United States Patent Application Publication US 2024/0409597 A1 - sequence listing, part 5

SEQ ID NO: 9732 - DNA, 1137 bp, synthetic construct
  misc_feature 1..1137: note = source = /note="Description of Artificial Sequence: Synthetic coding sequence"
  source 1..1137: mol_type = other DNA
tgatacagcggcgactacatggagcccgagaagcccggcgcccccctcttgcccccccccccccaaaattctgtgccacactatgccgaggccgatatagtaacactccagggtgtgaccgggggcaacacctatgcagtgccagcactgccccccggcgccgtgggggacggccccccccgggtggacttcccacgcagtcgcctccgcttcaaagagaaacttggcgagggtcagtttggtgaggtgcatctgtgtgaggtcgattcccctcaggacttagtctccctggatttccccctgaacgtcagaaaaggacatcccctcctcgtggccgtgaaaatattgaggcccgatgctacgaaaaatgcgtcattctcccttttcagtcgaaatgactttctgaaagaggtgaaaataatgagcaggctgaaagacccaaacatcataagactcctaggagtgtgtgtgcaggatgacccgctgtgtatgatcacggattatatggaaaatggagacctgaatcaatttctgtccgcacatcagcttgaagataaggccgcggaaggggccccaggggatggacaggccgcacagggccctaccatctcctatcccatgctgcttcacgttgccgcccagattgctagcggaatgaggtatctcgccaccttaaactttgtccatcgagatctggccacccggaattgtctcgtgggagagaacttcactatcaagatcgctgactttggcatgtctaggaacctctatgccggggactattacagggtccagggccgcgccgtgctccccattagatggatggcttgggaatgcatcttaatggggaaattcaccacagcttccgacgtttgggcctttggagtcaccctatgggaggttcttatgctctgtagggcacagccattcgggcagctgaccgacgagcaagtgattgaaaacgctggcgagttctttcgagaccaggggcgacaggtttacctgtcccggcctccagcttgtcctcaggggctctatgagctgatgctcagatgttggagcagggaaagcgaacaacgacctccattttcacagctccacaggttcctcgcagaagatgccctgaacactgtgtag

SEQ ID NO: 9733 - DNA, 762 bp, synthetic construct
  misc_feature 1..762: note = source = /note="Description of Artificial Sequence: Synthetic coding sequence"
  source 1..762: mol_type = other DNA
atggccccctggagccaccccagcgcccagctgcagcccgtgggcggcgatgccgtgagccccgctctgatggttctgttgtgcttgggcaacctatctaaggcaaccctttgggcagagccaggctccgtgatctccagggggaacagcgtgaccatccgctgtcagggaacccttgaggcccaagagtaccggctagtaaaagaggggtctcccgagccatgggacacacagaacccgctcgaaccaaagaacaaagcgaggttcagcatccccagtatgaccgagcatcatgcagggagataccgctgttattactatagccccgctgggtggtctgagccgagtgacccgcttgagttggtggttacaggcttctacaacaagccgaccctctccgccctcccgtcacccgtggtgacatctggggagaatgtgaccttacagtgcggatctagactgcgctttgacaggttcatactcaccgaagagggggaccataagcttagttggactcttgatagtcagctgaccccatctgggcagtttcaggcgctgttccctgtgggcccagtgacaccctcacatcgttggatgctccgttgctatggtagccgacgtcacattctccaggtttggtctgaaccctcagatctacttgagatcccggtttctggcgaagaggccactgtgttttcctccacaatccagggctcacaaacgggctgtggggaactctacagacagggatctccatgctag

SEQ ID NO: 9734 - DNA, 288 bp, synthetic construct
  misc_feature 1..288: note = source = /note="Description of Artificial Sequence: Synthetic coding sequence"
  source 1..288: mol_type = other DNA
atgcggaagccccggcggaagagccggcagaacgccgagggccggagaagcccgagcccctatagcctgaagtgttcccccacgagagagacactgacttatgctcaggctcagaggatcgtggaggtagacatcgacgggcgacttcataggatttccatttatgacccccttaagataatcactgaggacgaattgaccgctcaggacatcaccgaatgcaactccaacaaagagaacagtgagcaaccccagttccccggcaaatcaaaaaaaccgagttcttag

SEQ ID NO: 9735 - DNA, 1311 bp, synthetic construct
  misc_feature 1..1311: note = source = /note="Description of Artificial Sequence: Synthetic coding sequence"
  source 1..1311: mol_type = other DNA
atgaagttccagggccccctggcctgcctgctgctggccctgtgccttggcagcggggaagctggtcccctccaatcaggcgaggagtccacagggactaatatcggtgaggcactgggccatggcctcggagacgccctatcagagggagtgggaaaggccatcgggaaggaagctggcggggctgcagggagcaaggtgagcgaggccctaggccagggtactagggaggcggtgggcactggcgtcagacaggttccaggcttcggagtcgcagacgcgctggggaatcgcgtcggagaggccgcacacgccctcggcaataccgggcacgaaatcggacgccaggctgaggacgttattcggcatggagcggatgcagtacggggttcctggcagggcgtgcctggacataacggggcttgggaaacgtcaggtggccacgggatcttcggtagccagggcggtctgggtggccaaggccagggaaacccgggagggcttggcactccctgggtgcatgggtaccctgggaattctgcgggcagtttcggaatgaaccctcagggcgctccgtggggccaaggggggaatgggggaccccctaattttggcactaacacccagggcgccgtcgcccagccaggctatggctctgtccgcgcgagcaaccagaacgagggatgcacaaaccccccacctagtggctccggcggcggctccagcaactcaggaggtggttccggttctcagtcaggatcttccgggtccgggagcaacggggacaataacaatgggagttcgagtggcgggtcctcctcagggagtagttccggtggctcctctggtggttcgagcggtgggagcagtgggaattctggcggcagccgcggagacagcgggtcagagagctcatggggaagtagcacaggcagtagctcaggcaatcacggcggctcagggggtggcaacgggcacaagcccggctgcgagaagcctgggaatgaggctcgtgggtcgggggaatccggaattcagggttttcgggggcagggcgtgtcatccaacatgcgcgaaattagcaaggaaggtaaccgcctcctgggcggctcaggcgataactacagaggacaggggtctagctgggggagcggtgggggggacgcggtagggggtgtgaacacagtaaactctgaaacctcacccggcatgttcaatttcgacacattctggaagaatttcaagagcaagttggggtttataaattgggacgcaattaataaagatcagcgctcaagtcgcataccttag

SEQ ID NO: 9736 - DNA, 240 bp, synthetic construct
  misc_feature 1..240: note = source = /note="Description of Artificial Sequence: Synthetic coding sequence"
  source 1..240: mol_type = other DNA
atgcccgcctgccggctgggccccctggccgccgccctgctgctgtcactgttgctttttggattcactctcgtgagtggtactggtgccgaaaagaccggcgtttgtccagaattacaggcagaccagaactgtactcaggaatgtgtgtcagactcagagtgcgctgataaccttaagtgctgcagcgctgggtgcgccacattctgctctttgcctaatggccaactggcagaatag

SEQ ID NO: 9737 - DNA, 2130 bp, synthetic construct
  misc_feature 1..2130: note = source = /note="Description of Artificial Sequence: Synthetic coding sequence"
  source 1..2130: mol_type = other DNA
atgggctgcctgtggggcctggccctgcccctgttcttcttctgctgggaagttggtgtgtcagggtcaagcgccggaccctccacacgccgtgctgacacagccatgactactgatgacactgaggtgcctgcaatgacattggccccaggccatgcagctctggaaacacagaccctttctgccgagaccagtagccgggcttccacacctgcgggaccgatacctgaagctgaaactcgcggggctaagcgcattagccctgcacgcgagactcggtcatttactaaaacctcgcccaattttatggtcctgatcgcaacatccgtggaaacctctgccgcctctggtagccccgagggcgctggaatgacaacagtccaaaccattaccggctccgatcctcgagaagccatatttgatacattgtgtacggacgattccagtgaagaggcaaaaaccttaactatggatatattgacactcgcccacactagtaccgaggctaaagggctgtcatctgaaagttccgcaagtagcgattcaccacaccccgtaatcacaccatcaagagcttcagagtcttccgcatcttctgatggacctcaccctgtcattactccatccagagccagtgaaagctcagcctcatccgatgggccccaccctgtaatcaccccctcccgcgcgtcagaatcttccgcctccagtgacggtccacatcccgtaatcacaccaagcagagcctccgaatcgtctgcttcctccgatgggccacaccctgtgattactccctctcgggccagcgagtcatctgccagctcggatggtccacaccctgtgataaccccaagtcgggctagtgagtcttctgcatctagcgatggtccccacccagtgattactccgtcccgggcctccgagagctctgctagtagtgacgggcctcatcctgtgattactccgagtcgggcctcagaatcctctgcctcctctgatggtccccaccccgtgattacccccagtcgagcatctgaaagctcggccagttcagatgggctgcaccccgtgatcactccaagtcgcgcctctgaatcatctgcgtccagcgatggtccgcatcctgtcataaccccatcacgggccagtgagagctccgctagttctgatgggccccatcctgtcatcacgccaagctggagccccggctcggatgtaacactccttgcggaggccctcgtcacagtcaccaatatagaagttattaactgctctatcactgagatcgaaactaccaccagctccattcccggcgcttcagacaccgacttaatcccgaccgagggtgtgaaggcttcctctacaagcgacccccctgccctgccagactccaccgaggcaaaaccacacataacagaggtgacagccagcgcggagactctgtctactgccggtacaaccgaaagcgctgcacctgacgctactgttggaacccctttacctaccaactcagctacggaacgggaagttactgcaccaggagccacaactctgagcggggctctcgtcactgtgtccagaaatccactggaggaaacttctgcactgagtgtagaaaccccttcctacgttaaggtttcaggagcagcaccagttagcatcgaggccgggagcgctgtgggcaagacaacatcttttgcaggatctagcgcctcttcttactccccttcagaagccgcgttaaagaatttcacgcccagcgagactcccacaatggacatcgccaccaagggcccctttccgacgagtcgggatccactcccctctgtcccgccaacaaccaccaattcctcgaggggtaccaacagcaccctggcaaaaataaccacttcggcgaaaaccaccatgaagccccccaccgctaccccaacaaccgcgcgaacccgtcctacgaccgatgttagcgccggcgagaatggcggtttcctgctgctaaggctgagcgttgcgtcgccagaagacctaacggaccctcgggtcgctgagcgcctgatgcagcagctccatcgcgaactgcacgctcacgcccctcatttccaagtgtctctcttacgggtccggagaggctag

SEQ ID NO: 9738 - DNA, 2067 bp, synthetic construct
  misc_feature 1..2067: note = source = /note="Description of Artificial Sequence: Synthetic coding sequence"
  source 1..2067: mol_type = other DNA
atgctgcccaccgaggtgccccagagccaccccggccccagcgccttactcctcttacagttgcttctgccaccgacaagcgcttttttcccgaatatctggtcccttctggcggcccccggtagtatcacacatcaagacctcaccgaggaggcggccctgaatgttacactgcagctttttttggaacagcccccacctgggcggccaccactgcgcctagaagacttcctggggcgcacattgctcgccgacgacctgtttgcggcatattttgggcccgggtccagccggaggttcagggcagcactgggggaggtctcacgggccaatgcagcccaggatttcttaccaacttcccgcaatgacccggacctgcacttcgatgcagagagacttggccaaggtagagcccgtttagtgggcgctcttagggagaccgtggtggccgccagggccctggatcacacactggcccggcagcggttaggcgccgcactgcacgcccttcaagatttctactcccactcaaactgggtggagctgggtgagcagcaaccacaccctcacttgctatggcctaggcaggaactccagaacctcgctcaggtggctgatccaacttgttcagattgcgaggagctgagctgcccccggaactggctcgggtttaccctgctgacgtcaggatacttcggaacccacccccccaagccccccggcaaatgttcccacggcggccatttcgacagatcgagctcacagccacctcgtggaggcatcaataaggattctacgtccccagggttcagtccccaccacatgctgcatctgcaggctgctaagcttgccttgttagccagcattcaggcctttagtcttttacgctcacgcctgggcgatagagacttctcacgattgctggacattactccagcctcaagcctgtcatttgttcttgatacaacaggaagcatgggggaagaaataaacgcagctaagatccaggcaaggcacctcgtagaacaacgtcggggaagccccatggagccggtccattatgttctagtgccttttcacgatcctgggtttggacccgtcttcaccactagcgaccccgattctttctggcagcagctcaacgaaatccacgccttgggaggcggagatgagcccgaaatgtgcctgtccgccctgcagctcgccctgctccataccccacctttaagcgacatctttgtgtttactgatgctagccccaaggacgcctttctgactaatcaagtagaatccctgacgcaagaacgcaggtgtagggttacatttttagtgacagaggacacatccagggtacaggggagggcgcggcgtgaaattctatctcccctgaggttcgagccttacaaggccgtagctttagcgagcggaggcgaagtgatatttactaaagatcagcatattagggacgtggccgccattgtcggcgaatccatggcagcattagttacactgcctttagatcccccagttgtggtccccggacagccactggtcttttccgttgatggcctgttgcagaagatcaccgtccggatccacggagacatcagtagcttctggattaagaatccagcaggcgtgtcccagggccaggaagaaggcggcgggcccctgggtcacacacgcaggttcggccagttctggatggtgactatggatgacccacctcagacgggaacttgggagattcaggtcacggccgaggacacccccggtgtgagggtgcaggctcagacatctctcgattttctgttccactttggcatcccaatggaggacggtcctcacccaggactgtatccattgacccagcccgtagctggtctccagacacagctcttagtagagagtcagtcttggggctcctctgctgccttcctgccacgtcatccatcacgtggcccccggggctgcaggacacgaccaggggccctgggggcaagagggacatccggtgctagatcccctagaagcctcgctgtggctcatgctgctgtccatccctag

SEQ ID NO: 9739 - DNA, 1257 bp, synthetic construct
  misc_feature 1..1257: note = source = /note="Description of Artificial Sequence: Synthetic coding sequence"
  source 1..1257: mol_type = other DNA
aacaacctgaacgtgggcagcgacaccaccagcgagaccagcttctcactttccaaggaagcccctcgagagcacttggatcatcaggcggcccatcagccattcccccggcccagattccgtcaggagaccgggcacccgagcctgcaacgtgacttccccaggtccttcttactggatctgcctaatttccccgacctcagcaaagccgacataaatggccagaaccccaatatccaggtcaccattgaggtcgtagatggaccggatagcgaggcagacaaagaccagcaccccgagaacaaaccctcttggtcagtcccatcccctgattggagagcgtggtggcagcggtccctctcactcgctcgcgccaactctggagatcaggactataagtacgactctactagcgatgactcgaattttttgaatccaccccgggggtgggaccacaccgctcccggccatcgcaccttcgagaccaaggatcagcccgagtatgacagcacagacggggaaggagactggagcctgtggagcgtttgctccgtcacttgtggcaacggcaatcaaaaaagaactagatcatgtggttacgcctgcacagccacagagtccaggacatgcgatcgacctaattgccctgggattgaagatacattccgaacagccgcaaccgaagtcagcctgctggccggtagtgaagaatttaatgccactaaactgtttgaggtggacacggacagttgcgaacgatggatgtcatgcaaatccgagttcctcaagaaatatatgcataaggttatgaatgatcttccatcctgcccctgctcctaccctaccgaggttgcttactctaccgccgatattttcgatagaatcaagcgtaaggattttaggtggaaggatgcctcaggaccaaaggaaaaactcgaaatttacaagcctaccgcgaggtactgtatccggtccatgctgagtcttgagtctactacccttgcggcgcagcattgctgttacggtgacaacatgcaactgatcacacgagggaaaggcgctgggactcctaacctcataagtactgagttctctgctgaattacactacaaggtagatgtcctgccatggatcatatgtaaaggagactggtcaaggtataacgaagcgcgaccacccaataatggccagaaatgtaccgaatctccctctgacgaggactatataaagcagtttcaggaggccagggaatactag

SEQ ID NO: 9740 - DNA, 693 bp, synthetic construct
  misc_feature 1..693: note = source = /note="Description of Artificial Sequence: Synthetic coding sequence"
  source 1..693: mol_type = other DNA
atgcggctggccggccccctgcggatcgtggtgctggtggtgagcgtgggcgtgacttggattgtggtatcaattctacttgggggtccagggtccggatttccacgaatccagcaactgtttactagccctgaatcatccgtgactgctgcgccacgagctagaaagtacaaatgtggcctgcctcagccgtgccccgaagaacatttggcttttagagtcgtgagcggtgctgccaacgtcatcggccccaagatttgcttggaggataaaatgctgatgtcaagcgttaaagacaatgtgggccggggtttgaatatcgccctcgtgaacggcgtgagtggcgaactgatagaggcccgagccttcgacatgtgggccggggacgtcaatgatctgctgaaattcatccggccccttcacgagggcaccctggtgtttgtcgccagctacgatgatcctgctaccaaaatgaacgaagaaacgcggaagctgttttccgagctgggatcccggaatgctaaggaactggcgtttcgtgattcttgggtgtttgtgggcgccaagggcgtgcagaataagtccccattcgagcaacacgtcaaaaactctaagcactctaacaaatacgaagggtggccggaggctctggagatggaaggctgcattcctcggagaagcacagcgtcctag

SEQ ID NO: 9741 - DNA, 192 bp, synthetic construct
  misc_feature 1..192: note = source = /note="Description of Artificial Sequence: Synthetic coding sequence"
  source 1..192: mol_type = other DNA
atgggccccgaggccctgagcagcctgctgctgctgctgctggtggcttcaggggatgctgatatgaagggccactttgaccctgccaagtgcagatatgccctcggcatgcaagaccgaacaatcccagacagcgacatcagcgcttcgagttcttggagtgattccactgctgcccgccatagccgctag

SEQ ID NO: 9742 - DNA, 1014 bp, synthetic construct
  misc_feature 1..1014: note = source = /note="Description of Artificial Sequence: Synthetic coding sequence"
  source 1..1014: mol_type = other DNA
atgctgagcctgggcgcccacagcgtgaccaagacccagatcctgcagggcctggggttcaacctgactcataccccagagagcgctatccatcagggttttcagcacctagtgcattctctgaccgtcccgagcaaggaccttactttgaagatgggctccgcgctattcgtcaaaaaggaacttcaactccaagctaattttcttggaaacgtaaagaggctgtacgaggccgaggtttttagtacggatttcagtaacccatcgattgcccaggcaaggattaatagccacgtgaaaaagaaaacccagggtaaggtggtcgacatcattcagggcttagacctgctgacagccatggtgctcgtgaatcacattttttttaaagcgaaatgggagaaacctttccaccccgagtatacacgcaaaaatttcccattcctcgttggggagcaggtgaccgttcatgttcccatgatgcaccagaaagagcaattcgccttcggagtggatacagagctgaactgctttgtgctacaaatggactacaaaggagacgctgtggctttctttgtcctccctagcaaaggaaagatgcggcaactggagcaggctctaagtgcccggaccctgcgaaaatggagccatagcctgcagaagcggtggatcgaggtttttattccacgcttttctatctctgcgtcctataacctggagacgatcctgcctaagatggggatacagaatgtgtttgataaaaatgcagattttagcggcatcgccaaacgggactcattgcaagttagcaaggctacccacaaagcagtgttggacgtctccgaagagggtaccgaagcgaccgccgcaaccactacaaagtttatagtcaggtccaaggacggacctagctattttactgtgagctttaatcgaacttttctcatgatgatcacaaacaaagccacagacggtattttgttcttagggaaggtcgagaaccccaccaaatcgtag

SEQ ID NO: 9743 - DNA, 336 bp, synthetic construct
  misc_feature 1..336: note = source = /note="Description of Artificial Sequence: Synthetic coding sequence"
  source 1..336: mol_type = other DNA
atgttcttcaccatcagccggaagaacatgagccagaagctgagccttttgctgctggtattcgggctgatatggggccttatgctgttgcactacacctttcagcagccaagacaccaatcatcagtgaaattacgcgaacagatcctggatctctctaagcgatatgtgaaagcgctagcagaagaaaacaagaataccgtcgacgtcgaaaatggcgcctccatggcgggatacgccgatctcaaacgcaccattgctgtgctcctcgacgacattttgcaacgtttagttaaactcgaaaacaaggtggattacatcgtggtgaacggatag

SEQ ID NO: 9744 - DNA, 498 bp, synthetic construct
  misc_feature 1..498: note = source = /note="Description of Artificial Sequence: Synthetic coding sequence"
  source 1..498: mol_type = other DNA
atggagatgttccagggcctgctgctgctgctgctgctgagcatggggggcacatgggccagcaaagagcccctccgccctagatgcaggcccataaatgccactcttgcggttgaaaaggagggttgccccgtatgcattactgtgaatactacgatttgcgctgggtactgtcccaccatgacccgagtgttacagggtgtcctgcccgccctgccgcaggtcgtgtgtaactacagggacgtccgcttcgaaagcattcggttaccaggatgccctcggggcgtcaatcctgtagtctcatatgccgtggcactgagctgccagtgcgctctttgcagacggtccacaacagattgcggtgggcctaaagatcaccctctaacatgcgatgatccacggttccaagattccagcagcagcaaggcgccacctccaagcctcccctccccatcgaggctgcccggcccctcggatactccaatcctcccacagtag

SEQ ID NO: 9745 - DNA, 699 bp, synthetic construct
  misc_feature 1..699: note = source = /note="Description of Artificial Sequence: Synthetic coding sequence"
  source 1..699: mol_type = other DNA
atggtgctgctgctggtgatcctgatccccgtgctggtgagcagcgccgggaccagcgcccactacgagatgttgggtacctgccgcatggtgtgtgatccttacggaggcacgaaagccccgagtacggctgccacccctgacagagggctcatgcaatcccttccaactttcattcagggacccccaatgggacccccaggggaaaagggcgagcctggacggcagggactcccagggccccccggagcccccggccttaatgcggcgggagccatctctgccgccacatactctactgtaccaaagattgccttttatgcaggcctgaaaagacagcacgagggctacgaagtgctcaagttcgatgacgtcgttacgaacctgggcaatcactacgaccctacgaccggtaagttcacgtgctcgatccccggaatatatttttttacctatcacgtacttatgcgcggcggagacggtacatcaatgtgggctgacctctgcaagaataaccaggtgcgagcctcggcaattgcccaagatgccgatcagaactacgattatgccagcaacagcgtcgtgctccaccttgagcccggagatgaggtgtatatcaagctggacggcggcaaggcccatggtggaaataataacaagtacagcacattctctggatttatcatctacgctgattag

SEQ ID NO: 9746 - DNA, 501 bp, synthetic construct
  misc_feature 1..501: note = source = /note="Description of Artificial Sequence: Synthetic coding sequence"
  source 1..501: mol_type = other DNA
atgggccccgaggccctgagcagcctgctgctgctgctgctggtggccagtggagacgccgatatgaaagggcattttgacccggctaaatgtcgatatgccctggggatgcaagacagaactattccagactccgatatcagtgcctcgtcttcctggagcgattcaacggctgcaagacattcacgcctagagagttcagacggggatggcgcttggtgccccgctggcagcgtgtttcctaaagaggaagagtacctccaggtggatctccagcgtctgcacctcgtggcactggttgggacgcaggggagacatgctggagggctcggcaaggagtttagcaggagctatcggctacgatactcgagggatggtcgacgctggatggggtggaaggatcgatggggacaggaagttatttcgggcaatgaggaccccgagggagtggtcttgaaggatctcggccctcccatggtggcccgcctggtgcgtttctag

SEQ ID NO: 9747 - DNA, 627 bp, synthetic construct
  misc_feature 1..627: note = source = /note="Description of Artificial Sequence: Synthetic coding sequence"
  source 1..627: mol_type = other DNA
atgatcatcaagcacttcttcggcaccgtgctggtgctgctggcctcgactactattttttctctggacttaaaactgattatctttcaacagcgccaggtcaaccaggaatctctgaagctgttaaacaagctgcagacactctccatccaacaatgtttaccacatagaaagaactttttactccctcagaagagcctttcccctcagcagtaccagaaaggacatacccttgccatcctccacgagatgctacagcagatcttctcgttattccgcgcaaatatatccctggacggctgggaggaaaaccacaccgaaaaattcctaatccagctccatcagcaattggagtatctcgaggcactcatgggcctcgaggctgagaagttgtcggggactctggggtctgataatctcagacttcaggttaagatgtactttaggcgcattcacgactacttggagaatcaggactattcaacatgtgcttgggctatcgtacaagtcgaaatcagccggtgcctgtttttcgttttctccctcacagaaaaattgagcaagcagggcagaccactgaatgacatgaagcaggaactaactacagagttcaggagtcctaggtag

SEQ ID NO: 9748 - DNA, 2241 bp, synthetic construct
  misc_feature 1..2241: note = source = /note="Description of Artificial Sequence: Synthetic coding sequence"
  source 1..2241: mol_type = other DNA
atgcccttccggcacaagcccggcagcgtgttcagcgtggagggcgagaacctagatctggctatgagcaaagaagaggtcgtagcaatgattggagacgggccttgcgtggtaaaaactctgaccaggcatcacctctactgtgaaccacccgtcgaacagccgctaccccggcaccatgcactaagggaggctcccgacagcctgcctgaattcacagtgcagatgggcaaccttaggtttagcctcggccacgtgcagtacgatggagaatcaccaggggccttcccggtggctgcacaagttggcctgggtgtagggactagcctcctggcccttggcgtaataataattgtgcttatgtaccggcgcaagagcaaacaggcattgagagactacaagaaagtgcagatccaactagagaacctcgaatcctctgttcgggaccgttgcaaaaaggagttcactgacctcatgacagaaatgacagatctgacaagcgacttgcttggctccggtattccatttttagactataaagtctatgctgagaggatcttttttccaggacacagggagagtccccttcaccgggacctgggcgtgccagagtcccgtagacctaccgtggaacagggcctggggcaacttagcaatcttctcaactcgaaactcttcctgactaagttcatccatactcttgagtcacaacgcactttttcagctagggacagagcttacgtcgcctctttgctgaccgtggcacttcacggaaaactagaatacttcactgacatactcagaactctcctgagtgacctagtggcacagtacgtggccaaaaatcctaagctgatgctccgcagaactgaaaccgtcgtggagaaactcctcactaactggatgtccatctgtctctacacgttcgtcagagacagcgtaggcgagcccctgtatatgttatttcgtggaatcaaacaccaggttgataagggccctgttgactcagtgactggaaaggccaaatatacactcaacgacaaccggcttctccgcgaagacgttgaatatcgtcctctaaccctcaacgccctactagctgtgggtcccggcgcgggagaggctcagggggtaccggtgaaggtgcttgattgcgatactatctcccaggctaaggagaaaatgctcgaccagctgtacaagggggtgccgttgacccagagaccagaccccaggaccctcgatgtagagtggcgatcaggtgtggccggccacctcatcctatccgatgaggacgtcaccagtgaagttcagggcttgtggcggcggttaaataccctgcagcattataaggtgcctgatggcgccaccgtcgcactggtaccttgtctcactaagcacgtcttgcgcgagaaccaggattacgtccctggtgagcgcacccccatgttagaagatgtcgatgaaggcggaataaggccttggcacttggtcaagccgtccgatgagcctgaacccccccgccccagaaggggaagtctgcgcggtggtgagagggagcgtgcaaaagcaatcccagaaatctacctgacgcgtcttctatcaatgaagggaaccctacagaaatttgtagacgaccttttccaggttatcctgagtacctcaagacctgtacctctcgctgttaagtactttttcgatctgctcgatgaacaagcccagcaacacggcatctccgatcaggacacaatccacatctggaagacaaacagtctgcccctgcggttttggatcaacattataaagaacccgcagttcgtgttcgatgtgcaaacctccgacaacatggacgccgtgctgctggtgatcgctcaaacatttatggatgcatgcaccctggccgaccataaactcggccgggactccccgatcaataagctcctgtacgctcgggacatcccaagatataaacgcatggtcgagaggtactatgcggacatccgccagacagtgccagcatccgaccaggaaatgaatagcgtactggccgagctcagttggaactactcaggagacctgggtgcccgggttgctctgcatgagctgtacaagtatataaataagtattacgatcaaattattactgcactggaggaagatggaacagctcagaaaatgcaactcgggtaccgactccagcagatcgcagccgccgtcgagaacaaagttacagacctttag

SEQ ID NO: 9749 - DNA, 603 bp, synthetic construct
  misc_feature 1..603: note = source = /note="Description of Artificial Sequence: Synthetic coding sequence"
  source 1..603: mol_type = other DNA
atggcctggggcggcgtgcacacctgctgcttccacctgtgctgctgttgcagttggccacagggcgcagtccctgaagagctgcacaagcaccctggccagactctcctgctccagtgccaatattcgcccaagagggggccgtaccaacccaagagctggtgtcaacagacaagtccatctcgatgcaccttactggtcaccagtagtaaaccatggaccgccgtccagaaaagccactacactatctgggacaaacctaacgccgggttctttaatatcaccatgattcagctgacacagaatgattcagggttttactggtgcggcatctacaatgcttccgaaaacattatcacagtcttgcggaacatctcgctggtggtatctccagccccgaccacaagccctatgtggacccttccgtggctcccaacctccacggttctcattacctcccctgagggtaccagcgggcacccctcgattaacggttctgaaactcgcaaaagcagggcccccgcctgcctcggttccgggggacctcgcttcctggtgctggtactgtgcggtctgcttcttgctaaagggctgatgctatag

SEQ ID NO: 9750 - DNA, 114 bp, synthetic construct
  misc_feature 1..114: note = source = /note="Description of Artificial Sequence: Synthetic coding sequence"
  source 1..114: mol_type = other DNA
atgggctggctgacccggatcgtgtgcctgttctggggcgtgctgctaactgccagggcgaactatcagaacggtaaaaataatgttccgaggctgaagctgagctacaaatag

SEQ ID NO: 9751 - DNA, 525 bp, synthetic construct
  misc_feature 1..525: note = source = /note="Description of Artificial Sequence: Synthetic coding sequence"
  source 1..525: mol_type = other DNA
atgcggctgctggccttcctgagcctgctggccctggtgctgcaggagacaggaaccgctagtctgcccaggaaagaacgtaagaggagggaggaacagatgccgagggagggcgacagttttgaggttctgcccctgagaaatgacgtgctgaatccggacaactatggtgaggtcatcgacctgagtaattatgaggagctgaccgactatggtgaccaacttcctgaagtgaaggttacctctctagcccccgcaacctccatttcccctgccaagagtacaaccgcccccggtaccccaagtagcaacccaactatgacgaggcctacgaccgctggacttcttctgtcatcacaacctaatcacgaggacatcccacctttgccccgccgtaccgcatacctgtacgcgagattcaaccgcataagccggataagagccgaagattttaaggggttgaccaagctgaagagaatcgacttatctaacaacctgatatcatccatcgataatgatgcttag

SEQ ID NO: 9752 - DNA, 657 bp, synthetic construct
  misc_feature 1..657: note = source = /note="Description of Artificial Sequence: Synthetic coding sequence"
  source 1..657: mol_type = other DNA
atgggccgggtgttcctgaccggcgagaaggccaacagcatcctgaagagataccccagggctaatggcttttttgaagaaatccgccaggggaatatagaacgagaatgtaaggaggagttttgcaccttcgaagaagccagagaagcgtttgaaaacaacgagaaaaccaaagaattctggagtacctatacaaaagcccaacagggggaatccaaccgtggctccgactggttccagttctatctcacctttcccctcattttcggcctgttcattatcctgctggtgattttcctcatttggagatgtttcttgcggaacaagactcggagacaaaccgttaccgaggggcacattccattcccacagcacctgaacattatcaccccccctcccccaccggacgaggtgtttgattcctcaggactatcacccggtttcttgggctacgtggtgggccgcagcgattccgtgtctacgcgtctttcaaattgtgaccccccccctacatacgaagaggctaccggccaggtgaatctgcaacggtccgagactgagcctcaccttgaccccccacccgagtatgaagacatcgtgaacagcaatagcgcctccgctattcctatggttcctgtggtgacaacaattaagtag

SEQ ID NO: 9753 - DNA, 2535 bp, synthetic construct
  misc_feature 1..2535: note = source = /note="Description of Artificial Sequence: Synthetic coding sequence"
  source 1..2535: mol_type = other DNA
atgggccccggcgcccccttcgcccgggtgggctggcccctgcccctcctcgttgtaatggccgcgggcgtcgcaccagtctgggcctcccattcaccacatcttcccaggccccattcaagagtgcctccacaccctagctcagagcggcgtgcagtatacataggtgcgcttttccccatgagcggcggctggcctggtggacaggcatgccagcctgctgtggaaatggcgctggaggatgtgaattctcggagagacatccttccggactacgagctgaagctgatccaccacgactctaaatgtgacccaggacaggctactaaatacctttacgaacttctgtacaacgatcctatcaaaatcattctcatgcctggttgctctagcgtgagtacactcgtggcagaggccgcacggatgtggaatctgattgtcctgtcttatggtagtagctcacctgccctgagcaacagacagaggttccccacattttttcggacacaccctagcgcaacgttacataaccctacccgcgtaaagctgtttgaaaaatggggatggaagaagattgctacgatacagcagacaaccgaggtgttcacctccactctggacgatctggaggagcgggtcaaagaggctggaattgagataaccttcagacagtccttctttagtgatccagccgtgcccgttaaaaatctgaaaagacaggatgctcgtattattgttggactgttctatgaaactgaagctaggaaagtcttctgtgaggtctataaggaaaggctattcggaaaaaagtacgtttggtttctgattggctggtatgctgacaactggttcaaaatctatgatccctctatcaattgtactgtcgacgaaatgaccgaggcagttgagggccatattacaacagagattgttatgctgaatccagcgaatactagaagcataagcaacatgactagccaggagtttgtcgaaaagctaacaaagagactgaagcggcaccccgaagagacaggcggctttcaagaagcccctctagcctacgatgcaatttgggcccttgcccttgcactcaataagacatcaggcggaggtggcagatctggtgtacgtctggaggacttcaattacaataaccagactatcaccgaccaaatttacagggctatgaattcatcttcattcgagggggtgagcggtcacgtggtgttcgacgctagtggcagtcggatggcctggacactaattgaacaattgcagggtgggtcttacaagaagataggttactacgatagtaccaaggatgacctcagctggagcaagacagacaagtggattggcggaagccccccggccgaccagacgctggtgataaagacttttcggttcctcagtcagaaactgttcatctccgttagcgtcctgtcgagtctgggtatagtactggccgtggtttgccttagcttcaacatctacaatagccacgtaagatacattcagaacagccaacccaatctgaacaacctgacagccgtggggtgctcactcgcgctggctgcagtgtttccactgggcctggacggataccacatcggtaggaaccagttcccttttgtgtgccaggcccggctgtggcttctgggcctgggattctctctggggtacggaagcatgttcactaaaatttggtgggtccataccgtgtttacgaaaaaagaagaaaaaaaggagtggcgtaagactctcgagccttggaagctttatgctactgtgggcctgctggtgggcatggatgttctcaccctcgcaatatggcagatagttgacccgctccataggacaatcgagacctttgctaaggaagagccaaaggaggatattgatgtgtcaatcctgccacaactggagcattgttcttctcgcaagatgaatacatggctgggcattttttacggctacaaaggcctgctgttgttgctgggcatttttctggcatatgaaaccaaaagtgtgagcactgaaaaaattaatgaccacagggcggtggggatggctatctacaatgtggcagttctgtgcttaatcaccgccccagttaccatgatcctctcctcacagcaggacgcagcttttgcctttgctagtctggccatcgtctttagttcctatattactttagttgtgctgttcgtgcccaagatgagacggctgattactcgcggtgagtggcagtcagaggctcaggacactatgaagactggatctagcactaacaacaacgaagaggagaaaagcagactgttagaaaaagagaatcgagaactggaaaagattattgccgagaaggaggagagggtgagtgagctccgacaccaactacagagcagacaacaattacggagccgcaggcatcctccaactccccctgaaccctctggtggactacctcgggggccgcccgagcccccagaccgcctgtcctgcgacggctctcgagtacacctgttgtataaatag

SEQ ID NO: 9754 - DNA, 2007 bp, synthetic construct
  misc_feature 1..2007: note = source = /note="Description of Artificial Sequence: Synthetic coding sequence"
  source 1..2007: mol_type = other DNA
atggacctggtgctgaagcggtgcctgctgcacctggccgtgatcggcgcactactcgctgtcggcgccacaaaagttccccgtaatcaggattggttgggggttagtagacaactcaggacaaaggcctggaatcggcagttgtatccggaatggacagaggcccagaggctcgattgctggaggggtggccaggtatcgctcaaggttagcaacgacggcccaaccctgattggtgcaaacgcatcatttagcatcgcgcttaattttcccggctcccagaaggtgcttcctgacggccaagtgatctgggtgaacaacaccataattaacggttcgcaagtttgggggggtcagccagtgtatccacaggagacagatgacgcttgcatcttccccgacggtggtccatgccccagtggcagttggtcccagaaaaggtccttcgtgtacgtttggaagacatggggacagtattggcaggtactaggaggccccgtgtctggcctcagcataggaacaggacgggcaatgttagggacacacaccatggaggtcacagtctaccataggcgagggagtcgtagctacgtccctctggcccacagcagttcagcgtttacaatcacagatcaggttcccttttcggtgagtgtgtctcagctgagggcccttgacggagggaacaagcacttcttgagaaaccaaccccttacctttgcgctgcagctgcacgatccaagcggctacctggccgaagcagatctcagctatacttgggactttggggactccagtggtacattaattagccgggccctggtggtgacccacacttacctcgagccaggcccagtgactgcacaggtcgtcttgcaagcagcaatccctttgacatcctgtggcagctctccagtcccaggcacaaccgacgggcatcggccaaccgcagaggccccgaatactacggcagggcaggtccccacaaccgaagtagtggggacgacccctgggcaggctccaacagccgagccttccggtactacaagcgtgcaggtccctaccacagaggtgatcagtacagcacccgtccagatgcccaccgccgaaagtacaggaatgactccggaaaaggtgccggtatcagaagtgatgggtacaacccttgccgagatgtcaacccctgaagccactggcatgacacctgcggaggtttctatcgtggtgctctccggcaccaccgcagctcaggtcacgacaaccgaatgggtggagaccactgccagagagctgccaatacccgaacccgaggggcccgatgctagctccattatgagtactgagagcattaccgggtctctggggcctctcttagatggtactgctaccctgcggctcgttaagcgacaggtgcccctggattgtgtgctttatcggtacgggtcctttagcgtcacactggacatcgtccaaggaatcgaatcggcggaaatcctccaggccgtcccttcaggtgagggcgatgccttcgaactcacagtatcctgccaaggcgggcttcctaaggaagcttgtatggaaatctcctcccccgggtgtcagccacccgcacaaagactgtgccaaccggtcctgcctagcccggcatgccagctggtgctgcatcaaattttgaaaggtgggtctggaacctattgccttaatgtgtctctggccgacacaaacagcctggccgttgtgtccacacaactgattatgcctgtgcccggcattcttttgaccggacaggaagcgggactcgggcaggtgcctctgattgtgggcattctgctggtgcttatggccgtcgtactcgcatccttaatctatcgtcggcggctgatgaagcaggatttcagtgtcccccagctgcctcactcatctagccattggcttcggcttccaagaatcttttgcagctgtccgatcggcgagaacagcccactcctttccggacaacaggtttag

SEQ ID NO: 9755 - DNA, 525 bp, synthetic construct
  misc_feature 1..525: note = source = /note="Description of Artificial Sequence: Synthetic coding sequence"
  source 1..525: mol_type = other DNA
atggccgacatgcagaacctggtggagcggctggagcgggccgtgggtagactcgaggccgttagccacacatctgacatgcaccggggatatgctgactcaccaagcaaggctggcgccgctccctacgtccaggcctttgattccctattggcaggtccggtggccgagtatcttaagatatccaaggagatcggcggcgacgtgcagaaacatgcagagatggtgcatactgggttgaaacttgagcgggcattgttggtgaccgcctcccagtgccagcagcctgccgagaacaaactgtccgacctgttagctcctatatctgagcaaattaaggaggttattacatttcgcgagaaaaacagaggttcaaagctctttaaccacctctctgctgtgagcgagtctattcaagcactcggctgggttgccatggcacccaaacccggaccttatgtgaaggagatgaatgatgccgctatgttctacacaaaccgggtcctcaaagagtataaggactag

SEQ ID NO: 9756 - DNA, 1368 bp, synthetic construct
  misc_feature 1..1368: note = source = /note="Description of Artificial Sequence: Synthetic coding sequence"
  source 1..1368: mol_type = other DNA
atgctgcaccccgagaccagccccggccggggccacctgctggccgtgctgttagcattgttaggcactgcttgggccgaggtttggcccccgcaattacaggagcaggctcctatggcaggagccctgaatcggaaggaatccttcttgctgctgagcctgcacaatcgactcaggtcctgggtccagccgcccgctgctgacatgcgcagactggattggagcgactcgctcgcccagctggcccaggctagagccgcactctgcgggacccccacacctagtcttgcctcaggattatggagaactctccaggtggggtggaacatgcagctgcttcctgcaggcttggtatcgtttgtggaggtagtctcactgtggttcgccgaaggccagcgatacagccacgcggctggcgagtgtgcacgaaacgcaacctgcacgcactatactcagttagtgtgggccacatcgtctcagctgggctgcggcagacacctctgcagcgcaggacaggccgcaattgaggcgttcgtgtgcgcttatagtccccgggggaactgggaggtgaacggcaagacaattgtaccatataagaagggtgcctggtgcagcttatgtaccgcatcggtgtctgggtgttttaaagcttgggaccacgccggcggactgtgcgaagtccctaggaacccctgccgaatgtcttgccaaaaccatgggaggctgaatatttccacttgccactgccactgcccaccggggtacacgggtcgctactgccaggtccgctgtagcctccagtgtgtacatggtagattcagagaggaggagtgttcttgcgtgtgtgacattggctacgggggagcccagtgtgcaacaaaagtccatttccccttccacacatgtgatcttcgcattgatggcgactgcttcatggtgtcttccgaggctgatacttactatagggcccgaatgaagtgccagcgaaagggcggggtgctcgcccaaattaaatcacagaaagttcaggatatcctggccttttacctgggaagactggagactaccaacgaggtcatcgattccgatttcgagacccggaatttctggatcggtttgacttataaaaccgcaaaggacagctttaggtgggctaccggggaacatcaggccttcacaagtttcgcctttggacagcccgataatcatggcttagtgtggctttccgccgccatgggatttggaaattgcgtggagttgcaggcaagtgcagcattcaactggaatgatcagaggtgcaaaacgcgtaaccgttacatatgtcagtttgcccaggagcacatctcacggtggggtccgggttcttag

SEQ ID NO: 9757 - DNA, 297 bp, synthetic construct
  misc_feature 1..297: note = source = /note="Description of Artificial Sequence: Synthetic coding sequence"
  source 1..297: mol_type = other DNA
atggtgctggccatgctgggcgccctgcacccccgggccggcctgtcactatttctccacttgatacttgccgtcgccctgctgcggtcccagccgctccgtagccagaggagtgtcccggaagcttttagcgcccctttagaactttcacaacccctgtcagggctggtcgatgattatggaatcctacctaagcatcctcggccacggggaccccgtcctttactatccagagctcagcagcggaagcgtgacggacccgacctggccgaatattactacgacgctcatctatag

SEQ ID NO: 9758 - DNA, 2742 bp, synthetic construct
  misc_feature 1..2742: note = source = /note="Description of Artificial Sequence: Synthetic coding sequence"
  source 1..2742: mol_type = other DNA
atgggccccgaggccctgagcagcctgctgctgctgctgctggtggcctctggagacgcagacatgaagggacacttcgacccggctaaatgccgctacgccctgggcatgcaggatcggaccattcccgacagtgacatctctgcaagctcatcctggagcgattccactgcagctcgccattctaggttggaatcttcagatggcgatggcgcttggtgccccgccggttctgtgttccccaaagaggaggagtatctgcaagtcgacctgcagaggcttcacctcgtagcgctggttgggacacagggtagacacgcaggtggcttgggcaaggagttttctcggtcctatcggctgaggtattcccgggacggtcgtaggtggatgggatggaaagatcgttggggccaggaggtcatctcaggcaacgaagatcccgaaggtgtcgtcctgaaagatctcggccctccaatggtggcccgattggtccggttctatccccgcgctgacagagttatgagcgtgtgtcttagagtggaactgtacgggtgcctgtggcgagacggtctgctcagctacaccgctcctgtgggccaaaccatgtaccttagcgaagcagtgtacctgaatgattctacgtatgacggtcacacagttggcggtctgcagtatggaggccttgggcagctagcagacggagtcgtcggcttggatgacttcagaaagagtcaagaactgagggtttggccaggctatgactacgttggatggagcaaccatagtttcagctcagggtatgtcgaaatggagttcgagtttgaccgactgagggcatttcaagccatgcaggtgcactgcaataacatgcacactctcggcgctagactgcccgggggcgtggaatgccgatttagacgcggccccgctatggcctgggagggggagcccatgcggcataacctcggcggtaatctgggggatcccagagcaagagccgtatccgtgccgctgggcggacgagtcgccaggtttctgcaatgtaggttcctcttcgccgggccctggttgctgtttagcgaaatcagctttatatccgatgttgttaacaattctagtccggcacttggaggtacctttcccccagcaccttggtggcccccgggtccccccccgacaaacttcagtagcttagaactggagccaagaggccaacagccggtggcaaaagccgaggggagccctaccgccatcctcattgggtgtctggttgccatcatcctgctgctgttgctgatcatcgccttaatgctgtggagactgcactggcgccgcctgctttccaaagccgagcggcgggtactcgaggaggagctcacagttcatttaagcgtgccgggcgacacaatcctgataaataataggccaggcccccgcgagccacccccatatcaggaacctagacctagaggcaaccctccccattccgctccatgtgtccccaatggttctgctctgctcctgagcaatcccgcctatagactgcttcttgccacctacgcgagacctccccgaggaccagggcctccaacacccgcttgggcaaagcctacaaacacccaagcctactcgggggactacatggaacccgagaagccaggcgccccacttctgccaccccctcctcagaattctgtgcctcactatgctgaagctgatatagtaacactacagggagtgactggtggtaatacatatgcagtgcccgcccttccgccaggcgccgtcggtgacgggccccctagagttgatttccctagaagcagactgaggtttaaagaaaaactgggcgaagggcagttcggggaggtacacctgtgcgaagtcgactccccacaagatctggtgtccctggatttcccacttaacgtcaggaaagggcacccactgctggtcgctgtgaagattctccggcccgatgccacgaagaacgctcggaacgatttcttgaaggaagtgaaaatcatgagtcggctcaaggatccgaatatcattaggttgttaggtgtgtgcgtccaggatgaccctctgtgcatgatcacagattatatggaaaatggagacttgaatcagttcctttctgcacaccagctggaagataaggctgcagaaggcgctccaggagacggacaagctgcacagggtcccactatctcctaccccatgcttttgcatgtggctgcccagattgcaagtggtatgcggtatctggctaccttaaacttcgtgcatagagatctggccacgagaaactgccttgtgggcgagaactttaccattaaaatcgccgattttgggatgagtaggaatctttacgctggggactattaccgtgttcaaggccgcgcggtgttgcccattaggtggatggcatgggaatgcatactaatggggaaattcaccactgcctccgatgtgtgggccttcggtgtcactctgtgggaagttctgatgttatgccgggctcaaccttttggtcagttgaccgacgagcaggtgatcgagaacgcgggtgaatttttcagggaccaggggcgccaagtctacctgtcacggcctccagcatgcccacagggcctgtacgaacttatgctcagatgttggtctagggagtcggagcagcggccgcctttctcacagctgcaccggttcctagctgaagacgcactgaataccgtgtag

SEQ ID NO: 9759 - DNA, 678 bp, synthetic construct
  misc_feature 1..678: note = source = /note="Description of Artificial Sequence: Synthetic coding sequence"
  source 1..678: mol_type = other DNA
tgagccgacctgcccagctgctggggcgccggcccctgctacaccgggcacaaggtgggagctctgcggagagatacagtaatatgttgctgccggcacggggattactcaaccccatgtctcttcacccccggcaagccttcccgaaaccctagtccgtggaaacggaccctctggaccttatcagccccctgggctggacccgctggctggactggtgaggagcagaacgccacgaagacggggctgataactcgtcgccctagacccctgcgaaggcgcccacacccagcgcctgcctccccgttgcccgaaattataaggggcaacatcccccgaatgctcggtaaattcgtcccggtgaactgggaacccccccaacccctgccgttcccgaaatatctgaggtgttatcgatgtcttctggagaccaaggagctgggatgtcttctggggtccgatatctgcctcactccagcagggtcttcatgtattaccctccacaagaagaacagttccgggagcgacgtgatggttagtgactgccgatctaaagagcaaatgtctgattgctcaaatacacgcacctcacctgtgagcggattctggatcttcagtcaatactgctttctcgatttctgtaatgatccacagaaccgcgggctttataccccatag

SEQ ID NO: 9760 - DNA, 405 bp, synthetic construct
  misc_feature 1..405: note = source = /note="Description of Artificial Sequence: Synthetic coding sequence"
  source 1..405: mol_type = other DNA
atgccccggtgccggtggctgagcctgatcctgctgaccatccccctcgcgctagtggcaaggaaagaccctaagaagaacgagaccggcgtcctcagaaaactaaagcccgtgaacgcatcgaatgccaatgtgaagcagtgcctgtggttcgccatgcaggagtataataaggagtccgaagataagtacgtgttcttggtggtaaagacactacaggcccagttgcaggtcactaacttactggaatacctgatcgacgtggaaattgccaggtccgattgccggaaaccattgtcgactaacgaaatttgtgccattcaggaaaattccaagttaaagcgcaaactgtcttgctccttcttggtgggcgccctgccatggaacggagaattcacagtctag

SEQ ID NO: 9761 - DNA, 1182 bp, synthetic construct
  misc_feature 1..1182: note = source = /note="Description of Artificial Sequence: Synthetic coding sequence"
  source 1..1182: mol_type = other DNA
atgcggaccctgttcaacctgctgtggctggccctggcctgcagccccgtgcacactactttaagcaagtccgacgccaagaaagcagcttctaagactttgcttgagaaaagccaattttccgataagcccgtgcaggacaggggattggtcgtgacagatctgaaagccgagagtgtggtgttagagcaccgttcctactgtagtgcaaaggcccgagacagacatttcgccggcgacgttctcgggtatgtcacaccttggaactcccatggttacgacgtcacaaaggtgttcggatctaaatttactcagatatcccctgtgtggctgcagctgaagcgaagggggcgggagatgtttgaggttactggcttacacgacgtagaccaggggtggatgcgcgcagtccgaaagcacgccaaggggttgcatatagtcccacggctcttatttgaggattggacttatgatgactttcgcaacgtgctggacagtgaggacgagattgaggaactctcaaaaacagtcgtgcaagtagccaagaaccagcacttcgacggcttcgtcgttgaggtttggaaccagctgctgagccagaaaagggtggggctgattcacatgttaacccacttggcagaagctttacaccaggcccgccttcttgcgttgctggtaatccctccagcaataacaccagggaccgaccaactagggatgttcacccacaaagaattcgagcagctggccccagtgcttgacggattctctctgatgacctatgattacagcactgcccaccagcctggcccaaatgcacccctaagctgggtgagggcgtgtgttcaggtattggaccctaaaagtaagtggagatctaagatacttttgggcctcaatttctacggaatggactacgcaactagcaaagatgcaagagaacctgtggttggtgcacgctatatacaaactcttaaggatcaccgcccccgtatggtttgggatagtcaggcctcagagcacttctttgagtacaaaaaatctcggtcgggaaggcacgttgtgttctacccaactctgaagagtctgcaggtgaggcttgagctggcaagggaactgggagtgggagtttccatctgggagctaggacagggcctcgattatttttatgatttgctgtag

SEQ ID NO: 9762 - DNA, 678 bp, synthetic construct
  misc_feature 1..678: note = source = /note="Description of Artificial Sequence: Synthetic coding sequence"
  source 1..678: mol_type = other DNA
tgagccgacctgcccagctgctggggcgccggcccctgctacaccggtcacaaagtgggcgccctaagacgtgatacagtgatctgctgttgccgacacggcgattattctactccttgcctgttcaccccagggaaaccatcacgtaatccatccccttggaaacgcacactctggaccctgagcgcaccatgggccggccctgctggttggacaggggaggagcagaacgccactaaaacgggactgatcacccgtcggccaaggccgctgcggagacggcctcacccagcccccgcttcacctctgccagagatcattcgagggaacatacctaggatgctgggaaagtttgtgcctgtcaattgggaacccccacagcctctgccttttcctaagtacctgagatgttacagatgcctattagaaacaaaggaacttgggtgtttgcttgggagcgatatctgcttgacaccggctgggtctagctgcattacgttgcacaaaaagaacagcagcgggtcggatgtgatggttagcgactgtcgtagcaaagagcagatgagcgactgctccaacacaagaacaagtcccgtgtcggggttctggatattctcccaatattgctttctagacttctgcaatgatccgcagaatcggggtctgtacaccccctag

SEQ ID NO: 9763 - DNA, 1410 bp, synthetic construct
  misc_feature 1..1410: note = source = /note="Description of Artificial Sequence: Synthetic coding sequence"
  source 1..1410: mol_type = other DNA
atgatgcggctgggcggccggctggtgctgaacaccaaggaggagctggcaaacgaacgactcatgacccttaaaatcgcagaaatgaaagaggctatgagaacactgatattccctccatctatgcacttcttccaggcgaaacacttgatagagcggtctcaggtattcaatatcttgcggatgatgcccaaaggcgccgccctgcacctgcatgacatcggtatcgtgaccatggactggctggtcaggaatgtcacctaccggccccattgtcacatctgtttcaccccccgtggtatcatgcagtttcggtttgcgcaccctactccgcgcccttctgaaaagtgctcaaagtggattctcctagaggattatcgcaaacgcgtgcaaaatgtaacggagttcgatgacagcctgctgcgcaacttcactctagtgactcagcaccccgaggtcatctacacaaatcagaatgtagtctggtccaaattcgagaccatcttttttaccatctctgggctgatacattacgcacctgtgttcagagactacgtatttaggtcaatgcaggaattctacgaggataacgtgctgtacatggaaatcagagctaggctcttgcctgtctatgaactgtcaggcgagcaccatgatgaagagtggagcgtgaagacttaccaggaggtggctcagaagttcgtggagactcatcccgagtttattgggatcaaaatcatatatagtgatcatagatcaaaggatgtagctgtgattgctgaatccattcggatggcgatgggactccggataaagtttcctactgtggtggccggatttgacctggtggggcatgaagatactggtcactcactgcacgactacaaagaagctctgatgataccagcgaaggatggagtgaagcttccttattttttccatgccggagagactgattggcaggggacgtcaatagatcgcaatattctggacgctctaatgctgaacactactagaataggtcacggattcgcgctttcaaagcatccagctgttcgaacctactcttggaaaaaagatatccccatcgaggtctgtccaatctcaaaccaggtcctgaagcttgtgtctgatctccggaaccaccctgtagccactctgatggctactggccatcccatggttatctcgagcgatgacccggctatgtttggcgcaaagggattgagctatgacttttatgaggtgtttatgggcattggtggaatgaaagcggacttgcgaacactaaagcagctggcgatgaattccattaaatactcaaccctgctggaaagcgagaaaaatacatttatggagatctggaagaagagatgggacaagtttatcgccgatgtcgctacaaagtag

SEQ ID NO: 9764 - DNA, 1137 bp, synthetic construct
  misc_feature 1..1137: note = source = /note="Description of Artificial Sequence: Synthetic coding sequence"
  source 1..1137: mol_type = other DNA
tgatacagcggcgactacatggagcccgagaagcccggcgcccccttattaccccctcctcctcagaattccgtaccccattatgcagaagcggacattgtaactctgcagggggtgaccggaggtaatacctatgctgtgccagcccttccccccggtgccgtgggagatggtcctcctagagtggacttcccacgctcgcgccttcggtttaaagagaagcttggcgagggtcagttcggggaggttcacctctgcgaggttgattccccacaggacttggtgagtctggattttcctctgaacgtaagaaaaggacaccctcttcttgtggccgtgaagatcctgagaccggacgctaccaagaacgcaagcttcagtctatttagtcgcaacgattttctgaaggaagttaagataatgtctcggctaaaagatcccaatataatcaggctgcttggcgtatgtgtacaggatgatccactttgtatgattaccgactatatggagaacggagatctcaaccagtttctatccgctcaccaactcgaggataaagctgctgaaggggccccgggagacggtcaagccgcccagggtccgactatcagctatccaatgttgcttcacgttgccgcacagatcgcaagcgggatgagatacctggccacccttaatttcgttcacagggatttagcgactagaaactgcttagtcggcgaaaacttcacaatcaaaattgcagacttcggcatgtctaggaacttgtacgctggcgattactatcgcgtacagggacgcgccgtgttgcccatcaggtggatggcgtgggaatgcattctaatgggcaagttcacaaccgcgagcgacgtatgggcgttcggagttaccctctgggaggtcctgatgctctgcagggcacagccctttggtcagctcactgacgagcaagtgatcgagaacgcgggcgaatttttcagggatcagggcagacaggtctatttgtcccgtccccccgcttgccctcagggtctgtatgaacttatgctgcgttgttggagcagggagagcgagcaaaggcctcccttttcacagcttcatcgatttctagccgaggacgcactgaatacagtttag

SEQ ID NO: 9765 - DNA, 678 bp, synthetic construct
  misc_feature 1..678: note = source = /note="Description of Artificial Sequence: Synthetic coding sequence"
  source 1..678: mol_type = other DNA
tgagccgacctgcccagctgctggggcgccggcccctgctacaccggccacaaggtgggcgccctgaggcgtgacacagtgatatgctgctgcagacacggggactactcaaccccatgtctgtttacacccggaaagccgagtcgcaatcccagtccttggaaacgtaccctgtggaccctgagtgccccctgggccggtcctgccgggtggactggagaagagcagaatgccaccaaaaccggattaatcacacgacggcctcgcccgcttcgccgccggccacatccggctccagccagtcccctgcctgagatcatacgcggcaatataccgagaatgctggggaagtttgtacctgtcaactgggaacccccacagccccttcccttcccaaaatacctacggtgctaccgttgcctgcttgagaccaaggagctggggtgtctgctcgggtctgatatttgtcttacccccgccggctcatcctgcattacactgcacaagaagaactcttctggtagcgatgtgatggtctcggactgccgctcaaaagaacagatgtccgactgctccaataccaggacctctcctgtgtcagggttttggatctttagccagtactgctttctggatttttgtaatgatccccaaaaccggggcttatatactccttag

SEQ ID NO: 9766 - DNA, 846 bp, synthetic construct
  misc_feature 1..846: note = source = /note="Description of Artificial Sequence: Synthetic coding sequence"
  source 1..846: mol_type = other DNA
atgctgcccaagagccggcgggccctgaccatccaggagatcgccgcattggctagatctagcctacatggaatcagtcaggtcgttaaagatcatgtgacaaaacctacagccatggctcaaggacgggtggctcatctaatcgaatggaaaggatggagcaagccttctgactcgcctgccgcattggagtctgctttttcatcttatagcgacttaagcgaaggggagcaggaggctagatttgccgcaggcgtggccgagcagtttgctattgcagaggccaaattgagagcttggtcatcagtagacggagaggactcaaccgacgacagctacgatgaggattttgccggcggaatggacacagatatggcagggcagctccctctgggccctcacctccaggatctgttcaccggccataggttcagcagaccggtcagacaggggagcgtcgagccagaatcagactgcagtcaaaccgtgtcccccgacacgttgtgcagctccctgtgttccttggaagacggccttctaggaagcccggcaagactggctagtcagctcttaggagacgagctgctcctggctaaattacctccaagtcgtgagtccgcatttcgaagtctgggaccgttggaggcccaggacagcctgtataacagccctctaacggagagttgcctctcccccgccgaggaagagcccgctccctgtaaagactgtcaaccactgtgcccccccttgacggggagttgggagcggcagagacaagcttcagatctggcctcctccggcgtcgtcagcctggacgaggatgaagccgaaccagaagaacagtag

SEQ ID NO: 9767 - DNA, 1110 bp, synthetic construct
  misc_feature 1..1110: note = source = /note="Description of Artificial Sequence: Synthetic coding sequence"
  source 1..1110: mol_type = other DNA
atgaagttccagggccccctggcctgcctgctgctggccctgtgcttggggagtggcgaggccgggccactacagtctggcgaagaaagcacggggactaacatcggtgaggcactaggtcacggactgggagacgcactctctgaaggcgtcggcaaggctataggcaaagaagccggcggtgctgccggctccaaggtgagtgaggcccttggccaggggacacgggaagccgttgggacaggggtcaggcaggtgcccggattcggcgtagccgatgccctcggaaatagggtgggagaagccgctcatgccctgggcaatacggggcacgagataggcagacaggctgaagatgtcattagacacggcgcggatgcagtgcggggttcatggcagggagtgcctggacacaatggcgcctgggaaacatccggaggacacggaatcttcggtagtcaaggcggactaggcggacagggacaggggaacccgggggggcttgggacgccctgggtccacggttaccctggcaactcagcagggtccttcggaatgaacccccagggtgccccgtggggacagggaggtaacggagggcctcctaacttcggcactaatacccagggcgctgttgcacagcccggctacggcagcgtaagggcctctaatcagaatgaagggtgtacaaatccacctcccagcggtagcggtggcggcagcagtaactctggcggtgggtcgggatctcagagcggatctagcggctctggtagtaatggtgataataacaacggtagcagctccgggggctcgagctctgggtcatccagtgggggttcttcaggcggttcatctgggggctcaagcggaaattcaggggggtcaagaggggacagcggctctgaaagttcttgggggtcttctactggttcaagcagcggaaatcacggggggtcaggtggaggaaatggtcacaagcctggcaatagcgaaacttcacctggcatgtttaattttgacaccttctggaaaaattttaaaagtaagcttgggttcatcaactgggatgcgataaacaaggatcaacgctcttcaagaatcccctag

SEQ ID NO: 9768 - DNA, 420 bp, synthetic construct
  misc_feature 1..420: note = source = /note="Description of Artificial Sequence: Synthetic coding sequence"
  source 1..420: mol_type = other DNA
atgggccccgaggccctgagcagcctgctgctgctgctgctggtggcatcaggagatgcggacatgaaaggacactttgacccagccaagtgcagatacgctctgggcatgcaggatagaactatccctgattcagacattagcgcttcaagtagctggtccgactctaccgccgcgcggcactcacggcttgaatcttcagacggcgatggggcgtggtgtccagccggtagcgtatttcctaaagaggaggagtatctccaagtggatctacagcgactgcacctggtggccctggtggggacccagggccggcacgccggaggcctcggaaaggaatttagccgtagttataggctgcgctacagtcgggatggtaggaggtggatgggttggaaggatcgatggggacaggagtag

SEQ ID NO: 9769 - DNA, 516 bp, synthetic construct
  misc_feature 1..516: note = source = /note="Description of Artificial Sequence: Synthetic coding sequence"
  source 1..516: mol_type = other DNA
atgcggcacaacctgggcggcaacctgggcgacccccgggcccgggcagtcagcgtgcccttgggcggccgggtcgcgcggttcctgcagtgcagatttcttttcgcaggtccatggctcctgttttcagagatttcctttatctccgatgttgttaacaactcttctccagccctgggtggaacatttcctcccgccccctggtggccaccaggccctccaccaacaaatttttctagtttggaactagagcccaggggtcaacaaccagtagcaaaggcagagggttcaccaacagccattctcatcgggtgtttggttgctatcatcctgctgctcctgttgatcattgcactcatgctctggcgcctgcactggagaagactattgtctaaagtgctggaatcgcatcctcggactcgctctcccggtctggtggggattcgtcccacacccctcccggtttctcccatggctttggttcacctctgtgaagtggacagtcctcaggattag

SEQ ID NO: 9770 - DNA, 192 bp, synthetic construct
  misc_feature 1..192: note = source = /note="Description of Artificial Sequence: Synthetic coding sequence"
  source 1..192: mol_type = other DNA
atgggccccgaggccctgagcagcctgctgctgctgctgctggtggcctcaggtgatgccgacatgaagggccactttgacccagcaaaatgtcgatacgcactggggatgcaggacagaaccattccagattctgatattagtgcttcaagttcctggtcagatagcacagctgcccggcacagccgctag

SEQ ID NO: 9771 - DNA, 1137 bp, synthetic construct
  misc_feature 1..1137: note = source = /note="Description of Artificial Sequence: Synthetic coding sequence"
  source 1..1137: mol_type = other DNA
tgatacagcggcgactacatggagcccgagaagcccggcgcccccctgctcccaccccctccacagaatagcgtgccccattacgcagaggccgatatcgtgactctccagggggtgacaggcggtaatacgtatgccgtgccagcactgcctcctggagccgtgggcgacgggccaccacgagtggatttcccacgttctagacttcggttcaaggaaaagttaggcgagggacagttcggcgaagtgcacttgtgtgaggtagacagccctcaggatttggtctctctcgattttcctctgaatgtgcgaaaggggcaccctcttctggtggccgtcaagattctgcgtccagacgccactaaaaacgctagtttcagcttgttctcacgcaacgactttctaaaggaggtgaagatcatgtcccgccttaaagaccctaacatcattaggttgctcggtgtgtgcgtgcaggatgaccctttgtgtatgatcacagactatatggaaaacggagacctgaaccagtttctgtctgctcaccagctcgaagataaggccgctgagggtgcccccggagatgggcaagcagcccagggccctaccatctcctatcctatgctgctgcatgtggcagcccaaatcgcctccggcatgcgctacctcgcaacactgaactttgtacaccgtgatttagctacccggaattgtctcgtgggcgagaactttaccattaagatagccgactttgggatgagcaggaatctgtatgcaggcgactactaccgagtccagggaagagctgtactgccaatccgatggatggcctgggaatgcatcctaatgggaaaatttactacagcttcagatgtgtgggctttcggagtgacattatgggaagtgcttatgttgtgcagagcacagcctttcggacaactgaccgacgaacaggtaatcgagaacgccggggaatttttcagggaccagggacgccaggtataccttagtcggccccctgcatgtccgcaggggctttatgagctgatgctgcggtgttggagtcgcgaaagcgagcagaggcccccattctctcaacttcatcggttcttggccgaagacgctttaaatactgtgtag

SEQ ID NO: 9772 - DNA, 2535 bp, synthetic construct
  misc_feature 1..2535: note = source = /note="Description of Artificial Sequence: Synthetic coding sequence"
  source 1..2535: mol_type = other DNA
atgggccccggcgcccccttcgcccgggtgggctggcccctgcccctgctagtggtgatggcggcgggggtggcccccgtatgggcttcccactctcctcacctgcctcgcccacactccagagttccgccccatccttcatctgagagacgcgctgtctacattggagccctgttccccatgagcgggggttggcctggggggcaagcctgccaaccggctgttgagatggcactggaagacgttaactcacgccgcgacattctcccagactatgagctcaaactcatacaccatgactctaagtgtgatcctggccaggctactaagtacctgtatgagctgctttataatgatcccattaaaataattctcatgccaggatgtagttccgtttctacgttggtagctgaggccgcacgaatgtggaacttaatcgttctcagttatggttcaagcagcccagccctcagcaaccgccagagatttcctacctttttcaggacacacccgagtgccacccttcataaccccacccgggtgaaactatttgaaaagtggggttggaaaaagatcgccactatccagcagaccacagaggtgtttacctccacactcgacgacctggaggaacgcgtcaaggaagcgggcatagaaataaccttccgccagagttttttctcagaccccgcggtgcctgttaagaacctgaagcgccaggacgcgcggatcattgtggggctgttctatgagaccgaagctcgaaaagtgttctgcgaggtgtacaaggagcggctgtttggcaaaaagtatgtgtggtttctaatagggtggtatgctgataactggtttaagatatatgatccttcaatcaactgtacagtcgatgagatgaccgaggcagtggagggacacatcactaccgaaatcgtcatgctgaatccggccaacacccgcagcatttctaacatgacatcacaggaattcgttgagaagctgactaaacggttgaagcgccaccccgaagaaaccgggggcttccaggaagctccactcgcttatgacgctatctgggcactagcgctggcgttaaacaaaacctctggtggcggtggcaggagcggcgtacgacttgaggattttaattacaataatcaaacgattaccgaccaaatttacagggctatgaattcttcttcctttgaaggagtaagtggtcacgtagtcttcgacgcctccggatcacggatggcttggacgttgatcgagcagttgcaagggggcagctacaaaaagatcggctactacgactccactaaagatgacctgtcatggtccaagaccgataaatggattggtggctcccctcctgccgaccagacactggtgatcaagacatttcgattcctctcccagaaactgtttatatctgtgagcgttctgagctcacttgggattgtcctcgcagtcgtttgtttgtcattcaacatctataatagtcacgtgaggtatattcagaacagccagcctaacttgaacaacctgactgcagtcggatgtagcctggctcttgcagcggttttcccccttggactagatggttatcatattggccgcaatcagttccctttcgtgtgtcaagccaggttgtggctccttggtttaggctttagcctcggttatgggtcaatgtttaccaaaatatggtgggtgcatactgtcttcaccaagaaggaagaaaagaaggaatggagaaaaacccttgagccttggaaactgtacgcaactgtggggttgcttgtgggcatggatgtgcttacccttgcaatatggcaaattgtcgatcctcttcacagaactattgagacctttgctaaggaagagcccaaagaggacatcgacgtcagtatccttccgcagctggagcattgttcctccaggaagatgaacacatggctcggcatcttctatggatataaagggttactgctcctcttgggtatttttctggcctatgagacgaagtcagtctccacggagaaaattaatgatcaccgggcagtcggcatggctatctataatgtggccgtcttgtgcctcataaccgcaccagtcactatgattctgagctcgcagcaggatgctgcttttgcctttgctagtctcgccattgtgttctcttcatacatcacgctggttgttctgttcgtgccaaagatgcggcgcctgatcacaagaggcgagtggcaatccgaggctcaagacactatgaaaacaggctcttccacaaataacaacgaagaagaaaaatctaggctgttggagaaggagaatagagagctcgaaaagattatcgctgagaaggaggagagggtctccgagctgcgtcatcaactgcagtcccggcagcaactacggtcaaggcgacacccccctacccccccagagccttccggcgggctgccacgggggcctcctgagcctccggatcgtttatcgtgcgatggatcacgggttcacctgctctacaaatag

SEQ ID NO: 9773 - DNA, 339 bp, synthetic construct
  misc_feature 1..339: note = source = /note="Description of Artificial Sequence: Synthetic coding sequence"
  source 1..339: mol_type = other DNA
atgctgaccgccgccctggcccccggcgccgccaacagccccaccacaaatccggtcatacttatcgtagacaaggtcctcgaaacacaagacctgaacggagacggactaatgaccccagctgaattaattaactttcccggcgtcgcattaaggccataccccccttatattggggtaggccccaattctaacatgtgttcacgatcagacctgcctgaggactccaacactctgtatcccggctctcacctctggctgaggcatgctttgaactcaaaggggaacctcgatgcaagactggatggaggcgagaaagccatgcagcctcagtggtag

SEQ ID NO: 9774 - DNA, 2676 bp, synthetic construct
  misc_feature 1..2676: note = source = /note="Description of Artificial Sequence: Synthetic coding sequence"
  source 1..2676: mol_type = other DNA
atgctgcccaccgaggtgccccagagccaccccggccccagcgccctcctgctcctgcagctgcttctcccacccacttccgctttcttccctaacatatggtctcttctcgccgccccggggtctatcacgcaccaggatttaacagaagaagctgccttgaacgtgaccctgcaactgttcctcgagcagcccccacccggtcgcccccccctacggttagaggatttcctgggtcgaaccctcctagccgacgaccttttcgctgcctactttggcccaggcagttcaagaaggtttcgggcagccctgggtgaagtctcaagggccaacgccgcacaagattttctgccaacgtcaaggaatgaccccgatctgcatttcgatgccgagagacttggccaaggcagagctcgactagtaggggctttgagggaaactgtggtggcagccagggctttagaccacacccttgcccgccagcgcctgggtgcagctctgcacgctctacaagatttttacagtcattcaaactgggtcgaactgggggaacaacagccacatcctcacctgctctggcccaggcaggaactacaaaatctggcccaagtggcagaccccacatgctctgattgcgaggaactttcttgtcctaggaattggctgggtttcactctgttaacgtcagggtatttcggcacccatccaccaaagccaccaggcaagtgttctcacggcgggcatttcgatagatcttcgagccagcctccgcggggggggattaataaggacagtacttctcctgggttttcaccacatcacatgctccacttacaggccgctaaactcgcactgctggctagcattcaggccttcagcctgctcagatccaggttaggagaccgggacttttcaagactgcttgacatcacacctgccagctcattgtcatttgtcctggacacaaccggcagcatgggtgaagaaataaacgcagctaaaatccaggcccgacatctggtggagcagcggagagggagtccaatggaacccgtgcactacgtcctcgtcccctttcatgatcctgggttcggacccgtattcacaacatctgaccccgacagcttctggcaacaactcaatgagattcatgcccttggggggggcgacgagccagaaatgtgtttatcagcattacaattggctctcttacacactcctccgctctctgacatttttgtcttcacggacgcttctcctaaagacgcgtttttaaccaatcaggtggagagcttaacccaggagcgtagatgtagagttactttcctggtaaccgaagacacatctcgggtgcaggggcgcgcacgtcgagaaatcctgagccctttgagatttgagccatacaaggccgtcgccctcgcttcggggggcgaggtaatctttactaaggaccaacatatcagagatgtggctgccatcgtgggagaatccatggcggcactcgttacactgccccttgatccccctgttgtggtgccaggacagcctctggtcttttccgttgatggattgctacagaaaattaccgttcgcattcatggagatatttctagcttctggattaagaacccagctggcgtttctcaggggcaagaggaaggaggagggcctcttgggcatactaggagatttggacagttctggatggtcacgatggatgaccctccacagactggaacttgggaaatacaggtgaccgcagaagacacgccgggtgttagagtacaggcccagacctccttagactttctctttcacttcggcattcccatggaagatgggccccacccaggattgtaccctcttacgcagcctgtcgcggggcttcaaacccagctcctcgtggaagtgacgggactcggttccagagcgaaccctggggacccacaaccacacttctcccacgtgattctgcgcggggttccagaaggtgctgaactcggacaggtccccctggaacccgtgggtccacctgaaagaggtctgcttgccgcctcactcagtccaaccttacttagtaccccccgccccttttctctggagttgattggccaggacgcggccggcaggcggctacaccgggccgctcctcagccatcaactgtcgtgccagtgctgctagagctcagcggaccatcgggcttcctcgctccggggagtaaagtgcctctgagtctgcgcatcgccagtttttctggccctcaggatctggacctgagaacttttgtgaacccatcattttccttgaccagcaatctgtctagagctcacctggagttaaacgagagtgcctggggtcggctttggctggaagtgcccgacagcgccgcccctgacagcgtcgtaatggtgacagtgacagccggcggccgggaggccaatcctgtgcctcctacccacgcgtttctcaggctgctggtctctgcacccgctccacaagaccggcatactacaccaacgggcagctcggaccccatactgacaaccgccaccccagctttttcgccttttactttggttacacaaggtcgggcaggtgcagggctcgccgcggggtctccctggtgggggacggtgggcggcgtgctactcctcctcggcctggcatcatggtag

SEQ ID NO: 9775 - DNA, 2742 bp, synthetic construct
  misc_feature 1..2742: note = source = /note="Description of Artificial Sequence: Synthetic coding sequence"
  source 1..2742: mol_type = other DNA
atgggccccgaggccctgagcagcctgctgctgctgctgctggtggcatccggtgatgccgatatgaagggacatttcgatccagccaagtgtaggtatgccctgggcatgcaagataggactattcccgactctgacatttccgcctcttcatcctggagcgattccacagccgccagacattccagactcgagtcttccgatggagatggggcctggtgccccgccgggtctgtgttcccgaaggaagaggagtatctgcaggtggacctgcaacgactgcaccttgtcgcgctggtgggaacacagggacggcacgcggggggcctgggtaaggagttctcccggagttaccgactgcggtactcaagagatggtcgccgctggatgggatggaaggataggtggggacaggaggtcatatcagggaacgaggaccccgaaggagttgtgctgaaggacttgggacccccaatggtggcccgcctcgtgcgcttttatcccagggccgaccgcgtgatgtccgtgtgtcttcgggtagagctctacgggtgtctctggcgtgacggactactgagttatacggcccccgtggggcagactatgtacctctcagaagccgtatacctcaatgatagcacatatgatggacacacagttggcggactgcagtacggtggactaggccagttggccgacggggttgttggattagacgattttagaaaaagtcaggagttgcgggtatggcccggatatgactatgttgggtggagcaaccattccttcagctcaggctatgtcgaaatggagttcgagtttgatcgcctccgcgcgtttcaagctatgcaagtacactgcaacaacatgcacaccctaggggccagactgcctgggggagttgaatgccgattcaggagaggaccagctatggcctgggagggcgaacccatgagacacaatctgggcggcaacctgggcgacccaagagcccgtgccgtgtccgttcccctgggcggacgcgtggcccgattcctgcagtgccgcttcttgttcgccggaccatggctcctcttcagcgagatctcattcatcagcgatgtagttaataattcctctcccgccctgggggggacattcccaccagccccttggtggccacctgggcctcctcctaccaactttagtagcttagaactggaaccaagaggtcagcagccagtggccaaggccgagggttcaccgaccgcaatcctcatcggatgtttggttgctataattcttttacttctactgattattgcattgatgctatggagactacattggaggcggctcctgtcaaaagctgaacgcagggtgcttgaagaggagctcactgtccatttgtcagttccaggcgataccatcttgataaataaccggcctgggcctcgggagccgcccccatatcaggagcccaggcctagaggaaatcctccccattccgccccttgcgtgcccaatggttcagcactgttgctgtcaaatccagcatatagactgctcttagccacgtatgcccggcctccacgcggacctgggccgcctacccctgcgtgggccaaacctacaaacacccaggcctactctggggattacatggagcccgagaagccgggtgctcccctgctgccacccccgccccagaactcagtacctcattatgcagaggctgacattgtgacgttgcagggagttactggaggtaatacttacgctgtgccagccctgcctcccggcgccgttggagatggccccccaagagtggacttcccgcggtcaaggctgcggtttaaagagaagttgggtgagggtcagttcggcgaggtacacctgtgcgaggtggattccccccaagaccttgtgtccctggactttccactgaatgtgcgcaagggccatccgctgctcgtggccgtcaagatcttacgccccgacgctacgaagaatgctcgaaacgatttcctaaaggaagttaagatcatgtctaggctcaaggaccccaatattatcagacttcttggggtctgcgtccaagacgaccccctctgcatgattacagactacatggagaacggcgatctgaaccaattcctctcagctcaccagcttgaagataaggcggcggagggcgcacccggggatggacaggccgcacagggccccacgattagttatccgatgctgcttcatgtagccgcccagatcgcctctggaatgcgatacctggctacactgaacttcgtccatcgcgacctggcgacacgaaattgcctcgtgggcgaaaactttactatcaagattgcagatttcgggatgagtcgcaatctgtacgccggtgattattatcgtgtgcaggggcgggctgtcctgcctattcgttggatggcgtgggaatgtatcctaatggggaaattcaccaccgcatcagacgtctgggcctttggcgtgactctctgggaggtcctgatgctgtgtcgtgcccaaccttttggccagctaaccgatgaacaggtcatcgagaacgcaggggagtttttccgcgaccagggtaggcaggtgtacctatcacggccccctgcgtgtccccaggggttgtatgagctgatgcttcgctgttggtcacgtgagtccgaacagcggccaccattctctcaactccaccggtttctggcagaggatgccttaaatactgtgtag

SEQ ID NO: 9776 - DNA, 390 bp, synthetic construct
  misc_feature 1..390: note = source = /note="Description of Artificial Sequence: Synthetic coding sequence"
  source 1..390: mol_type = other DNA
atggccgccggcagcgcccccatgcagctgcacctgcgggccaccatccgaatgaaggacggcctctgcgttcctaggaagtggatctatcatctgactgagggtagtaccgatctccgtacggaggggaggcccgacatgaaaacagaactgtttagcagctcgtgccctggaggaatcatgctgaatgaaacggggcagggataccaacgattcctattgtataatcggtctcctcacccaccagaaaaatgtgttgaagaatttaaaagcctgacaagctgtttggacagcaaagccttcctactaacacctcggaaccagggaaaggggctgaaatcccataagacaggactcggactgacaaaatcaagcggggttactgggtag

SEQ ID NO: 9777 - DNA, 846 bp, synthetic construct
  misc_feature 1..846: note = source = /note="Description of Artificial Sequence: Synthetic coding sequence"
  source 1..846: mol_type = other DNA
atgctgcccaagagccggcgggccctgaccatccaggagatcgccgcactggcccggagtagcctacacggaatcagccaggtcgtgaaagaccacgtcacgaagcctacagccatggcccaagggagggtggcccatctgatcgaatggaaaggctggagcaaacctagcgactcccccgcggctcttgagtccgctttctcaagctattcagacctctcagagggggaacaagaagcccgcttcgctgcaggagtcgccgagcagtttgcgattgctgaagccaagctgcgggcatggtcttcagtcgatggcgaggattctacggatgacagttacgatgaggactttgctggaggtatggataccgacatggccggacagcttccactgggacctcatctgcaggatctgttcacgggccatcgatttagcaggccagtccgccagggctccgtggaacccgagtctgactgtagccaaacggtcagtcctgatacattgtgctcatctctctgttcactggaagatgggcttctgggatcacctgcacggctggcatcacagctgctgggcgacgaactgctgctcgctaagctacctcccagcagagagtcggctttccggagtctgggtcccttggaggcccaagactccctgtataacagccccctgaccgagtcttgcctctcaccagctgaggaggagccagcgccctgtaaggattgccagcccctatgccctcctctgacgggctcatgggagcgtcaaaggcaggcttccgacctagcttcaagcggggtcgtgagtctcgacgaggacgaggccgagccagaagaacagtag

SEQ ID NO: 9778 - DNA, 444 bp, synthetic construct
  misc_feature 1..444: note = source = /note="Description of Artificial Sequence: Synthetic coding sequence"
  source 1..444: mol_type = other DNA
atgggccccgaggccctgagcagcctgctgctgctgctgctggtggcatccggagacgccgatatgaaaggacattttgacccagcgaagtgccgatacgctctggggatgcaagaccgtactatccccgacagtgatatttctgcatcttcttcttggtcagacagcacagcagcgcgccattctcgcctggagtcttcagacggggacggcgcctggtgccccgccggatcagtgttccccaaggaggaagaatacctgcaggtagacctgcagagactccatcttgtagctttggtcggtacccaggggcgccacgccggtggactgggtaaagagttctccaggagctataggttgcgttacagccgggacggtcgccggtggatgggatggaaggatcgttggggtcaggaggtgattagcggtaatgaggacccctag

SEQ ID NO: 9779 - DNA, 2631 bp, synthetic construct
  misc_feature 1..2631: note = source = /note="Description of Artificial Sequence: Synthetic coding sequence"
  source 1..2631: mol_type = other DNA
atgggccccgaggccctgagcagcctgctgctgctgctgctggtggcctccggagatgccgatatgaaagggcattttgaccccgccaagtgtcggtacgctctgggtatgcaggatcgcactattccagactctgacatttcggccagttccagttggtctgattcaaccgccgcccgccattcaaggctcgagagcagcgacggagacggcgcgtggtgtcctgcaggttccgtctttcccaaggaagaggaatatttgcaggttgatcttcagagactgcacttggtggctttagtgggcacccagggtcggcacgcgggggggctcggtaaagagttctctcggtcctatagactgcggtacagcagggatggcagacggtggatggggtggaaggataggtggggccaggaggtgatctcaggaaacgaggatcccgaaggcgttgtgctcaaagaccttgggccaccgatggttgctaggttagtacgcttctatcctcgtgccgatagggtcatgagtgtttgtttgcgcgtggagctctacggttgcctatggagggatggcctgctctcctataccgccccagttggtcagactatgtacttgagcgaagccgtgtatctgaatgactccacctatgatggccacaccgtcggggggctgcagtacggaggcctgggccaactggcagatggggtggtggggctagatgattttagaaagagccaggaactgagggtctggcctgggtacgattatgtcgggtggagcaaccactctttttcaagtggatacgtagagatggagttcgaatttgatagactgcgagcctttcaggccatgcaggtccattgcaacaatatgcacaccttgggggcccgtctgccagggggcgttgaatgccggttccgtcggggtcccgccatggcttgggagggagaacctatgcggcacaatctaggaggcaacttgggtgacccccgagcaagagctgtgtctgtgccgcttgggggcagggttgcccgcttcctgcaatgtcgtttcctgtttgccggaccctggttgctgttttcagaaatttcatttatctccgacgttgtgaacaatagcagcccggcactgggcgggacattcccaccagccccctggtggccccccggaccgccaccgactaacttttcttccctagaattagagccacgggggcaacaacctgtagcgaaggcagaggggtcccctacagccatcctcattggctgtctagttgctattatcctgctgctgcttttgattattgccctgatgctttggcggctgcattggcggagactgttgagtaaagccgagcggagagtgctcgaggaagaactgacagtgcacctctctgttccaggagataccattctgattaataaccgacctggaccacgagagcctcctccataccaggagcctcgccccaggggaaatccccctcattcggctccctgcgtgcccaacggcagtgcctactcaggagactacatggaaccagaaaagcctggcgccccactgcttcccccaccacctcagaactcagtgccccactatgctgaggcggacattgtgacactgcaaggcgtgactggaggaaacacgtacgccgttccggccctgccccccggcgctgttggtgatggtccccctagagttgatttccccaggagtcgcctccgattcaaagagaagttaggcgagggccagtttggggaggtgcacctctgtgaagtggatagtccccaggacttggtgtccttggacttcccactcaatgtgagaaaagggcacccactgctcgttgcagttaaaattctgcgtccagatgctaccaagaatgcacgtaacgatttcctgaaggaggtgaagatcatgtcacggctgaaggatcctaatattatcaggctcctcggtgtctgcgtacaggacgacccactgtgtatgatcacagattacatggaaaacggagacctgaatcagtttctttccgcccaccaactcgaggacaaagccgccgaaggagcaccgggtgacggacaagctgcccagggccccactatttcctatcctatgctccttcatgtggccgcacagatcgcgtctgggatgaggtacttagccaccctgaatttcgtccatcgagatcttgcgacccgaaactgcctagttggcgagaacttcacaattaaaatcgccgactttggaatgtcccggaatctttacgccggggactattacagagtccaggggcgagccgtccttcccattaggtggatggcctgggagtgtatactgatgggaaagttcacaactgcctctgatgtttgggctttcggagtgaccctatgggaggtgctgatgttgtgtcgtgctcaaccattcgggcagctcacggacgagcaggtgattgaaaacgccggcgagttttttagagatcaggggcggcaggtgtatctcagccggccccctgcatgcccacaggggctttacgagctgatgctgcgatgctggtctcgggaatcagagcagcgtccgcctttctcacaactgcacagattcctagcagaggacgcgttgaacacagtatag

SEQ ID NO: 9780 - DNA, 1749 bp, synthetic construct
  misc_feature 1..1749: note = source = /note="Description of Artificial Sequence: Synthetic coding sequence"
  source 1..1749: mol_type = other DNA
atggacttcctgctggccctggtgctggtgagcagcctgtacctgcaggcggccgctgaattcgacggcagatggccgcgccagattgtcagtagtattggtctgtgccggtatggcggtagaatcgattgctgttggggttgggccagacagtcatggggtcagtgccagccattctacgtgttaaggcagcgtattgcccgcattcgatgtcagttgaaggcagtttgtcagccacgctgtaagcatggtgaatgcatcggacccaataaatgtaagtgtcaccctggctatgcaggtaaaacctgcaatcaagaccttaatgaatgcgggctaaagccccgcccttgcaagcatcgctgtatgaacacatacggcagttacaagtgttactgtctaaacggctacatgctaatgccagatgggtcttgcagctcagcgctcacctgtagcatggctaattgtcaatacggatgcgacgtcgtgaaaggtcagattagatgccaatgcccaagccccgggctccagctggcccccgatggccggacctgcgtcgatgtggacgagtgcgcaaccggtcgcgccagctgtccaaggtttcgacagtgtgtcaacaccttcgggtcctacatttgtaagtgtcataagggatttgatctgatgtacatcggtggaaaataccaatgccacgacattgatgagtgttcattgggacagtatcagtgctcatcattcgctcgctgttataatataagggggtcctataaatgcaagtgtaaagaaggataccaaggcgacgggttgacgtgtgtgtatatccctaaggtaatgattgagccatcgggacctatccacgttcctaagggcaacggcacaatcctgaaaggcgatacagggaacaacaattggattcccgatgtcgggagtacatggtggccccctaaaacaccctacatccctcccattattacgaatcggccaacttcaaagccaaccacacggccaacccctaaacctacccctattcctactccacccccgcctccacctctgccaacagaattacgcactcccttacctcctactactcctgaaagacccacaacaggcctcaccacaatcgctccggccgccagcacacctcccgggggaatcaccgtggacaacagggtccagaccgatccacagaaacctcggggcgatgtgtttattcctagacagcccagcaacgatttgtttgagatcttcgagattgagcgaggcgtctctgcggacgatgaggccaaagatgaccccggcgttctcgtccatagctgtaattttgaccatggcctgtgcgggtggattcgagagaaggataatgatctgcactgggagcccatccgggaccctgcaggaggccagtatcttacagtctcagcggctaaggctcccggtggcaaggccgcccggctggtccttccactgggaaggctgatgcatagcggtgacctctgcctgagctttaggcacaaagtgaccgggctgcattctggcactctgcaggtgttcgtgaggaaacacggagcccacggcgccgcactatggggccgcaatgggggacacggatggcggcagacccagattacgttacgcggggctgacattaaaagcgtagtcttcaaaggagagaagcggcgcggccataccggagagataggcctcgacgatgtcagtctgaagaaaggacactgctcagaggaacgctag

SEQ ID NO: 9781 - DNA, 1602 bp, synthetic construct
  misc_feature 1..1602: note = source = /note="Description of Artificial Sequence: Synthetic coding sequence"
  source 1..1602: mol_type = other DNA
atgggcagcagccggctggccgccctgctgctgcccctgctgctgatcgtgattgatctgtccgattctgcggggattgggttccgccacctgccccactggaatacccgatgtcctctagcgagtcatacagatgactcctttacaggcagttccgcctacatcccttgcaggacttggtgggcactgttttccaccaagccttggtgcgtcagggtctggcactgttctcgatgcttgtgccagcacttactttccggcggatccggtctccaacggggtctgtttcatctcttggtccagaaatctaaaaagagctccacattcaagttctaccgccgacataaaatgcctgcaccagctcagaggaagctgctccccaggaggcacctgtcagagaaaagtcaccacatctccataccgagtcccgatatatcccacaaggggttaagaagtaagaggacccagccgtccgatcccgagacctgggagtcactccccagattagattctcagcggcatggcggccccgaattttcatttgatctgttacccgaggccagggccatccgagtgaccatcagctccggaccggaagtgagtgtgagattgtgtcatcagtgggcactggagtgcgaagagttgtcatctccctacgatgtgcaaaaaatagtatctggcggacacaccgtcgagttaccatatgagtttttactcccttgtctgtgcatagaggccagctatctacaagaagataccgtgcgccggaagaagtgtcctttccaaagctggcctgaagcttatggatcagacttctggaaatccgtgcatttcaccgattactcgcagcatactcagatggtgatggctttgaccttgcggtgccccttgaagctagaggcggctctgtgccagagacacgattggcacaccttgtgcaaggatctcccaaatgcaacagcccgtgaaagtgatgggtggtatgttctggagaaagtggatctccacccacagttatgctttaagttctcttttggtaactcttctcatgtggaatgtccccatcagactgggtccttaacgtcatggaatgtctctatggatacacaggcccaacagttaatcctgcacttctcttcccgtatgcacgcaaccttctctgcggcctggtcccttcccggactggggcaggatactctcgtaccaccagtatacaccgtatcacaagctagaggcagctctccagtgagtctggacttgattatcccatttctccggcccggatgctgcgtactcctgcatgcctccctcagttcacctggcggtgaggacgcatggctgatcggggtgggcggttcagtaccctccggcgtggcggtgagatgcccggtatgtctggaagcacctcttgtgagtggttgtctgttgcagacccccggcgcactcgatcccggaaccgctggcccgcctcatcctactggctgctgctcggggccacatcttccagctcccactgtccgaccaggacctagtgccgcttccgcacccccggctcgtggcggactcggtggggccgcggcacccggcggaagcgctggttag

SEQ ID NO: 9782 - DNA, 1293 bp, synthetic construct
  misc_feature 1..1293: note = source = /note="Description of Artificial Sequence: Synthetic coding sequence"
  source 1..1293: mol_type = other DNA
atgggcgtgagcaagctggacatcctgtaccggcggctgctgctgaccaagctctttattagaggttggggtcgacctgaagacctgaaaagactgttcgagttccgaaagatgatcgggaacagggaaaggtgtcagaatctggtctcctccgactatccagtccacatcgataaaatagaggaacagtccgattgtaagatcctcgatgggcatttcgtttcgcccatggcccactacgtgcccgacatcatgcctatagagagtgtcatcgctcggttccagttcattgtgcctaaggagtggaactccaagtatcgtccagtgtgtatacatctcgccggaactggagatcatcactactggaggagaagaacgcttatggcccggccaatgattaaggaggcccgcatggcgtccctcctcctcgagaacccttattacggctgcaggaagcctaaggatcaggtcaggtcgtccttgaaaaacgtgagcgacctgtttgtcatgggcggcgcattggtgctggaatcagctgcattgctccactggttagaacgcgagggctacggacctctcgggatgaccggtatctcgatgggaggtcatatggcctctctggccgtcagtaactggccaaagcccatgcccctcatcccatgcctgtcatggagtacagcctccggtgtcttcacaacaactgactccttcaagatggggcaggagttcgtcaagcatttcaccagctcagccgacaaactaaccaatctcaatctggtgtcacgcaccttgaatctggatatcagcaaccaagtggttagccaaaagcctgccgactgccacaattcatcgaagacaagtgtttcagcgacatctgagggcctgctgttgcaggacactagtaagatgaagcgctttaaccagacgttgagcacaaacaagtccggctacacctcgcgtaacccccagagttaccacctgctcagtaaagaacagtctagaaatagcctgagaaaagagtcgctcatttttatgaagggagtcatggatgagtgtacacatgtcgccaacttttctgtcccggtcgatccaagtctcatcatagtcgttcaagctaaagaggatgcctatatcccgaggacgggtgtgaggagtcttcaagagatttggccagggtgcgaaatcagatacctggaaggcggacacatctcagcttatctttttaagcagggattattccgacaggctatctatgacgccttcgacaggtttctgcacaagtacgccaactag

SEQ ID NO: 9783 - DNA, 2631 bp, synthetic construct
  misc_feature 1..2631: note = source = /note="Description of Artificial Sequence: Synthetic coding sequence"
  source 1..2631: mol_type = other DNA
atgggccccgaggccctgagcagcctgctgctgctgctgctggtggccagcggggatgcagatatgaagggccactttgaccccgcaaagtgccgctacgcccttggcatgcaggacagaacaatcccagactccgatatcagcgcctccagctcatggagtgactcaacagctgccaggcactcacggttggagtcttcagatggagatggcgcctggtgccctgcgggaagtgtgtttcctaaggaggaggaatatctgcaagtggatctgcagcgtcttcacttggtggctctggtcggaacacaggggcgacatgccggaggacttggtaaagaattttccagaagctacaggctgaggtattcccgagacgggcgcagatggatgggttggaaggaccggtggggacaggaggtgatcagcggcaatgaagaccccgaaggcgtggtcctcaaagatctgggccctcccatggtcgcccgtctggtgagattttacccccgagccgatcgcgtgatgtcagtgtgccttcgcgtagaactgtacggctgcctgtggcgcgacggcctcttgagttacacagcgccagtgggccagaccatgtacctgagcgaggcggtttacctgaacgattctacctacgacggacatacggtcggggggctgcaatacgggggtctgggtcaactggccgacggggtggtgggtttagacgacttccgaaagagtcaggagctgcgtgtgtggcctggctacgactatgttggctggtctaatcattctttctctagcggctacgtggaaatggagtttgagtttgacaggctgagggcatttcaagcaatgcaagttcactgcaacaacatgcacacactgggtgcccggctgccggggggcgtggagtgtcgcttccggaggggtccagctatggcgtgggaaggtgagcctatgcgccacaatctgggagggaacctaggtgaccccagagccagagccgtgtctgtccctcttggtggtagagtggcgagatttttacagtgtaggttcctcttcgcaggtccctggctacttttcagcgagatcagtttcatctcggatgtggttaacaactcttcccctgctctggggggcactttccccccagcaccttggtggcctcccggaccacctccgaccaatttcagtagcctggagctcgaaccacgtgggcaacagcccgtcgcaaaagccgagggttctcctaccgcaatcctgatcggctgtctagttgcaatcatcctcctgctgctgctgattattgccctgatgctgtggcgcctccactggagacgtttgctttctaaggccgagagacgcgttctcgaggaagaactgactgttcacttgtcagttcctggagatacaatcttgatcaacaaccggcccgggccacgggaacctcccccttatcaggagccacgaccccggggtaatccgccacactcagccccgtgtgttcccaatggatccgcgtatagtggagactacatggagcccgaaaagccgggcgcccctctgctgcccccccccccacaaaatagtgtgccgcactacgcggaagccgacattgtgactttgcagggcgtgacgggtggcaacacctacgcagtgccggccttgccacccggggccgtgggggacggaccaccacgcgtcgactttccacgctcgagattgcgcttcaaagaaaaactgggcgaaggccagttcggcgaggtgcatctatgtgaggtggattctccacaggacctggtctcgttagacttcccactaaacgtgcggaaaggccatccactgctggtagcggtcaagatcctgcggcctgacgctaccaagaacgctcggaatgatttcctgaaggaggttaagataatgtctaggctgaaggatcccaatatcatacgcttattaggagtatgtgtacaggatgatcctttgtgtatgatcacggactatatggagaatggtgacctgaaccagttcctttccgcccaccagttggaagataaggctgcagagggagctcccggggatggacaggcagctcagggaccgacaatctcttacccaatgctgttgcatgtcgccgcgcaaatcgcttctgggatgcgttacttggctacgctgaacttcgtgcatagggacttggcaacacgaaattgccttgttggagaaaattttaccattaagatcgcagacttcggaatgtctcgaaacctgtacgctggcgactattacagggtgcaaggaagagccgtgctcccgatccggtggatggcctgggaatgtattctgatgggcaagttcaccactgcctcagacgtatgggcattcggggtcacgctctgggaggttctgatgctttgccgggcccagccattcggtcaactgaccgacgagcaagtaattgagaacgccggggagtttttcagggatcagggacgccaggtgtatttgagccgtccaccagcctgtccacagggcctttatgagctgatgctgagatgctggagcagggagtcagagcaaagaccaccattttcccaactccatcggtttctggcagaagatgccctgaataccgtgtag

SEQ ID NO: 9784 - DNA, 237 bp, synthetic construct
  misc_feature 1..237: note = source = /note="Description of Artificial Sequence: Synthetic coding sequence"
  source 1..237: mol_type = other DNA
atgggcagcggcctgcccctggtgctgctgctgaccctgctgggcagttcccatgggacaggccccggcatgacactgcagctgaaactgaaggagtcctttctgactaacagctcctacgaatcctcctttctggaactgctggaaaagctgtgcctgctcctgcaccttccttctggcacatccgtgactcttcatcacgcacgtagccaacaccacgtggtctgcaacacgtag

SEQ ID NO: 9785 - DNA, 2631 bp, synthetic construct
  misc_feature 1..2631: note = source = /note="Description of Artificial Sequence: Synthetic coding sequence"
  source 1..2631: mol_type = other DNA
atgggccccgaggccctgagcagcctgctgctgctgctgctggtggcaagcggcgatgctgatatgaaggggcactttgaccctgccaaatgtaggtacgcgctcggcatgcaagatcgcacgatacctgactccgatattagtgcctcgagctcttggtcagacagtacagcagcccgacattcccggctagaaagctcagatggcgacggggcctggtgtccagccggctccgtttttcccaaggaggaagagtatctccaggtcgacctacagcggttgcacctggtagccttggtaggtactcagggccgccatgctggcggcctgggaaaagaattcagcaggagctaccgcctccgttactcacgagacgggcgtcgctggatggggtggaaagacagatggggtcaagaagttattagtgggaatgaagatccggaaggtgtagtgctgaaggatctagggccccccatggtggcgcgattggtgcgattttacccgagagcagaccgggtgatgtctgtgtgcctccgcgtcgagctatacggctgcttatggcgcgatggactgctgtcctacactgccccagttgggcaaaccatgtacctgtctgaggccgtctatctaaatgattctacgtacgatggtcacaccgtcggcggactgcagtacgggggcctgggacagctggccgatggcgtggttggcctggatgattttcggaaaagtcaggagctgagagtttggccgggctacgactacgtgggatggtccaatcactcattctcatccgggtatgtggaaatggaattcgagttcgatcggttgcgcgcatttcaggccatgcaagtccattgcaacaacatgcacactttaggtgctcgactccctggcggcgtggaatgccgtttccgccggggcccggccatggcttgggagggcgagccgatgcggcacaacctaggcggaaacctcggagaccctcgggcacgtgccgtcagtgtcccactaggcggccgtgtggcccggtttctgcagtgccgcttcttgttcgccggcccctggctcctgttcagcgaaataagctttatatccgatgtagtaaataattcctctcccgctctgggcggtacattcccccccgctccctggtggcctccggggcccccacctactaacttctcatctctggaactggaacctcggggtcagcagccagtggcgaaggctgagggctcccccaccgccattctcatcggttgccttgtggctataatcctcctactgcttttgattatcgcgttgatgctgtggaggctgcactggcgaagacttctctccaaagcagaacgccgcgtcctggaggaagagttgacagtgcatctgagtgtgcctggcgacacaatactaataaataatcgtcctggtccccgcgagccccccccttaccaggagccccgtccacgggggaatccacctcattccgctccgtgcgtcccgaatggcagtgcctacagtggagactacatggaaccagagaaaccgggagctcctttactgccacctcccccccagaattctgtcccacactatgcagaggctgacatagttaccctacagggcgtgactggaggcaacacctacgcagttccagctcttccacccggcgcggtcggcgatggccctcctcgggtcgacttcccccggagtcgtctgcgatttaaggagaagctcggagaaggccaattcggagaggtacatctctgtgaggtggactcaccccaggacctggtgtccctggacttccctcttaatgtgagaaagggccatccactgctagtcgctgtgaagatactgcgccccgatgccaccaagaatgccagaaacgatttccttaaagaggtgaagattatgtcacgtttaaaggacccaaatattatcaggctgttaggcgtttgtgtgcaggatgatccactctgcatgataaccgactatatggaaaacggggacctgaatcagtttctgagcgcgcaccagctcgaagataaggccgccgagggcgcaccaggggacggacaggcggctcagggccctactattagctatcccatgttgttgcacgtggccgcccagattgcgtcaggcatgcgatacctcgccactttgaattttgtacatagggacctcgctactaggaactgtctggtgggtgaaaattttacaatcaagattgccgattttgggatgtcccgaaacctatacgccggcgattattacagagtacagggccgcgctgtcctcccaatccggtggatggcctgggagtgcatcttaatgggcaagttcacgaccgcctctgatgtgtgggcgttcggcgtcaccctctgggaggttctgatgctgtgccgagctcagccctttggccagttgaccgacgagcaagtgatagaaaacgctggggagttctttagggaccagggaaggcaggtgtacctcagcagaccccccgcctgtcctcagggactgtacgagttgatgctgcgctgctggtctagggagtcagagcagaggcctccattcagtcagctgcacagattcctggctgaggacgctttaaacactgtttag

SEQ ID NO: 9786 - DNA, 1257 bp, synthetic construct
  misc_feature 1..1257: note = source = /note="Description of Artificial Sequence: Synthetic coding sequence"
  source 1..1257: mol_type = other DNA
atgcggaccctgttcaacctgctgtggctggccctggcctgcagccctgtccacacaacactctcaaagtcagacgccaagaaggcggcttcgaaaaccttgttggagaaggtgaaattctgttcatgctgtccaggatggagtgctatggctaggtcctggctcaccgccaccagcgcgacacagtctcaattctccgacaagcccgtgcaagaccgaggtttagtggtgaccgacctgaaggctgagtccgtcgtgctggagcaccggagctactgttccgctaaggcccgcgaccgacactttgctggagacgtccttggctacgtcacaccatggaactcccacggttatgacgtaactaaggtcttcgggagcaagttcacccagatttcaccagtatggctacaactgaagcgccggggacgggagatgttcgaagtaactggcctacatgatgttgatcaaggatggatgcgcgcagtcaggaaacacgcaaaaggtctccacatagtgccacgtctactctttgaagactggacctacgacgattttcggaacgtgttagacagtgaagatgagattgaagagctgtccaaaacggtagttcaggtggcaaagaatcaacacttcgacgggtttgtcgttgaagtgtggaatcaactgctatctcagaagcgcgtaggcctgatccatatgctgactcatttggccgaagcactgcaccaggcaagactgctggccctccttgtcatccccccagcaataactccagggactgaccagttgggcatgtttacgcataaggaattcgagcagcttgcccctgttctcgacggcttcagtctcatgacttacgattatagtacagcacaccagcctggaccaaatgctccactgagctgggtgagggcgtgcgtacaggtgctagatcccaagtccaagtggcgttccaaaatactactaggtctcaatttctacgggatggactacgccaccagcaaagacgccagagaacctgtggtgggcgcgcggtacatccagactctcaaagaccatcggccaagaatggtgtgggacagtcaggcaagcgaacatttctttgagtacaaaaaaagcaggtctggcagacacgtcgtgttttatccaaccctaaaatcccttcaagttcgcctcgagctggcccgggaactaggtgtcggtgtcagtatatgggaactgggtcaggggctcgattacttttacgatctcctgtag

SEQ ID NO: 9787 - DNA, 390 bp, synthetic construct
  misc_feature 1..390: note = source = /note="Description of Artificial Sequence: Synthetic coding sequence"
  source 1..390: mol_type = other DNA
atgcggaagccccggcggaagagccggcagaacgccgagggccggcggtcacctagtccctacagcctcaagtgttctcccacacgagaaaccctgacctacgctcaagcccaaagaatcgtcgaagtcgacatcgacggtagactacatcgaatatctatttatgaccctttgaaaattataaccgaagacgaattaaccgcacaggatatcacagagtgtaattccaataaagagaactcagaacaaccacagttccccggcaagagtaagaaacccagctctaaaggtaagaagaaggaatcatgcagtaagcatgctagcggaacaagtttccaccttcctcagccaagctttcgtatggtagactctggaatacaaccagaatag

SEQ ID NO: 9788 - DNA, 315 bp, synthetic construct
  misc_feature 1..315: note = source = /note="Description of Artificial Sequence: Synthetic coding sequence"
  source 1..315: mol_type = other DNA
atgcgggtggtgaccatcgtgatcctgctgtgcttctgcaaggccgccgaattgcgcaaagcctcccctggctctgtgaggagtagggtcaaccatgggagggccggtggggggaggcgaggtagcaacccggtgaagaggtacgcaccgggcctgccatgtgacgtgtacacttacttacatgaaaagtacctcgattgccaggagcggaagcttgtgtatgtcctgccggggtggccccaggacctgctgcatatgctgctggcgcgaaataagattcggacgctgaagaataacatgttctccaaattctag

SEQ ID NO: 9789 - DNA, 639 bp, synthetic construct
  misc_feature 1..639: note = source = /note="Description of Artificial Sequence: Synthetic coding sequence"
  source 1..639: mol_type = other DNA
gacttcggctactgcccccgggtgtactgcgagaaccagcccatgctccctattggtgttctagtgatggtgggattcacagttggtaaagtgccagtgccggacattcgcacatgccacttttgcttggtcgaagatccctctgtgggatgcatcagtggaagcgagaaatgcactatcagttcgagctcactgtgcatggtcattacgatctactacgatgtcaaggtccgctttatagtacgggggtgcggccagtacatttcctatcgttgccaagagaaacgcaacacgtacttcgcagagtactggtatcaggcacagtgctgccagtatgattattgtaactcttggagctctcctcagctgcaatccagcctcccagagcctcacgaccgtcctctcgccctgcccctctcagactctcagatacagtggttttaccaggcactgaatctctcactaccactacctaactttcacgccggcacagagcccgacgggctagaccccatggtcacgctgagcttgaacctcggcctctccttcgctgagctgagaaggatgtacctcttcttgaattcctccggccttctcgtcttaccgcaggctggacttctgactccccatcccagttag

SEQ ID NO: 9790 - DNA, 1005 bp, synthetic construct
  misc_feature 1..1005: note = source = /note="Description of Artificial Sequence: Synthetic coding sequence"
  source 1..1005: mol_type = other DNA
atgctggccctggccaagatcctgctgatcagcaccctgttctactctctgctctcaggctcacacggcaaggaaaatcaggatattaacaccacacagaatattgccgaagtcttcaagactatggagaataaacccatctccctcgagagcgaggcaaatctcaactccgacaaggagaatataaccacctctaatttgaaagcttctcacagccctcccctcaatctgccaaataatagccacgggatcaccgatttttcttcaaactctagcgccgagcattctttgggtagtctcaagcctacctctactatcagcacctctcctccactgattcatagttttgtatcgaaggttccatggaacgctcctattgctgacgaagatctgcttcccatttctgcacaccctaatgctaccccggcgctgagttcggaaaactttacctggtctctcgttaatgacacagtgaagacccccgataacagctccatcacagtttccatcctgagctctgaacctaccagtcccagtgtaactccactgattgtggagcctagcggctggctcactacaaattctgactccttcactggctttacaccgtatcaggagaaaacaaccctgcagcccaccctgaagtttactaataattccaagctgttcccaaatacgtctgatcctcagaaggaaaacaggaataccgggattgtgtttggggccattcttggcgccatcttaggagtctctctgctgactcttgttggatacctcctgtgcggtaaacggaaaacggatagctttagccatcgcaggttatacgacgacagaaatgaacctgtgctgaggcttgacaacgctcccgagccttatgacgtctcctttggaaactcttcctattacaatcctactctcaatgactcggctatgcctgagtccgaggagaatgcacgggatggtatcccaatggacgatatcccacccctgcggacgagtgtctag

SEQ ID NO: 9791 - DNA, 987 bp, synthetic construct
  misc_feature 1..987: note = source = /note="Description of Artificial Sequence: Synthetic coding sequence"
  source 1..987: mol_type = other DNA
atgggccccgccggctgcgccttcaccctgctgctgctgctgggcatctcagtctgcgggcagccagtgtatagcagccgagtagtcgggggacaggacgctgctgctggaaggtggccttggcaagtgtctttgcacttcgaccacaattttatttgtgggggaagcttagtaagtgaaaggcttatactcaccgcggcccactgtatccaacccacatggactacgttttcctacaccgtgtggttgggctctatcacagtgggggacagcagaaagcgggtcaaatactatgtgagcaagatagtaattcacccaaagtaccaagatacaaccgcggacgtcgccctgcttaaacttagttcccaggttactttcacaagtgctatcttaccaatatgtcttccttctgttactaagcaactggctattccacctttttgttgggtaactggctggggcaaagtgaaggaatcctctgacagagattaccactccgcattgcaagaagctgaggttcccatcattgatcgccaggcgtgtgaacaattgtataatccaatcggaatattcctgccagcgcttgaacctgtgattaaggaggacaaaatctgcgccggggacacccagaacatgaaggatagctgtaagggcgactccgggggtccattgtcgtgccacattgacggcgtttggatacagacaggcgtcgtgtcatggggccttgagtgcggtaagtctctgcctggcgtctacacgaatgtcatctactatcagaaatggatcaatgctactatctctagggcaaataatctggatttctctgatttcctgttccctattgtgctgctttccttggcccttctcagaccttcatgtgcctttggccccaacacaatccatcgggtcggaacagtggcagaggccgtggcttgtatccagggttgggaagaaaatgcgtggcgattttcgccacgtggcagatag

SEQ ID NO: 9792 - DNA, 453 bp, synthetic construct
  misc_feature 1..453: note = source = /note="Description of Artificial Sequence: Synthetic coding sequence"
  source 1..453: mol_type = other DNA
atgcggttcatggccggccccgccggcagccagagcctgggccccctgtgctttcactcgtcaccacaggcactttacactgtgctgctgattgtactcgtcatgatgtcactcgtcttcgggaagttcgtgccagtcaattgggagccgccccagcctctaccatttcccaagtaccttcggtgctatagatgtctccttgagacaaaggagcttggctgcctgctgggttctgacatctgcctgacacctgccggctcttcgtgcattaccctacataaaaagaatagttccggctccgatgtgatggtgtctgactgtcggagcaaagaacagatgtcagactgcagcaacacacggacaagccctgtcagcgggttctggattttctctcagtactgtttcctcgatttctgcaacgatcctcagaacaggggactgtataccccttag

SEQ ID NO: 9793 - DNA, 234 bp, synthetic construct
  misc_feature 1..234: note = source = /note="Description of Artificial Sequence: Synthetic coding sequence"
  source 1..234: mol_type = other DNA
atgcgggtggccggcgccgccaagctggtggtggccgtggccgtgtttctgcttaccttctatgtgatcagtcaggtgtttgaaatcaaaatggacgcttccctgggaaacctcttcgcaagatcagccctggatacggcagcccgctcaactaaacccccacggtacaagtgcgggatctctaaagcatgtcccgaaaagcactttgcctttaaaatggcctcaggagcatag

SEQ ID NO: 9794 - DNA, 1143 bp, synthetic construct
  misc_feature 1..1143: note = source = /note="Description of Artificial Sequence: Synthetic coding sequence"
  source 1..1143: mol_type = other DNA
atggccctgacccccggctggggcagcagcgccggccccgtgcggccagagctgtggctcctactatgggcagctgcctggagactgggcgccagcgcttgcccagctctgtgcacatgcaccgggactacggtggactgccacggcaccggtcttcaggcaatccccaagaatatcccacgaaataccgaacggctcgagctgaatggcaacaacattacccggatacataagaacgattttgctggactgaagcagctgagggtactgcagctcatggaaaatcagatcggcgctgttgagcgcggcgcctttgatgacatgaaagaacttgagagattggacttaagcgagaacgcaatccaggccatcccacgcaaagcgtttagaggggctacagaccttaagaatttacaattagacaaaaaccagatcagctgcattgaagaaggggcctttagggcactgagggggctcgaagtgttgacgctgaataacaataacattactactatccctgtaagtagtttcaatcacatgccgaaactcagaacattcaggctacattcaaaccatctgttttgcgactgtcacctcgcgtggttgagccagtggctgaggcagcgaccaacaatcggtctgttcactcagtgtagtgggccagcctccctgcgaggtctcaatgtggccgaggtgcaaaaatcagaattttcctgtagcggtcagggtgaagctgggagggtacctacatgcaccctcagctccggatcttgccccgctatgtgtacctgttctaacggtattgtcgactgcagaggtaagggactgacagcaattccagcaaacctccctgagactatgactgaaatcaggcttgagctaaatgggataaaaagcatcccgccaggagcctttagtccttatcggaaactgagacgaattgatctgagtaacaaccagatagccgagattgcccccgacgcgttccaggggttgcgctctctgaactccctcgtactgtatggcaacaagataaccgacttgcctcgcggagttttcggaggactttacaccctgcaattgcttcttcttaatgcaaataagataaattgcatccgaccggacgccttccaggacttgtag

SEQ ID NO: 9795 - DNA, 558 bp, synthetic construct
  misc_feature 1..558: note = source = /note="Description of Artificial Sequence: Synthetic coding sequence"
  source 1..558: mol_type = other DNA
atgcccggctggctgaccctgcccaccctgtgccggttcctgctgtgggcctttactatctttcataaagctcagggggatcccgcttcccaccccggtcctcattacctgctgccccccatccacgaagtaatccattcacaccgcggagcaacggctaccttgccgtgtgtcctggggacaacgcctccttcttataaggtcagatggtcaaaagtagaacctggggaattaagggagacgcttatcctgattaccaacggactccacgcacgaggatacgggcctttggggggacgcgcgcgtatgagacgcggtcatcggctggacgccagtcttgttattgccggtgtacgactggaagatgagggtcgctaccgctgtgagctaattaatggcatcgaagatgaaagtgtggcccttacactttccttagagggagtagtatttccatatcagccatccaggggaagataccagttcaactattacgaagctaaacaagcatgtgaggagcaggatggcaggctggccacctactcccaactctatcagtag

SEQ ID NO: 9796 - DNA, 375 bp, synthetic construct
  misc_feature 1..375: note = source = /note="Description of Artificial Sequence: Synthetic coding sequence"
  source 1..375: mol_type = other DNA
atgctgatgctgttcgtgttcggcgtgctgctgcacgaggtgagcttgtctggccagaatgaagcaccacccaacacccattccatcccaggcgaaccgctctacaactacgctagtattagactacccgaggaacatattcctttctttctccacaacaaccggcacatagcaacagtctgccgcaaggactcactctgtccctataagaagcacctggaaaagctgaagtattgttggggctacgaaaagtcgtgcaagcccgagtttagatttgggtaccccgtatgcagctacgtggatatgggctggacagacacgttggagagcgcagaagacatcttctggaaacaggctgatttcggctatgcctag

SEQ ID NO: 9797 - DNA, 5859 bp, synthetic construct
  misc_feature 1..5859: note = source = /note="Description of Artificial Sequence: Synthetic coding sequence"
  source 1..5859: mol_type = other DNA
atgcccgccctgggccccgccctgctgcaggccctgtgggccggctgggtgctgacgctgcagcccttgccaccaactgcctttacccccaacgggacataccttcaacatctggccagggaccctacatccggaacactgtacctgggagccaccaacttcctgtttcagctgtcgcctgggcttcaactggaagctacagtgtcaacaggacctgtgctggattcccgggattgcctcccccctgtgatgcctgatgaatgcccccaggcccaacccaccaacaaccccaatcagctgttgctcgtcagtccgggcgcactcgtggtttgtggctcggtccatcagggtgtgtgtgagcagcgccggctgggccaacttgaacaactattgcttcggccagagcggccaggggacactcagtatgtagcagccaatgacccagcagtgtctacagtgggactggtcgctcagggattggctggtgagccactgctttttgtggggcgcggatatactagtaggggtgtcggaggcggaatccctcccattactacacgagccttgtggccgcccgatccccaagccgctttctcatatgaggagaccgccaaactcgcagttggccgacttagcgagtacagtcatcactttgtgtctgccttcgctcgaggtgccagcgcttactttctgtttctcaggagagacctccaagcccagagccgggctttccgggcttacgtgtcgcgcgtgtgcctacgggatcaacactattattcatatgtggaactgccgctcgcctgcgagggcggtcggtatggcctgattcaggccgccgcagttgccacatcacgcgaggtcgctcatggcgaagtgctttttgctgcttttagctccgccgctccaccaaccgtggggcgaccgcccagtgcagccgccggcgcctccggggcctcagctctgtgtgcattccctctggacgaggtggataggctggccaaccggactagggacgcgtgctatacccgagagggaagggctgaagatggtacagaggtggcctatatcgagtatgacgtgaacagcgactgtgcccagctccctgttgatactttagacgcttatccatgcggttcagatcataccccgagtcccatggcctcccgtgttcccctggaggcgacccctatccttgagtggcccggcatccagcttaccgccgtggctgtcaccatggaggatggccacaccatagcgttcctgggagactcccaaggacagttgcaccgtgtgtatctgggcccaggctctgacggccacccttatagcacccaatccatccagcagggaagcgctgtctctcgcgatttgaccttcgacggcacatttgagcacctttacgtcatgacccagtcgacgttgttgaaggtgcccgttgccagctgtgcacagcacctggattgtgcctcctgtcttgcgcaccgggatccctattgcggctggtgcgtcttattggggcgctgcagtaggcggtctgagtgctctcgagggcagggccccgagcagtggttgtggagctttcagcctgagctcggttgtctgcaggtcgcagcaatgtcacccgcaaatatctctagagaagagaccagggaagtgtttctgagtgtgccagacttgcctccgttatggccaggagaaagctattcgtgccattttggggagcaccagagtcccgcactgcttacgggtagcggggtgatgtgccctagccccgatccctcggaagctccagtcctgccacgcggagccgattacgtgtccgtctctgtcgaactccgtttcggtgctgtagtgatagctaagacatctctaagtttctatgattgtgtagccgttaccgagctgcggccatctgctcaatgtcaggcttgtgtgtctagtagatggggctgtaattggtgtgtctggcaacatctctgtacccacaaggccagctgtgatgccggccctatggtggccagtcaccagagccctttagttagcccagacccccctgccaggggtgatggggattccgcggagctagaaggacctcctgccccgctgatcctgccatcaagcctggactaccagtacgatactcccggcttatgggagctggaggaagctaccctcggtgcctcttcctgtccatgcgttgagtccgtccagggcagtacccttatgcccgtgcacgtggagagggaaatcagactcctggggcgaaatttacatctgttccaggacggaccaggcgacaatgaatgtgtaatggaactcgaaggcctggaggtggtcgttgaagccagggtggaatgcgagccgcctccggacacccagtgtcatgttacatgtcagcaacaccagctttcatacgaggctctgcagcctgaactgcgcgtcggattgtttttacggcgggcaggccgccttcgagttgattcagctgaggggttgcatgtggtgctatatgattgcagcgttggccatggggattgcagccggtgtcagacagccatgcctcagtacgggtgcgtttggtgtgagggtgaacgcccaaggtgtgttacccgggaggcatgtggtgaggccgaggctgttgccacacagtgtccggcacccttaattcactcggtggaacccctgaccggtccagtggatggaggtactagagttaccattagagggagcaatttaggacaacatgtccaggatgtcctgggcatggttacagtcgctggagtgccatgcgcggtggacgctcaggaatacgaagtttccagctcactggtttgcattacaggagcatcaggggaggaggtcgctggggccacagcggttgaggtccccgggagagggcggggtgtgagcgagcacgatttcgcttatcaggatccaaaggtgcattccatttttcccgctcggggcccgcgggccggtgggacacgcctcacgctcaatggtagtaaactgttaacagggagacttgaggatatccgggttgttgtgggcgatcaaccatgtcatctcctcccagaacagcagtctgagcagcttagatgtgagacatccccccggccgacacccgccactctcccagttgctgtctggttcggcgctaccgagcggcgactgcaaaggggccaatttaaatacactctagatcccaacatcacatccgccggccccacgaagtcattcctgtctggggggagggaaatctgtgtgagaggacaaaatctagacgtcgtgcagactcccagaatccgagtgaccgtagtcagccgcatgctgcagcccagtcagggcctcgggcggcgccgaagagtggtccccgagactgcctgcagcctgggaccctcatgcagctctcagcagtttgaggagccgtgtcacgtgaactcatctcaattgataacatgtagaactcctgctctaccaggtcttccggaagacccctgggtccgggtggaattcatcctcgacaacctcgtcttcgacttcgcaacgttaaatcctaccccatttagctacgaggctgacccgaccctccaaccacttaatccagaagatccgacgatgccttttcgacataaacccggcagcgtctttagtgttgaaggggagaaccttgacctcgcaatgagcaaggaggaagttgtcgccatgatcggagatgggccatgtgttgtgaaaaccctcacacgccatcacctgtactgcgaaccaccagttgagcagccgcttcctcggcatcacgcactgcgggaggctccagactcgctccccgagttcactgtacaaatgggaaacttgcggttctctctgggtcacgtgcagtatgacggtgaaagtcccggcgcctttcccgtggcggcacaggtgggacttggtgtgggcaccagccttctggctttaggcgtgattataattgtgctgatgtacagaagaaagtctaagcaggccctccgcgattataaaaaggtgcaaattcagcttgagaacctcgaatcgagtgtgagggatcgctgtaaaaaggagttcactgatttgatgaccgagatgaccgatctcacttcagacctgctgggttccggcatccccttcctcgattataaggtctatgcagagagaatcttctttccaggtcacagagagagccctctgcacagagaccttggagtgccagagtcccgccgccccaccgtcgaacaggggcttggtcagttgagcaatctgctgaactctaagttattcctgaccaaattcatccacacccttgagtcccagcgcactttcagtgcccgcgaccgagcctatgtcgcgtcccttcttactgtggcactacacggaaaactcgagtattttactgacatactacgtactctactttcggatctggttgcccaatacgtggcaaaaaaccccaaactgatgctacggcggactgagacagtggtagagaagctcctgacaaattggatgtctatctgcctgtacacgtttgtgcgcgactctgtgggggaacccctgtatatgcttttccgggggattaagcaccaggtcgacaaagggccggttgacagtgtgaccgggaaggctaagtacactctgaacgataatagactgttgcgtgaagacgttgaatacagaccactcaccctcaacgcattactggcagtgggtccaggcgctggagaggctcagggagtgcccgttaaagtgctggattgcgatacaataagtcaggcaaaagaaaagatgctggaccagttatacaaaggggtccctctgactcagaggcctgatcctagaactctcgacgtggaatggcggtccggagtggctgggcacctgattctgagtgatgaagatgtcacgtctgaggtccaagggctctggagaagactcaacacacttcaacactacaaggtgccggacggcgcgactgtggcactggtgccatgcctcacgaaacacgtcctgagggagaatcaggactatgtccccggagagaggacccccatgcttgaagatgttgatgagggcggaatccgaccatggcatctggttaagccttctgatgaacccgagcctccgcgtccccggcgcggctcactcagaggcggggaaagagagcgcgctaaggctatccccgagatttacctgacaaggctgttgagcatgaagggaaccttacaaaagttcgtcgacgacctttttcaagtgatcttaagcacctctagaccagtcccgctggctgtcaaatatttttttgatctgttggacgagcaggcacaacagcacgggatctccgatcaagataccatacacatctggaagacaaactcacttccactgagattttggatcaatattattaagaaccctcaattcgtctttgacgtacagacatccgataacatggacgcagtgttgttggtcatcgcccagactttcatggacgcctgtacacttgccgatcataagctgggccgcgattcgcccattaataaactcttgtatgcccgggacatcccaagatataaacgaatggtggagagatactacgccgatatccgacagacagtgcccgcttctgaccaggaaatgaacagcgtcctcgctgaattgtcctggaactactccggtgacctcggggcccgggttgctctgcacgagctgtataaatatatcaataagtactacgaccagattatcacagccctggaagaagacggcacggctcaaaagatgcagttaggctacagattgcaacagattgccgctgctgtagagaataaggtgactgatctatag

SEQ ID NO: 9798 - DNA, 612 bp, synthetic construct
  misc_feature 1..612: note = source = /note="Description of Artificial Sequence: Synthetic coding sequence"
  source 1..612: mol_type = other DNA
atgcggaccgtggtgctgaccatgaaggccagcgtgatcgagatgttcttagtgttattggtgactggggtacactcaaataaggagactgcaaagaagattaagcgccctaagttcaccgtgccccagatcaactgtgacgtgaaggcaggcaagataattgaccccgagttcatcgttaaatgtcctgcaggctgccaggacccaaagtaccacgtctatgggacagacgtgtacgcttcatattctagcgtctgcggggcggccgtgcattccggagtgttagataactccgggggtaagatcctggttcgaaaggtggccgggcagtcgggatataaggggtcatattccaatggagtgcaatcactaagtctcccgagatggagagaaagcttcattgtcttggaaagcaagcctaagaagggcgtgacgtatccctcagctctgacgtattcctcctcgaagagtcccgctgcgcaggctggcaagtgtagccgggtcattgaatcaaagcccagcgagtccatgaatacgcgtagagtgttgggcgatagcggagagatcaatattctcacggggcaggcccctctggcactcgccattttctag

SEQ ID NO: 9799 - DNA, 2511 bp, synthetic construct
  misc_feature 1..2511: note = source = /note="Description of Artificial Sequence: Synthetic coding sequence"
  source 1..2511: mol_type = other DNA
atggagacccaggagctgcggggcgccctggccctgctgctgctgtgtttctttacatctgcttctcaggaccttcaagtaattgatctgctgaccgtcggggagtcccgccagatggttgcagtggccgagaagattagaactgcccttctgaccgctggcgacatctacctcctctcaacttttaggctcccgcctaagcagggcggggtgctattcggtctttattcccgacaagataacacccgatggctggaagccagtgtagttggcaagatcaataaagtgactaacgcgctgcattctatattaggcgagcaaacaaaggctctggttacccagctgacactgttcaaccagatcctggttgaactgagggacgatatcagggatcaagtgaaagagatgagccttatccggaacacaattatggaatgccaagtctgtggctttcacgagcagagatcccattgttcaccaaacccatgttttcgcggggtcgactgcatggaggtatatgaatatccaggttaccgctgtggaccctgccctcctggtctccagggcaacgggacccactgcagtgacataaacgagtgtgctcacgctgatccttgttttccaggatctagctgcatcaataccatgcccggctttcattgcgaggcttgcccgaggggctataagggcacccaggtgtcgggagtcggcatcgactatgctagggcttcgaagcaggtttgtaatgacatcgacgagtgcaacgacgggaataacggcggctgcgatccaaattcgatttgtactaatacagtcggttctttcaagtgcgggccctgccgacttgggtttctgggaaatcaatcccaggggtgcctccctgctcgcacttgtcattctcctgctcattcaccctgtcatattcatgcgcattgcctcttcgagaggaacggcgccgtgtcttgccagtgtaatgtgggttgggctggcaacggcaatgtttgtggcacagacactgatattgacgggtatcccgaccaggctctgccatgcatggataacaacaaacattgtaaacaagacaactgcctgctgacccccaactccggtcaggaagatgctgacaacgacggggtgggggatcagtgcgatgacgatgccgatggagatggaataaaaaacgtcgaggacaactgtagacttttccccaacaaagatcagcaaaacagtgatacagactccttcggcgacgcctgcgacaactgtcctaatgtgccaaataacgatcagaaagatactgatgggaatggtgagggcgatgcgtgcgataacgacgtggatggggatggcattcctaatgggttagacaactgccccaaggtgcccaatccactgcagaccgatcgggatgaagacggggtgggagacgcttgtgactcctgcccagaaatgtctaatccaacccagaccgatgcggactcagacttggtgggagacgtctgcgacacgaacgaggacagcgacggggatggacaccaagatacgaaagacaattgcccccaattaccaaacagtagccagttagacagtgataacgatggcttaggcgacgagtgcgacggcgatgatgataacgacggcattcctgattatgttccccccgggcccgacaactgccggctagttccaaaccctaaccagaaggactctgatgggaacggagtcggcgatgtgtgtgaagatgatttcgacaacgatgccgtggtggacccattggatgtgtgtccagagtccgcagaggtgacactgaccgatttccgggcataccagaccgtggtgctcgatccggaaggcgatgcacaaattgatccgaattgggtggttctgaaccagggtatggaaatcgttcagaccatgaatagcgatcccggcctggcggtcggctacaccgccttcaacggcgttgatttcgagggcacattccatgtgaacaccgtgaccgatgatgactatgccggctttctgttctcataccaggacagtggccgtttctacgtagtgatgtggaaacaaactgagcagacttattggcaggccaccccattcagagcagtggcccagcctggcttgcagctgaaggccgttacgtccgtaagcggaccgggcgagcacctccgcaacgcactgtggcatacaggacacaccccggatcaggtgcgacttctgtggactgacccaaggaatgtgggctggagggacaaaaccagctacaggtggcagctgttacacaggccgcaggtgggctacatccgcgtcaagctctatgagggtccccagttagtagcggactctggagtgattattgatacctccatgagaggcgggcgcttgggtgtcttctgtttctctcaggagaatattatctggtcaaatctgcagtaccggtgtaatgatacagttcccgaggacttcgagcctttccggcggcagctcttgcagggtcgcgtctag

SEQ ID NO: 9800 - DNA, 1311 bp, synthetic construct
  misc_feature 1..1311: note = source = /note="Description of Artificial Sequence: Synthetic coding sequence"
  source 1..1311: mol_type = other DNA
atgtggcggtgccccctgggcctgctgctgctgctgcccctggccggtcacttagcgttgggcgcacagcagggtcgcggacggagggagctggccccaggactccacctaagggggattcgtgacgccggaggcaggtattgccaagaacaggatctctgttgccggggacgggccgacgactgtgccctgccatacctcggcgcgatttgctactgtgatctgttctgcaacagaactgtgagtgactgttgccctgatttctgggacttttgcctgggcgtacctccccctttccctccaattcagggatgcatgcacggtgggcggatctaccctgtgctcggaacatactgggataactgtaatcgatgctggcaggccgggaaccactctgccttttggggaatgacattggacgagggtattagatatcgccttggcactattcgtccttcatcttccgttatgaatatgcacgagatctatactgtgttgaaccccggcgaggttttaccaacggcattcgaggcttcggaaaaatggcccaacttaatccacgagccactggaccagggtaactgtgctggcagttgggccttctcaactgccgcagtcgcctccgaccgtgtctccatccacagtcttgggcacatgacacctgtgctttcaccccagaacctgctctcctgtgacactcaccagcagcagggatgccggggaggacggctggatggcgcttggtggtttctgagaaggagaggcgtggtgtccgatcattgctaccccttctcaggacgcgagagggatgaggccggccccgcccccccatgcatgatgcattccagagccatgggccggggcaagcgacaggccactgctcactgtccaaactcgtacgtaaacaataatgatatataccaagtaaccccggtctaccgcctggggtctaacgacaaagaaatcatgaaagaattgatggaaaacggcccagttcaggctctgatggaagtccatgaggatttcttcctgtacaaagggggtatctacagtcacacacccgtttcattgggcagaccagagaggtaccggcgtcacggaacccattccgtcaaaatcacgggctggggcgaggagacactgccggatgggagaaccctgaaatattggacagcagcgaacagctggggccctgcctggggggagcgcggacatttccggatcgtccggggagtcaacgagtgcgatatcgagagcttcgttctcggcgtttggggtcgcgtcggaatggaggatatgggtcaccattag

SEQ ID NO: 9801 - DNA, 942 bp, synthetic construct
  misc_feature 1..942: note = source = /note="Description of Artificial Sequence: Synthetic coding sequence"
  source 1..942: mol_type = other DNA
atgagcgacctgctgctgctgggcctgatcggcggcctgaccctgctgttgctgctcaccctcctcgcttttgcaggctacagcggcctgttggccggagttgaagtatcggcaggatcacctccgataaggaatgttacggtggcttataagtttcacatgggtttgtacggcgagaccgggcggctctttactgagagctgctcgattagcccaaaactgaggtccatagcggtgtattacgacaatccccacatggtccctccagacaaatgtcgttgtgccgtcgggtctattctaagtgagggagaagaatcccccagtcccgaactcatagacttgtatcagaaattcgggtttaaagtgttctccttccccgcccccagccacgtcgtcaccgcgacatttccttacaccaccatcctgtccatctggctcgctactaggagggtgcatccagcacttgatacctatattaaggagcggaaattatgcgcttatccccggctagaaatctaccaagaagatcagattcatttcatgtgtcctttagctagacagggggatttctacgtgccagagatgaaggaaaccgaatggaaatggcgcgggttagtcgaggccatagatacccaagtcgatggaaccggagccgataccatgagcgatacctcatctgtctcacttgaagttagcccaggtagccgggagactagcgcagcaacattatcaccgggggccagttcccgtggctgggacgatggagatacccgaagcgaacactcatattctgagagcggggcttctggtagcagcttcgaggaactcgatctggagggagaaggaccattgggtgagtcacgtttagaccctgggaccgaacctttgggaaccacgaagtggctgtgggaacccacagctccggagaaggggaaagaatag

SEQ ID NO: 9802 - DNA, 213 bp, synthetic construct
  misc_feature 1..213: note = source = /note="Description of Artificial Sequence: Synthetic coding sequence"
  source 1..213: mol_type = other DNA
atggtggcccccgccgcccgggtgttcctgcgggccgtgcgggccgccttaacatccactgtgcctgatcttttatgcctcctggcccggggctcaccgcgcggcttggcttcgggacggctgcctcttgcagtccattccgctcagcacggccccggaagcggcgcaccatggttgaggatcgccaggagggccttaagtcagcggatctag

SEQ ID NO: 9803 - DNA, 642 bp, synthetic construct
  misc_feature 1..642: note = source = /note="Description of Artificial Sequence: Synthetic coding sequence"
  source 1..642: mol_type = other DNA
atggcccagctgttcctgcccctgctggccgccctggtgctggcccaggccccggcagctctagcagacgtgcttgaaggggattcctctgaagatcgtgccttcagagtaaggatcgcaggggatgccccactgcaaggagtcctaggaggtgctcttacaatcccatgccatgtccactatctcaggcccccccctagtcgacgggccgtgctgggttcccctcgggtcaagtggacattcctttctcgcggcagggaggcagaagtgctggtggccaggggggtcagagtcaaggtgaacgaggcatatagatttcgagtcgcactccctgcatacccagcatccctcaccgatgtgtccttggcattaagcgaattgaggcctaacgactccggtatttataggtgcgaggttcagcacggtatcgacgattcctcagatgccgtggaagtgaaggttaagggtgttgtttttctgtaccgggaaggctccgcccggtatgctttctcctttagcggggcccaggaggcctgtgccaggatcggagcacacattgccactcctgaacagttgtacgcagcctatctggggggctacgagcagtgcgatgcgggctggctcagcgaccagaccgtgtag

SEQ ID NO: 9804 - DNA, 237 bp, synthetic construct
  misc_feature 1..237: note = source = /note="Description of Artificial Sequence: Synthetic coding sequence"
  source 1..237: mol_type = other DNA
atgggcagcggcctgcccctggtgctgctgctgaccctgctgggctctagccatgggacaggtccaggcatgaccttgcagctgaagctaaaagaatcattccttacgaactcgtcctacgagagctcttttcttgaactcctggaaaagctttgtctacttttgcatcttccatccggcacaagcgtgacactacatcacgcccggagtcaacaccacgtcgtctgcaatacatag

SEQ ID NO: 9805 - DNA, 651 bp, synthetic construct
  misc_feature 1..651: note = source = /note="Description of Artificial Sequence: Synthetic coding sequence"
  source 1..651: mol_type = other DNA
atgagcgacctgctgctgctgggcctgatcggcggcctgaccctgctattgttgctcaccctcctggcgtttgcaggctatagtggactcctagcaggtgtagaggtctctgctgggagtcccccaataagaaatgtcaccgttgcatacaagtttcacatgggtctctatggggagaccggccggctgtttacagagagctgcagcatcagccctaagctacggagtatcgcagtctattatgacaacccccacatggtcccaccggacaagtgtcggtgcgcagtgggtagcatactctcagagggcgaggaatcacctagccctgagcttatcgacctgtaccagaagttcggattcaaagtattttcattccccgctccttctcacgttgtgaccgctacgtttccatatactactattttgagtatttggcttgctacccgccgagtccatccagctctggatacttacattaaggaaaggaagctgtgcgcctacccacggctggaaatttaccaggaagaccagatacattttatgtgtcccctggctaggcaaggagatttctatgtgcctgagatgaaagaaaccgagtggaaatggaggggactggtcgaagctattgatacgcaggtcgatggtacctag

SEQ ID NO: 9806 - DNA, 453 bp, synthetic construct
  misc_feature 1..453: note = source = /note="Description of Artificial Sequence: Synthetic coding sequence"
  source 1..453: mol_type = other DNA
atgcggttcatggccggccccgccggcagccagagcctgggccccctgtgctttcatagctcaccccaagctctgtacactgtactcttgattgttctggtgatgatgtctctagtgtttggcaaatttgttcctgtgaattgggagcctccgcagccccttccttttcccaaatacctgagatgctatagatgcctgctggaaacaaaggaacttggatgtcttttggggtccgatatctgcctgacacccgctggatcatcttgcattacactacataaaaagaattccagcggcagtgacgtcatggtgtctgattgtagatccaaagagcaaatgtccgattgttctaacacccgaacctcaccagtgtcaggcttctggatattttctcaatactgcttcttggatttttgcaatgatccacaaaatagaggcctctataccccctag

SEQ ID NO: 9807 - DNA, 171 bp, synthetic construct
  misc_feature 1..171: note = source = /note="Description of Artificial Sequence: Synthetic coding sequence"
  source 1..171: mol_type = other DNA
atgaagaccggcctgttcttcctgtgcctgctgggcaccgccgccgcaatccctacaaatgccagactcctgtcagatcactcaaagcccactgccgagactgtggcccccgataacaccgccatcccctcactcagggcagaagcagaagagaacgagaaagagacatag

SEQ ID NO: 9808 - DNA, 2346 bp, synthetic construct
  misc_feature 1..2346: note = source = /note="Description of Artificial Sequence: Synthetic coding sequence"
  source 1..2346: mol_type = other DNA
atggccgtggccgaggtgagccggacctgcctgctgaccgtgcgggtcttacaagcacaccgtctccctagcaaggacttggtgacgcctagcgactgctacgttaccctgtggttaccaacggcttgttctcatagactacaaacgcgcacagtgaaaaacagcagcagtccggtatggaatcagtctttccacttccgcatccatcggcagctgaagaatgtgatggaactcaaagtcttcgatcaggatttagtgactggtgacgatccagtcttaagcgtcttgtttgatgctggcactcttagggcaggggagtttaggagggagtcatttagtctctctccccagggggaaggacggcttgaagttgaattcaggctgcaaagcttggcggaccggggcgagtggctcgtgtcaaacggcgttcttgtcgctagagaactgagctgtctgcacgtccagctggaggagaccggcgaccagaaatctagcgagcatcgcgtgcagcttgtcgtgccaggcagctgcgaagggcctcaggaggcatcggtaggcactggcacattcagattccattgccccgcctgttgggagcaggagcttagcattcggctccaggacgccccggaggagcaactcaaggcaccactatccgccctgccttctggacaagttgtgagactggtgttccctacctcacaagaacctctgatgcgcgtcgaactcaaaaaggaggccggactgagagaactagcagttcgactcggttttggaccatgcgctgaagaacaggcattcctatctagacgcaagcaagtcgtggctgccgctctccggcaggcactccagctcgacggggatttacaggaggatgagattcccgtcgtggctatcatggcaacaggtgggggaattcgagcaatgaccagcctgtacggacagctggccgggctgaaggagctgggtctcctggattgcgtaagctacatcaccggcgcttctgggtccacctgggccctggctaatctttacgaggaccccgaatggagccagaaggacctcgcgggcccaactgagctgctcaagacgcaggtaaccaaaaataaattaggcgtactggcgccttcccagctgcaacgctacaggcaggagctggcagaacgggcccgcctgggttatcccagctgcttcaccaacctttgggccttgataaacgaggcactcctgcatgacgagcctcatgatcataagctcagcgaccagcgggaggcattgtcccacggtcagaaccccctcccaatatattgcgcactcaatactaagggacagagtctcactacgtttgaattcggagaatggtgtgagttttccccctacgaggtggggtttcccaagtacggagctttcataccttctgaattgtttggctcagagttttttatggggcaactgatgaaacgcctaccagagagtagaatatgctttctcgaaggcatttggagcaacttatatgcagctaatcttcaagattcactctactgggcctcagaaccgtcccagttttgggaccggtgggtgcgtaaccaggcaaacctcgacaaggagcaggtacctcttctgaagattgaagaacctccatcgaccgctgggcgtattgcagaattcttcaccgatctgttgacctggcgcccactggcgcaagccacacataactttctaagggggcttcactttcacaaggactactttcagcacccacacttcagcacctggaaggccaccaccttagatgggcttcctaatcagcttacaccttccgagccccacctgtgtcttttggatgttggatatcttattaacacctcatgtctcccattgcttcagcctacgagagacgtggacttgattctgagccttgactataatctgcatggtgcatttcaacagttgcaactgttgggccgcttttgtcaggagcagggtattccatttccacctatcagtcccagtccagaagagcaattacagcctagggaatgtcacaccttcagtgacccgacatgccctggcgcgcctgccgtcttgcatttcccgctagtcagcgatagctttcgggaatactcagcccccggagtccgcaggaccccggaggaggcagccgctggagaagtgaacctttcctcatccgatagcccttatcattacaccaaggtcacttactctcaagaagatgttgacaagttactgcaccttacccactacaacgtgtgcaacaatcaggaacagttattagaagccctgagacaggcagtccagcgccgccgacagagaaggccccactag

SEQ ID NO: 9809 - DNA, 219 bp, synthetic construct
  misc_feature 1..219: note = source = /note="Description of Artificial Sequence: Synthetic coding sequence"
  source 1..219: mol_type = other DNA
atggccgccgccacccggggctgccggccctggggcagcctgctgggactccttgggctcgtctcagccgccgccgccgcctgggatcttgcatctctgcgttgtacgctgggggcattctgcgagtgcgacttccgtcctgacttgccggagggttctgaagagcttggtcctagggagcctcactgcctgtggccacttcctctgccactcaggtag

SEQ ID NO: 9810 - DNA, 243 bp, synthetic construct
  misc_feature 1..243: note = source = /note="Description of Artificial Sequence: Synthetic coding sequence"
  source 1..243: mol_type = other DNA
atgaaggtgttcttcctgttcgccgtgctgttctgcctggtgcagaccaattccggggatgttcctccgggcattcgcaacacaatttgccacatgcaacaggggatctgccgcttattcttctgccactctggcgagaagaagcgcgatatatgttctgatccgtggaatcgatgttgtgtgagcaacaccgacgaagagggtaaagagaaacccgaaatggacggacgctccggaatctag

SEQ ID NO: 9811 - DNA, 861 bp, synthetic construct
  misc_feature 1..861: note = source = /note="Description of Artificial Sequence: Synthetic coding sequence"
  source 1..861: mol_type = other DNA
atgggccccgaggccctgagcagcctgctgctgctgctgctggtggcctcaggcgatgctgacatgaagggacactttgacccagctaaatgtcggtacgcactgggtatgcaagatcgaacaattccagatagcgatatttctgcatcaagtagctggtctgactccactgcagccagacacagccgtctagaatcgtcagacggcgacggtgcatggtgccccgctggaagtgtttttccaaaggaagaagagtacttgcaagttgatctacaacgacttcatctggtggccctggtgggtactcagggcagacacgccggtgggctcggaaaggagttcagccgcagctatagactcagatatagtcgcgacgggcggcggtggatgggctggaaagacaggtggggacaggaggtaatatctgggaacgaagatcctgaaggcgtcgtgctgaaggatctggggcctccaatggtagctcgtctcgtgcgcttctaccccagagcggaccgcgtgatgtcggtgtgtctgcgagttgaactgtacggatgcttatggcgtgacggcctcttgagctatacagcccccgtgggacaaaccatgtacctgagtgaggctgtttatcttaacgatagcacttacgatggacacacggtgggcggactgcagtatggcgggctcggacaactggccgatggcgttgtgggcctggatgacttccgcaagagccaggagctacgcgtctggcccggctatgattacgtggggtggagtaaccacagtttttcgtcgggctatgtcgaaatggagtttgagttcgatcgtttgcgtgccttccaagccatgcaagtgcactag

SEQ ID NO: 9812 - DNA, 858 bp, synthetic construct
  misc_feature 1..858: note = source = /note="Description of Artificial Sequence: Synthetic coding sequence"
  source 1..858: mol_type = other DNA
atgcggggccagggccggaaggagagcctgagcgacagccgggacttggatggtagctatgatcaacttacagggcatccacccggccccacgaaaaaggctcttaagcaacgcttcctgaaacttttgccatgttgtggcccacaagccctgcccagcgtcagtgaaatcggcagggtgttcaggtttttgggagacagtagcttgccaagtgctctggcggctcccgcctcactccgccctcaccggcccagactcctggatcctgacagtgtggacgacgagttcgagttaagtacagtttgccataggccagaggggctggaacaacttcaggaacagaccaagtttacacgtaaagaactgcaggttctgtacagggggtttaagaacgagtgtcctagtggcattgtaaatgaagagaattttaaacagatttacagccagttcttcccccagggagattccagcacctacgcaactttcctctttaatgcattcgatactaaccacgatggctccgtttcattcgaagattttgtcgcaggcctgtctgtgattttacgcgggaccgtcgacgacagactgaactgggcttttaatctgtacgacctgaacaaggacgggtgcataaccaaggaggagatgctcgacatcatgaagagcatttatgatatgatggggaagtatacgtaccccgctctgcgtgaagaggcgccacgggaacacgtagagtctttttttcagaagatggataggaacaaagatggggtggttacaattgaagaattcatcgagtcctgccagaaggacgagaacatcatgcgctcaatgcaacttttcgacaacgtgatttag

SEQ ID NO: 9813 - DNA, 1311 bp, synthetic construct
  misc_feature 1..1311: note = source = /note="Description of Artificial Sequence: Synthetic coding sequence"
  source 1..1311: mol_type = other DNA
atgcagggcacccccggcggcggcacccggcccggccccagccccgttgaccggagaaccttgcttgtgttctctttcatcctcgcagccgctctcggccagatgaacttcaccggcgatcaggtgctaagggtgttagccaaagacgagaagcaactgagtctgctgggggacttggaaggactgaaacctcagaaggtggacttttggcgtgggccggcccgcccctctctccccgttgacatgagagtccccttcagtgagctgaaagacataaaggcttatcttgaaagccatggcttagcctacagcattatgatcaaagacattcaggtgttgctcgatgaagaacggcaggcaatggccaagagccgtaggctggagagaagtacaaacagtttcagttattcatcttatcatacactggaagaaatatattcctggatagataattttgtgatggaacactccgatattgtgtccaaaatacagatcggaaactcatttgagaaccagtccattctggtgcttaaattctctaccggcggttctaggcacccagcgatatggatcgacacaggaatccactcaagagaatggattacccacgcgacgggcatttggactgcaaataagatcgtttctgattacgggaaagaccgcgtgctcactgatatcttgaatgcgatggatatctttatcgagctagtgacaaatcccgatggctttgctttcacccacagcatgaacagactgtggcgaaaaaacaaatcaatccgtccaggcattttttgcattggcgtggatctcaaccggaactggaagagtggctttgggggaaacggatccaattccaatccctgttcagagacataccatgggccaagtcctcaatccgaacctgaggttgctgccattgtgaacttcataactgcacatggaaacttcaaagcgttgatttccattcatagttacagccaaatgctgatgtatccctacggtaggctattagaaccagtcagcaatcaacgcgagttgtacgacctggccaaggacgctgttgaagccctgtacaaggttcatggaattgagtacatttttgggagcatctctacaacattgtacgtggcaagcggcatcactgtggattgggcctatgattctgggataaaatacgcgttcagtttcgaattgagggatacaggacaatacgggtttctgcttcccgccacccagattattcccacggctcaagagacatggatggctctgagaacaatcatggagcacacccttaaccatccatattag

SEQ ID NO: 9814 - DNA, 1218 bp, synthetic construct
  misc_feature 1..1218: note = source = /note="Description of Artificial Sequence: Synthetic coding sequence"
  source 1..1218: mol_type = other DNA
atggacaccatcttcctgtggagcctgctgctgctgttcttcggcagccaagcctctcgatgcagtgcccaaaagaatactgagtttgctgtagatttatatcaagaggtgagcctttcccataaggacaatatcatcttttccccgttgggaatcacacttgtacttgagatggtgcagctgggggctaaggggaaagcccaacagcagattcggcagaccctcaagcagcaagagacaagcgctggagaggagtttttcgtgctcaaaagtttctttagcgctatatcagaaaaaaagcaggaattcacgtttaacctcgctaacgctttatacttgcaggagggctttactgtgaaggagcagtatctccatggcaacaaggagttttttcagtctgctatcaaacttgttgactttcaagacgccaaagcttgcgccgagatgatctcaacctgggtcgaacgtaaaaccgatggaaagattaaggatatgttctcaggagaagagtttggacctttgaccaggttggttctcgttaatgctatctattttaagggggattggaagcagaaatttcggaaggaggatacccagctgattaacttcaccaaaaaaaacgggtctacagttaagatcccaatgatgaaagcgctgctgcgcacaaaatatggatatttctctgagtccagtctgaattatcaagtcctggaactcagttataagggagacgagttttccttgattattatattgcctgcggagggaatggacatcgaagaggtagagaagctcattaccgcgcagcagattctgaagtggttgtcggagatgcaagaagaagaagtggagatctcattgcctcggtttaaagtagaacagaaagtcgatttcaaggatgttttgtactccctgaacatcacagagatttttagcgggggttgcgatctctccggcatcacagactctagcgaagtctacgtgtcacaggtgactcagaaagtgttctttgaaattaatgaagacgggagtgaagcagctaccagcaccggaatccacatcccagttattatgtctctggcccaatcccaatttatagcaaaccaccctttcttgtttattatgaaacacaaccctacggagtcgatcctgtttatggggagagtgacaaacccggacactcaggagattaagggcagggaccttgatagtttgtag

SEQ ID NO: 9815 - DNA, 300 bp, synthetic construct
  misc_feature 1..300: note = source = /note="Description of Artificial Sequence: Synthetic coding sequence"
  source 1..300: mol_type = other DNA
atgctggccctgctggtgctggtgaccgtggccctggccagcgcccatcacggcggagagcactttgagggagagaaggtattcagggtcaatgtggaagacgagaaccacattaatatcattcgagaactggcctcaactacccagatcgacttctggaagccggactcagtgacccagatcaagccccacagcaccgtagacttccgcgtgaaggccgaagacactgttactgtagagaatgtcttgaagcaaaacgagctgcagtacaaggttctcatcagcaacctgcggaactag

SEQ ID NO: 9816 - DNA, 471 bp, synthetic construct
  misc_feature 1..471: note = source = /note="Description of Artificial Sequence: Synthetic coding sequence"
  source 1..471: mol_type = other DNA
atgctgctgctgctgctgctggcccccctgttcctgcggccccccggagctggaggcgcacagaccccaaatgcgacaagcgagggctgtcagattatccacccaccatgggagggcggcatcaggtatcgaggcttaaccagagaccaggtgaaggcaattaactttctgcccgtagattacgagattgaatacgtgtgccgaggggaaagggaagtagtggggcccaaggtgaggaaatgcctggccaatgggtcttggactgacatggacactccatctcgatgcgttaggatctgtagcaagagctatctgactctcgagaacggcaaagtgtttttaacaggtggtgatctgcctgctctcgatggagcgagagtcgactttcgatgcgaccctgattttcaccttgttggatctagcaggtccatctgtagccaggggcagtggagcactcctaaaccacattag

SEQ ID NO: 9817 - DNA, 249 bp, synthetic construct
  misc_feature 1..249: note = source = /note="Description of Artificial Sequence: Synthetic coding sequence"
  source 1..249: mol_type = other DNA
atgggccgggtgttcctgaccggcgagaaggccaacagcatcctgaagagatacccccgggccaatgggttcttcgaggagataaggcaaggcaatattgagcgcgaatgtaaggaagagttctgtacttttgaagaggcacgtgaagcatttgaaaataatgaaaagaccgggctagtgctgctgcctcgcctcgagtgttcctgcgaacatgggtcactgcagcctcagctccctgtgcccaaatag

SEQ ID NO: 9818 - DNA, 372 bp, synthetic construct
  misc_feature 1..372: note = source = /note="Description of Artificial Sequence: Synthetic coding sequence"
  source 1..372: mol_type = other DNA
atgcagggcacccccggcggcggcacccggcccggccccagccccgtcgataggcgtaccctgttagtcttctccttcattctggccgccgctttgggtcagatgaatttcaccggcgaccaggttttgagagtcctggccaaagatgagaagcagctgtcactgttgggggatttagaaggactgaagcctcaaaaggtggacttctggcggggtcctgccagacccagcctcccggtcgatatgcgtgtgccattttctgagctgaaggatataaaggcgtacctggaaagccacggactagcctacagtataatgattaaagatatccaggtactgcttgatgaggagaggcaagccatggccaagtag

SEQ ID NO: 9819 - DNA, 840 bp, synthetic construct
  misc_feature 1..840: note = source = /note="Description of Artificial Sequence: Synthetic coding sequence"
  source 1..840: mol_type = other DNA
atgggccgggtgttcctgaccggcgagaaggccaacagcatcctgaaacgatatcccagggctaacggttttttcgaggagatccgccaggggaacatcgagcgagaatgcaaggaggaattttgtacgttcgaggaagcccgggaggccttcgagaataacgagaagactattactggggtgatcctattggctgtgggagtgtggggcaagctcacgctgggaacctatatcagcctgatagctgaaaatagcaccaatgctccctatgtgctgataggaacagggacaactatcgtggtgttcgggctgtttgggtgctttgctacttgccggggttctccatggatgttaaaactttacgctatgttcctaagcctggtcttcttagctgagctggtggctggtatttctggctttgtcttcagacatgagatcaaggacacattccttcgaacttacaccgacgctatgcagacatataacgggaatgacgaaagatcaagggcagtggatcacgtacagcggagcctctcctgctgcggtgttcagaattataccaactggagtacatcaccctacttcctcgaacacggcatccccccttcttgttgtatgaacgaaaccgattgtaatcctcaggacttgcacaacttgacagtggcagctacaaaggtcaaccagaagggatgttacgatttagttacatccttcatggagacaaacatggggatcattgccggcgttgccttcggaattgccttctcccagctgatcgggatgctgctagcgtgctgtctgtcacgtttcatcaccgcaaatcagtacgagatggtgtag

SEQ ID NO: 9820 - DNA, 564 bp, synthetic construct
  misc_feature 1..564: note = source = /note="Description of Artificial Sequence: Synthetic coding sequence"
  source 1..564: mol_type = other DNA
atgtggtgcgccagccccgtggccgtggtggccttctgcgccggcttactggtgagtcaccctgttctgacccagggccaggaggccggcggtcggcctggagcggactgtgaagtctgtaaagagtttctaaacagattctataagtccttgatcgatcggggcgtcaacttttctctggacacaatcgagaaggagctcatcagcttctgtcttgacacaaaaggcaaagaaaatagactctgctactatctgggtgctaccaaagatgctgccaccaaaattctttcagaggtgacaagacccatgtcagtccatatgccagcaatgaaaatctgtgagaaactgaaaaagctggactcacaaatctgtgaactgaaatacgagaaaaccttggacttagcttccgtggacttacgcaagatgcgggtagccgagctgaagcagatccttcactcctggggagaggaatgtcgagcctgcgctgagaagacagactatgttaatttgatccaggagttagctccaaagtatgccgcaacacaccctaagaccgagctttag

SEQ ID NO: 9821 - DNA, 1311 bp, synthetic construct
  misc_feature 1..1311: note = source = /note="Description of Artificial Sequence: Synthetic coding sequence"
  source 1..1311: mol_type = other DNA
atgcagggcacccccggcggcggcacccggcccggccccagccccgtggataggcggacgctcctagtgtttagttttatcctggccgccgcacttggacagatgaatttcactggggaccaagtcctaagagtcctcgccaaagacgaaaagcaactatcccttctgggggacctggagggcctgaagccacagaaagttgacttctggcgggggcctgccaggccctccctacctgtagatatgcgcgtacccttttccgagctgaaagatatcaaagcatacctggagtcacacgggctggcttattccattatgatcaaggacatccaggtcctattagacgaagagcggcaggctatggctaaaagcaggaggctggagagaagcactaattctttttcctatagctcctaccataccctggaggagatctactcatggatcgacaatttcgtgatggagcatagcgacatcgtatctaaaattcaaatcggcaatagttttgagaatcagagcatcctggtgctcaagttttctacgggagggagcaggcatccagccatttggatagataccggcatccactcgagagagtggattacgcatgctacgggaatctggaccgctaacaaaatcgtcagcgactacgggaaggatcgcgtgctgaccgatatactgaatgcaatggacatctttatcgaactcgtaacaaacccagacgggtttgccttcacccacagtatgaatcgtctttggagaaaaaataagtcaatccggcctggcattttctgtatcggcgtggatctcaatagaaattggaaaagcggctttggaggcaacggatctaactcaaacccttgtagtgagacctatcacggcccgtctccgcaatcagagcctgaggtggcagccattgtcaatttcattacagctcatggcaacttcaaggcacttatttctatacacagttacagtcaaatgctgatgtatccttacggacgcctgctggaacccgtgtctaaccagagagagctgtatgaccttgccaaagatgcagttgaggcactttacaaggtacacggaatcgaatacatttttgggtcgatctccaccacactttacgttgcgtcaggcatcaccgtagattgggcgtatgacagtggtatcaagtacgcatttagctttgagctcagagatacaggccagtatggcttcttattgccagccacccagatcattccaactgcacaggagacctggatggcattgaggacaattatggaacataccctcaatcatccatactag

SEQ ID NO: 9822 - DNA, 450 bp, synthetic construct
  misc_feature 1..450: note = source = /note="Description of Artificial Sequence: Synthetic coding sequence"
  source 1..450: mol_type = other DNA
atgggccgggtgttcctgaccggcgagaaggccaacagcatcctgaaacgctacccccgggctaatggtttttttgaggaaatccgccaggggaatattgagagggaatgcaaagaagaattttgtaccttcgaggaagccagagaagcattcgagaataacgagaagacgaaagaattctggtctacttacactaaagcacagcagggcgaaagtaaccggggcagcgactggtttcagttctatctgacgtttccgctgatctttggactctttatcattttattagtgatttttctgatctggcgttgttttcttcggaacaagactcgccgccaaacggtgactgaggggcacatcccatttccacagcacttgaatattattaccccccctcctcctccagacgaagtgttcgacagcagcggactgagcccaggcttcctttag

SEQ ID NO: 9823 - DNA, 936 bp, synthetic construct
  misc_feature 1..936: note = source = /note="Description of Artificial Sequence: Synthetic coding sequence"
  source 1..936: mol_type = other DNA
atgctgtaccagaccatcaacagcctgaagaccaagaaccccaagctgaaaatcctccttagcattggcgggtatttatttgggtctaagggcttccatcccatggtggattctagtacctcacgtctggaatttatcaatagtattatattatttctgcggaatcacaactttgacggactggacgtttcctggatttaccccgaccagaaggagaatacacattttacagtcctcatccatgagctagccgaggcttttcagaaggacttcacaaaaagcactaaggagcggctactcctcaccgccggtgtctccgcgggaagacagatgatagataatagttaccaagtcgagaaactggccaaggacctggacttcatcaacctgttaagctttgatttccacggtagttgggaaaaaccactgatcacggggcataattccccactcagcaaaggctggcaggaccgcggcccatcatcctattacaatgttgaatacgcggtggggtattggatccataaaggcatgcctagcgagaaagtggtcatgggcatacctacctacgggcatagcttcaccctcgcctctgccgagaccaccgtgggtgcccctgctagtggccctggcgccgcggggcctataaccgagtcttctggattcctggcatactacgaaatttgccagttcctgaagggtgcgaagataaccaggctccaggaccaacaggttccctatgccgtgaaggggaaccagtgggtggggtatgatgacgtaaagagcatggaaactaaggtacagtttttaaagaacctgaacctcggcggggctatgatctggagcatcgatatggatgactttaccggaaaaagctgcaaccagggtccgtacccgttggttcaagcggttaagagatcactgggctcactgtag

SEQ ID NO: 9824 - DNA, 621 bp, synthetic construct
  misc_feature 1..621: note = source = /note="Description of Artificial Sequence: Synthetic coding sequence"
  source 1..621: mol_type = other DNA
atggacaccatcttcctgtggagcctgctgctgctgttcttcggctcccaggcctcacgctgctcagcacagaagaacactgagtttgctgtggacctgtatcaagaggtgtcattgagccacaaggataacatcatattctcaccattggggataacactggtccttgaaatggtacaactcggtgcaaaaggcaaagcccagcaacaaatccggcaaacactgaagcagcaagaaacatcagcaggggaagagttcttcgtactgaaaagcttctttagtgccattagcgaaaaaaaacaggaatttacgttcaacctggctaatgctctgtacctgcaggaaggatttactgtgaaggaacagtatctgcacggaaataaggaattcttccagagcgcaattaaactggtggactttcaggacgcaaaagcatgcgcagagatgatcagcacttgggtggagaggaaaactgacgggaaaattaaggacatgtttagcggggaggaattcgggcctctcactcggctggtgctggttaatgctatctattttaaaggcgactggaagcagaagtttagaaaggaagacacacagttgatcaactttactaagaagtag

SEQ ID NO: 9825 - DNA, 1218 bp, synthetic construct
  misc_feature 1..1218: note = source = /note="Description of Artificial Sequence: Synthetic coding sequence"
  source 1..1218: mol_type = other DNA
atggacaccatcttcctgtggagcctgctgctgctgttcttcggctcccaagctagccgttgctcagcccaaaagaataccgaatttgcagtggacctttaccaggaagtatctttgtctcacaaagataatataattttcagcccccttggaatcaccctcgtgctggagatggtccagctgggggccaaggggaaggcccagcagcaaatacgccagaccctgaagcagcaggagacatcagccggcgaggagttttttgtgctgaagtcctttttcagtgccataagcgagaaaaagcaagagttcacatttaacctggcgaatgctttatacttacaagaggggtttactgttaaagagcaatacctgcacggcaacaaggagttttttcagagtgcaattaaattggttgatttccaggatgccaaagcgtgcgcagagatgatttcaacctgggtggaacggaagaccgatggtaagataaaggacatgttctcgggggaggaatttggtcctctaacacggctggttctcgtaaacgctatctatttcaaaggggattggaagcagaagttccgaaaggaagatacccagctgatcaattttacaaagaagaatggttccactgtcaaaattccaatgatgaaagcgctgctgcgaaccaagtacggctacttttcagaatccagcctgaattaccaggttttggagttgtcctataaaggagatgaattctcgctgatcattattctgcctgcagagggcatggacatcgaagaagtggagaagttgatcaccgcccagcagattctgaagtggttgtccgaaatgcaagaggaggaagtcgagatctctctaccacgattcaaggtggagcagaaggtggactttaaggatgtactgtactctctaaacattacagaaatattttccggaggctgcgacttaagcggcattaccgacagttccgaagtatatgtgagtcaggtgacccagaaagtgttctttgaaatcaatgaggacgggagcgaagccgccacttctaccggaatccacatcccagttatcatgagcctggcacaatcccagttcatagcaaaccatcctttcctgttcatcatgaaacacaatccgacagaatccatcctgtttatgggacgggtgaccaatcccgatactcaggaaattaagggcagagaccttgactcactctag

SEQ ID NO: 9826 - DNA, 399 bp, synthetic construct
  misc_feature 1..399: note = source = /note="Description of Artificial Sequence: Synthetic coding sequence"
  source 1..399: mol_type = other DNA
atgctgatcttctggaccatcaccctgttcctgctgggcgccgccaagggcaaggaggtgtgttatgaggatttggggtgctttagcgataccgagccctggggggggactgctatcagacccctgaagatactgccgtggagcccagagaaaatcggcacaaggttcctgctgtatacgaatgaaaacccgaataacttccagatcctgctgttatccgacccttctactatcgaagcctccaattttcagatggacaggaaaacgcgcttcatcatccatggctttatagacaagggtgacgagtcatgggtgaccgacatgtgtaaaaagttgtttgaggtcgaagaagtaaactgtatctgtgtcgattggaaaaaggggagccaggctacgtag

SEQ ID NO: 9827 - DNA, 606 bp, synthetic construct
  misc_feature 1..606: note = source = /note="Description of Artificial Sequence: Synthetic coding sequence"
  source 1..606: mol_type = other DNA
atgaaggtgcacatgctggtgggcgtgctggtgatggtgggcttcactgtgggtaaggtacctgtcccagatatccgaacctgtcacttctgcctcgtggaggacccttctgtggggtgcatttccgggagtgagaaatgcacaatctcttccagtagtttgtgcatggtgatcacaatctactatgacgtaaaggtgaggtttattgtccgcggctgcggacagtacatctcgtacaggtgccaggagaagagaaatacctacttcgccgaatactggtatcaagcccagtgttgccagtatgactattgcaacagctggtcttcaccccaattacaatcttctcttcctgaaccccacgaccggcctcttgctcttcctctctctgatagccaaattcagtggttttatcaggcactcaatctgtctctaccacttcccaacttccatgccggtacagaacctgatggtctagatccaatggtgacactgtcgcttaatctcggtttgtcttttgccgagctccgcaggatgtatctgtttctgaattcctccggtctgctagtactgcctcaggccgggctgctgacaccacacccctcttag

SEQ ID NO: 9828 - DNA, 1086 bp, synthetic construct
  misc_feature 1..1086: note = source = /note="Description of Artificial Sequence: Synthetic coding sequence"
  source 1..1086: mol_type = other DNA
atggccagcctgggcctgctgctgctgctgctgctgaccgccctgccaccgctgtggagcagttcactgcccgggctagacacagccgagtctaaggcgacaatagccgacctgatcctcagcgctctggagcgcgcaaccgtgtttctggaacagcgcttaccagagattaatttagatggaatggttggcgtgcgcgtgttggaagaacagctcaaaagcgtgcgtgaaaaatgggctcaggagcccctgctgcagcctctctcactacgagttggcatgcttggcgagaaactggaagcggcaatacagaggagtctccattacctgaagttgagcgacccaaagtatcttagagaattccaactcaccctgcagcctgggttttggaagctgccccatgcatggattcataccgacgccagtttggtgtaccccacttttggaccccaagactcattctccgaagaacgatctgatgtttgtctggtgcaactgctggggacgggtaccgactctagtgaaccctgtggactatctgacctttgcaggtccttgatgacaaagccaggctgttctggatactgcctgtctcaccagcttttgttcttcttgtgggcaagaatgagaggatgtacccagggaccactgcaacaatcccaagactacattaacctgttctgtgctaatatgatggacctcaaccgccgagctgaggccattgggtacgcctaccctacccgggatatcttcatggagaacatcatgttttgtggcatgggtggatttagtgacttttataagcttcgctggctggaagccattctttcctggcagaagcagcaggaaggatgtttcggggagccggatgccgaagacgaggagttaagcaaggctatccagtatcagcagcattttagccggagggttaaacggagggagaagcagttccctgacgggtgctcctcacataataccgccactgctgttgctgcgctggggggcttcctgtacattctcgctgaatatccccctgccaaccgagaacctcatccctcaactccaccccccccctcctcacggtag

SEQ ID NO: 9829 - DNA, 162 bp, synthetic construct
  misc_feature 1..162: note = source = /note="Description of Artificial Sequence: Synthetic coding sequence"
  source 1..162: mol_type = other DNA
atgtggaccaacttcttcaagctgcggctgttctgctgcctgctggcagtgctcatggtggtcgtcctagtaataaatgtcacccaggtcgaatacctggaccacgagacggtaagcgccacgttcattgatagttctggccaattcgtctcctcccaatag

SEQ ID NO: 9830 - DNA, 1305 bp, synthetic construct
  misc_feature 1..1305: note = source = /note="Description of Artificial Sequence: Synthetic coding sequence"
  source 1..1305: mol_type = other DNA
atggccagcctgggcctgctgctgctgctgctgctgaccgccctgccccccctgtggtcctcgagccttcccggactggataccgctgaaagcaaagccacaattgcagatcttattctctccgcgctggaacgagctacggtgttcttggagcagcggctcccggagatcaatctggacggaatggtgggagtgagagtcctagaggagcagctgaagtccgttcgggagaagtgggctcaagagccgttgttacagcccctcagtctgagagtgggaatgctgggtgagaagctggaggccgccatccagcgctcactgcattacctgaagctgtcagacccaaaatacctccgggagttccaacttacccttcagccaggtttttggaaactgcctcacgcctggatccatacagatgcatcccttgtgtaccccacgtttggaccccaagattcattcagtgaagagcgcagtgacgtgtgcttggtgcaactcctcgggaccggcacagattcgtcagagccgtgcggcctttctgacctgtgtcgctcccttatgactaaacctggttgcagcgggtactgcctcagccaccagcttctatttttcctttgggctaggatgaggggctgcacccagggccctctgcagcaatcccaggactatattaacctgttttgtgccaacatgatggatctgaaccgaagagcagaagccatcgggtacgcctatcccactcgagatatttttatggagaactccgtgacgggccatcccgtcttctacttacccctgtgcgacagtttcctgccacctaaggctgcacccgtgacagaactgtacactgatggaccagttatgttctgcggtatgggcgggttttcagacttctataagctccgctggcttgaagcaattctatcatggcagaaacagcaagaagggtgtttcggagaacctgacgcggaagatgaggaactgagcaaggccatccagtaccaacagcacttttctaggcgcgtgaagagaagggagaaacagtttcctgattcgcgaagcgtcgcacaggccggcgtgcagtggcggaatctgggctccctgcaacccctgccacccggcttcaaacaattctcgtgcctgatactaccttcttcctgggattacagatctgtgcctccctatctcgccaacttctatatttttctagtggagactgggtttcatcacgttgctcacgcaggattggagctccttataagcagagacccccctacgtccgggtcacagtcagtgggtctctag

SEQ ID NO: 9831 - DNA, 1311 bp, synthetic construct
  misc_feature 1..1311: note = source = /note="Description of Artificial Sequence: Synthetic coding sequence"
  source 1..1311: mol_type = other DNA
atgcagggcacccccggcggcggcacccggcccggccccagccccgtcgatcggcgtacattgcttgtcttctcttttatcctggccgccgcactggggcagatgaatttcacgggggaccaggtcttgcgcgttcttgctaaggatgagaagcaactgtctctgttgggcgatctcgaaggtctgaagcctcaaaaggtggacttctggagaggacccgctagaccaagtcttcccgtggatatgcgcgtcccctttagcgagctgaaagatatcaaggcctacctggaatctcacggtcttgcctattcaatcatgattaaggatatccaggtcttactggatgaagagagacaggccatggcgaagagccgccgcctggagcggtccacaaacagtttctcctatagttcctaccataccttggaggagatttactcttggatcgacaatttcgtgatggaacactcagatatcgtgagcaagattcaaataggcaactcctttgagaaccaaagcatcctcgtgctgaagttctccacaggggggtccagacatccggcgatctggattgacacaggtattcactcaagagagtggattacccacgcaaccggtatctggaccgcgaataagatcgtctccgactatggcaaagaccgggtgttgaccgatatattaaacgccatggatattttcatcgaactagtgaccaaccctgatggctttgcatttacacactctatgaaccgtctctggagaaaaaataagtctatacgccctggaattttctgcatcggtgtcgatctgaatagaaactggaaatcaggtttcggagggaatggcagcaattcaaatccctgctccgaaacctatcacggcccatctcctcagagcgagcctgaggtggccgctatcgttaactttataacggcacacggaaacttcaaagccctcatatcaattcatagctactctcagatgttgatgtacccctatggcagactcctggagcccgtgagtaaccagcgcgagctctacgatttggcaaaagacgccgtggaggctctgtataaagtgcatggaatcgaatatatcttcggaagcatctccacaaccctatacgttgcttctggaataaccgtggattgggcatatgatagcgggatcaagtacgccttctctttcgaactgcgggataccggccagtatggattccttctgcccgctactcagataatccctacagcacaggaaacctggatggccctgcgaactataatggaacacaccctgaaccatccatattag

SEQ ID NO: 9832 - DNA, 1218 bp, synthetic construct
  misc_feature 1..1218: note = source = /note="Description of Artificial Sequence: Synthetic coding sequence"
  source 1..1218: mol_type = other DNA
atggacaccatcttcctgtggagcctgctgctgctgttcttcggcagtcaagcctcaaggtgcagcgcccagaagaataccgaatttgctgtggatctttatcaggaagtgtcactgagccataaggataacataattttttcacctttgggaataacattagtcctggagatggtgcagctgggcgccaagggtaaagcccagcagcagattagacagaccctcaagcagcaggaaacctcggcaggggaggagttctttgtcctaaagagttttttttccgccatcagcgaaaagaaacaggaattcacgtttaacttagccaatgctctttacctccaggaggggttcacggttaaagagcaatacctgcatggcaataaagagttcttccaatcagcaatcaagctggtcgactttcaggacgctaaggcatgtgccgaaatgatatccacgtgggtggagcgaaagaccgacggcaaaatcaaagacatgttctctggtgaagagttcggcccgctcaccagacttgtcctcgtcaacgctatttacttcaagggggattggaaacaaaagtttcgaaaggaagatacccagctcattaatttcactaagaaaaacgggtcaactgttaagattccaatgatgaaggccctcctgaggactaaatatgggtatttcagcgagagctcgcttaattaccaggtccttgagctttcctacaagggcgacgagttctcgctcataattattctgccagcagagggtatggacattgaagaagtagagaaacttatcaccgcacagcagattctaaaatggctatccgaaatgcaagaggaagaggtggaaatatccctgcccagattcaaagtagaacagaaggtcgactttaaggatgtgctgtactccctgaacatcaccgaaatctttagcggcgggtgtgatctgagcgggatcacagattcctctgaagtttacgtcagtcaagtaacccagaaagtattcttcgagatcaatgaggacgggagtgaagctgcaacgagtactggcatccatatccctgttattatgagcctcgctcagagccaattcattgcaaaccatccattcctgttcattatgaagcacaatccaactgagagcatcctttttatggggcgtgtgaccaaccctgatactcaagagatcaaggggcgggatcttgactccctgtag

SEQ ID NO: 9833 - DNA, 510 bp, synthetic construct
  misc_feature 1..510: note = source = /note="Description of Artificial Sequence: Synthetic coding sequence"
  source 1..510: mol_type = other DNA
atgctgtaccagaccatcaacagcctgaagaccaagaaccccaagctcaaaattcttttaagcataggcggttacttattcggttcaaaaggtttccaccccatggtggattcttctacatcccggctggagtttattaactcgattatcctcttcctgagaaatcataacttcgatgggctggatgtctcttggatctacccagatcagaaggaaaatactcacttcacagtccttatacacgaattagcagaagctttccaaaaggatttcacaaagtcaaccaaggagaggctgctgcttaccgccggggtatcagccggaaggcagatgatcgataattcttatcaggtcgagaagctagcaaaggatctagattttatcaacctgctctcgttcgactttcacggatcatgggagaagcctctcatcaccggccataactccccactgtctaaggggtggcaggacagaggccctagtagttactacaatgtagaatacgcttag

SEQ ID NO: 9834 - DNA, 1209 bp, synthetic construct
  misc_feature 1..1209: note = source = /note="Description of Artificial Sequence: Synthetic coding sequence"
  source 1..1209: mol_type = other DNA
atggccagcctgggcctgctgctgctgctgctgctgaccgccctgccccccctatggtcctcatcccttcccggtctggacacggccgagtctaaggccacgattgccgacttgatcctctcggcattggaacgggccaccgtgtttctggaacaaaggctgccagagataaacctagacggcatggtgggagtccgagtgttggaggaacagctgaaaagcgtccgggagaaatgggcacaggagcccttgctgcaaccactgagcttgagagtgggaatgctgggggagaagctcgaggccgccatccaacggtccctgcattatcttaaactcagcgacccgaaatacctgcgcgaatttcagctgaccctacagcccggtttctggaagctgccccacgcttggattcacacagatgcctcactggtatacccgaccttcgggccacaagattccttttcagaagaacggagtgacgtgtgcctggtacaactgctgggtacagggaccgattccagcgagccctgcggtctgtccgatctgtgtagatcactgatgactaaacccggctgttccggctactgcctgtcccatcagcttctgtttttcctgtgggccaggatgcgggggtgcacacaggggccgcttcaacagtcgcaggattatatcaacttgttctgcgcaaacatgatggacctcaacagaagagccgaggccatcggctatgcgtaccctaccagggacattttcatggagaacattatgttttgcggcatgggtgggttcagtgatttttataaacttaggtggctcgaggctattctgagttggcagaagcagcaggagggctgttttggggagccagacgcagaggatgaagaactgtctaaggctatccagtatcagcagcattttagccggagagtgaaaagaagggagaaacagttcccagattctcggtccgtcgctcaggccggcgtgcagtggcggaatttggggtcgctgcagccgctgccacccggctttaaacagtttagttgcttgattttacccagttcatgggactaccggtcagtgcccccttatcttgccaatttctacatcttcttggtagagacaggctttcatcacgtagcacatgcgggcctggaactccttatcagccgagaccctcccacaagcggcagccaaagcgttgggctctag

SEQ ID NO: 9835 - DNA, 1680 bp, synthetic construct
  misc_feature 1..1680: note = source = /note="Description of Artificial Sequence: Synthetic coding sequence"
  source 1..1680: mol_type = other DNA
atgtggaccaacttcttcaagctgcggctgttctgctgcctgctggccgttctcatggtggttgtgctggttatcaatgtcacccaggtcgaatacctagatcacgaaaccgtgtcagctacttttatcgatagctccggccagttcgtctctagtcaggtcaccgggatcagccggaatccttactgcggatacgatcagcagacacttagctcccaggagcggatggaggaggattctcttttagcggcccttcacagacaggttcctgatgttgggcctgtgcctttcgtgaagagcaccgatccttcttcctcatattttgttattctgaattcggctgcatttttcaaagtcggctcccaactggaagtacttgtgcatgtgcaggacttccaacggaaaccaaagaagtatggaggcgactatcttcaggcacggatccactcactgaagctgcaggctggcgccgtgggcagagtcgtggattaccagaatgggttctataaagtgttctttacgctgctgtggcccgggaaggtgaaggttagtgtttcactggtgcacccatcagaaggaatccgcgtgttgcagcgtctgcaggaggataaacccgatagggtatactttaagagcctattcaggtctggcagaatctctgagaccacagaatgcaacgtgtgtctaccggggaatctgcctctctgtaatttcactgatttatacaccggcgagccatggttttgcttcaagcccaagaagctcccatgcagttctagaattactcatttcaaaggtggctacctcaagggtctgttgaccgctgctgaatccgctttcttccagtccggcgttaatatcaagatgcccgttaattccagcggacccgattgggttactgtcatcccgaggagaatcaaggaaaccaacagtttagaactgtcgcagggttcaggaacatttccttctggctactattataaagaccagtggcggcctagaaaattcaaaatgcggcaattcaacgaccctgataacataacagaatgcctccagcgcaaggtggttcatttgtttggagatagcacaatccgccaatggttcgaatacttaacaacattcgtccccgatcttgtggagtttaatttgggaagtccgaagaatgttggacccttcctggcagtcgaccagaagcacaacatattgctgaaatatagatgccacggaccacctattcggtttacaactgtgttctctaatgagctgcactacgtggctaatgaactgaacgggattgtgggtggcaaaaataccgtggtggctatagcagtttggtcacacttttccacttttcctttagaagtctatatcaggaggctgaggaacataagacgggctgtggtgagactcctcgataggtcacctaagaccgttgtcgtgattaggacggcaaacgcacaagaactggggcctgaagtgtcgttatttaactctgactggtacaactttcagttggatactattttaaggcgcatgttcagtggtgtcggggtgtaccttgtggacgcctgggagatgacgcttgcccattacctcccccacaagctgcatcccgacgaagttattgtgaaaaatcagctggacatgtttctgtcattcgtgtgcccactggagacatag

SEQ ID NO: 9836 - DNA, 402 bp, synthetic construct
  misc_feature 1..402: note = source = /note="Description of Artificial Sequence: Synthetic coding sequence"
  source 1..402: mol_type = other DNA
atggccatggtgagcgccatgagctgggtgctgtacctgtggatctccgcttgtgcaatgcttctctgtcatggctctctgcagcacacatttcagcagcaccatctccatcgtcctgaagggggcacatgcgaggtcatagctgcccaccgctgttgcaacaaaaacaggattgaagaaagaagccagaccgtaaaatgctcttgccttcccggcaaagtggccggtacaaccagaaacagaccttcatgcgtcgacgcttccatcgtgataggcaagtggtggtgcgaaatggaaccgtgcctcgaaggtgaggagtgcaaaacactgcccgacaactccggctggatgtgcgcaaccggcaacaaaattaagaccactagaatccaccctaggacatag

SEQ ID NO: 9837 - DNA, 606 bp, synthetic construct
  misc_feature 1..606: note = source = /note="Description of Artificial Sequence: Synthetic coding sequence"
  source 1..606: mol_type = other DNA
atgaaggtgcacatgctggtgggcgtgctggtgatggtgggcttcaccgttgggaaagttccagtgccggacatccgtacttgtcatttttgtctggtcgaggacccctcagtgggatgcatcagtgggagcgagaagtgcaccatctcaagctcctccctgtgcatggtgatcactatttactatgatgtgaaggtgcgcttcattgtgagagggtgcgggcagtatatttcctaccggtgtcaggagaaaaggaatacctactttgctgagtattggtaccaggcacaatgctgtcagtacgactactgtaacagctggtccagtcctcaactccaaagcagccttccggagcctcatgacaggccattggcgctaccgctgagcgattcgcagattcagtggttctaccaggccctgaatttgtccctgccgctccccaactttcacgctggtactgagcctgatggcttagaccccatggtgactttgtctctcaatctgggattaagttttgccgagctccgcaggatgtacctctttctcaacagcagtggactactagtgttgcctcaggctggattgttgaccccacacccatcctag

SEQ ID NO: 9838 - DNA, 606 bp, synthetic construct
  misc_feature 1..606: note = source = /note="Description of Artificial Sequence: Synthetic coding sequence"
  source 1..606: mol_type = other DNA
atgaaggtgcacatgctggtgggcgtgctggtgatggtgggcttcacagtggggaaagtgccggtacctgatattagaacttgccacttctgtctggtagaagaccccagtgtggggtgcatctccgggagtgagaagtgcacgattagttcttcatccttgtgtatggtcatcaccatctactatgatgttaaggtacgatttattgttcggggctgtgggcagtacatcagctatcgctgtcaggaaaagagaaacacatacttcgctgaatactggtaccaggctcagtgctgtcaatacgactactgtaattcgtggagcagtccacagttacagtcctccctaccagagcctcatgacaggccgttagccctcccactgagcgatagccagattcagtggttttaccaggccctgaacttgagtcttcctctgcccaactttcacgcaggtaccgagccagacggcctggatcccatggtcacgctgagcctgaatctgggcctgagcttcgccgagttgcgacgcatgtacttgtttctgaactcctctggtctgctagtgctgccacaggccgggctgctgacaccgcatccttcctag

SEQ ID NO: 9839 - DNA, 732 bp, synthetic construct
  misc_feature 1..732: note = source = /note="Description of Artificial Sequence: Synthetic coding sequence"
  source 1..732: mol_type = other DNA
atgggccccgaggccctgagcagcctgctgctgctgctgctggtggcaagcggagacgccgacatgaaaggtcacttcgaccccgccaagtgtcgttacgcattgggcatgcaggaccgtactatcccggattccgatatcagtgccagctcttcctggtcggactccaccgcagctcgtcattcccggcttgagtcctccgatggtgacggcgcatggtgtcccgctggctccgtgttccctaaggaggaggagtatctgcaggtcgacttacagcgcctgcacctggtggctttggttggtacacagggacgacacgccgggggactgggcaaagagttttctcggagctaccggttaagatactctcgggacggcagaagatggatgggatggaaggaccggtggggacaggaagtgatctcgggtaacgaagatcccgaaggtgttgtcctcaaggatctggggcccccaatggtggctagactcgtgaggttttaccccagggctgatcgggtgatgtcagtatgcttgagggtagagttatacggctgcctgtggagagactgctccatgggagtctgggcaagttggcagatggtgtggtggggttggatgacactgggtcgtgtaagatcttgtggctctggacaggcaatgaccatgtgggatggggctacaacagcttcacccgtcgcaatgtggcgatggtcactaagtctgacagggtag

SEQ ID NO: 9840 - DNA, 258 bp, synthetic construct
  misc_feature 1..258: note = source = /note="Description of Artificial Sequence: Synthetic coding sequence"
  source 1..258: mol_type = other DNA
atgaagatccccgtgctgcccgccgtggtgctgctgagcctgctggtcctgcacagtgctcagggcgctacactcggagggccggaagaggaatccactatcgagaattacgcctcacggcctgaagccttcaaggccgatgaattcctgaactggcacgcactattcgagagcatcaagaggaaactgcctttcctcaactgggacgctttccccaagcttaaagggctccgatccgcaaccccagacgcacaatag

SEQ ID NO: 9841 - DNA, 348 bp, synthetic construct
  misc_feature 1..348: note = source = /note="Description of Artificial Sequence: Synthetic coding sequence"
  source 1..348: mol_type = other DNA
atgggccgggtgttcctgaccggcgagaaggccaacagcatcctgaagaggtatcctagggctaatgggttcttcgaagagataagacaaggaaatattgagcgggagtgcaaagaggaattctgcactttcgaggaagctcgggaggcatttgagaataacgagaaaacaaaagagttctggagtacatataccaaagcccagcagggagagtctaaccgagggtccgactggtttcaattttacctgacctttcctctaatctttgggttgtttatcattttattggtgatttttctcatctggcgctgtttcttgcgaaataagactaggcgccagactgtgtag

SEQ ID NO: 9842 - DNA, 606 bp, synthetic construct
  misc_feature 1..606: note = source = /note="Description of Artificial Sequence: Synthetic coding sequence"
  source 1..606: mol_type = other DNA
atgaaggtgcacatgctggtgggcgtgctggtgatggtgggcttcactgtcgggaaggtcccagtgccggatatccggacttgccatttctgtctggtggaggacccctctgtgggctgcatctccggttccgagaaatgtactataagtagctccagtctttgcatggtgattaccatctactatgacgtgaaagttcgattcatagtcagggggtgtgggcagtacatctcctataggtgccaggagaaacgcaatacttatttcgcggagtactggtaccaggctcagtgctgtcagtatgactattgcaatagttggagtagcccccagttgcagtctagcctccctgaaccccacgatagaccactcgccttgccactgtctgactcacagatccagtggttttaccaggcgctgaatctgagcctgcccctccccaatttccacgctggcaccgagcctgacggactggatcccatggtcaccttgtcgcttaatctcggtctaagtttcgcagaacttcgtaggatgtatctatttttgaatagttccggattgctcgttctgccacaggcaggcctgctcaccccacacccatcttag

SEQ ID NO: 9843 - DNA, 1311 bp, synthetic construct
  misc_feature 1..1311: note = source = /note="Description of Artificial Sequence: Synthetic coding sequence"
  source 1..1311: mol_type = other DNA
atgcagggcacccccggcggcggcacccggcccggccccagccccgttgaccgaagaaccctccttgtgttcagctttattcttgcggccgcactgggccagatgaacttcaccggggaccaggttctgcgggttcttgccaaagacgagaagcagctttcgttactcggcgaccttgagggactgaaaccacagaaggtggatttctggcgaggaccggcacggcccagtctgccagtggacatgagggttccgttctctgaactcaaagatattaaagcctatctggaatctcacggtttagcgtattcaataatgatcaaagatatccaggtgctcctggacgaagaacgccaggctatggctaaatctcgacgactggagcgcagtacgaactccttctcatacagtagctaccatacattagaagagatctactcctggattgacaacttcgtgatggaacactcagatatcgtgagcaaaattcagattgggaacagcttcgagaaccagagcatattagtcctgaaattttcaactggcggttcccgccatccagccatctggatcgataccggtatccacagccgggaatggattactcacgccaccggaatctggaccgccaataaaattgtaagtgattatggcaaagatagagtcctcactgatatcctgaacgcgatggacatcttcattgagctggtcacaaatccagacggattcgcctttactcactctatgaaccgcctctggaggaagaacaagagcattagaccaggtattttttgcataggcgtcgatctgaataggaactggaagagcggctttggggggaatggctccaactctaatccatgttccgaaacttaccacggcccctcccctcagagtgagcccgaggttgccgcaatcgttaactttattaccgctcatggtaacttcaaggctctgatctctatccacagctactctcagatgctcatgtacccttacgggcgcctgctggaacctgtttcaaatcagcgagagctatacgacctcgcaaaagatgccgtcgaagccctctataaggtgcacggcattgaatatatattcggcagcatctccaccacactgtatgtggcctcaggcattaccgtagattgggcttacgattcaggcataaaatacgcattttcttttgaactgagggacaccggccagtatggatttctcctgccggccacccagataattcctacagctcaggagacatggatggcgttgcgaaccatcatggagcataccttaaatcatccatattag

SEQ ID NO: 9844 - DNA, 606 bp, synthetic construct
  misc_feature 1..606: note = source = /note="Description of Artificial Sequence: Synthetic coding sequence"
  source 1..606: mol_type = other DNA
atgggcgccaccaccatggaccagaagagcctgtgggccggcgtggtcgtgctgctcttactgcaggggggcagcgcatacaagctggtgtgctattttacgaattggtcccaggatcgtcaggagcctggcaaattcacccctgagaatattgatcctttcttatgttcccacctgatatactccttcgcctccatagaaaacaataaagtcatcatcaaggacaagtccgaggtcatgctctatcaaactataaactctctgaagacgaaaaacccgaagctgaagatcctgctgtccataggcggatacctgtttggctccaaaggattccatccaatggtagacagctcaactagtaggttggaattcatcaacagcatcattctgttcctacgaaatcacaacttcgatggactggatgtttcctggatctatcccgaccagaaggagaacacccatttcaccgtgttaatacacgagcttgctgaagccttccagaaggattttactaagtctacaaaagagcggctgttactcaccgcaggggttagcgccgggaggcaaatgatagacaactcttatcaggtggagaagctagcctag

SEQ ID NO: 9845 - DNA, 75 bp, synthetic construct
  misc_feature 1..75: note = source = /note="Description of Artificial Sequence: Synthetic coding sequence"
  source 1..75: mol_type = other DNA
atgctggtggacggccccagcgagcggcccgccctgtgcttcctgttgttagcggtcgccatgtcctttttctag

SEQ ID NO: 9846 - DNA, 252 bp, synthetic construct
  misc_feature 1..252: note = source = /note="Description of Artificial Sequence: Synthetic coding sequence"
  source 1..252: mol_type = other DNA
atgcggccccggggcctgccccccctgctggtggtgctgctgggctgctgggcttcagtgagtgcacaaactgacgccaccccagctgtcaccaccgagggtctgaatagcacggaggcagccctcgcaacctttgggacgtttccatccacacgtccaccagggacccctcgggccccgggaccaagtagcggaccgcgaccaacgcccgttaccgacggctctcactcggtaacgcaagccggcgtgtag

SEQ ID NO: 9847 - DNA, 1254 bp, synthetic construct
  misc_feature 1..1254: note = source = /note="Description of Artificial Sequence: Synthetic coding sequence"
  source 1..1254: mol_type = other DNA
atgctggccctgctggtgctggtgaccgtggccctggccagcgcccatcacggcggcgaacattttgaaggcgaaaaagtttttagggtgaatgtcgaggacgagaatcatatcaatatcattcgcgagctggcgtctaccacccagattgacttctggaagcccgacagcgttacccagatcaagccccatagtaccgttgatttccgtgtgaaggccgaggatacagtgaccgttgagaacgtgcttaagcagaacgagctgcagtacaaagttcttatatctaatctgaggaacgtggttgaggcccagtttgactcccgcgtgcgcgcaactggacactcttatgagaagtacaataagtgggagactatcgaggcctggacccagcaagttgccacagagaaccctgcactaatttcacgatccgtgatcggcacaactttcgaggggcgagctatctaccttctgaaagtgggtaaggctggacagaataagcccgccatcttcatggattgtggttttcacgcacgggaatggattagtccagccttctgccagtggtttgtgcgtgaggctgtcagaacgtatggcagggaaattcaagtgactgagttgctggacaagctggacttttacgtgttacctgtcctcaacatcgatggttacatctatacctggacaaagtccagattttggagaaagactagatcaacgcacacagggtcttcctgcattggaaccgatccgaataggaattttgatgccggctggtgtgagattggggcgagtagaaacccctgcgacgagacatactgcggacctgccgcagaatcagagaaagaaacaaaggccctggccgactttatcagaaacaagctgtcaagcattaaggcatacttgacaatccactcctattcacagatgatgatctacccatacagctacgcgtataaactgggtgagaacaatgctgaactgaatgctctcgctaaggccacagtcaaggagttagcttctctccatggaacaaaatacacctacggcccaggcgccaccacaatctaccccgccgctggtggttcggacgattgggcttatgaccaggggatccgctacagtttcaccttcgagcttcgcgatacagggaggtatggattcctccttcctgaatctcaaatccgggctacatgtgaagaaacctttttggcaatcaaatatgtcgccagctacgtgctagagcatctatattag

SEQ ID NO: 9848 - DNA, 1680 bp, synthetic construct
  misc_feature 1..1680: note = source = /note="Description of Artificial Sequence: Synthetic coding sequence"
  source 1..1680: mol_type = other DNA
atgtggaccaacttcttcaagctgcggctgttctgctgcctgctggccgtcctgatggtagtcgtgctcgtgattaatgtgacccaggtggagtacctggatcatgagactgtctccgctaccttcatagactctagtggccaattcgtttcatcccaagtcaccggtattagtcgcaatccgtactgtggttacgaccagcagacacttagctctcaagagaggatggaagaagatagtttgctggccgctctgcatcgccaggtcccagatgtgggacctgtcccctttgtgaagtctacagacccctcatcaagctattttgtcattttaaatagcgccgcttttttcaaagtgggcagtcagctcgaagtgctggtccacgtccaggattttcagcgaaagcccaagaagtatggcggcgattacctccaagcaaggatccacagcctgaagctccaggctggggccgtggggagggtggtcgactaccaaaacgggttctataaagtgttctttaccctcctctggccaggaaaagtgaaggtttccgtgagcttagtacatcccagcgagggcatcagagtcctccaaaggctgcaagaagataagcccgaccgggtgtacttcaaaagtctgtttcgttccggtcggataagtgaaactactgaatgtaacgtgtgcctccccggtaatctccccctgtgcaattttaccgacctctatacaggggagccgtggttttgcttcaaacctaaaaagttaccgtgttcgtctagaatcacacatttcaaaggcggctacttgaagggcctactcactgcggccgagtccgccttctttcagtctggcgtgaatattaagatgcctgtgaacagttccggccccgactgggtgacagtaatcccacgtagaataaaggagaccaactccctggagctgtctcagggctccgggactttccctagcggatactattataaggaccaatggcggccgcggaagtttaaaatgcgtcaatttaatgacccagataatataacagagtgcttgcagagaaaggtcgttcaccttttcggcgactctacgattagacagtggttcgaatatttaactacatttgtgccggatctcgtggaattcaatctgggtagccccaaaaacgtgggcccattcctggcagtggaccagaaacacaacattctgctcaaatacagatgccacgggccacctattaggttcacaacagtattcagtaatgagctgcactacgtagccaatgagcttaatggcatagttggggggaaaaacacagtggtggccatagcagtgtggtctcatttctccactttcccactggaagtatacataaggcgactcagaaatataaggcgggcggtggttcgcctgctggaccgaagccctaaaacggtggtcgttattcgcacagcaaacgcccaagagctcggaccagaagtgagcttattcaactctgattggtacaattttcagctagacacgatcctccgccgaatgttctctggggtaggcgtttatctggttgatgcgtgggagatgacactggctcactatctcccacacaaactgcatcctgatgaggttatcgtgaaaaaccaactggatatgtttctctcatttgtgtgccctctagagacctag

SEQ ID NO: 9849 - DNA, 99 bp, synthetic construct
  misc_feature 1..99: note = source = /note="Description of Artificial Sequence: Synthetic coding sequence"
  source 1..99: mol_type = other DNA
atgcagggcacccccggcggcggcacccggcccggccccagccccgtagaccgccggacactgctcgtgttcagcttcatcctggcggcagccctctag

SEQ ID NO: 9850 - DNA, 180 bp, synthetic construct
  misc_feature 1..180: note = source = /note="Description of Artificial Sequence: Synthetic coding sequence"
  source 1..180: mol_type = other DNA
atgctggccctgctggtgctggtgaccgtggccctggccagcgcccaccacgggggcgagcactttgagggagagaaggtgttcagggtaaacgtggaagacgagaatcacatcaatattatccgcgaattggcctcgacaacccagatagacttttggaaacctgactccgtgacttag

SEQ ID NO: 9851 - DNA, 303 bp, synthetic construct
  misc_feature 1..303: note = source = /note="Description of Artificial Sequence: Synthetic coding sequence"
  source 1..303: mol_type = other DNA
atgcggccccggggcctgccccccctgctggtggtgctgctgggctgctgggccagtgtctccgcccagaccgacgcaactccagctgttacgaccgagggattaaattctacggaggctgcactcgctacatttggcaccttccctagtacacgccccccggggacaccaagggcccctggaccttccagcgggccgcgccccaccccagtcacagacggtggatatcatgttcctgcccccggtgtgcattctgatccaacaagtcggggtcagcccagatgctgctccctgtgtctctag

SEQ ID NO: 9852 - DNA, 234 bp, synthetic construct
  misc_feature 1..234: note = source = /note="Description of Artificial Sequence: Synthetic coding sequence"
  source 1..234: mol_type = other DNA
atgcggagcccccggatgcgggtgtgcgccaagagcgtgctgctgtcccactggctgttcctggcctatgttctgatggtttgctgtaaactgatgagtgcttcctctcagcacctgagaggccacgccggacaccaccagattaaacagggaacatgcgaggtggttgctgtgcatcgttgctgtaataagaaccggattgaggaacgttcacagactgtcaaatgcagttag

SEQ ID NO: 9853 - DNA, 12 bp, synthetic construct
  misc_feature 1..12: note = source = /note="Description of Artificial Sequence: Synthetic coding sequence"
  source 1..12: mol_type = other DNA
atgtggacctag

SEQ ID NO: 9854 - DNA, 402 bp, synthetic construct
  misc_feature 1..402: note = source = /note="Description of Artificial Sequence: Synthetic coding sequence"
  source 1..402: mol_type = other DNA
atggccatggtgagcgccatgagctgggtgctgtacctgtggatcagcgcttgtgccatgcttctgtgccacggatccctgcagcacactttccagcaacatcatctccatagacctgaagggggcacatgcgaggtcattgcagcccaccggtgttgcaacaagaaccgtatagaagagcggtcccagactgtcaagtgctcctgcctgccaggcaaagttgccggtaccactagaaatcgaccctcatgcgtggacgcatccatcgtaatcggtaagtggtggtgcgagatggagccgtgccttgagggagaagagtgcaaaacattgccggataactccggatggatgtgtgctacagggaacaaaattaagactactcggatccacccccgtacctag

SEQ ID NO: 9855 - DNA, 600 bp, synthetic construct
  misc_feature 1..600: note = source = /note="Description of Artificial Sequence: Synthetic coding sequence"
  source 1..600: mol_type = other DNA
atgaccatgcggcacaactggacccccgacctgagccccctgtgggtgttactcctctgtgctcacgttgtcacgttgctggtgcgagccactcctgtgtcacagaccactacggccgcgacggctagtgtgaggtccaccaaggacccctgtcctagtcagcctcccgtgttccccgcggctaagcagtgcccggccctcgaagtcacctggcccgaggtggaagtgcccctgaacggcaccctgagcctaagctgcgtggcgtgctcacggttccccaatttttcaatcctctactggctgggtaacgggtcttttatcgagcacctgcctggcaggctgtgggagggatccacgagccgcgagcgagggagcaccggtacgcaactctgtaaagccctggttttggagcagctaactccagccctccattcaacaaatttctcctgcgtgctggtggatcccgaacaggtggtccagcggcatgtagtcctcgcccaattgtgggtgagatccccgcgccggggcctccaggaacaggaagaactttgtttccacatgtggggcggaaaagggggcctgtgccagtcatccctgtag

SEQ ID NO: 9856 - DNA, 1044 bp, synthetic construct
  misc_feature 1..1044: note = source = /note="Description of Artificial Sequence: Synthetic coding sequence"
  source 1..1044: mol_type = other DNA
atgggcgtggtgcagtacggcgacaaccccgccacccacttcaacttaaagacccacacaaactcaagagacctgaaaacggctatcgagaagatcacccagcggggcggtctgagtaatgttggcagagcaatctcctttgtcactaaaaacttttttagcaaggctaacgggaatcggagcggggcccctaacgtggtcgtcgtgatggtagatggatggcccaccgataaggtggaggaagccagtagacttgctcgagaatcggggattaacatcttctttattactattgagggggcagcagaaaatgagaaacagtacgtcgtggaaccaaatttcgctaataaggccgtgtgcaggacaaacgggttctactccctgcatgtccagtcctggtttgggctgcataagacccttcagccactggtcaagagagtgtgcgataccgatcgcctggcctgttcaaagacctgtctgaacagtgcagatatcggcttcgtgatcgatgggtcgagttccgttggtacggggaacttccggacagttttgcagttcgtgacaaacctaacaaaagagttcgagatttccgatactgataccagaatcggagccgtgcaatacacgtacgaacagagactggagttcggcttcgacaaatacagcagtaaacccgacattcttaatgccatcaaacgggtggggtactggagcggaggaacatcaacaggcgctgcaataaactttgccctagagcagctgtttaagaaatctaagcccaacaagcgaaagctcatgattctcatcaccgacggccgctcatatgacgacgtcagaatcccagcaatggcagcgcacctcaagggcgtaattacctacgccattggggtggcgtgggccgcacaggaagagctagaggtgattgctactcatccagctcgtgatcatagtttctttgtcgatgaattcgataacttacaccagtatgttccgcgcatcatacagaacatctgcacagaatttaactcacaacccagaaattag

SEQ ID NO: 9857 - DNA, 27 bp, synthetic construct
  misc_feature 1..27: note = source = /note="Description of Artificial Sequence: Synthetic coding sequence"
  source 1..27: mol_type = other DNA
atgcagggcacccccggcggcggctag

SEQ ID NO: 9858 - DNA, 369 bp, synthetic construct
  misc_feature 1..369: note = source = /note="Description of Artificial Sequence: Synthetic coding sequence"
  source 1..369: mol_type = other DNA
atgctgtaccagaccatcaacagcctgaagaccaagaaccccaagctgaagattttgctcagcatcggaggttacctttttggctccaaaggttttcacccaatggtcgactcttcaacaagccgactcgagttcatcaactctatcattcttttcctgagaaatcataacttcgacggcctggatgtttcatggatttatcccgaccaaaaggagaacactcacttcaccgtactgattcatgaactagcagaagcatttcagaaagatttcaccaaatcaactaaagagcgcttgctgctaacagcaggcgtgagcgctggacgacagatgattgacaatagttatcaggtggagaagttggcctag

SEQ ID NO: 9859 - DNA, 309 bp, synthetic construct
  misc_feature 1..309: note = source = /note="Description of Artificial Sequence: Synthetic coding sequence"
  source 1..309: mol_type = other DNA
atgcgggtgagcggcgtgctgcggctgctggccctgatcttcgccatagtgacaacctggatgttcattaggtcctacatgagcttcagtatgaaaacaatccgtctgccgcggtggctggcagcctccccaacaaaggaaatccaggtgaagaagtacaagtgcggcctgatcaagccatgtcccgcaaattactttgcttttaaaatttgctcgggcgccgcaaacgttgtcgggccgacaatgtgcttcgaggacagaatgatcatgagccctgttaagaataacgtagggcgcggactcaactag

SEQ ID NO: 9860 - DNA, 660 bp, synthetic construct
  misc_feature 1..660: note = source = /note="Description of Artificial Sequence: Synthetic coding sequence"
  source 1..660: mol_type = other DNA
atgaagctgctgctgtgggcctgcatcgtgtgcgtggccttcgccagaaagaggaggttccctttcatcggcgaggacgataacgatgatgggcatcctctgcacccctcacttaatattccctacggcatacgtaatttgcctcccccactttactatcgcccagtgaacactgtgcccagttatcccgggaatacttacacggacacgggccttccaagttatccctggattctgacctccccaggattcccctatgtctaccacatacgaggctttcctctggccacacagttgaacgtccctccattgccccccagggggttcccctttgtgcctccatccaggtttttcagcgcggctgctgctcccgccgcacccccaattgcagctgaaccggcggccgctgccccacttacggctacccccgtggcggcggagcctgcggctggcgctcccgtcgctgctgaaccagcagctgaggctccagtgggtgctgagcccgcggctgaggcccccgtggctgcagagcccgccgccgaggcaccagtgggagtggagcctgcggcagaggagccttccccagccgagcctgcgacagcgaaaccggccgctccagaaccacaccccagtccttctctcgagcaagctaaccagtag

SEQ ID NO: 9861 - DNA, 1869 bp, synthetic construct
  misc_feature 1..1869: note = source = /note="Description of Artificial Sequence: Synthetic coding sequence"
  source 1..1869: mol_type = other DNA
atgggcaagagcgagggccccgtgggcatggtggagagcgccggccgggccggccagaagagacctggctttctcgaggggggtttgctacttctacttctgcttgtcactgcagctctcgtggccctgggcgtcttgtatgccgatcgtcgtggcaagcagctgcccaggctggcaagtcggctatgctttctacaggaggaacgcacattcgtgaagcgcaagccaagaggaatcccagaagcgcaggaagttagcgaagtttgtaccactcccggctgcgtaattgcggccgcacgaattctccagaatatggaccccactaccgaaccatgtgatgacttctaccagtttgcctgcggaggatggctgcgtagacacgtcattccagaaacgaatagcaggtactccatattcgatgttctgcgtgatgagttagaggtgatccttaaggcggtgttggagaacagtacagctaaagccaccgtgccccaggaagagagacatgacgtcatcgcgctttatcaccggatgggcctggaggagctgcagagtcaatttggactgaagggttttaactggacactgttcatccagacggtgctgtccagtgtgaagattaaactgctgcctgacgaagaagtggtcgtgtacggaattccttatcttcagaacctggaaaacatcatcgatacatactcagcgagaacgattcagaactaccttgtgtggcggctcgtgctggatcgcatcggcagtctatctcaacgctttaaagacacaagagtgaactatagaaaagccctcttcgggactatggtggaggaagtaagatggagagaatgtgtcgggtacgttaactcaaacatggaaaacgcagtgggatccctatacgtgcgggaagcgtttcccggcgacagtaaaagcatggtgcgcgaactcattgataaggtgaggacagtgtttgtggagacgctcgacgagctagggtggatggatgaggaaagcaagaaaaaggcccaggagaaagcaatgtctatcagggagcaaattggtcaccccgactacatcttggaggagatgaatagacggctggacgaggagtactctaatctaaatttctccgaggatctttatttcgaaaactccctgcagaatcttaaggttggagcccagaggtccctgcgcaaattgagagaaaaagtggacccaaatctgtggataattggcgcggccgtggtgaatgccttttactctcctaaccggaatcagatagtcttcccagccggtatcctgcagccccccttcttttctaaagaacagcctcaggcgctgaactttggcggcatcggaatggtgatcggacatgagatcacccacgggttcgatgacaatgggcggaacttcgataagaacggcaatatgatggactggtggtcgaatttctcaacccagcacttcagggaacagtccgagtgtatgatttaccaatacgggaactatagctgggatctggcagatgaacagaatgttaacgggtttaatacattaggcgagaacatcgcagacaacggcggggtgagacaagcatataaggcttaccttaagtggatggccgaaggcggtaaagatcagcagttgccaggtctcgaccttacgcacgagcagttgttttttatcaactacgcccaggtgtggtgcgggtcttatagacctgaattcgccatccagagtataaagactgacgtgcactcgccgcttaaatacagagtgctggggtcattgcagaaccttgccgcctttgccgatacattccattgcgccaggggcacccccatgcatcccaaggagcgatgcagggtctggtag

SEQ ID NO: 9862 - DNA, 168 bp, synthetic construct
  misc_feature 1..168: note = source = /note="Description of Artificial Sequence: Synthetic coding sequence"
  source 1..168: mol_type = other DNA
atgggccccgaggccctgagcagcctgctgctgctgctgctggtggcctcaggcgacgctgatatgaagggacatttcgatccggcaaagtgtcgatatgcactgggcatgcaagaccggacgattccagacagtgacatttcggcatcttcttcatggtctgattag

SEQ ID NO: 9863 - DNA, 156 bp, synthetic construct
  misc_feature 1..156: note = source = /note="Description of Artificial Sequence: Synthetic coding sequence"
  source 1..156: mol_type = other DNA
atgggccccgaggccctgagcagcctgctgctgctgctgctggtggcaagcggtgacgcagatatgaaagggcattttgaccctgccaaatgtcggtatgcgctgggcatgcaggaccgcacaatccctgactccgacatctccgccagctcttag

SEQ ID NO: 9864 - DNA, 1620 bp, synthetic construct
  misc_feature 1..1620: note = source = /note="Description of Artificial Sequence: Synthetic coding sequence"
  source 1..1620: mol_type = other DNA
atgagcgagccccaggagaagaagctgagcgagaacaccgacttccttgctccgggtgtgtctagcttcaccgactcaaatcaacaagagtctattactaaaagggaagagaaccaggaacagccacgcaactactcacaccaccagttgaacaggtcttccaaacattcccaggggctacgcgatcagggcaatcaggaacaggacccgaacattagtaacggcgaagaggaagaagagaaagaaccaggtgaggtggggacccacaatgacaaccaggaacgaaaaaccgagctgccacgcgagcacgctaactccaagcaggaagaagacaacacccaatccgacgacatcctggaggagagtgaccagcctacccaagtcagcaagatgcaggaggacgagttcgaccagggcaaccaggaacaggaggacaactctaatgccgaaatggaagaggagaacgcctccaacgtgaataaacatatccaagaaacagagtggcagtctcaggaagggaaaaccggcctcgaagcaataagcaaccataaagaaaccgaggaaaagaccgtatctgaagctcttctgatggagccaaccgatgacggaaatactaccccgaggaaccatggtgtcgatgacgacggtgacgatgatggcgatgatggggggacagacggtccaaggcactcggcctccgacgattacttcattccctcccaagcatttctggaagcggaacgcgctcagtcaatcgcataccatctaaaaatcgaggaacagcgggaaaaggtgcacgagaacgagaatatcggaaccacagaaccaggtgaacaccaggaagccaagaaagcagagaatagcagcaatgaggaagagaccagttctgaggggaacatgagggtccacgctgtggattcttgcatgtcatttcagtgtaaaagggggcatatctgcaaggccgatcagcagggtaagccccactgtgtgtgccaagatccagtgacctgccctcctactaagcctctggaccaagtgtgcgggaccgataaccagacatatgcgagtagctgtcaccttttcgccaccaaatgccgcctggaaggcacgaagaaggggcatcagctccaactcgactattttggcgcttgcaaaagcattccaacttgtacggattttgaggtcattcagtttcccctaaggatgcgcgattggctgaaaaatattctgatgcagctttatgaggccaattcagagcacgctggctatctgaatgagaaacaaaggaacaaagtaaagaaaatatacctggatgagaagcgacttctggccggggatcacccaattgatcttcttctcagagactttaagaaaaattatcacatgtacgtgtatccagtccactggcagtttagcgagctggaccaacaccctatggaccgagttctgacccattcagaactcgcaccactgcgggcctctctcgtgcctatggagcattgtattacccgtttttttgaagaatgcgatccaaataaagataaacatatcactttaaaagagtggggtcactgtttcggcataaaagaagaagacatcgacgaaaatctgctgttctag

SEQ ID NO: 9865 - DNA, 591 bp, synthetic construct
  misc_feature 1..591: note = source = /note="Description of Artificial Sequence: Synthetic coding sequence"
  source 1..591: mol_type = other DNA
atgccccacctggccagcctgttcaccgccagcagccggtgctgcccccatccgttgcggcccgagggatcgggagcaatggggcctgaggccctctcatcgctgctgcttctgctactggtcgcctcaggtgatgcagatatgaagggccattttgaccctgccaaatgtaggtatgcgctgggaatgcaggatcgtacaatacccgactccgatatcagcgcgtcctcctcatggtccgattccaccgccgctcggcactctcgactggaaagcagtgatggtgatggagcctggtgtccagcgggcagcgtgttccccaaggaggaggagtaccttcaggtggacctgcagagactccatctggttgcactggtcggcactcagggcaggcacgcgggaggcctcggaaaagagtttagcagaagctaccgtctaagatactctcgggacggaagacggtggatgggctggaaggaccggtgggggcaggaggtgattagcggaaacgaagatccagagggagtggtccttaaagatcttggacctcccatggtcgcccggctggtgaggttctatccccgggcgtag

SEQ ID NO: 9866 - DNA, 162 bp, synthetic construct
  misc_feature 1..162: note = source = /note="Description of Artificial Sequence: Synthetic coding sequence"
  source 1..162: mol_type = other DNA
atgctgccctgcctggccctgctgctgctgatggagctgagcgtgtgcaccgtggccggtgacggcggagaagaacagaccctcagcacagaagctgagacgtgggtcatagtagccctggaagtcctacttggcagagggagtgacgaagggagggggtag

SEQ ID NO: 9867 - DNA, 126 bp, synthetic construct
  misc_feature 1..126: note = source = /note="Description of Artificial Sequence: Synthetic coding sequence"
  source 1..126: mol_type = other DNA
atgggccccgaggccctgagcagcctgctgctgctgctgctggtggcatctggcgacgcagatatgaaaggacatttcgaccctgccaagtgtcgatacgcgctgggcatgcaggaccgcacgtag

SEQ ID NO: 9868 - DNA, 222 bp, synthetic construct
  misc_feature 1..222: note = source = /note="Description of Artificial Sequence: Synthetic coding sequence"
  source 1..222: mol_type = other DNA
atgggccccgaggccctgagcagcctgctgctgctgctgctggtggcctctggcgatgccgatatgaagggacattttgatcctgccaaatgccggtacgctttgggcatgcaagaccgcactattccagacagtgacatctccgcttcctcatcatggtccgatagtaccgctgcgcggcattcgcggcttgagtcctcagatggggatggcgcctggtag

SEQ ID NO: 9869 - DNA, 369 bp, synthetic construct
  misc_feature 1..369: note = source = /note="Description of Artificial Sequence: Synthetic coding sequence"
  source 1..369: mol_type = other DNA
atgggccccgaggccctgagcagcctgctgctgctgctgctggtggcctccggggatgccgacatgaaggggcactttgatccagctaaatgtcgctatgcgctgggcatgcaagaccgcactatacctgacagcgatatcagtgcctcatcctcttggtcagattccacagcagcacggcactcacggctcgagtccagtgatggggacggcgcctggtgtcctgccgggtctgtgttcccaaaggaggaggaatatctgcaagtcgacctccagaggctccacttggtggccctggtaggaactcagggtaggcacgcaggaggcctggggaaggagttctcgaggagttaccgactgaggtactag

SEQ ID NO: 9870 - DNA, 483 bp, synthetic construct
  misc_feature 1..483: note = source = /note="Description of Artificial Sequence: Synthetic coding sequence"
  source 1..483: mol_type = other DNA
atgggccccgaggccctgagcagcctgctgctgctgctgctggtggccagcggggacgctgatatgaagggtcatttcgaccctgccaagtgtcgctacgccttaggcatgcaagatcggacaattcccgattccgacatttccgcttcaagctcctggtccgatagcactgcagcacggcactctcgcctagaatcatcggatggcgatggggcgtggtgcccggctggctccgtcttccctaaagaggaagagtaccttcaagtggacttacaaaggctgcacctggtggccctagtgggaacacagggacggcacgccggtgggcttgggaaagagttttctcgtagttatagactgcggtattcacgggacggccgccgatggatggggtggaaggatagatggggacaagaggtgatatctggcaatgaagatcccgagggtgtggtcttgaaggacctgggacccccaatggtctag

SEQ ID NO: 9871 - DNA, 540 bp, synthetic construct
  misc_feature 1..540: note = source = /note="Description of Artificial Sequence: Synthetic coding sequence"
  source 1..540: mol_type = other DNA
atgggcagcagcggcctgctgagcctgctggtgctgttcgtgctgttggctaatgtgcagggacctgggctgaccgattggctatttcctcgcaggtgccctaaaatccgcgaggagtgcgagttccaggagagagatgtgtgcacaaaagataggcagtgccaggacaacaagaagtgctgcgtgtttagttgcggaaaaaagtgcctcgaccttaagcaagacgtgtgcgagatgccaaaggagactggtccttgtttggcgtatttcctgcattggtggtatgataaaaaggataacacgtgctctatgttcgtctatggcggctgccaggggaataacaacaacttccagtcgaaggctaattgccttaacacctgtaagaataaacagccttgtccaaaaataaaagtggaatgcgaagtcgaggagatcgaccagtgtactaagcccagagactgcccagaaaatatgaagtgctgcccattcagcagggggaagaaatgcctagatttcaggaaagccagcctgagcacatag

SEQ ID NO: 9872 - DNA, 438 bp, synthetic construct
  misc_feature 1..438: note = source = /note="Description of Artificial Sequence: Synthetic coding sequence"
  source 1..438: mol_type = other DNA
atgctgttccggaaccggttcctgctgctgctggccctggccgccctgctggccttcgtgagcctctcactgcagttcttccacctcattcctgtgtcaacgcctaagaacggaatgtcctctaagtctcgaaaacgcattatgccggatcccgtgaccgagccaccagtcacggaccccgtgtacgaggccctcctgtactgcaacattccaagcgttgccgagaggtccatggaaggtcatgcgccccatcacttcaaactggtcagcgtccacgtgttcattcgccacggagaccggtatccattgtatgtgataccaaagacaaagcgtcccgagatcgactgtactctggtcgcaaatagaaagccataccacccgaagttagaagcctttatctcacacatgagcaaaggttcaggcgcgtccttcgaatag

SEQ ID NO: 9873 - DNA, 399 bp, synthetic construct
  misc_feature 1..399: note = source = /note="Description of Artificial Sequence: Synthetic coding sequence"
  source 1..399: mol_type = other DNA
atgggccccgaggccctgagcagcctgctgctgctgctgctggtggcttcaggtgatgccgacatgaaggggcatttcgaccctgccaaatgtagatatgccctaggcatgcaagatcggactataccagactcagacatcagtgcgtcttcatcttggtcagattctaccgcagcccggcactctcgcttagaatcctcagacggtgatggggcttggtgtccagccggctccgtcttccccaaggaagaagaatatctgcaagtggacctgcagcggcttcatctggtcgccctggtcggaacccagggccgccacgctggggggctcgggaaggagttcagccgtagctacaggctgcgctattcgagggatggtcgtcgctggatgggttggtag

SEQ ID NO: 9874 - DNA, 306 bp, synthetic construct
  misc_feature 1..306: note = source = /note="Description of Artificial Sequence: Synthetic coding sequence"
  source 1..306: mol_type = other DNA
atgggccccgaggccctgagcagcctgctgctgctgctgctggtggctagcggcgatgctgatatgaagggccactttgatcccgccaagtgccgatacgcactaggaatgcaagaccggactattcccgactctgatatctccgcttcctcttcttggtccgatagcaccgccgcacgtcacagccggctcgaatcttccgacggcgatggcgcgtggtgccctgctggatccgtctttcctaaagaagaggagtatctgcaggttgacctccagcgactgcacttagtggcgttggtggggtag

SEQ ID NO: 9875 - DNA, 393 bp, synthetic construct
  misc_feature 1..393: note = source = /note="Description of Artificial Sequence: Synthetic coding sequence"
  source 1..393: mol_type = other DNA
atgctggcccccctgttcctgtgctgcctgcggaacctgttccggaagctaatttcttttcagccccctcaactcgggcggaccaatatgcattattctaagctgcctagaacagccattgagacggaattcaagcagaacgttggtcccccgccaaaggaccttactgccgaggtatattttccgtcaatcaagtctcgtagtcacctccctgccgtgttctataaccagtattttaaacaccctaaatgcgttggcgagtatggacctaagaatggagctgaacgccagatcgaggagagaaaagtgctccccacaacaatgatgttcagcatgttggccgactgtgtactgaagtccacacccatcccgattttgggagtggccatgtag

SEQ ID NO: 9876 - DNA, 420 bp, synthetic construct
  misc_feature 1..420: note = source = /note="Description of Artificial Sequence: Synthetic coding sequence"
  source 1..420: mol_type = other DNA
atgcccgccatcgccgtgctggccgccgccgccgccgcctggtgctttcttcaggttgagagcaggcatctcgatgcgctcgccggaggcgccggccccaaccatggcaattttctggacaatgaccagtggctcagcaccgtctcccaatatgacagggataaatactggaaccgtttcagggatgatgactatttccgcaattggaatccaaacaagccttttgatcaggccttggacccctcaaaagacccgtgtttgaaggtcaaatgtagcccgcataaggtgtgcgtgacgcaggattaccagaccgccctctgtgtgtcacgaaagcacctactgccaagacagaaaaagggcaatgtcgcccagaaacactgggttggaccctccaacctcgtgaagtgcaagccatgctag

SEQ ID NO: 9877 - DNA, 510 bp, synthetic construct
  misc_feature 1..510: note = source = /note="Description of Artificial Sequence: Synthetic coding sequence"
  source 1..510: mol_type = other DNA
atgcggctgctgatcctgacctgcctggtggccgtggccctggcccgcccaaaattacccttacgatatcctgagcgcctgcagaacccctccgagtccagcgagcccatcccactggaaagccgagaggaatacatgaatggaatgaatcgccagagaaatattctcagagagaagcaaactgatgagattaaaaattgcgtcgtggcagagcccgagaaaatggaatccagtatttcatcttctagcgaggagcagttttgcagactcaatgagtacaatcagttacagctccaggccgcgcatgctcaggaacagatccggcgcatgaacgaaaatagccacgtgcaggtgccattccagcagctaaaccagttggcagcctatccatacgctgtctggtactaccctcagattatgcagtatgtgccttttcccccattttctgacatatcaaatccgaccgcacacgagaattacgagaaaaacaacgtcatgctgcaatggtag

SEQ ID NO: 9878 - DNA, 921 bp, synthetic construct
  misc_feature 1..921: note = source = /note="Description of Artificial Sequence: Synthetic coding sequence"
  source 1..921: mol_type = other DNA
atgaagaaggacgagccccccctggacttccccgacaccctggagggctttgaatacgcttttaacgagaaggggcagctcaggcacattaaaactggcgaaccttttgtgttcaattacagggaggacctgcaccggtggaaccagaagcggtacgaagccctgggcgagatcatcactaaatatgtttatgagctcctggaaaaagactgcaacctgaagaaggtatcaattcctgagggttacggagttatagtcctgaacccaaacgagaattacatcgaggtcgagaagcccaagattcatgttcagagctcctcggactcgtctgatgagcccgcagaaaaacgagaaaggaaagataaggttagcaaggaaaccaagaaacgtagggatttctatgaaaagtacaggaacccccaacgggaaaaggagatgatgcagctctacataagagagaacggcagtcccgaggagcacgctatttacgtgtgggaccatttcattgcccaggctgccgccgagaacgttttttttgttgcacattcatacggaggtttggccttcgtggagctgatgatacagagagaagccgacgttaagaataaggtgaccgcagtggcccttacggatagtgtgcataacgtgtggcaccaggaggccgggaagacgatcagggaatggatgcgggaaaattgctgcaactgggtgtcttcctccgagcctctcgatacttccgtagagtccatgctgccagactgtccgagagtaagtgccgggaccgataggcacgaactgacgtcatggaagtctttcccatcaattttcaagttctttaccgaagcctcagaggcgaaaactagctctctgaaaccggccgttacgagaaggtcacatagaatcaagcacgaggagctttag

SEQ ID NO: 9879 - DNA, 2862 bp, synthetic construct
  misc_feature 1..2862: note = source = /note="Description of Artificial Sequence: Synthetic coding sequence"
  source 1..2862: mol_type = other DNA
tgacagctgtgctggctgcccctgctggcccccctgctgctgctgaggcctcctggcgtgcagtcagctggcccgatcagagctttcgtggtcccccatagccacatggatgttggttgggtgtacaccgtccaggaatcaatgcgagcatatgcagctaacgtttatacgagcgtcgtggaggagctggcacgtgggcagcaaaggcgattcattgctgtggagcaggagtttttccggctgtggtgggatggcgttgcctctgatcaacagaaatatcaggtcagacagctgttagaggaaggccgcctggagttcgtaatcggtggccaagtgatgcacgatgaggctgtgacccatctcgatgaccaaatcctgcaactcacggaggggcacgggtttctctatgagacatttggtatccggccccaattcagttggcacgtggatccattcggcgcaagcgcaaccacccccaccctgttcgcgctagcaggctttaatgctcatctcggatctcgaattgattatgacttaaaagcagccatgcaagaggcacgaggtttgcagtttgtctggaggggatccccctctctgtctgaaagacaggaaatttttacacacatcatggatcaatacagttactgcaccccatcacatatcccattcagcaacagaagcggattttactggaatggggtcgccgtgttccctaagcctcctcaggacggcgtataccctaacatgtcagagcccgtgacccccgctaacatcaatctctatgccgaagcactagtggctaacgtgaagcaaagggccgcatggttccgcaccccacacgtgctgtggccatggggatgcgacaagcaattttttaatgccagcgtacagtttgctaatatggaccccctcctcgaccatatcaacagtcatgcggccgagttaggggtttcagtacagtatgcaacattgggcgattatttcagggccctgcatgctttaaacgtgacctggcgggtcagggatcaccatgactttttaccttattcaacagagcccttccaggcttggacagggttttacacatcgcgcagctctttgaaaggccttgccaggcgcgctagcgctctgctttacgccggcgagtctatgtttactagatacttgtggcctgctcctcgcggccatttggaccccacgtgggcactgcaacagctgcagcaacttaggtgggcagtgtcagaagtgcagcaccacgacgcaataaccggcaccgaatctcctaaggtgagggatatgtacgcaactcatttagcctctggaatgttgggcatgcgtaagctgatggcaagcatcgtgctggatgaactgcaaccgcaggccccaatggcggcctcgtctgatgccggcccagcaggacatttcgctagcgtgtataatcctttagcatggactgtgacaacaatcgtgacacttaccgtgggtttcccaggcgtccgggtaactgatgaggccgggcatcccgtgcctagtcagatacagaatagtacagagactccatctgcctacgacctgcttatcttgaccactattcctggcctgtcatataggcattataatattcggccaactgccggagcgcaggagggcactcaagagccagccgccactgtggcaagtacactgcagtttgggaggagactaagaagaagaacctcgcatgcgggcaggtacctcgtgcctgtggcgaatgactgttacatcgtgttgctggaccaggacactaacctcatgcactctatttgggagcgccagtccaacagaacagtgcgggttacacaagagttcttggaatatcacgttaacggcgacgtcaagcaaggacccatttctgacaattacttattcacccccggtaaagctgctgtgccagcttgggaggcggtagaaatggagatagtggctggccagctagtcactgaaattcgtcagtacttctacaggaatatgacagcacagaactacacctacgctattcgaagcaggctgactcatgtgccccagggccatgatggtgaacttctttgtcatcgcatagaacaggagtaccaagccggccctctggagctcaacagagaggctgtcctacggacgagcaccaacctcaattcccagcaagtaatctattccgataacaacgggtaccagatgcagcgcagaccttacgtgagctatgtgaataacagtattgcacggaactattacccaatggtgcagtccgcctttatggaggatggaaaatcccgcctggtgctgttgtccgagagggctcatgggatcagttcccagggcaacggccaggtagaggtgatgctacatcggcgcctgtggaacaactttgattgggacctcggctacaaccttacacttaatgatacctctgtggtacatccggttctatggctgctgctcgggtcctggtctctcacaacggcactgagacaacggtccgcactggcactgcagcaccggcctgtagtcctattcggggatctggccggcacagccccaaagctgcctggtcctcaacagcaggaagctgttactctaccccccaacctccacttacagatactgtctattcccggatggaggtattcctcaaatcacacagagcactcacaaaacctccggaaggggcacaggggagaggcacaggccgacctgcggcgcgttctgttgaggctgtatcacctttatgaagtgggggaggatcctgtgctgtcccaacccgtcacggtgaacctagaggtcaacttccccacaccaatacagaccatttctcagggtagcaaaccttag

SEQ ID NO: 9880 - DNA, 459 bp, synthetic construct
  misc_feature 1..459: note = source = /note="Description of Artificial Sequence: Synthetic coding sequence"
  source 1..459: mol_type = other DNA
atgcggttcaagaccaccgccaaggacggcctgctgctgtggcggggagacagccccatgagaccaaattcagacttcatctccctgggcctccgcgacggagctctagtcttctcgtacaatctggggagcggtgtggcaagcatcatggtcaacggatcattcaacgacggtcgttggcatagagttaaagccgtgcgcgatggtcagtccggtaaaataaccgtggatgattacggggcaaggaccggcaagtctcccggtatgatgagacagcttaacatcaatggcgctctatacgtgggtgggatgaaggagattgccctgcatacaaatcggcagtatatgcgcggactggttggctgcatttcccattttacccttagcacagactatcatataagccttgtcgaggatgcagtcgatgggaagaacattaacacatgcggcgccaagtag

SEQ ID NO: 9881 - DNA, 1701 bp, synthetic construct
  misc_feature 1..1701: note = source = /note="Description of Artificial Sequence: Synthetic coding sequence"
  source 1..1701: mol_type = other DNA
atggacttcctgctggccctggtgctggtgagcagcctgtacctgcaggcagccgcggaatttgacgggcgctggccacgccagatcgtctctagtattggactatgccgatatggcggcagaatcgattgctgctggggttgggcccggcagtcctggggacagtgtcagccagtgtgccagccaagatgcaagcacggggaatgcattggccccaacaagtgtaaatgccaccccggctacgcgggtaagacatgtaaccaggatgagcacatccccgccccactggatcagggaagtgagcagccacttttccaaccgctcgatcatcaagctaccagcctgccatcacgcgacttaaatgaatgtggcctgaagcccaggccttgtaaacaccgttgcatgaacacctacggatcttacaagtgctactgcttaaatggctatatgctgatgcctgatgggagctgttcttcagcactcacctgttcaatggctaactgccagtatgggtgtgatgttgttaaggggcagattagatgtcagtgcccttccccaggcctgcaactggctcctgacgggcgcacttgtgtagacgtcgacgaatgtgccaccggcagggcgagttgcccacgcttccggcaatgtgttaatacattcggctcctacatctgtaagtgccataagggttttgacttgatgtacataggcggtaagtaccaatgtcacgacatcgacgagtgcagtctgggccagtatcaatgttcaagcttcgcaaggtgctataacattagggggtcatacaaatgcaagtgcaaggaaggatatcagggggatggactcacctgtgtctacatcccaaaagtgatgatcgagccctcggggcccattcatgtgccaaaaggaaacggaacgattctgaagggcgatacagggaacaataattggatcccagacgtgggatccacctggtggccccctaagactccatacatacccccgataattaccaaccgccctacaagtaaacccaccaccaggcctacccccaagccaacccctattccgacgccgccaccacccccacctctgcctacagagttacgcacaccgctccctccgacaactcccgaacggcctaccactggcctgaccacaattgctcctgctgcctctactcctccaggaggaatcaccgtggacaaccgagtgcaaactgacccccagaagcctaggggggatgtgttcagcgttctggtccattcctgtaacttcgaccacggcctgtgcggatggatcagggagaaggataacgacctgcattgggaacccattcgagatccagccggcggacagtacctgaccgtgtcagcagctaaggcccccgggggcaaagctgcacgtctggtcctaccacttggtaggttaatgcattccggcgatttatgtctgtccttccgtcacaaggttacgggcttgcattcaggcaccctacaggtctttgtgcgcaaacacggcgcacacggtgctgccctgtggggccgaaatggaggccacggttggcgccaaactcagatcacgctccggggagccgatattaaaagcgtcgtctttaaaggagagaaacggaggggccatactggagagattggcttggacgacgtcagtttgaagaaagggcactgcagcgaggaaagatag

SEQ ID NO: 9882 - DNA, 213 bp, synthetic construct
  misc_feature 1..213: note = source = /note="Description of Artificial Sequence: Synthetic coding sequence"
  source 1..213: mol_type = other DNA
atgggccccgaggccctgagcagcctgctgctgctgctgctggtggcatccggggacgccgatatgaagggtcactttgaccctgcgaaatgtagatatgccctcggcatgcaggaccggactatccctgattccgacataagtgcctcctcaagctggtctgactccaccgccgcccgccacagccgtctggagtcctctgatggcgactag

SEQ ID NO: 9883 - DNA, 237 bp, synthetic construct
  misc_feature 1..237: note = source = /note="Description of Artificial Sequence: Synthetic coding sequence"
  source 1..237: mol_type = other DNA
atgggccccgaggccctgagcagcctgctgctgctgctgctggtggcatctggtgatgctgatatgaaaggccactttgaccccgcaaaatgccggtatgccttaggcatgcaggacagaacaatcccggatagtgatataagcgcttctagttcttggagcgacagtacagccgcccgacattcgagactcgaatcaagcgacggcgacggtgcatggtgtcccgctgggtcctag

SEQ ID NO: 9884 - DNA, 339 bp, synthetic construct
  misc_feature 1..339: note = source = /note="Description of Artificial Sequence: Synthetic coding sequence"
  source 1..339: mol_type = other DNA
atgcggttcaagaccaccgccaaggacggcctgctgctgtggcggggcgattctcccatgcgcccaaacagtgatttcatatcccttggtctcagagatggagctttggtttttagctacaatctggggtccggggtcgccagcattatggtcaacggaagcttcaacgacgggcggtggcatcgggtcaaagccgtcagggacggacagtcgggaaaaatcacagtagacgattacggggctcggacaggcaagagccccggcatgatgcggcagctgaacataaatggggccctgtacgtgggcggaatgaaagaaattgcccttcataccaactag

SEQ ID NO: 9885 - DNA, 2685 bp, synthetic construct
  misc_feature 1..2685: note = source = /note="Description of Artificial Sequence: Synthetic coding sequence"
  source 1..2685: mol_type = other DNA
atgagcctgccccggtgctgcccccaccccctgcggcccgagggctccggagcaatgggcccagaggcgctgtccagcctgttactgctgctgttggtggccagcggtgatgccgacatgaaaggccacttcgaccccgctaaatgccgctacgcgctgggaatgcaggaccgtacaatacctgatagcgacatctccgcttccagttcctggtctgactcaaccgccgctcggcacagtcgcctcgaatcctctgacggggacggtgcatggtgcccagcaggtagcgtcttccccaaggaagaggagtatttacaggtcgatttacagaggctccacctggtggctcttgtcggcacccaggggcggcatgccgggggcctgggtaaggagttctctcggtcttacaggctacgttacagtcgggacgggcgcagatggatggggtggaaggacagatggggccaagaggtcatctcagggaatgaagatcccgagggagtcgtgctaaaggacctcggcccacctatggttgctcgccttgtcagattctacccccgggctgatagagtgatgagtgtgtgcctgcgtgtcgagttatacgggtgcctgtggcgcgatgggctcctgagctacaccgcacccgtgggtcaaaccatgtatttatcagaggcggtatatttaaatgacagcacatatgatggccatacggtgggaggcctccagtatggtggattgggccagctggcggatggcgtcgttggattggacgacttccgcaagtcccaggagctgcgagtttggccgggatatgattatgtggggtggtctaatcattcattttccagcgggtacgtcgagatggagtttgaatttgataggctgcgagcatttcaggctatgcaggtgcattgcaataatatgcacaccctgggcgcacggttgcctgggggtgtcgaatgcaggtttaggcgcggacccgccatggcgtgggagggcgagcctatgcgacacaatctaggtggaaaccttggcgaccctcgggccagagccgtgtctgtgccactgggcgggcgtgtggcacggtttctgcaatgtaggtttttgttcgctgggccctggctgctcttttccgaaatcagctttatatccgatgtcgtgaacaactcaagtccagcactcggaggcactttccctccagctccatggtggccacctggtccacctcctactaacttctcctctctggagctggagcctcggggccagcagccagttgccaaggcggaaggatccccaactgccatcttgataggctgtttggtcgccattatcctcctgcttcttctaattattgcccttatgctgtggcggctccattggagaagactgctatccaaagccgagcgcagggtgctggaggaagagctaactgtacaccttagcgtgccaggagataccatcctgatcaataatagaccaggcccacgggaaccccccccttaccaggagccgcgcccaagggggaacccgcctcactccgccccctgcgtccccaatggctctgcctactccggtgactacatggagcctgagaaaccaggtgccccccttctgcctcctcctccccagaacagcgtcccacattatgctgaggcagacatcgttacactccagggagttacaggggggaacacttatgctgttcccgccctgccccccggagccgtgggggatggaccccccagagtcgattttccacggtccaggctgcggttcaaggagaagctcggggagggccagttcggggaggtccacctgtgcgaggtcgactcaccccaagatctggtgtcccttgactttcccctgaatgtgagaaagggacatcctctgttggtggctgtgaaaatcctgcgcccggatgcaaccaaaaacgctaggaacgatttcttgaaggaggtcaagatcatgtctaggctgaaggatcccaacatcatccgtcttctgggggtatgcgtgcaggacgatcccttgtgtatgataacagattacatggagaatggcgacctaaaccaattcctctcagcacatcagctggaggataaagccgctgaaggggccccaggcgacggccaggccgcgcaggggccaacaatttcctaccccatgttgcttcacgtcgccgcccaaattgctagtggaatgaggtaccttgccactctgaacttcgttcatagggatttggccacaagaaactgtcttgttggtgagaactttacaataaaaatagctgacttcggaatgtcccggaatttgtacgcgggagactactaccgagtccaagggagggctgtgttgcccatccggtggatggcatgggaatgcatcctgatgggaaaatttactacagcaagtgacgtctgggcatttggcgtaacactgtgggaggttctgatgctctgccgggcacagcccttcggacagctcactgacgagcaggtcatcgagaacgctggcgagtttttcagagaccaagggagacaggtttatctgtctcgcccacccgcctgcccacaaggcctgtacgaacttatgctaagatgctggtcccgagagtcggaacaacgtccaccgttttctcagctccaccgctttttggcagaggacgccttaaacaccgtgtag

SEQ ID NO: 9886 - DNA, 384 bp, synthetic construct
  misc_feature 1..384: note = source = /note="Description of Artificial Sequence: Synthetic coding sequence"
  source 1..384: mol_type = other DNA
atgggccccgaggccctgagcagcctgctgctgctgctgctggtggccagcggggacgccgacatgaagggccatttcgacccggcaaagtgtcgttatgccctcggcatgcaagatcgtaccataccggattctgacatcagcgcttcttcaagctggtcggactccacagcagcaaggcatagcaggcttgaatccagcgatggcgacggcgcctggtgccccgcaggaagcgtgttccctaaggaggaagagtacttacaggtcgacctgcagagactgcatcttgtagccttggtcggaacccaggggagacacgccggggggctggggaaggagttcagcaggagctatcggctccgatatagcagggatggaaggtag

SEQ ID NO: 9887 - DNA, 1113 bp, synthetic construct
  misc_feature 1..1113: note = source = /note="Description of Artificial Sequence: Synthetic coding sequence"
  source 1..1113: mol_type = other DNA
atgaagaaggacgagccccccctggacttccccgacaccctggagggctttgaatatgctttcaatgagaaagggcagcttagacatatcaaaactggagaacctttcgttttcaactatcgtgaggatctccaccggtggaatcagaagaggtatgaggccttgggggagataattactaagtatgtctacgagctgctggagaaagattgtaatctgaagaaggtgtctatcccagtagatgcaacagagtctgagccgaagagctttatattcatgtctgaggacgccctcaccaatccccagaagctcatggtgctcatccacgggagtggtgtcgtcagagctggtcagtgggccagaagactgattatcaacgaggaccttgattctggcactcaaatcccatttatcaaacgcgctgttgctgaaggatacggagtgattgtactgaacccaaatgagaactatattgaagtggaaaaaccaaaaattcatgtgcaaagctcatccgatagctctgacgaaccggccgagaagcgtgagagaaaggacaaagtctccaaggaaacaaaaaaaagaagggatttctatgaaaaataccggaatcctcagcgggagaaggaaatgatgcaactgtatattagggaaaacggatcccccgaagaacatgctatctacgtgtgggaccatttcatcgcccaggccgctgctgagaacgtgttcttcgtggcccattcatacgggggtctggcttttgtggagcttatgatccagagggaagccgatgtcaagaataaagtaacagcagtggcgcttactgactccgtccacaatgtttggcaccaagaggcgggaaagactatacgtgagtggatgcgagaaaactgttgcaactgggtcagcagcagcgagcctctcgacacaagcgtcgagtcaatgcttcccgactgtcctagagtgagcgctgggacagacagacacgaactgacttcctggaagtcattcccctctatctttaagttctttacagaggctagcgaggcaaaaacgtcctctctgaagcctgcagttaccaggcgctcccaccggattaaacatgaagagctgtag

SEQ ID NO: 9888 - DNA, 435 bp, synthetic construct
  misc_feature 1..435: note = source = /note="Description of Artificial Sequence: Synthetic coding sequence"
  source 1..435: mol_type = other DNA
atgaagaccggcctgttcttcctgtgcctgctgggcaccgccgccgccatcccaacaaatgcacgcctgttaagcgaccactccaaacctactgccgaaacagtggctcctgataacactgcaatcccgtctctgcgtgcagaggccgaagaaaacgagaaagagactgccgtgtccacggaagacgatagccaccataaggccgagaagtcttcagtgctcaaatccaaggaggaatcccacgagcagagcgcagagcaaggcaaatcgtctagtcaggaactgggattgaaagaccaggaggactccgatgggcatctaagcgtgaacctggaatatgccccaacagaggggaccctggatattaaggaggacatgtcagaaccccaggaaaaaaagctgtccgagaataccgattttctagcacccggctag

SEQ ID NO: 9889 - DNA, 1341 bp, synthetic construct
  misc_feature 1..1341: note = source = /note="Description of Artificial Sequence: Synthetic coding sequence"
  source 1..1341: mol_type = other DNA
ctgaccctgcacagcctgacctgctacgaggacctggtgaccttcctgcaacagtcaatacaccagttcgaggttgggccttacggctgtatcttgttgaccctgtctgccatactgagcaggtctactgaactgattaggcaggatttcgacgtaccaaccagccacttgatcggtgcacatggctattgtacacaggagctggtgaatctgctgctgacgggcaaggccgtatctaatgtttttaatgacgtggtggaattggacagtggtgatgggaacatcacactccttcgagggatagccgctcgctctgacattgggttcctatccctgtttgagcattacaacatgtgccaggtcgggtgctttcttaagacccctagatttcccatctgggtcgtatgtagtgagtcacatttcagtatactcttttccctgcagcctgggctattgcgagactggcgcaccgaacgtcttttcgacctttactactatgacggactcgctaaccagcaggaacagatccggctcactattgacacgacccagacaataagcgaggacacagataatgacttggtgccgcctctggaactatgtatccgcacaaatataggaagcgccctgggtttcaaataccctgtcggaaacaaccaaaccgccgtccaggacaacgtgaaagtctctcttgctttcgggctctccattgccaccctcgctcagagtgtggggcacataagcggagcccacctaaaccccgccgtaactttgggactgctgctgtcctgccagattagtatctttagggcgctcatgtatatcatcgcccagtgcgtgggcgccattgtagccactgctattctgagtgggataacttcatccctcacaggcaacagtctgggaaggaacgacttggccgatggagtgaactccggccagggcttgggtatcgaaatcatcggaacactgcagctagtgctgtgtgtcttggccactacagaccggaggaggcgcgatctgggagggtccgctccactcgccattgggctttcagtggctctcggccatctgctggccatcgattacaccggctgtggaataaaccctgccaggagctttggttcagccgtgattacccacaattttagtaatcattggattttctgggtggggcccttcatcggcggagccctggccgtcctgatttatgactttatactcgccccaaggagcagtgatctgaccgatcgagtcaaagtgtggactagcggccaagtcgaggagtacgacctagatgctgacgacatcaattcccgggttgaaatgaaacctaagtag

SEQ ID NO: 9890 - DNA, 81 bp, synthetic construct
  misc_feature 1..81: note = source = /note="Description of Artificial Sequence: Synthetic coding sequence"
  source 1..81: mol_type = other DNA
atgaagctgctgctgtgggcctgcatcgtgtgcgtggccttcgccagaaaaaacgcgggactaggttttctgtggctctag

SEQ ID NO: 9891 - DNA, 348 bp, synthetic construct
  misc_feature 1..348: note = source = /note="Description of Artificial Sequence: Synthetic coding sequence"
  source 1..348: mol_type = other DNA
atgggccccgaggccctgagcagcctgctgctgctgctgctggtggctagtggtgacgccgatatgaagggccactttgatccagctaaatgtcgatacgcgcttggaatgcaggaccgcaccatcccagattccgatatctcagcctcatcctcttggtctgactcaacagctgctaggcactcaaggctggagagttcagacggtgatggcgcatggtgcccagccgggagtgtatttcctaaagaagaggaatacctgcaggtggatctgcagcgactacatctagtggccctcgtcggcacccaaggccgccatgcaggaggcttgggtaaggagttcagctag

SEQ ID NO: 9892 - DNA, 165 bp, synthetic construct
  misc_feature 1..165: note = source = /note="Description of Artificial Sequence: Synthetic coding sequence"
  source 1..165: mol_type = other DNA
atgtacatccccctggaccccgactacaacgccgactgccccaacgtgaccgccccagtgtgtgcctctaatggacacacgtttcagaatgaatgtttcttctgcgtcgagcagcgcgagttccactatagaataaaattcgagaaatatggtaagtgtgactag

SEQ ID NO: 9893 - DNA, 351 bp, synthetic construct
  misc_feature 1..351: note = source = /note="Description of Artificial Sequence: Synthetic coding sequence"
  source 1..351: mol_type = other DNA
atggtgctgctgcactggtgcctgctgtggctgctgttccccctgagtagtcgcactcagaagctgcctactcgtgatgaggagctcttccagatgcagatccgggacaaggcatttttccacgatagcagcgtgatacctgacggcgcagagattagttcatacctgttcagagatactcctaaaaggtatttctttgtggtggaagaagacaacactccattgtccgtcaccgttactccatgcgatgctcctctagagtggaaattatctctgcaagagctgcctgaggacaggtccggcgaagggagcggagatttggaacccctggaacagcagaaacagcaatag

SEQ ID NO: 9894 - DNA, 432 bp, synthetic construct
  misc_feature 1..432: note = source = /note="Description of Artificial Sequence: Synthetic coding sequence"
  source 1..432: mol_type = other DNA
atgggccccgaggccctgagcagcctgctgctgctgctgctggtggcttccggtgatgctgacatgaagggtcactttgaccctgccaagtgtcggtacgctctgggtatgcaggataggaccatccccgacagcgatataagtgcttcaagcagttggtcggacagtaccgccgctaggcactctagactggagtcttccgacggcgacggcgcctggtgtccggccggatcggtattccctaaggaggaagagtaccttcaggtagacctgcagagacttcaccttgtggccctagttgggacccagggacggcacgccggtggtctcggcaaggaattctcccggagctacaggttgcgatatagccgagatggccggcgctggatgggttggaaggaccgctggggtcaggaggtgataagcggttag

SEQ ID NO: 9895 - DNA, 747 bp, synthetic construct
  misc_feature 1..747: note = source = /note="Description of Artificial Sequence: Synthetic coding sequence"
  source 1..747: mol_type = other DNA
atggagctgctgcaggtgaccatcctgttcctgctgcccagcatctgtagttccaactctactggcgttctggaggcggcaaacaactctttggtggtcaccaccaccaaaccgagtatcacaacaccaaacactgaaagcttgcagaagaacgtggtgacaccgacaacgggtactacgccgaaggggaccataacaaatgagcttctgaagatgagcctcatgtccaccgcaacttttctcacctcgaaggacgaaggcctcaaggccacaactaccgatgtgcgcaagaacgattccatcatctcaaatgtgaccgtgacctccgtcaccctgcccaatgcagtgtctacacttcagagcagcaagcccaaatcctctgttctgcagcctgacgcgtcacccagtaagactggaacgctaacttccattcccgtcacaatcccagagaacactagccagagccaggtgatcggcactgaaggcgggaagaacgcaagtaccagtgccacaagtcggtcctatagttccataatcctgcccgtcgtgatcgcgttgatcgtcattacactgtccgtatttgttttggtgggcctctaccggatgtgctggaaggctgaccccggcacaccagaaaacgggaatgatcaacctcagtcagacaaggagagcgtcaaattactcacagtgaaaaccatctctcacgagagcggcgagcactctgcacaagggaaaactaagaactag

SEQ ID NO: 9896 - DNA, 363 bp, synthetic construct
  misc_feature 1..363: note = source = /note="Description of Artificial Sequence: Synthetic coding sequence"
  source 1..363: mol_type = other DNA
atgaagaccggcctgttcttcctgtgcctgctgggcaccgccgccgcgatcccaaccaatgcccgcctgctctctgaccatagcaagcctacggcggagacggttgcaccggacaacacggcaattccttctcttcgggccgaagccgaggaaaacgagaaggagaccgccgtcagtaccgaagatgacagtcaccacaaggctgagaagtctagtgttctgaagagcaaggaggaaagtcatgagcaatccgcagagcagggcaaaagtagcagtcaggaactggggctgaaagatcaagaagactccgacggccacctgtctgtcaatttggaatacgccccaacagaggggaccctgtag

SEQ ID NO: 9897 - DNA, 339 bp, synthetic construct
  misc_feature 1..339: note = source = /note="Description of Artificial Sequence: Synthetic coding sequence"
  source 1..339: mol_type = other DNA
atgggccccgaggccctgagcagcctgctgctgctgctgctggtggcctcgggagatgctgacatgaaaggacatttcgatcccgccaagtgtagatatgcattaggaatgcaggacagaacgatccccgactctgatatctccgcctcatcaagctggagcgattctacggccgcccgccactcacggttggagagcagcgatggtgacggcgcatggtgccccgccggcagtgtcttcccgaaagaggaagaatatctgcaagtggatttgcaacgcctgcatctcgtcgcccttgtgggtacccagggccgccacgccggaggcctggggaaatag

SEQ ID NO: 9898 - DNA, 513 bp, synthetic construct
  misc_feature 1..513: note = source = /note="Description of Artificial Sequence: Synthetic coding sequence"
  source 1..513: mol_type = other DNA
atgggccccgaggccctgagcagcctgctgctgctgctgctggtggctagcggtgatgcagatatgaagggacacttcgaccccgccaaatgtcggtacgcactcgggatgcaggatcgcaccataccagattcagacattagcgcctcctcgtcttggtctgactctacagcagccaggcacagccgcctggagtccagtgacggtgacggcgcatggtgccctgccggtagtgtatttccaaaggaggaagagtatctccaagtggatctgcaacgattgcacttagtcgctctggtgggcacccaggggagacacgcaggcggactggggaaggaatttagcagatcatatcgtttacggtactcacgggacggcaggcgatggatgggctggaaggataggtggggccaggaggtcatcagcggaaacgaagaccccgagggggtggtgctgaaggatctgggaccccctatggtagcgaggttagttcggttctatccccgcgcttag

SEQ ID NO: 9899 - DNA, 417 bp, synthetic construct
  misc_feature 1..417: note = source = /note="Description of Artificial Sequence: Synthetic coding sequence"
  source 1..417: mol_type = other DNA
atgggccccgaggccctgagcagcctgctgctgctgctgctggtggcctcaggcgacgcggacatgaaaggccacttcgatcccgcgaaatgtagatatgctctcggcatgcaagacagaaccattcccgactctgatatatccgcctcatccagttggagcgactccactgcggcgaggcacagccgtcttgagagcagcgatggggacggagcctggtgtcctgccggatccgtattcccaaaggaggaggagtacttgcaggtggatctgcaaaggctccatctggtcgccctggttggtacccaaggtcggcacgccggcggcttaggaaaggaattttcgagaagctaccgactccggtactccagggacgggcgtcgctggatgggttggaaggacaggtggggccaatag

SEQ ID NO: 9900 - DNA, 285 bp, synthetic construct
  misc_feature 1..285: note = source = /note="Description of Artificial Sequence: Synthetic coding sequence"
  source 1..285: mol_type = other DNA
atggccgccttcccccacaagatcatcttcttcctggtgtgcagcaccctcacacacgtcgccttctccgggatctttaacaagcgggacttcactcggtggccaaagcctaggtgcaaaatgtatatcccacttgacccagattacaacgcagattgtccaaatgtcactgcgcccgtgtgtgccagcaacggccacactttccaaaacgaatgttttttttgtgtagaacagcgtgaattccattataggatcaagttcgagaaatacgggaaatgtgattag

SEQ ID NO: 9901 - DNA, 156 bp, synthetic construct
  misc_feature 1..156: note = source = /note="Description of Artificial Sequence: Synthetic coding sequence"
  source 1..156: mol_type = other DNA
atgggccccgaggccctgagcagcctgctgctgctgctgctggtggcttctggagatgccgatatgaagggtcatttcgatcctgctaagtgcagatatgcattgggaatgcaggaccgtacgataccagactctgatatcagcgcttctagttag

SEQ ID NO: 9902 - DNA, 2760 bp, synthetic construct
  misc_feature 1..2760: note = source = /note="Description of Artificial Sequence: Synthetic coding sequence"
  source 1..2760: mol_type = other DNA
atgggccccgaggccctgagcagcctgctgctgctgctgctggtggcctcaggagacgcagacatgaagggacactttgatccagctaaatgtcgctacgccctaggcatgcaggaccggactatcccagacagcgatatatccgcttcctctagctggtcagatagtaccgctgccagacatagcaggctcgaaagttccgatggcgacggcgcctggtgtcccgccggatcagtgttcccaaaggaggaggaataccttcaggtcgatctgcaacgtcttcacctcgtcgcccttgtcggaacccaggggaggcacgccggcggcctgggcaaggagttcagcagatcctacagactgcgctacagtagagatggcaggaggtggatgggctggaaggacaggtgggggcaagaggtcatatctggaaatgaggatcctgaaggtgtagtcctgaaggacctggggccacccatggttgctcgcttagttagattttatccacgcgctgatagagtcatgagtgtgtgcctccgagttgaactttatggctgcctgtggcgtgacggtcttctttcctacaccgcgcctgtggggcagactatgtatctgtcagaggccgtttatctgaacgactctacctacgacggccatacagtgggcggcctgcagtacggaggtctgggccagttagccgacggggttgtgggactggacgactttaggaaatcccaggagctcagggtttggcctggctatgactatgtgggatggagcaaccactcctttagctcagggtacgttgagatggaattcgaattcgaccgactgcgcgcattccaggccatgcaggtacactgtaataatatgcatactctgggggcgcgtcttccgggcggtgtcgaatgtcgcttcaggcgcggccctgctatggcttgggagggggagcccatgagacataacctgggcggtaacttaggagatccgagagcccgtgctgtgtccgtacctcttgggggccgcgttgccaggttcttacaatgtcggttccttttcgctggaccatggctgctctttagtgagatctcgtttatctccgatgtggttaacaactcatcacccgctctgggcggtaccttccccccagctccctggtggccacctggtccaccccctaccaatttttcatccctcgaactagaacccagaggtcagcagcccgttgccaaggctgaaggatccccaacagctattctcatcgggtgccttgtcgccattatattgttactcctccttatcattgcccttatgctatggcggcttcactggcgacgcctgctttccaaagcagagcgcagggtactcgaggaagaacttacggtccatctgtcggttcctggagacacaattcttataaacaaccgccctgggcctcgggagccccctccatatcaagaaccccggccccgcgggaatccaccacatagcgccccttgtgtgccgaatgggtcagctctgcttctctctaatccagcataccggctgttgctcgccacatatgctagacctcccaggggacccggccccccaacgccggcttgggccaaacccacgaatactcaggcctatagtggggattatatggagccagagaaacctggcgccccactcctacctcccccaccacagaactcagtgccacactatgcggaggccgacattgtgactcttcaaggggtcacaggaggcaatacctacgcagtgccggccctgcctccaggagcagtaggcgatggccctccccgggtggatttccccaggtctagactaagattcaaagagaagctgggagaagggcagttcggggaggtacacctctgtgaggtggatagccctcaggatctggtgtcactggacttcccactcaatgttcgaaaggggcaccccctcctggttgctgtgaagatcctgaggcccgatgccactaagaatgcttcattcagcctatttagccggaacgacttcctgaaggaggttaaaattatgtctcggctgaaagatccaaacataatcaggctgttaggggtgtgcgttcaagacgaccccttatgcatgattacagattatatggaaaacggggatctaaaccaattcctcagtgcccaccaactcgaagataaggctgccgaaggcgccccaggcgacggacaagctgcacaggggcctaccatctcttatcccatgcttctccacgtcgcagcccagatagctagtggcatgaggtatctcgccaccctgaactttgttcacagagatctggcaacacggaactgcctggtaggcgaaaacttcacgattaaaatagctgacttcgggatgagccggaacttgtacgcaggcgattactatcgggtccaagggcgcgccgtcttgcctattagatggatggcctgggagtgtatactcatgggaaaattcacaaccgcaagtgacgtatgggccttcggggtaactctgtgggaggtcctgatgctgtgtagggcacaaccgttcggacagctgacggatgaacaagtgatagagaacgcgggcgagttcttccgcgatcaggggagacaagtataccttagcaggcccccagcatgtcctcagggtctgtacgagctcatgcttcggtgttggagccgggagtccgagcagcggccaccatttagtcagctccataggttcttggccgaagacgcactgaacactgtttag

SEQ ID NO: 9903 - DNA, 318 bp, synthetic construct
  misc_feature 1..318: note = source = /note="Description of Artificial Sequence: Synthetic coding sequence"
  source 1..318: mol_type = other DNA
atgggcgtgagcaagctggacatcctgtaccggcggctgctgctgactaaactcttcatccgaggttggggccggcctgaggacttgaaaaggttgttcgagtttaggaagatgatcgggaaccgcgaaaggtgtcagaatctggtctcgtctgactaccctgttcacatcgataagatcgaagagcaaagcgactgcaagatccttgatggtcactttgtgtccccaatggcacattacgtgccagacataatgcccattgagagcgttattgcccggttccagttcatcgttccaaaagagtggaattccaagtag

SEQ ID NO: 9904 - DNA, 126 bp, synthetic construct
  misc_feature 1..126: note = source = /note="Description of Artificial Sequence: Synthetic coding sequence"
  source 1..126: mol_type = other DNA
atgaagctgagcggcatgttcctgctgctgagcctggccctgttctgcttcctgaccggagtattctcacagggggggcaagtcgactgcggcgaatttcaggatccgaaagtgtattgtacctag

SEQ ID NO: 9905 - DNA, 459 bp, synthetic construct
  misc_feature 1..459: note = source = /note="Description of Artificial Sequence: Synthetic coding sequence"
  source 1..459: mol_type = other DNA
atgcggttcaagaccaccgccaaggacggcctgctgctgtggcggggggatagtcctatgagaccaaatagtgatttcatatcactgggcctgagggacggggctttggtctttagctataatttgggatctggagtggcttctatcatggtgaacggctccttcaatgacggccgttggcaccgagtcaaggccgtcagagacggacagtcaggaaagattacagtggacgattacggcgcccgcactggcaaatcccctggcatgatgaggcagttgaacattaatggcgcgctctacgtgggcggaatgaaggagatcgcactacacaccaataggcagtacatgcgcggtctcgtgggatgcatttctcattttaccctgtccaccgactaccatattagtctggttgaggacgcagtggatggcaaaaacatcaacacgtgtggggctaagtag

SEQ ID NO: 9906 - DNA, 1611 bp, synthetic construct
  misc_feature 1..1611: note = source = /note="Description of Artificial Sequence: Synthetic coding sequence"
  source 1..1611: mol_type = other DNA
atggacttcctgctggccctggtgctggtgagcagcctgtacctgcaggctgcggccgagttcgacgggcgatggcctcgccagattgtgagttccatcggactgtgcaggtatggcggccgcatagactgttgctgggggtgggcacgtcagtcttggggacagtgtcagccagtctgtcaaccccgctgtaagcatggcgaatgcatcggaccaaacaagtgtaagtgtcacccaggctacgctggtaagacttgcaaccaggatctgaatgaatgtggacttaaacccaggccctgtaaacacagatgtatgaatacgtatggaagctataaatgctactgtctgaatggatacatgctcatgcctgatggctcctgttcgtctgctttgacgtgctctatggcaaactgccagtatggctgcgacgtagtcaagggccagatccggtgccagtgtcccagccccggactgcagctggcacctgacggaagaacttgcgtagatgtggacgagtgtgctaccggccgtgcttcctgcccccgctttagacagtgtgttaacacgttcggtagctatatttgcaagtgccataaggggttcgacttaatgtacattggtgggaaatatcagtgtcacgacatcgatgaatgcagtctgggccaatatcagtgctcctcctttgctaggtgctataatatacgggggtcttataagtgcaagtgtaaggaaggctaccagggcgacggtctcacctgcgtgtatataccaaaagtgatgatcgaaccctccggtcccatccacgtgccaaaaggcaatggaaccatccttaagggtgacaccggcaataataactggataccagatgtggggtccacctggtggccacccaagactccatacattcctcccatcatcaccaaccgtcccacatccaaacctaccactagacctactccaaaacccaccccgattcctaccccccctcccccaccacctcttcctacagagctccggactccgttaccaccgaccacccctgagcgtcctacaaccggcctgaccaccatcgcccctgccgcctcaaccccgccaggcggcatcactgtggataatagggtgcagactgacccacagaaacctagaggtgatgtcttctcggtgttggtgcatagctgtaatttcgaccacggcctctgtggctggatccgggagaaggacaacgacctgcattgggagccaatacgcgatcccgcggggggtcagtacctgaccgtgagcgccgcaaaggcccccggaggcaaggctgccaggctggtgctccctctcggccggttgatgcactctggagacctctgcctgtcgtttcgccataaggtgaccggcctgcactccggtacccttcaagtgtttgtccgcaaacacggtgcacacggtgctgccttgtggggcaggaatggcgggcatggctggcggcaaacccagattaccctgagaggcgcggacattaaatcagttgtgtttaagggcgaaaagcggagagggcatacaggagagatcggcctggatgatgtctctctcaaaaaaggacattgcagcgaagagcggtag

SEQ ID NO: 9907 - DNA, 288 bp, synthetic construct
  misc_feature 1..288: note = source = /note="Description of Artificial Sequence: Synthetic coding sequence"
  source 1..288: mol_type = other DNA
atgctgttccggaaccggttcctgctgctgctggccctggccgccctgttggccttcgtctccctgagcttacagttcttccatctgattccggtgagcacccccaaaaatggaatgagttcaaagagcaggaaaaggatcatgccggatccagtgacagagccacccgtgacagaccctgtctacgaagccctactgtattgtaacatacccagtgtagccgagcgaagcatggagggacacgcaccacaccactttaagctcgtatctgttcacgtatttatatag

SEQ ID NO: 9908 - DNA, 213 bp, synthetic construct
  misc_feature 1..213: note = source = /note="Description of Artificial Sequence: Synthetic coding sequence"
  source 1..213: mol_type = other DNA
atggccagcgacctgatccggaccatcctggccgtggccctgatctcaaagctcggcacggccgttgacgccgagttgatgccttctggtgctatcctgcagaacaagcgggagaacctgccccgtgtctgccatgccctggccttcctggggatggcccggtgtcaggacctgtttttagttcgacttcagggctggaaactgggcacctag

SEQ ID NO: 9909 - DNA, 417 bp, synthetic construct
  misc_feature 1..417: note = source = /note="Description of Artificial Sequence: Synthetic coding sequence"
  source 1..417: mol_type = other DNA
atgggccccgaggccctgagcagcctgctgctgctgctgctggtggcctcaggcgatgccgatatgaaagggcacttcgaccctgccaagtgcagatatgctcttggtatgcaggatcggaccatccctgactcagacatctccgcctcgtcaagttggagcgattctaccgctgccagacatagtaggttagagagcagcgatggggacggggcatggtgtccagccggttcagtctttcctaaagaagaagagtacttgcaagtggacctgcaaagactccatttagtggccctggtgggtacacagggcagacacgcaggaggcctgggcaaggagttctcacgctcctatcggctgaggtacagcagggatggcagacgctggatggggtggaaagaccgttggggtcagtag

SEQ ID NO: 9910 - DNA, 219 bp, synthetic construct
  misc_feature 1..219: note = source = /note="Description of Artificial Sequence: Synthetic coding sequence"
  source 1..219: mol_type = other DNA
atggccgtgagcgtgctgcggctgaccgtggtgctgggcctgctggtcctctttctcacctgctatgccgacgacaagcccgataagccggacgacaagcctgacgactccggaaaggatccaaagcctgactttccaaaatttttgtcactgctgggtacagaaataatcgaaaacgccgtcgagttcattcttcggtccatgagcaggagcacatag

SEQ ID NO: 9911 - DNA, 438 bp, synthetic construct
  misc_feature 1..438: note = source = /note="Description of Artificial Sequence: Synthetic coding sequence"
  source 1..438: mol_type = other DNA
atggtgctgctgcactggtgcctgctgtggctgctgttccccctgagttcacgcacacagaaactccccacccgtgacgaagagctgtttcaaatgcagattcgtgataaggcattctttcatgactccagcgtaatccccgatggcgcagaaatatccagctatctgttccgggacactccgaagaggtatttcttcgtagtggaggaagataacacacctctttctgttaccgtcacgccatgtgatgctcccctcgaatggaaactgtccctgcaggagctccctgaagatcggagcggagaggggagcggggacctggagcctttagagcagcagaagcagcagattattaacgaggagggcactgagctcttctcctataagggaaacgatgtcgagtactttatttccagcagtagtccctcaggcctttag

SEQ ID NO: 9912 - DNA, 258 bp, synthetic construct
  misc_feature 1..258: note = source = /note="Description of Artificial Sequence: Synthetic coding sequence"
  source 1..258: mol_type = other DNA
atgggccccgaggccctgagcagcctgctgctgctgctgctggtggcaagcggagatgccgatatgaagggccatttcgaccctgcaaagtgcaggtatgcattaggcatgcaggaccggacaatacctgatagtgatatttctgcttcaagctcttggtcagattccaccgctgcacggcacagtcgcctagaatcatccgacggcgacggcgcatggtgtcctgctggctcggtgtttcccaaagaagaagagtag

SEQ ID NO: 9913 - DNA, 1410 bp, synthetic construct
  misc_feature 1..1410: note = source = /note="Description of Artificial Sequence: Synthetic coding sequence"
  source 1..1410: mol_type = other DNA
atgctgaaggtgcactaccccaagttcggcgtgagcgaggactgcctctacctgaatatatacgcgcctgcccacgctgacacagggagcaaactcccagtgttggtctggtttcccggtggcgcgtttaaaacaggatccgcctctatctttgacggcagtgccctggctgcctacgaagacgtgttagtcgttgtggtgcagtacagactcggcatttttggattcttcactacgtgggaccagcatgcgcctggaaattgggcatttaaggaccaggtggcagctctgagttgggtccagaagaacatcgagtttttcggaggggacccatcttctgtcacaatcttcggagaatcagctggggccatttcagtgagctcactgatcctgtccccaatggctaagggactcttccataaggccataatggagtcgggggtggctatcattccctacctcgaagcccacgactacgagaaaagcgaggacctgcaggttgtcgcccacttttgtggaaacaacgccagcgattccgaagcgctgctcaggtgtctacgcacaaagccatctaaagaactcttgaccctgagtcaaaaaacaaaaagttttacgcgggttgtcgacggtgctttcttcccaaacgagcctctcgatctactcagccagaaggcatttaaggctatcccctccatcataggagtgaacaaccatgagtgcggctttctcctaccaatgaaggaggcaccagaaatcttgtcagggagtaataagtccttggcacttcatctgatacagaacattctacacatcccaccacagtacttgcacctggtggcgaatgaatacttccatgacaagcacagcctgactgagattagggactctttactggacctgctaggagatgtgttcttcgtggtccccgctctgattaccgctcggtaccatcgcgacgctggagcaccagtatacttctatgagttcagacataggccccagtgctttgaggatacaaagcctgctttcgtcaaagccgaccacgccgatgaagtacggtttgtgtttggaggggctttcctgaagggagacatcgttatgtttgaaggcgctaccgaggaggagaaactcctgagcaggaagatgatgaagtattgggctaccttcgccaggacaggcaacccaaatgggaatgatttgtccctctggcctgcctataacttaaccgaacagtatctgcagttggatctaaatatgtcactgggccagaggctcaaagaacccagggtcgacttttggacgagcaccatccccctgattctttctgcctctgacatgttgcactcaccactatcttctctcacctttctgtccctactgcagccgtttttctttttctgcgccccgtag

SEQ ID NO: 9914 - DNA, 393 bp, synthetic construct
  misc_feature 1..393: note = source = /note="Description of Artificial Sequence: Synthetic coding sequence"
  source 1..393: mol_type = other DNA
atgctgcccttcctgttcttcagcaccctgttcagcagcatcttcaccgaggctcagaagcaatactgggtgtgcaatagcagtgacgccagtatcagctatacttactgcggacgcgatctcaagcagctgtactttaacttgtatataacagtaaacactatgaacttgccaaagaggaaagaagtgatttgcagggggtccgatgatgactactctttctgtagagcattgaagggcgagaccgttaatacaacaatctcattcagcttcaaggggatcaaattttcaaagggcaaatacaaatgcgtagtggaggccataagtggcagtccagaagagatgttgttctgcctggaatttgtgatcctgcaccagccaaatagcaactag

SEQ ID NO: 9915 - DNA, 318 bp, synthetic construct
  misc_feature 1..318: note = source = /note="Description of Artificial Sequence: Synthetic coding sequence"
  source 1..318: mol_type = other DNA
atgaagtgcaccgcccgggagtggctgcgggtgaccaccgtgctgtttatggcgcgagcaatccctgcgatggtggtaccaaacgctacacttctggaaaagcttctggaaaagtatatggatgaagacggcgagtggtggatagcgaagcagagaggaaagagagctataaccgataacgacatgcaaagtatactcgatctccataacaagctccggagtcaggtttatcccacggcatcgaacatggagtacatgacctgggatgtggaactggaaagatcagctgaaagctgggcagaatcctgcttgtggtag

SEQ ID NO: 9916 - DNA, 567 bp, synthetic construct
  misc_feature 1..567: note = source = /note="Description of Artificial Sequence: Synthetic coding sequence"
  source 1..567: mol_type = other DNA
atgaccatggtgtgccaccggcccgagggcctggagcagctggaggctcagaccaacttcacgaagagagagttgcaggtcctttacagaggttttaaaaacgagtgtccgagtggagttgtcaacgaggacacatttaaacagatatacgcccagttttttccacacggcgacgcgtctacctacgctcactatttgttcaatgcattcgacacgacccaaaccggatcggtgaaatttgaagattttgtgaccgcactgtcaatcctgttgagggggacagttcatgagaagctacggtggactttcaatctgtatgacataaacaaagatggctacattaataaggaggagatgatggacattgttaaggcgatctacgatatgatgggcaaatacacatatcccgtgttgaaggaggacaccccaagacagcacgtcgacgtatttttccagaagatggataaaaacaaagatggaatcgtgaccctggacgagttccttgagtcctgccaggaagatgacaacattatgcgtagccttcaactgttccagaatgtgatgtag

SEQ ID NO: 9917 - DNA, 1275 bp, synthetic construct
  misc_feature 1..1275: note = source = /note="Description of Artificial Sequence: Synthetic coding sequence"
  source 1..1275: mol_type = other DNA
atgccccccttcctgatcaccctgttcctgttccacagctgctgcctccgggcaaatggccacctcagggaaggcatgaccctgctgaagaccgaatttgccctgcatctgtatcagtctgtggctgcctgccggaacgagaccaactttgtgatttcacctgctggggtcagtttgcctctcgaaattttgcagtttggggcagaagggagcacaggtcaacagctggccgacgctttagggtacacagtacatgataagagggtgaaagatttcctccacgccgtgtatgccactctgcccaccagctctcaaggtaccgagatggagttggcttgttcactattcgttcaagtgggtactcctctgagcccttgcttcgtggagcacgtctcctggtgggccaactcctcattagagcccgccgacctgtctgaaccaaactccactgcaattcagacttcagagggagcctcccgggagacagcaggcggcgggccctctgaggggcctggaggctggccctgggaacaggtgtcggctgccttcgcccagcttgttctagtgagcaccatgtcgttccagggtacctggagaaagaggttcagtagcaccgacactcagatcctccctttcacctgtgcgtatggcctcgttctgcaggtgccaatgatgcaccagaccaccgaggtgaattacggtcagttccaggatactgccgggcaccaggtgggtgtactggagctgccctacctcggatctgcagtgtccctcttcctcgtcctgcctcgagacaaagatactccactctcacatattgaacctcatctcaccgcaagtaccattcacctgtggacaacctcactgcggagagcccggatggacgtctttctgccacggtttcggatacagaaccaattcaaccttaagagcattctgaactcatggggcgtgactgatctctttgatcccctgaaggctaacctgaagggcatctctggtcaggatggtttttacgtgtcagaagccatccacaaagccaagatagaggttctggaggaaggcactaaagccagcggagcaacagcactgctgctccttaaacggagtcgcatcccaatattcaaggccgatcgcccgttcatctatttcctcagggaaccgaacaccggtattacagtcttttttgacaggatccagataatttatcagtgcctgtctagtaacaaaggatcattcgtccattaccctctgaagaataagcacagtttttag

SEQ ID NO: 9918 - DNA, 1815 bp, synthetic construct
  misc_feature 1..1815: note = source = /note="Description of Artificial Sequence: Synthetic coding sequence"
  source 1..1815: mol_type = other DNA
atggccgtgctggtgtgccccgccagctgccacggcctgaaggagttcaggatccgtcgaggaatgtggcgactgtgcttggtttattacttttatccagcatccagtacactttatgtcctgagaattgatgtcctgaattacacttccaaggatgagggaccatcagccgagggaccccaacggaacactagactgggatggattcagggaaagcaggtaacagtcctcggtagccctgtaccagtgaacgtattcctcggcgtgccatttgctgctccacctttggggagcttgagattcaccaatccccaaccagcatcaccttgggacaacctgcgcgaggctacatcctaccccaatctgtgtctccaaaattccgagtggttgttgctggatcagcacatgctgaaagttcattatcccaaattcggtgtttcagaagattgtttgtacttgaacatttatgccccagcgcatgcggacacgggttctaagctacccgtgctggtgtggttccctggaggcgcgtttaaaactggcagtgccagtatcttcgatgggtcggccctggcagcatacgaggatgttctcgtcgttgttgtgcagtataggttaggaatttttgggttctttactacttgggaccagcacgctccgggtaactgggcattcaaggatcaggtcgccgctttgtcctgggtacagaaaaatatagagttttttgggggtgatcccagctctgtgacaatattcggggaaagcgccggagcgatttctgtaagcagcctaatcctctctccaatggcaaagggtctcttccataaggccatcatggaatccggcgtggccatcattccttaccttgaagctcacgattacgaaaagtccgaagacttacaggtggtcgcccacttttgtggcaataatgcttcagactctgaggcgctgctgagatgtttacggacaaaaccatccaaagagctgctgaccctgtcgcaaaaaacaaaaagctttacccgagtcgtcgacggagcgtttttcccaaatgagccgctggacctcctgagccagaaagccttcaaggctatcccgagcattattggggtgaataaccatgagtgcggtttccttcttcctatgaaagaagcccctgaaatcctgtccgggtcgaacaaaagcctggcgttacacctcattcagaacatcttgcacattcctcctcagtacctacacctggtcgctaatgagtatttccacgataagcactctctgactgaaatcagagactcactgctggatctccttggcgacgttttcttcgtggtgcccgctctcatcactgccaggtaccacagagacgcaggggcccctgtgtacttttatgagtttcgacataggccccaatgtttcgaggataccaaacctgcattcgtcaaagctgatcacgctgacgaggtgcggtttgtctttggcggcgcctttttaaaaggggatatcgttatgttcgagggcgccactgaggaagaaaagctgctgtctcgaaagatgatgaagtactgggctacctttgctaggactggcaatcccaatggaaatgatctatccctgtggcccgcatataatttgaccgaacagtacctacaactcgatcttaacatgtccctgggccagaggctaaaggagcccagggtggatttctggaccagcaccatacctctgattttgtctgcttccgacatgctgcacagtcccttgagttcactcacattcctgtccttgctccaacccttcttctttttttgcgccccctag

SEQ ID NO: 9919 - DNA, 939 bp, synthetic construct
  misc_feature 1..939: note = source = /note="Description of Artificial Sequence: Synthetic coding sequence"
  source 1..939: mol_type = other DNA
atgaacatctggggccagatctggcccaaggccgtgtacctggtgtgtaactattccccgaagggcaattggtgggggcacgcgccctacaaacatggtcgaccttgcagcgcctgtccccctagtttcggaggtggatgcagggaaaatctgtgctataaagaagggagtgacaggtactatccgccaagagaggaggagacaaatgagatcgaaaggcagcagtcccaggtgcacgacacccacgtaagaacaagatctgacgatagtagtagaaatgaggtcatctcggcccagcagatgtctcagatagttagttgcgaagtgcggctccgagaccagtgcaaaggtacaacttgtaaccggtacgaatgtccagccggatgcctggactcaaaagccaaggtgatcgggagtgttcattacgagatgcagtccagcatttgtcgagccgctattcactacgggattatagacaatgatggggggtgggtggacattactcgccagggacgcaagcattacttcattaagtccaatagaaatggaatccagacaattggcaaataccagtcggccaacagttttactgtgtcaaaagttacagttcaggctgtcacctgtgagaccactgtagagcagctttgcccgtttcacaaaccagctagtcattgcccccgggtttattgcccgcggaactgtatgcaggccaatccccactatgccagagtgatcggtaccagggtgtattccgatctgtcttctatttgtagagcagcagtccacgcaggagtggtacggaatcatgggggttacgtggatgttatgccagtggacaaacgaaagacatacattgcctcatttcagaacggaatctttagcgaatccctgcagaatcctccaggggggaaggccttcagggtgtttgccgtggtgtag

SEQ ID NO: 9920 - DNA, 777 bp, synthetic construct
  misc_feature 1..777: note = source = /note="Description of Artificial Sequence: Synthetic coding sequence"
  source 1..777: mol_type = other DNA
atgatcgccatcagcgccgtgagcagcgccctgctgttcagcctgctgtgcgaagcctcaactgtcgttctgctcaacagcacagattcctcgcctcccaccaataacttcactgacatcgaggccgctctgaaggctcagctggatagcgcggacattccaaaagccagacgtaagaggtatataagtcagaacgatatgattgcgattctggattaccacaatcaggtgcgcggaaaagtgttccctcccgccgcaaatatggaatatatggtgtgggatgagaacctagcgaaatctgctgaagcctgggccgctacatgcatttgggatcatggaccgagctacctgctgcggttcctcgggcagaacctatctgttcgcacaggacgataccgctccattttacagctagtcaaaccctggtacgacgaggtgaaagactacgctttcccatatcctcaggactgtaatcctaggtgtccgatgcggtgcttcggccctatgtgtacccactacacacagatggtttgggcaacttcaaacagaattggatgtgccattcatacctgccagaatatgaatgtttggggctctgtttggaggagggcagtgtatctcgtgtgcaactacgctcccaagggcaattggattggggaagctccatataaggtgggagtcccctgtagttcctgtccaccctcttacgggggcagttgtacagacaatctgtgcttccctggtgtgacaagcaattacttgtattggttcaaatag

SEQ ID NO: 9921 - DNA, 1215 bp, synthetic construct
  misc_feature 1..1215: note = source = /note="Description of Artificial Sequence: Synthetic coding sequence"
  source 1..1215: mol_type = other DNA
atgccccccttcctgatcaccctgttcctgttccacagctgctgcttacgcgcgaacggtcacctgagggaaggcatgactctgctgaagacagagtttgccctgcatttatatcagagcgtggccgcatgtcgaaacgaaaccaactttgtgatatcaccagcaggggtctcccttcccttggaaatcctgcagtttggtgcagagggcagtacgggccaacaattagccgatgcgctgggatatacggtgcacgataagagagtgaaagactttcttcatgctgtatacgcaacactacctacttcaagtcaggggaccgagatggaactggcctgctccctgttcgtgcaagtgggaactcctctctctccatgttttgtggagcacgttagctggtgggccaactctagtctggagcctgcagacctcagcgaacccaattccacagccatccagacaagcgagggagcttcccgcgaaaccgctggcggaggccctagtgaaggcccaggagggtggccttgggaacaggtgagtgccgctttcgcccaattggttctggtgtctactatgagctttcaggggacgtggagaaaaaggttctccagtaccgacacacagatcttaccttttacctgcgcctacggactggtgctacaagtccccatgatgcatcagactacggaagtgaattatggccagtttcaggacacagcgggacaccaggtaggcgtcctggaattgccatatctgggttccgccgtcagcctctttctggttctgcccagggacaaggacacgcccctgtcccatattgagcctcatctgaccgcctcaaccattcacctgtggacaacaagtctgcggcgcgctcggatggacgtgttcttgcccagattcagaattcagaatcagttcaacctcaagagtatcttgaattcttggggggtaacggaccttttcgaccccctgaaagccaatctcaaggggatctccggacaggacgggttctatgtgtcggaggctattcacaaggctaagatcgaagtgctcgaggaaggcacaaaggcctccggggcgaccgctctgctgctcttgaaaagatctagaatccccatctttaaggccgatagaccgttcatttactttttgagagaacccaacaccgggttcgtgttcagtatcggacgcgtgagcaatcccctggactag

SEQ ID NO: 9922 - DNA, 936 bp, synthetic construct
  misc_feature 1..936: note = source = /note="Description of Artificial Sequence: Synthetic coding sequence"
  source 1..936: mol_type = other DNA
atgctgtaccagaccatcaacagcctgaagaccaagaaccccaagttaaagatcctgctttccattggaggctacctgtttgggagcaagggatttcacccgatggttgactcctccacctctcggctcgagtttattaactcaatcatcttgttcctgcgcaaccataactttgatggcctggatgtgtcatggatataccccgaccagaaagaaaatacacattttacagttcttatacatgaactggcggaagccttccagaaggatttcacgaaaagcaccaaggagaggctgctgctcacagccggagtgagcgccggtagacaaatgattgataattcatatcaagtcgagaagctggccaaggacctggatttcatcaacttactgtcgttcgactttcacggaagttgggagaagccacttatcaccggacacaactcccctctaagcaaagggtggcaggatagaggacccagttcgtactataatgtagaatacgctgtcggatattggattcataagggaatgcctagcgaaaaggttgtgatgggcatccccacctacgggcactccttcacacttgccagtgctgagacgaccgtcggtgcgccagcctccggccctggggccgctggtccaatcacagagagtagtggttttcttgcgtattacgagatctgtcagtttctcaagggagctaaaattacccgactgcaggatcagcaggtgccctatgccgtgaaggggaatcagtgggtcgggtacgacgatgtaaagtccatggagactaaagtgcagttcttgaagaatctgaatttgggcggcgctatgatctggtccatagacatggatgacttcacagggaaatcctgcaaccagggcccatatcccctggtacaggccgtcaaaagaagcctgggaagtctgtag

SEQ ID NO: 9923 - DNA, 555 bp, synthetic construct
  misc_feature 1..555: note = source = /note="Description of Artificial Sequence: Synthetic coding sequence"
  source 1..555: mol_type = other DNA
atggccagcgagcggctgcccaaccggcccgcctgcctgctggtggccagcggcgcagctgagggggtatccgctcagagttttttacactgctttacgatggcttctaccgcatttaatcttcaggtcgccacgcctggaggtaaggctatggagttcgttgacgtcactgagtcgaacgcgagatgggtgcaggatttcaggttgaaagcatacgccagtcccgccaagttggaaagcattgatgagcctatctgcgcggtgggccacggtgtggcggctttgtgttgcgccacgaatgaagaccgttcatgggtttttgattcatattccctgacaggaccgagcgtgtgcgaactggtacgggccccaggattcgcccgcctccctctagttgtcgaagactttgtcaaggattccggcgcgtgtttcagcgcttcggaacccgatgcagtgcacgtcgtgctcgaccgacacctggtgactggccagaacgcttcttccaccgtcccagccgtgcagaacctgttgttcctctgcggcagtcgtaaatag

SEQ ID NO: 9924 - DNA, 1257 bp, synthetic construct
  misc_feature 1..1257: note = source = /note="Description of Artificial Sequence: Synthetic coding sequence"
  source 1..1257: mol_type = other DNA
atgcggagcctgctgctgctgagcgccttctgcctgctggaggccgccctggccgccgaggttaaaaaacccgcagccgctgcagcaccgggcaccgctgagaagttgtcaccaaaagctgcgactttggcagaacgaagcgcaggactggcatttagcctctaccaggccatggccaaagatcaggctgtggaaaacatcttggtgtctcccgtcgtcgtcgcctcatctctcggtctggtatctctgggaggtaaagctactaccgcttcccaagctaaggccgtgctatcagctgaacagcttagagatgaggaggtccacgccggtctgggagaactgctgaggtccctctccaattccactgcccgcaacgtgacctggaaactgggtagccgattatacgggccctcttcggttagttttgccgatgatttcgtaaggagctctaaacagcactataactgcgagcatagtaagattaattttcgggacaagaggagcgctcttcagtctatcaatgagtgggcagcccagacaacagacgggaagctgcccgaagtgactaaagatgtggaacggactgacggggcccttctggtaaacgcgatgttctttaagccccattgggatgaaaaatttcaccacaaaatggtggataacagaggattcatggtgaccaggtcttatactgttggggtgatgatgatgcatagaaccgggctctataactactacgacgacgaaaaagaaaagctgcagattgtggaaatgccattggcccacaagctttcatccctgataatcctgatgccccatcatgtggaaccactggagagactggaaaaacttttgacaaaggaacaactgaagatctggatgggcaaaatgcaaaaaaaagcggtggctatctccctgccaaagggtgtggtagaggtgacccacgatctgcagaagcatctggccggactgggcctcaccgaagctatcgacaagaacaaggcagaccttagccgcatgagcgggaaaaaagatttgtacctggccagtgtgtttcatgccaccgcttttgaactcgatacggatgggaatccctttgatcaggatatctacggccgagaggagctccggagccctaagcttttctatgccgatcacccctttatctttttggtacgagacacccagtctggttccctgctgtttattggaaggctggtgcgtccgaaaggagacaaaatgagggacgagctgtag

SEQ ID NO: 9925 - DNA, 1425 bp, synthetic construct
  misc_feature 1..1425: note = source = /note="Description of Artificial Sequence: Synthetic coding sequence"
  source 1..1425: mol_type = other DNA
atggaccggaaccccagcccccccccccccggccgggacaaggaggaagaggaggaagtggcgggcggggattgtataggttctacagtctatagcaaacactggctgttcggggtgctgagtggcctcatccagattgtttcacccgaaaacactaaatcctcatcggacgatgaagagcagctgactgagcttgacgaagagatggaaaatgaaatttgtcgcgtgtgggacatgtcaatggacgaagatgtagccttattcctccaggagttcaatgcccccgatatctttatgggcgtgctggccaaatcgaaatgtcccagattgagagagatctgcgtagggatcctgggtaacatggcatgctttcaggaaatatgcgtgtctatctcttcagataagaacctggggcaagtgctgttacattgcttatacgactccgatccacccactcttctggagaccagtcgcctgctgctcacctgtttgtctcaggctgaggtcgcaagcgtgtgggtggagcggatccaggagcaccccgcaatatatgacagcatctgcttcatcatgagcagtagtacgaatgttgacctgctagtaaaggtgggcgaagtggtggacaagctgtttgacctcgacgagaagctgatgctcgagtgggttaggaacggcgcggcacaaccattagaccagccacaggaggaatctgaagaacaaccagttttccggcttgtaccctgtatcctcgaagctgctaaacaggtcagatccgagaatcccgagtggcttgacgtgtatatgcacatactgcagctcctgaccacagtcgacgacggtatacaggctattgtgcattgtccagacaccggtaaggacatttggaacctcctctttgaccttgtttgtcatgagttctgtcagagcgacgaccctcctattatcctgcaggagcaaaaaacagtcctcgctagtgtattcagcgtgttgtctgcaatttatgcatctcagaccgaacaggaataccttaagatagagaaagtcgatttgcccctgatcgacagcctgattcgggttcttcagaacatggaacaatgtcagaagaagccggagaattctgcagagagcaataccgaagagaccaaaagaacagatctgacgcaagatgatttccacctgaagatcctgaaggacatcctgtgtgagtttctaagcaacatctttcaagcactgacgaaagaaacggtggcacagggagttaaagaaggccaattatcaaagcagaagtgtagcagtgcttttcagaaccttctgcccttttattcccctgtggtggaggacttcattaagatcctgcgagaggtggataaggccctggcagacgacctcgagaaaaacttcccctctctaaaggtacaaacctag

SEQ ID NO: 9926 - DNA, 438 bp, synthetic construct
  misc_feature 1..438: note = source = /note="Description of Artificial Sequence: Synthetic coding sequence"
  source 1..438: mol_type = other DNA
atgctgacccggctggtgctgagcgcccacctgagcagcaccacctctcccccatggacacatgccgccatctcctgggagctcgacaacgtgcttatgccctctcctaggatctggccgcaagtgaccccgacaggacgaagtgcgagtgtcaggagtgaggggaatacttcgagtctttggaatttttctgcaggccaggacgtacacgcgatcgtcacgcggacctgtgaatctgtgctctctagcgccgtgtacactcacggatgcggctgtgttcggtctgcaacaaacatcacgtgccaatcttcggggcaacagaggcaggcggcaagacaggaggaggaaaactctatctgcaaagctcacgattctcgcgaggggaggttaggctaccctcttagtgcgcaccagcctgggtcaggggggcccaactag

SEQ ID NO: 9927 - DNA, 1728 bp, synthetic construct
  misc_feature 1..1728: note = source = /note="Description of Artificial Sequence: Synthetic coding sequence"
  source 1..1728: mol_type = other DNA
tgaatcttcggcggcagcatccactacttccgggtgccccgggagtattggcgggaccgcctgctgaaaatgaaggcttgcggtctgaacactctcactacgtatgtgccctggaacctacacgagcctgagcgcggaaagttcgatttcagtgggaacctggacctcgaagccttcgtgttgatggctgctgagataggtctctgggtcattttgcggccaggaccctatatatgttctgagatggacctaggtggactgccgagttggcttctccaagaccctgggatgcgcctgcggaccacctataagggatttacagaggcggtagatctttattttgaccatttgatgtcccgggttgtcccattacagtataaaaggggggggccaattatcgcggtccaggtcgaaaatgagtacggtagctacaataaggaccccgcttacatgccctatgttaagaaagccctggaggaccgtggaatcgtggagctactgctaaccagcgacaataaagatggattatcaaaggggatcgtacagggagtgctcgccacaataaacctccagtcaacccacgaactgcagttgctcaccacctttctttttaacgtgcaggggacccagccaaaaatggtgatggaatattggaccgggtggtttgacagttggggaggacctcacaacattctggactctagcgaagtgctgaaaacagtgtccgccattgttgatgctggcagctcgatcaatctttatatgttccatggcgggaccaattttggcttcatgaatggagcgatgcatttccacgattataaatctgacgtcacttcttatgactatgacgccgttttgaccgaagccggtgattacaccgcaaagtacatgaaattgcgcgatttctttggaagcataagcggtataccgctgcctccgccgcccgatctgttacccaagatgccttatgaacccttgactcctgtgctgtacctttctctgtgggatgcactgaaatatctgggagaaccaatcaagagcgaaaagcctattaacatggaaaacttacccgtaaatggggggaacggtcaaagtttcgggtatatcctgtacgagacatcaattactagctcaggcattctatctggtcacgtgcacgacaggggccaagtgtttgttaacactgtgagcatcggcttcttagattacaagaccacaaagatcgccgtccccctgattcagggatatacagtgcttagaatactggtagaaaacaggggtagggtcaattacggagagaatatcgatgatcaaaggaaaggactgattggaaatctttatctcaatgattccccactgaaaaactttaggatttacagtcttgacatgaagaagtcgttttttcaacggtttggactggataagtggtccagcctgcctgagaccccaacactgccagccttttttctgggctcactgtcaatctcctctaccccttgcgacaccttcctgaaactggagggatgggaaaaaggagtggttttcataaatggtcaaaacctggggagatattggaatataggacctcaaaagaccttgtacctgcccggtccttggctttcttcggggattaaccaggtgatcgtttttgaggagactatggcaggacccgcactacaatttacagagactccccaccttggccggaaccaatacattaaatag

SEQ ID NO: 9928 - DNA, 255 bp, synthetic construct
  misc_feature 1..255: note = source = /note="Description of Artificial Sequence: Synthetic coding sequence"
  source 1..255: mol_type = other DNA
atgcggaccctgttcaacctgctgtggctggccctggcctgcagccccgttcatactaccctatctaagtccgatgcgaaaaaggctgcctccaagaccctgcttgagaagtcccaatttagtgacaagcccgttcaagaccgcgggctggtagttacagatctgaaggcagaaagtgtggtgctggagcatcggtcctactgttctgctaaggctcgtgataggcacttcgcaggcgacgttctgggatattag

SEQ ID NO: 9929 - DNA, 744 bp, synthetic construct
  misc_feature 1..744: note = source = /note="Description of Artificial Sequence: Synthetic coding sequence"
  source 1..744: mol_type = other DNA
atgcggagcctgctgctgctgagcgccttctgcctgctggaggccgccctagccgcggaggtgaaaaaacctgctgccgctgcagcgcccggtactgcggagaaactgagccccaaggctgccactctggccgagcgatccgcaggcctggcctttagcctgtaccaagcaatggccaaagatcaggcagttgagaacatccttgtatcgcctgtcgttgtggcctccagtctgggcctggtgagcctcggggggaaggctactaccgccagccaggctaaagctgtgctttctgcagagcaactgcgggacgaagaagttcacgctgggctgggtgagttattacgatctctgagtaattccactgctaggaatgtgacctggaaacttggctcacggctttatgggccgtcctctgtgtcatttgcagatgatttcgtgcgtagctctaagcagcactacaactgcgaacactccaagatcaattttcgcgacaagaggtctgccctccagagcattaacgaatgggccgcccaaaccacagatggtaaactacccgaggtgaccaaggatgttgagcggaccgacggcgccttgctagtcaatgctatgttcttcaagcctcactgggacgagaaattccaccacaaaatggtggacaatcggggcttcatggtgacgcggtcgtatacggtgggcgtgatgatgatgcatcgaactggtttgtacaactattatgattag

SEQ ID NO: 9930 - DNA, 117 bp, synthetic construct
  misc_feature 1..117: note = source = /note="Description of Artificial Sequence: Synthetic coding sequence"
  source 1..117: mol_type = other DNA
atgcggaccctgttcaacctgctgtggctggccctggcctgcagccctgttcatacgacactgtctaagtcggacgcaaaaaaggccgcctcaaaaacccttcttgaaaaagtgtag

SEQ ID NO: 9931 - DNA, 750 bp, synthetic construct
  misc_feature 1..750: note = source = /note="Description of Artificial Sequence: Synthetic coding sequence"
  source 1..750: mol_type = other DNA
atgcggagcctgctgctgctgagcgccttctgcctgctggaggccgccctcgctgccgaggtaaagaaacctgccgccgccgccgcgccagggacagctgagaagctgtcacctaaagctgcaacactggccgagcgctccgccggactcgccttctctctctaccaagccatggcaaaagaccaggcagttgagaatattctcgtgagcccagtagttgtcgcctctagcctgggactggtctctctgggggggaaagcgacaaccgctagtcaagccaaagccgtcctttctgctgagcagctacgggacgaggaagtccatgccggcctcggtgagctcttgagaagtctctccaactccaccgcacgtaacgtgacttggaaactgggtagtcggctctacgggccaagctctgtaagctttgcagatgatttcgtgcgatctagcaaacagcattacaactgtgagcactctaagatcaattttcgagataaacgttcagcgctccagagtattaacgagtgggcggctcagactacagatggaaaattgcccgaggtcaccaaggacgtggaaagaaccgacggggctcttttagtgaatgctatgttctttaagccacattgggacgagaaattccaccacaaaatggtggacaaccgcgggttcatggtgaccaggtcttatacggtaggcgtcatgatgatgcatagaacaggactctacaattactacgatgacgagtag

SEQ ID NO: 9932 - DNA, 201 bp, synthetic construct
  misc_feature 1..201: note = source = /note="Description of Artificial Sequence: Synthetic coding sequence"
  source 1..201: mol_type = other DNA
atgaagcccctgctggtggtgttcgtgttcctgttcctgtgggaccccgtattagccggcataaattctctctcttctgagatgcacaagaaatgctataaaaatggtatctgccgcctggaatgctatgagtccgaaatgctggtggcctactgcatgttccagcttgagtgttgtgtgaaggggaaccctgcaccatag

SEQ ID NO: 9933 - DNA, 1002 bp, synthetic construct
  misc_feature 1..1002: note = source = /note="Description of Artificial Sequence: Synthetic coding sequence"
  source 1..1002: mol_type = other DNA
atggtgagcaagagccggtggaagctgctggccatgctggccctggttcttgtggtcatggtgtggtacagtatttcaagggaagatcgctatatcgaactgttttactttccaatccctgagaagaaggagccctgtctgcagggggaggccgaaagtaaggctagtaagcttttcgggaactacagtcgggatcagcccatttttctgagactggaagactacttctgggtgaaaaccccgagcgcttatgaactgccttacgggaccaaaggcagcgaagacttacttctaagagttctggccatcacaagcagctctataccgaaaaacattcaatctctaagatgtcggagatgtgtggtagtcggaaatggccaccggcttaggaattcgtcactgggagatgctatcaataaatatgatgtcgtaatacgcctgaataacgctccagtagccggctatgagggcgacgtgggaagtaagacgaccatgcggctcttctaccctgaatctgcacatttcgatcctaaggtggaaaataaccccgacaccctcctcgtgctcgtggcattcaaagctatggacttccactggatcgaaactatactctcagacaaaaagcgggtaaggaagggcttctggaaacagccgcccctgatctgggacgttaatccaaaacagatcagaattctgaacccctttttcatggagatcgccgcagacaagctgctaagcctgccgatgcagcagcccaggaagatcaaacagaaacctaccacggggctgctggctatcacactggccctccatttgtgcgatctggtgcacatcgccggttttggatatcccgatgcttataacaaaaaacagaccatccattattacgagcagattacactcaaatctatggctggttccgggcacaacgtctcccaagaggcccttgcaatcaaaaggatgctcgagatgggcgcaattaagaacctcacaagtttttag

SEQ ID NO: 9934 - DNA, 645 bp, synthetic construct
  misc_feature 1..645: note = source = /note="Description of Artificial Sequence: Synthetic coding sequence"
  source 1..645: mol_type = other DNA
atgcggcccaagaccggccaggtgggctgcgagacccccgaggagttgggtccaggaccgaggcagaggtggccactgctcctgctcggactggcgatggtcgcgcatggtttattgaggcctatggttgccccccagtcaggggatccggatcccggcgcctcagtggggtcctcccgatctagcctacgcagcctgtgggggagactgctgctgcaacccagtccacagagggcagacccacggtgttggcctcgcggcttttggagcgagcctcaatctctgtgttatgtgttcggcaccgggacgaaggtcacggtgctaggccagcctaaggccaaccctaccgtgactctgtttccaccctcgtctgaggagttgcaagccaataaggcaactctagtgtgtttaatctccgatttttatccaggggccgtcactgtcgcatggaaagcggacggtagtccagtgaaagctggggttgaaaccacaaaacctagcaaacagagcaacaacaaatacgccgcttccagctatctgagtcttacccccgaacagtggaagagccaccgttcatacagctgtcaggtgacccacgagggcagcacagtggagaagactgtcgccccaacagaatgctcttag

SEQ ID NO: 9935 - DNA, 1050 bp, synthetic construct
  misc_feature 1..1050: note = source = /note="Description of Artificial Sequence: Synthetic coding sequence"
  source 1..1050: mol_type = other DNA
tgactgtacaagaaccggctgggcagcggcggccggggccggtgcattaagcagggagagaactggtactccccaacggagttcgaagcgatggcgggacgggctagttctaaagattggaaacggtccattcgctatgccgggcggcctttacaatgtctcattcaggatgggatcctcaatccccacgcagccagttgcacttgcgccgcttgttgtgatgatatgactctcagcgggcctgtacggctgtttgtgccatacaaacggagaaaaaaggagaacgagctccccaccactccagtgaaaaaggacagccctaagaatattacattactgccagccacagccgctactactttcacagtcaccccaagtggccagattacaacgagtggggctctgaccttcgatagggcatctacagtggaggccaccgcagtcatcagcgaaagccctgcgcagggggacgtgtttgcgggcgcaacagtgcaggaagcctctgtgcagcctccctgcagggccagtcacccggagccccactacccaggataccaagatagttgccaaatcgcacccttccccgaggccgctttaccaacctcgcatcctaaaatcgtcctcactagtctcccagccttggctgtccctccacccacccccacgaaagcagctccgccagccttagtgaacgggctcgagctgagcgaacctcggtcatggctttacctagaggagatggtgaactcattgttgaatactgcgcagcaattaaaaacactctttgagcaggccaagcacgcctctacatacagggaagcggccaccaaccaagcgaaaatccatgccgacgcagaaaggaaagaacagagttgcgtcaactgcggacgcgaagccatgagtgagtgcactggatgccataaggtgaattattgttccaccttttgccagcgtaagcgctggtcccttaccatgctcacctctctggtcagcatctcctggctaagggctattctgccatgccaaccgcccaaggttcttggtctatag

SEQ ID NO: 9936 - DNA, 600 bp, synthetic construct
  misc_feature 1..600: note = source = /note="Description of Artificial Sequence: Synthetic coding sequence"
  source 1..600: mol_type = other DNA
atgagcctggacatccagagcctggacatccagtgcgaggagctgtcagacgcaagatgggccgagctgcttccactgctgcaacagtgccaagtggtgagattagacgattgtggcctgacagaggcccgctgcaaagacatctcttccgccctacgcgtcaacccggcgctagccgaattgaatcttcgaagcaacgagctgggagatgtcggggtgcattgcgttctgcaggggctccaaactccttcatgtaaaattcagaaactgagtctgcagaactgttgcttgactggggccggctgcggagtcctatcctctaccctcagaacgctgccaacgctacaagagctgcacttgagcgacaacctgctcggagacgccggcctccagttgctgtgcgaaggccttttggatcctcagtgcaggctggagaagttgcagctggaatactgctccctgtccgcagcttcttgtgaacctctggcctctgtactccgggccaaaccggacttcaaagaattaacagtttcgaataatgatatcaatgaggcaggtgttagagtcttgtgccagggcttaaaggactcaccatgttag

SEQ ID NO: 9937 - DNA, 465 bp, synthetic construct
  misc_feature 1..465: note = source = /note="Description of Artificial Sequence: Synthetic coding sequence"
  source 1..465: mol_type = other DNA
atggccggcatccccggcctgctgttcctgctgttcttcctgctgtgtgccgtcggccaggtttcaccctactccgccccctggaagccaacgtggcccgcctaccggcttcccgtggttctgcctcagtcaacgctgaatttagcaaaacccgacttcggagccgaggctaagctagaggtgtccagcagttgtggtccccagtgccacaagggaacaccgctccccacatacgaagaggccaagcagtatctcagctacgagacactgtacgccaacggctctagaaccgaaacccaggtcggcatatatattttatcgagctcgggtgatggagcccagcaccgagacagtggcagttccggcaaaagtcgacgaaagcggcagatatatggatacgacagtcgcttcagcatttttggaaaagacttcttactcaattacccattttcaactagcgtctag

SEQ ID NO: 9938 - DNA, 936 bp, synthetic construct
  misc_feature 1..936: note = source = /note="Description of Artificial Sequence: Synthetic coding sequence"
  source 1..936: mol_type = other DNA
atgggcatcatccagagcatcctggccaccagccgggactgctacagctttaagaagaagccaataccaaagaagcctacaatgctggcccttgcaaaaatacttctgatatcaaccctgttctatagtttacttagcgggagccacggcaaagaaaaccaggacatcaatactacacagaacatagcagaagtttttaaaacaatggaaaataaacctataagcctggaaagtgaggctaatctcaattcagacaaagaaaacatcaccaccagcaatctcaaagcaagccacagcccaccattgaatctgcccaacaattcccacggtatcacggattttagtagtaatagctctgccgaacatagcttagggagtctgaaacccacgtccacaattagcaccagtcccccccttattcatagtttcgtctcaaaagtgccgtggaacgcccctatcgctgacgaagaccttctacctataagtgcacaccctaatgcaactccagccctgagtagcgagaattttacttggtccttagtgaatgacaccgtgaagactcccgacaacagcagtattacggtgtctattctgagcagcgagcccactagcccctccgtcactcctctaatcgtcgaaccttccggatggttaaccacaaattctgacagttttacaggctttactccataccaagagaaaaccaccctgcagccaaccttgaagtttacgaataattccaaactgttcccgaatacaagcgatccccagaaagttttacggctggacaacgcgccagagccatacgacgttagtttcggcaacagtagctattacaaccccaccctaaacgactccgcaatgccagaatcagaagagaacgctcgggacggtatccccatggatgacatacccccactgagaactagtgtctag

SEQ ID NO: 9939 - DNA, 1404 bp, synthetic construct
  misc_feature 1..1404: note = source = /note="Description of Artificial Sequence: Synthetic coding sequence"
  source 1..1404: mol_type = other DNA
atgctgatcttctggaccatcaccctgttcctgctgggcgccgccaaagggaaagaagtgtgttacgaagacctggggtgttttagcgacactgaaccgtggggcggcaccgcgattcggccactgaaaatcctgccttggtccccagaaaagatcggaaccagatttctcctttatactaacgaaaatcccaataacttccagatcctcctgcttagcgacccatccaccatagaagcgtctaattttcagatggatagaaagaccaggttcatcattcatggcttcattgacaagggcgacgaatcttgggtaactgatatgtgcaagaaacttttcgaggttgaggaggtcaactgcatctgtgtggattggaagaaaggcagccaggctacgtatacccaagcagcaaataatgtacgggtcgtaggtgcccaagtcgctcagatgctggacatcctgctcacagagtacagctacccaccctccaaggtgcacctgattggccacagcttgggcgcccatgttgctggggaagccgggagcaaaacacctgggctttcacgaataactggcttggatccagtggaggccagctttgaatctactccagaggaagtccgcctcgacccgtccgacgcggacttcgtggacgtgatacatactgacgctgcaccgctcataccctttctaggctttggcacaaaccaacaaatgggccacttggacttcttccccaacggtggcgagagcatgccaggctgtaagaagaacgccttatcacagattgtggatctagacggcatctgggctgggacccgagattttgtggcttgtaatcatctccgttcttacaagtattatctggaaagcatacttaatccggatggcttcgctgcctacccatgtacttcctacaaaagttttgaatcagacaagtgcttcccctgtcccgaccaagggtgcccacagatgggtcattacgctgataagttcgccggcaggacatcagaagaacagcaaaaatttttccttaatactggagaggcctcaaatttcgcacgctggaggtatggtgtttctataaccctttctggcagaaccgccacgggacaaatcaaagtggcactcttcggcaacaagggcaacacacatcagtattctatctttcggggaatcctgaaaccagggtctacccattcatatgagttcgacgcaaaactcgatgtggggaccatagaaaaagtgaagttcctgtggaataacaacgtcatcaaccctaccctgccaaaggtgggcgcaaccaagataactgtccaaaagggcgaggaaaagactgtctataacttttgtagtgaggacaccgttcgcgaggatacgctgctcactcttacaccttgctag

SEQ ID NO: 9940 - DNA, 81 bp, synthetic construct
  misc_feature 1..81: note = source = /note="Description of Artificial Sequence: Synthetic coding sequence"
  source 1..81: mol_type = other DNA
atgcggaccctgttcaacctgctgtggctggccctggcctgcagcccagtacacacaaccctaagcaaatcagatgcatag

SEQ ID NO: 9941 - DNA, 549 bp, synthetic construct
  misc_feature 1..549: note = source = /note="Description of Artificial Sequence: Synthetic coding sequence"
  source 1..549: mol_type = other DNA
atgcggcggatgtgggccacccagggcctggccgtggccctggccttgtcagttttgccaggtagcagagccctgcgacctggagactgcgaagtatgcatatcctacctgggtcggttctaccaagatctgaaagatagagatgtgaccttttcacccgcgactatcgagaacgagttgatcaagttctgcagggaagccaggggaaaggaaaacaggctgtgctattacatcggcgcgacagatgacgcggcaaccaagatcataaatgaggtaagcaaaccactggctcatcacattcctgtggaaaagatctgcgagaagctcaaaaaaaaggatagtcagatatgcgaactaaagtacgacaagcagatcgatctgagcacagtcgacttaaaaaaactgcgggtgaaagaactgaaaaaaatcctggacgattggggcgaaacatgtaagggatgtgccgagaaaagcgattatattaggaagataaatgagcttatgcctaagtacgctccaaaggccgcttcggctcgcactgatctgtag

SEQ ID NO: 9942 - DNA, 153 bp, synthetic construct
  misc_feature 1..153: note = source = /note="Description of Artificial Sequence: Synthetic coding sequence"
  source 1..153: mol_type = other DNA
atgaaggtgttcttcctgttcgccgtgctgttctgcctggtgcagaccaatagcgtgcacatttctcatagggaggccagagggccttctttcagaatttgcgtggatttcctcggaccccggtgggctagaggctgctcaactggtaactag

SEQ ID NO: 9943 - DNA, 666 bp, synthetic construct
  misc_feature 1..666: note = source = /note="Description of Artificial Sequence: Synthetic coding sequence"
  source 1..666: mol_type = other DNA
atgggcgccaccaccatggaccagaagagcctgtgggccggcgtggtagtgcttctcctgcttcagggcggatccgcatacaaactggtgtgctattttactaattggagtcaggaccggcaagaaccaggcaaattcacccctgaaaacattgatccctttctgtgttctcacctaatctattcgtttgcaagtattgagaataataaagtcattataaaggataagtctgaggttatgttgtatcagacaattaactctctcaagaccaagaatcccaaactgaaaatcctgctatccatcggtggctatttattcggcagcaaaggatttcaccctatggttgattctagcacatctagactggagttcatcaactccatcatcctgttcctccggaaccacaatttcgacggcctcgacgtttcctggatctaccctgaccagaaagagaatactcactttaccgtactgatccacgaacttgccgaggcctttcagaaggattttactaagtccactaaagagaggttactactcactgctggggtttccgccgggcgccaaatgatcgacaactcatatcaggtcgaaaagcttgctaaggaccttgattttatcaatctgctgtcattcgatttccacggatcttgggaaaaaccctag

SEQ ID NO: 9944 - DNA, 1257 bp, synthetic construct
  misc_feature 1..1257: note = source = /note="Description of Artificial Sequence: Synthetic coding sequence"
  source 1..1257: mol_type = other DNA
atgcggaccctgttcaacctgctgtggctggccctggcctgcagcccggtgcatactaccctctctaagtccgatgctaagaaggctgcgtccaagacacttttagagaaggttaaattctgcagctgttgtcctggatggagcgcaatggcacggtcctggttaaccgctacctccgcaactcaatcccaatttagcgataaacccgtccaggacagggggttggtcgttacggacttgaaagccgagtccgtcgtgcttgaacacagatcctactgcagtgcaaaggcgcgggataggcacttcgccggagacgtccttggctatgtcacaccatggaattcccatggatatgatgtgaccaaagtctttggaagtaagttcactcaaatctcccccgtttggctacagctcaagcggcgtgggcgggagatgttcgaagtaacaggtttacacgatgtggaccaaggatggatgagagccgtccgtaaacatgctaagggccttcacattgtccctaggctgttgtttgaggactggacgtatgacgacttccgcaacgttctggactctgaggacgagatagaggagttgagtaagacggtggtgcaggtggctaagaatcaacacttcgatggattcgtggtcgaggtttggaatcagctcctgagtcagaagcgagtgggcttgatccatatgctgacccacctggccgaggccctgcaccaggcccgtctcctcgcattgcttgttataccgcctgcaatcacgcccggaacagatcagctgggcatgtttacacacaaggaatttgaacagctcgcccccgtgttagacggatttagtttgatgacctacgattactctaccgctcatcagccaggcccaaacgcaccactatcttgggttagagcctgcgtgcaggtgctggatcctaaatcaaaatggcgcagcaagattctactggggcttaacttctatgggatggactacgccacctcaaaagacgcacgtgagcccgtcgtaggggcccggtacatccagactctgaaagaccacaggccccgcatggtgtgggacagccaggcatcagaacactttttcgagtataagaaaagcagaagcggccgccacgtggtgttttaccccacactgaaaagtctgcaagtccgcttagagctcgctagggaactaggagtgggcgtctctatttgggaactggggcaaggactggactacttttacgacttattgtag

SEQ ID NO: 9945 - DNA, 612 bp, synthetic construct
  misc_feature 1..612: note = source = /note="Description of Artificial Sequence: Synthetic coding sequence"
  source 1..612: mol_type = other DNA
atgcggagcctgctgctgctgagcgccttctgcctgctggaggccgccctggctgccgaggtcaagaagccagccgctgccgcagcacccggaaccgctgaaaagctgagtcctaaggccgcaactcttgcggaacggtcggcaggcctggcattctccctgtaccaggcaatggccaaggaccaggctgtcgagaacatacttgtgtctccagtggtggtcgcttccagtcttggattagtgagccttggaggtaaggctaccacagcgtctcaggcgaaggccgttctctctgcagagcagcttcgggatgaggaggtgcacgccggccttggtgaattacttcgctctcttagcaactcgacagccaggaatgtgacctggaagttgggaagtaggctctatggccccagcagtgtcagctttgccgatgattttgtccgcagcagcaaacaacattataattgcgagcactctaaaatcaacttccgggacaagaggtctgctttgcagagtattaatgagtgggctgctcagacaacggatgggaagttgcctgaggtgacgaaagacgttgagcgcacagacggggccctcctcgtgaacgcttag

SEQ ID NO: 9946 - DNA, 492 bp, synthetic construct
  misc_feature 1..492: note = source = /note="Description of Artificial Sequence: Synthetic coding sequence"
  source 1..492: mol_type = other DNA
atgcggagcctgctgctgctgagcgccttctgcctgctggaggccgctctggccgcagaggtcaagaagccagccgccgctgccgcaccgggaaccgcagaaaaactgtcccctaaggctgcgaccctggctgagcgatctgcaggcctggccttttctctgtaccaagccatggccaaggatcaggccgtggagaatatcctggtaagtcccgtggtcgttgcctctagcttggggctggtaagcctggggggcaaagccacgacagcctcgcaggccaaagcagtgttgagcgccgagcagctccgggacgaagaggtgcatgcgggccttggcgagctgttgcggtctttatctaactctaccgcccgtaacgtgacctggaaattgggttctagattatacgggcccagttctgtgagctttgcagacgacttcgtgcgctccagcaaacaacattataactgcgagcattccaagataaatttttag

SEQ ID NO: 9947 - DNA, 570 bp, synthetic construct
  misc_feature 1..570: note = source = /note="Description of Artificial Sequence: Synthetic coding sequence"
  source 1..570: mol_type = other DNA
atgagcctggacatccagagcctggacatccagtgcgaggagctgtccgacgcaaggtgggccgagcttttaccattgttgcagcagtgccaggtcgtgcgtctcgacgactgcgggctaacagaagcccgctgcaaggatatctccagcgccttgcgagtgaacccggctctggcggaacttaacctgcgctccaatgaacttggcgatgtcggggtgcattgcgtcttgcagggattacaaaccccctcgtgtaagatacagaagttaagcctgcagaactgctgcctgacaggtgccgggtgcggagtgctgtcctccaccctgaggacgcttcccacactccaggaactccatctctcagacaacctgctcggggatgcgggactgcaactactgtgcgagggcctgttagatccacagtgccgtctagagaagctgcagttagaatattgttccctgtctgctgctagttgtgagccccttgcttctgtgctgcgggcaaagcctgacttcaaggagctgactgttagcaataatgatatcaacgaggccggggtcagggtttag

SEQ ID NO: 9948 - DNA, 585 bp, synthetic construct
  misc_feature 1..585: note = source = /note="Description of Artificial Sequence: Synthetic coding sequence"
  source 1..585: mol_type = other DNA
atgagcctggacatccagagcctggacatccagtgcgaggagctgagtgatgcgcggtgggctgagcttctccccctcctgcaacagtgccaggtggtcagacttgacgactgtggtctgaccgaagcccgctgtaaagatattagttccgcactgagggtgaatcctgctctggcagaacttaatctacggtcaaacgaactgggcgacgtgggggtccattgcgtgttgcaagggctccagacccctagctgcaagatccagaagctttcattgcagaattgctgcctaacaggagcgggctgtggggtacttagttccaccctgagaaccctgcccaccttacaggaattacacttatccgacaacctgctgggcgacgctgggttgcagcttctgtgcgagggcctccttgacccccagtgccgactcgaaaagctccagttggaatactgttccctgtcagcagcaagctgcgaacccctggcctcagtgctccgcgcaaagcccgattttaaagaactgacagtcagtaataatgatataaatgaggccggagtccgcgtcctctgtcagggcttgtag

SEQ ID NO: 9949 - DNA, 1086 bp, synthetic construct
  misc_feature 1..1086: note = source = /note="Description of Artificial Sequence: Synthetic coding sequence"
  source 1..1086: mol_type = other DNA
atgggcatcatccagagcatcctggccaccagccgggactgctacagctttaagaaaaaacccatacccaaaaagcctacaatgctcgctctcgccaaaatcctgctcatctctaccctgttctactccctcctatccgggtctcatggcaaagagaatcaggatatcaataccacccagaacattgccgaagtgttcaagaccatggagaataagcccatttccttggaaagcgaggccaatcttaactctgacaaagagaatatcactacgtccaatttaaaggcgagtcactccccaccgctgaacctgcccaataactcacacgggatcaccgatttcagctccaatagttccgcagaacacagcctggggtctctcaagcccacctccaccatctccacctccccacccctcattcacagttttgttagtaaggtgccgtggaacgctcccatcgctgacgaagacttgcttcccatctcggcccaccctaacgccacacccgccctcagtagcgaaaacttcacatggagcctggtcaatgataccgtgaagaccccagacaattcatctatcacagtaagcatactcagttctgagccgacatctccctccgtgacacccctcatcgttgaacccagtggttggcttacgacaaatagtgattcattcacaggcttcacgccttatcaggagaagaccaccctgcagcccacacttaaattcaccaataattctaaactattcccaaacacctccgacccacagaaggagaacaggaatactggtatcgtttttggggccatcctgggcgctattctgggagtttcactcctcacattggtcggataccttctttgtggaaaacggaaaacagactcgttctcccatcgccggctttatgatgaccgcaacgagcctgttctgcggctagataatgccccagaaccctacgatgtctctttcggaaactcctcttactacaacccaaccctcaacgatagtgccatgccggaatctgaggagaatgcgcgggatggcattcccatggatgacatacctcccctgcgaaccagcgtgtag

SEQ ID NO: 9950 - DNA, 327 bp, synthetic construct
  misc_feature 1..327: note = source = /note="Description of Artificial Sequence: Synthetic coding sequence"
  source 1..327: mol_type = other DNA
tgacccaagagcaagtggcggagcaagatcctgctgggcctgaacttttacggaatggactatgccacatcaaaggacgcacgggagcccgtggtcggcgcgcgttatattcagactctgaaagatcatcgcccgaggatggtttgggattctcaggcctccgagcacttcttcgaatataaaaaatcccggtcgggtcggcacgtggtcttttacccaactctgaagagcctccaagttcggctggaactagccagagagttgggagtgggtgtgtcaatttgggagttgggccagggtctggattatttttacgatctgctgtag

SEQ ID NO: 9951 - DNA, 504 bp, synthetic construct
  misc_feature 1..504: note = source = /note="Description of Artificial Sequence: Synthetic coding sequence"
  source 1..504: mol_type = other DNA
atgcggagcctgctgctgctgagcgccttctgcctgctggaggccgcacttgcggccgaagtcaaaaaacctgccgccgcagctgccccaggtacagccgaaaaactcagccccaaagccgcgaccctggccgagcgaagtgcgggcctggccttctcattgtaccaggcaatggcaaaagaccaggcagtggaaaatatacttgtttccccggtagtagtagcttcatcactcggtctagtctctcttggtggcaaagccactacagccagccaggctaaagccgttctgtctgctgagcagcttagggatgaggaagtccacgccggacttggcgaattgctccgcagcctgagtaattctaccgcgcggaacgtcacctggaagctcggcagcagactgtacggcccttcctccgtttcttttgccgatgacttcgtgcgctcttccaaacagcattacaactgcgaacactccaaaattaacttccgggataagcgctag

SEQ ID NO: 9952 - DNA, 1209 bp, synthetic construct
  misc_feature 1..1209: note = source = /note="Description of Artificial Sequence: Synthetic coding sequence"
  source 1..1209: mol_type = other DNA
atgatggtggccctgcggggcgccagcgccctgctggtgctgttcctggccgccttcctgcctccccctcaatgcacccaggaccctgccatggttcactacatttatcagaggtttagggtactcgagcaggggcttgaaaagtgcacccaggccacccgcgcatacatacaggagttccaggagttttccaagaacatcagcgttatgttgggccggtgtcaaacatataccagcgaatacaagtctgcggtgggaaatctggctcttcgcgtcgagcgagcccagcgtgaaattgactacatccagtatctgagagaggctgatgaatgcatcgaaagtgaggacaagaccttggctgaaatgctcctgcaagaggcagaggaagagaagaaaatccgaacattactaaacgcttcgtgcgacaacatgcttatgggcataaagtcgttaaagatagtaaagaaaatgatggatactcatggctcctggatgaaagatgccgtctacaattccccaaaagtctacctgctgatcggcagccgcaataacactgtatgggagttcgccaacattagggcctttatggaggataatacaaagcccgcaccacggaaacaaatcctcactctgagctggcaaggtacagggcaggtgatctacaaaggttttctgttcttccacaaccaggcaacatctaacgagattatcaagtacaatctccaaaagcgcactgtggaggaccggatgctacttccagggggagtgggacgggctcttgtgtaccagcactccccgagcacctacatcgatctggcagtggacgagcacggcctctgggccatccattcaggccccggtactcactcccacctcgtcctgactaaaatcgagcccgggacacttggggtagagcacagttgggatacgccttgtagaagccaggacgctgaagctagctttttgttgtgcggagtgctgtatgtcgtctattccaccggagggcaggggccccacaggatcacatgtatctatgacccgcttggaacgataagtgaggaggatctgccaaatctgttcttccctaaaaggcctcgctcccattccatgatccactacaatcccagagacaagcagctgtacgcgtggaacgaggggaatcagattatctacaagttacagacgaagaggaagttacccctgaagtag

SEQ ID NO: 9953 - DNA, 975 bp, synthetic construct
  misc_feature 1..975: note = source = /note="Description of Artificial Sequence: Synthetic coding sequence"
  source 1..975: mol_type = other DNA
atgcggagcctgctgctgctgagcgccttctgcctgctggaggccgcccttgcagccgaggtgaagaaaccagctgctgctgctgctccgggcacagctgagaagctgagccctaaggccgccacactggccgaacgttctgcaggccttgctttcagcctctatcaggccatggcaaaggatcaggccgtagaaaatatcctcgtgtctccggtggttgtggcatcgagtctggggctcgtgtctttaggtggcaaggcaacaactgcctcccaggccaaagccgtgttatcagccgaacagctacgtgatgaagaagtgcacgctgggctaggggagctcctccggtccctgtccaacagtaccgcacggaacgtgacctggaagctggggtcccgcctgtacggtccaagctctgtgagctttgccgacgactttgtccggtcttcaaagcaacattataattgcgagcactccaagatcaacttcagagataagaggtcagccctgcaaagtataaatgaatgggctgcacagactacagacgggaaacttcctgaagtgaccaaggatgttgagcgcaccgatggcgcgttgttagtgaatgccatgttttttaagccccactgggacgagaaatttcatcataaaatggtggataaccgcgggtttatggtgacccgcagctataccgtgggagtgatgatgatgcacaggactgggctgtacaactattatgacgacgaaaaggaaaagctgcagattgttgaaatgccccttgctcataaactgtcctctctcatcattctgatgccgcatcacgtggagccactggaaaggttggagaaacttctgactaaagagcagctgaaaatctggatgggtaagatgcagaagaaggctgtggccatttctctccccaagggcgtggtggaagtaactcacgacctgcaagtccgcggggggcctgcttag

SEQ ID NO: 9954 - DNA, 990 bp, synthetic construct
  misc_feature 1..990: note = source = /note="Description of Artificial Sequence: Synthetic coding sequence"
  source 1..990: mol_type = other DNA
atggtgagcaagagccggtggaagctgctggccatgctggccctggtgttggtggttatggtgtggtatagcatctccagagaggatagtttctacttcccaattccggaaaagaaagagccctgcctgcagggtgaggctgagagcaaagccagtaaacttttcgggaactatagcagagaccagccgatcttcttgagactggaggattacttttgggttaaaacaccgtctgcctacgaattaccttatgggacaaagggcagcgaggatttactgcttagggtgctggccattactagcagctcaatccctaaaaatattcaatctctgcggtgtagacgttgcgtggtggtcggcaacggccatcgacttagaaattcgagtctcggcgatgctattaacaaatacgatgtggtcattcgcctaaacaatgcacccgtcgcaggctatgagggggacgtcgggtccaagaccacaatgcgtttgttctatccagagagcgctcatttcgacccgaaagttgagaacaatcctgatacgctgctggtgcttgtggctttcaaggccatggattttcactggatcgagacgatcctgagcgacaaaaagcgagtgcggaaaggcttctggaaacagccccctctgatctgggacgttaatccaaagcagatccgcatcctaaacccattttttatggaaatcgcggccgataagctgctcagcctgcccatgcaacagccccgcaagataaaacagaagccaactactgggcttctggccatcacactggctcttcatttgtgtgatctggtacacatcgccggcttcgggtaccctgatgcttataataaaaagcaaaccatccattattatgagcaaattaccttgaagtctatggcgggtagtggccataatgtcagccaggaggctctggccattaaacgaatgctggaaatgggcgctatcaagaacctgacttccttttag

SEQ ID NO: 9955 - DNA, 351 bp, synthetic construct
  misc_feature 1..351: note = source = /note="Description of Artificial Sequence: Synthetic coding sequence"
  source 1..351: mol_type = other DNA
atgcggaccctgttcaacctgctgtggctggccctggcctgcagcccagtgcacacgacacttagcaagagcgatgccaagaaggccgcgagtaagaccctgttggagaaatcacagtttagtgacaagcctgtgcaggatagaggcctagtcgttactgatctgaaagccgaaagcgtggtgttagagcaccgatcttattgcagtgcgaaggcccgcgatcggcacttcgccggagacgttcttgggtatgtgaccccctggaatagtcatggatacgacgtcaccaaagttttcggcagcaagtttacacagattagtcctgtgtggctacagctgaagagaaggtag

SEQ ID NO: 9956 - DNA, 282 bp, synthetic construct
  misc_feature 1..282: note = source = /note="Description of Artificial Sequence: Synthetic coding sequence"
  source 1..282: mol_type = other DNA
atggacagcctgcggaagatgctgatcagcgtggccatgctgggcgccggtgccggcgtgggctacgcattacttgttatcgttaccccaggcgagaggagaaagcaggagatgctaaaggaaatgccactgcaggatcccagaagtagagaggaagctgctcggacgcaacaacttctcttggcaacattgcaagaggccgcaaccacacaggagaacgttgcatggcgtaaaaactggatggtgggcggtgagggcggggcgggaggtcggtccccttag

SEQ ID NO: 9957 - DNA, 255 bp, synthetic construct
  misc_feature 1..255: note = source = /note="Description of Artificial Sequence: Synthetic coding sequence"
  source 1..255: mol_type = other DNA
atgcggcccaagaccggccaggtgggctgcgagacccccgaggagttgggccctggcccacggcagaggtggccgctgttactcctcggcctcgccatggtcgcgcacggcctgctccgaccaatggtggcccctcagtccggcgacccagatcccggagcaagcgttggttcaagtagatctagtctgaggtctctgtggggtcgttccgcacaaggccaaccccactgccattctgtccccgccctgctttag

SEQ ID NO: 9958 - DNA, 27 bp, synthetic construct
  misc_feature 1..27: note = source = /note="Description of Artificial Sequence: Synthetic coding sequence"
  source 1..27: mol_type = other DNA
atgagcctggacatccagagcctgtag

SEQ ID NO: 9959 - DNA, 576 bp, synthetic construct
  misc_feature 1..576: note = source = /note="Description of Artificial Sequence: Synthetic coding sequence"
  source 1..576: mol_type = other DNA
atgctgatcttctggaccatcaccctgttcctgctgggcgccgccaagggaaaagaggtctgttacgaagatctaggatgcttctccgacactgagccctggggcggcacagctatacgacccttgaaaattctcccttggtcaccagagaagattgggacgcgctttctgttatataccaacgaaaatcccaacaattttcaaatcctgcttctgtctgacccttccacaatagaagcctccaactttcagatggaccgcaagactcggttcatcatccacggatttatcgataagggagacgagagttgggtgaccgatatgtgtaaaaagttgttcgaggtggaggaggtgaattgtatatgtgtagattggaaaaagggaagtcaggctacatacacacaagcggcaaacaacgtaagagtggttggggcacaggtggcacaaatgctcgacattctcttaacagagtattcgtatccaccatccaaggtgcacctcattgggcattcgctcggcgctcacgtggcaggcgaggccggcagcaagacccccgggctcagccgcatcacctag

SEQ ID NO: 9960 - DNA, 123 bp, synthetic construct
  misc_feature 1..123: note = source = /note="Description of Artificial Sequence: Synthetic coding sequence"
  source 1..123: mol_type = other DNA
atgagcctggacatccagagcctggacatccagtgcgaggagctgtccgacgcacgatgggcagaactcctgcccctacttcagcagtgtcaggtggtgagactagatgactgcggactgtag

SEQ ID NO: 9961 - DNA, 648 bp, synthetic construct
  misc_feature 1..648: note = source = /note="Description of Artificial Sequence: Synthetic coding sequence"
  source 1..648: mol_type = other DNA
atgcggcccaagaccggccaggtgggctgcgagacccccgaggagttgggtcccgggccaaggcagcggtggcccctgctgttgctgggactcgccatggtagcacatggtctcttgcgcccaatggtggccccccagtccggcgacccggatcccggagcaagcgttgggagttcaagatcttccctaaggtctctgtggggaagtaggctgctcctccagccctctccacagcgcgctgaccctagatgctggccccgcggattctggagtgaaccccagtcactatgctacgtcttcggcactggtaccaaagtgaccgtgcttggccagccaaaggctaatccaacagtcactctgttccccccttcctctgaggagttacaggctaataaggctacactggtgtgcctgatctctgatttttacccgggcgcggtgaccgtggcttggaaggctgacggaagccccgtgaaagccggggtggagaccactaagccctcgaagcaatcgaacaataaatatgcggccagctcctacctgtctcttacgcctgaacagtggaaatcccaccgctcttattcctgccaagtgacccacgaggggagcaccgtcgagaagaccgtggctcctacggagtgcagttag

SEQ ID NO: 9962 - DNA, 999 bp, synthetic construct
  misc_feature 1..999: note = source = /note="Description of Artificial Sequence: Synthetic coding sequence"
  source 1..999: mol_type = other DNA
atgtgccccgccggctggaagctgctggccatgctggccctggtgctagtggtcatggtgtggtactccatcagcagagaagacaggtatatcgagttgttctatttccccatccccgagaaaaaggagccctgccttcaaggcgaagcagagtctaaggcttctaagctgtttggcaactatagtcgggaccaacctatcttcctgagactcgaagactacttttgggtaaaaactccgagtgcctatgaactcccatatggcaccaaaggaagcgaggacctgctgctgcgggtccttgccataacttctagttcaatccccaaaaacatccaatccctccgctgcaggcgctgtgttgtcgttggaaacggccaccgcctgcgcaacagctccctgggtgatgccattaacaagtatgacgtggtgattcgcctaaacaatgctcccgttgcaggctacgagggggatgtcggttcaaagactaccatgagactgttttaccccgaatctgctcactttgatcctaaagtcgaaaataaccctgatactctcttagttcttgttgcctttaaggccatggacttccactggatcgaaactatcctttccgataagaagcgcgtgcgaaaaggtttctggaagcagccgccattaatctgggacgtgaacccgaaacaaattaggatcctaaatccattttttatggaaattgccgccgataagcttttgagcctgcctatgcagcagccacgtaaaatcaaacagaaacccactactggtttgttagcgattacgcttgcactgcatctgtgtgaccttgttcatatcgcgggcttcggatatcccgatgcttacaacaaaaagcagacgatccattactatgaacagattaccctgaaaagtatggccgggtctggacacaacgtttcacaagaggccctggcgataaagagaatgttagaaatgggcgccatcaaaaatcttacctcattctag

SEQ ID NO: 9963 - DNA, 888 bp, synthetic construct
  misc_feature 1..888: note = source = /note="Description of Artificial Sequence: Synthetic coding sequence"
  source 1..888: mol_type = other DNA
atgcggagcctgctgctgctgagcgccttctgcctgctggaggccgctcttgcagcggaggtcaagaaaccagccgctgctgcggcccctggcacagcggaaaaactcagtccgaaagcagcgacactggcagagaggtccgccgggctggctttttccctgtaccaggcaatggcgaaagatcaagcagtagaaaacattctggtatcacctgtggtggtagcgtcatcactgggactggtaagtttgggcggcaaagcaactaccgcctcccaagccaaagctgtcctgtcagccgagcagctgcgggacgaggaagtgcacgccggtctcggcgaactgctaagaagcctgtctaactccaccgctaggaatgtaacgtggaagcttggatcgcgcctgtacggcccaagctctgttagctttgcagacgactttgtacggtcttccaaacagcattacaactgcgagcattccaaaattaattttcgggataagagatctgccttgcagtctattaacgaatgggccgctcaaactaccgacggaaagctcccggaagtaactaaggacgtggagcgaaccgacggggccctgcttgtaaacgcaatgttttttaaaccccactgggacgagaaatttcaccacaaaatggtggataatcggggattcatggtcactcgcagctacaccgtgggtgtcatgatgatgcaccgcactggtctgtacaattactacgacgacgagaaggaaaagctgcagatcgtggagatgccactggcccacaagctcagctctctgataattcttatgcctcaccatgtggaaccccttgaacggcttgaaaagttactcaccaaagaacagctcaagatctggatggggtag

SEQ ID NO: 9964 - DNA, 399 bp, synthetic construct
  misc_feature 1..399: note = source = /note="Description of Artificial Sequence: Synthetic coding sequence"
  source 1..399: mol_type = other DNA
atgcggaccctgttcaacctgctgtggctggccctggcctgcagccctgtgcataccaccctgtccaaatctgatgctaaaaaggccgcatccaagactttactggagaagtcacaattcagcgacaagccagtccaggatagagggcttgtggttactgacttgaaggccgagtctgtggtacttgagcatcgaagctattgctctgccaaggcacgtgacagacattttgccggagacgtgctaggctatgttacgccttggaattcacacggttatgacgtaacgaaggtgttcggctccaaatttacccagatctcccccgtgtggttacagctcaagaggagaggacgcgaaatgtttgaagtgaccggcctccacgatgttgaccaaggctag

SEQ ID NO: 9965 - DNA, 360 bp, synthetic construct
  misc_feature 1..360: note = source = /note="Description of Artificial Sequence: Synthetic coding sequence"
  source 1..360: mol_type = other DNA
atgcggaccctgttcaacctgctgtggctggccctggcctgcagccctgtacatacaactctgtccaaaagtgatgccaagaaggccgcatctaagactttgttagaaaagagccagtttagtgacaaacctgtccaggatagggggctggtggtgactgatttgaaagctgaatctgttgttctggaacataggtcttactgtagcgccaaagcccgcgacagacacttcgccggggacgttcttggctacgtcactccttggaacagccacggttacgatgtgactaaggtgtttggctctaaattcacgcagatctcgcctgtgtggcttcagctgaagcgccgcggccgagagtag

SEQ ID NO: 9966 - DNA, 390 bp, synthetic construct
  misc_feature 1..390: note = source = /note="Description of Artificial Sequence: Synthetic coding sequence"
  source 1..390: mol_type = other DNA
atgcccatggccagcccccagaccctggtgctgtacctgctggtgttagccgttaccgaagcatgggggcaagaggccgtgattcccgggtgtcaccttcatcctttcaatgtcactgtaaggagtgaccgtcagggcacctgtcagggaagtcacgtggcccaggcctgtgttgggcattgcgagagtagtgcctttcccagccgttactctgtgctggtggccagtgggtacaggcacaatataaccagcgtgtcgcagtgctgcactatctctgggttaaagaaagtgaaggtgcagcttcagtgcgttggctctcgaagagaagaactcgagattttcacagcccgcgcatgtcaatgcgatatgtgccgcctctcgaggtactag

SEQ ID NO: 9967 - DNA, 1386 bp, synthetic construct
  misc_feature 1..1386: note = source = /note="Description of Artificial Sequence: Synthetic coding sequence"
  source 1..1386: mol_type = other DNA
atgagcctggacatccagagcctggacatccagtgcgaggagctgagtgatgcacgctgggccgagctgctgccactgttacagcagtgtcaggtcgtgcggctggacgattgcggcctaaccgaggctcggtgcaaggacatcagcagcgcactccgcgtaaaccctgccttagcagagttaaacctccgtagcaacgagctgggtgatgtgggtgtgcattgtgtgctccagggcctccaaactccctcatgtaagatccaaaagctttcgttacagaattgctgcctgacaggcgcaggatgtggggtgttaagttccaccctgcgtaccctgcccaccctgcaagagctacacttatctgataatcttctgggcgacgctgggctccagctgctgtgcgaaggtctcctggacccccagtgcaggctggagaagctgcagttagaatattgtagcctctccgccgcgtcctgtgaaccactcgcctccgtgcttagagctaaacctgactttaaggaattgacggttagtaacaatgacattaacgaggctggggttagagttctttgtcagggcttgaaggacagtccttgtcagctggaagctctgaagctggagtcctgcggggtcacttctgacaactgtagagacctgtgcggcatcgttgcttctaaagcctcactcagagaactggcattggggtccaacaagctcggtgatgttggcatggccgagctgtgtcctggcttattacacccctccagcagacttcgcacactctggatatgggaatgcggtatcaccgccaaagggtgtggggacctatgcagagtcctgcgtgctaaggaatccctgaaagaactgagccttgccggaaacgagctcggtgatgagggggccagattgttatgtgagacactgctcgagcccgggtgccagctggagagtctgtgggtgaaaagctgttccttcaccgccgcctgttgtagtcacttcagcagcgttctcgcgcagaatagattcctcctggagctgcaaatctctaataaccgtcttgaagacgcaggagtgagagagctgtgtcagggactggggcagccgggcagcgttcttcgggttttgtggctcgccgattgtgacgtgtctgattcatcatgcagtagtttggctgctacattgctcgcgaaccactcccttcgcgaactggaccttagcaataactgcctcggggatgccgggatacttcaactggtagaatctgtaagacagcccggctgtctgttggagcagctcgtgctgtacgacatttactggtccgaggaaatggaagacaggttacaggccctggaaaaggataaaccctctctgcgcgtcatctcttag

SEQ ID NO: 9968 - DNA, 453 bp, synthetic construct
  misc_feature 1..453: note = source = /note="Description of Artificial Sequence: Synthetic coding sequence"
  source 1..453: mol_type = other DNA
atgcggagcctgctgctgctgagcgccttctgcctgctggaggccgctctagccgcggaggtgaagaaaccagccgccgctgcagctcccgggacagccgaaaagttgtctcccaaggccgccaccctggcggaacgcagcgccggactggctttcagtctctaccaggctatggccaaggaccaagccgtcgaaaacatactcgtcagccccgtggtggtcgcaagctctctgggcctcgtgtcccttgggggcaaagctactactgcaagccaggccaaggctgtattatcagcggaacagctgagagacgaagaggttcatgctggcctgggcgagcttcttaggtctttgtccaatagcaccgcgagaaacgtgacctggaagcttgggtctaggctgtatggccccagtagtgtttcgttcgcagatgatttcgtgcggagttcatag

SEQ ID NO: 9969 - DNA, 1257 bp, synthetic construct
  misc_feature 1..1257: note = source = /note="Description of Artificial Sequence: Synthetic coding sequence"
  source 1..1257: mol_type = other DNA
atgcggagcctgctgctgctgagcgccttctgcctgctggaggccgctttggctgcagaggtaaaaaaacccgctgctgccgctgcaccaggaactgcggaaaaactctctccaaaggcagcaacgctcgccgaacggtctgccggcctcgctttttcactgtatcaggctatggcgaaggatcaggcagttgagaatatccttgtcagtcctgtcgtggtggcatcttcgctagggctagtgagcctcggcggaaaagccacaaccgctagccaggctaaagcagtgctttccgcagaacaactgcgggacgaagaggtgcatgcaggtctgggcgagctgctgcggagcctttctaatagtactgccagaaatgtaacctggaaactgggatctcgcctctacggaccttccagtgtgtccttcgcagacgacttcgttagatctagtaaacagcactataattgcgaacacagtaagatcaactttcgcgacaagcgctccgcgctacagagtattaatgagtgggcggcccagaccacagatgggaagcttcctgaagtgaccaaggacgtcgaacgcaccgacggagctctgctggtcaacgcaatgttcttcaaaccacattgggatgagaagtttcaccacaaaatggtggataacagagggttcatggtcacgaggtcatacaccgtgggagtcatgatgatgcaccggaccggattgtacaactactatgacgacgagaaggagaaacttcaaattgtagaaatgccccttgcccacaagctctcatcgcttatcattctcatgcctcaccatgttgagccccttgaacgcctggagaagctactgactaaagaacagctgaagatatggatgggaaaaatgcagaaaaaggcggttgcaatatctctgcccaagggtgtggtcgaggtaactcatgacctccaaaagcatctggccggattgggtctgaccgaagccatcgataaaaataaggccgatctgagcaggatgagtggaaagaaagacctgtaccttgcatcagtctttcacgccactgctttcgagctggacacggacgggaaccccttcgatcaagatatttacggcagagaggagctccgatcccccaagcttttctatgctgatcaccctttcatattcctcgtcagggacacacaatctggttcgctcctctttataggtaggctcgttcgccccaagggcgacaagatgagggatgagctctag

SEQ ID NO: 9970 - DNA, 1002 bp, synthetic construct
  misc_feature 1..1002: note = source = /note="Description of Artificial Sequence: Synthetic coding sequence"
  source 1..1002: mol_type = other DNA
atggtgagcaagagccggtggaagctgctggccatgctggccctggttctggtggtcatggtgtggtatagtatcagtcgcgaagatagatatatcgagctgttttatttcccgattccggaaaaaaaggagccctgcctgcaaggagaggccgaatcaaaggcctctaaattattcggaaattactcacgggaccagcccatctttttacgcctggaggactacttctgggtgaaaaccccttctgcctatgagttgccttacggtacaaaaggatccgaagacttacttcttcgggtgctggcaattacatcttccagtatacctaagaacatacagtcactgaggtgccgccgctgcgttgtggtgggaaacggccacagactcaggaacagctcccttggagatgctatcaataaatacgacgtcgtaatccgcttgaacaatgcccccgtggctggatacgaaggagacgtcgggagtaaaacaacaatgcggctgttctaccctgagagcgctcactttgaccccaaggtcgagaataaccccgataccctcctggtgctggttgcctttaaagctatggacttccattggatagagacgatcctgtctgacaaaaagcgcgtcaggaaggggttttggaaacagccccccctaatctgggatgtaaatcctaaacaaataagaattttgaatccgtttttcatggagatcgcagctgacaaattactctctctcccaatgcagcagccccgcaaaataaagcagaagcccacgaccggcctactggccatcacacttgcactgcatctttgtgacctcgtgcatatcgccggcttcggatatccagatgcatacaacaaaaagcagactatccactactacgagcagatcaccttgaagtctatggctggcagcgggcataatgtctctcaggaggcgctggctatcaaacggatgctggaaatgggcgcgatcaagaaccttacctctttctag

SEQ ID NO: 9971 - DNA, 987 bp, synthetic construct
  misc_feature 1..987: note = source = /note="Description of Artificial Sequence: Synthetic coding sequence"
  source 1..987: mol_type = other DNA
atgtgccccgccggctggaagctgctggccatgctggccctggtgctggtggttatggtttggtatagcatttcacgcgaagactctttttacttccctatcccggagaagaaggagccttgcctccagggcgaagccgagtcaaaagcctccaaactgttcggaaattattcccgcgaccagccaatttttctcagactcgaggactacttttgggtgaaaaccccttcggcctacgagcttccttacggcaccaagggttccgaggatttgctcttgcgcgtgctcgctatcacctctagttctattccaaagaacattcagagcctacggtgccgtcggtgtgtagtggtcggaaacggacacagactgcgaaatagcagcttgggggacgccattaataagtacgacgtcgttatcaggctgaataacgcccccgtggcgggctacgagggtgacgtgggcagcaaaactacaatgcggcttttttatccggagagcgcccacttcgatcctaaggtggagaacaatcctgatacactactggtcctggtggccttcaaagccatggacttccattggatcgaaacgatcctttctgacaagaaaagagtacgaaagggcttctggaaacaaccgccacttatctgggatgtgaacccaaaacagataagaattctgaacccttttttcatggaaattgcggctgacaagctcctgtccctcccgatgcagcaacccaggaaaattaaacagaagcctactacaggcctactggctattaccctggcactacatttatgtgacctcgttcatatcgcagggtttggatatcctgatgcttacaacaagaaacaaacgattcactactacgagcaaatcaccctgaaaagtatggctggcagtggacacaacgtgtcacaggaggctctggcgattaaacgcatgctggagatgggcgcaatcaagaatttgacatccttctag

SEQ ID NO: 9972 - DNA, 585 bp, synthetic construct
  misc_feature 1..585: note = source = /note="Description of Artificial Sequence: Synthetic coding sequence"
  source 1..585: mol_type = other DNA
atgaccatgcggcacaactggacccccgacctgagccccctgtgggtgctcctgctgtgtgcacatgtggtcacactgctggtaagggccactcctgtctcacagactacaacagccgccacagcgagcgtccgcagcacaaaagacccgtgtcccagccagccccctgtgtttccagctgccaaacaatgtcccgccctcgaggtgacttggcccgaagtagaggttccactcaacggcaccctgagcctctcttgcgtcgcttgctctcgctttcctaatttcagcatcctctactggctgggcaacggcagtttcattgaacaccttccaggcagactctgggagggttcgaccagtcgcgagcgcggttccacgggcactcagctgtgcaaggcactggtgctggagcaactgacgcctgcactgcacagtacaaacttctcttgtgtgcttgtagaccccgagcaggtggtgcagcggcatgtggtgctcgcccagctatgggcagggttgcgggctacattgccccccactcaagaggcactgccaagtagtcattcaagcccccagcagcaaggatag

SEQ ID NO: 9973 - DNA, 1386 bp, synthetic construct
  misc_feature 1..1386: note = source = /note="Description of Artificial Sequence: Synthetic coding sequence"
  source 1..1386: mol_type = other DNA
atgagcctggacatccagagcctggacatccagtgcgaggagctgtccgacgcaaggtgggccgagctgctgccactgctccaacaatgccaagtagtaaggcttgatgactgtggactgacagaggcacgatgcaaagatatatcctcggcactgcgggtgaaccctgctctcgccgaactgaatctgcggagtaatgagttgggagatgtaggcgtccattgtgttttacagggcctgcagactccaagctgcaaaatacagaaactaagtctccaaaattgttgcctcactggcgcaggatgcggtgtgttgagttcgacactaaggacactcccaaccctccaggagctgcacttatccgacaatctgctgggggacgccgggctccagctactgtgcgagggcctgctggaccctcaatgccgcctggagaagctgcagctggaatactgctctctctctgccgcaagctgcgaaccgctggccagtgtgctgagggccaaaccggactttaaggagctgactgtttcaaacaacgatatcaacgaggccggcgtacgcgtgctgtgtcagggtctgaaggattcaccttgccagcttgaagccctgaagctggaaagctgtggcgtgacctcagataactgcagggatctatgtggaattgtggcatccaaagccagcttgcgcgaactggcactgggcagtaacaagttaggtgatgtcggcatggctgagttgtgtccaggactcctgcatccctcatcgcgcctccggacgttgtggatttgggagtgtggaatcaccgccaaaggatgcggcgacttatgcagggtcttgagggcaaaggagagcttgaaagaactgagcctggccggcaacgaactgggggacgagggcgctaggctgctatgcgagacactcttggagccgggttgtcaactggaaagtttatgggtcaaatcatgctccttcaccgctgcttgctgctcccacttttctagcgtgttggcccagaatagatttttgttggaactgcagatcagcaacaatcgcctagaggatgctggcgtcagagagctttgccagggattggggcaaccgggatctgtcttgcgcgtcctgtggctggccgactgtgacgtctcagactcatcctgttcatcactcgctgctacattgctcgcaaatcattccttacgagaactggaccttagtaacaattgcctgggcgacgcgggaatcttgcagctggtggaaagcgtccgccaacccggctgtttgctcgagcagctggtcctttatgatatttattggtccgaggagatggaggacaggctgcaagccctcgaaaaggataagccatctcttcgcgttatcagttag

SEQ ID NO: 9974 - DNA, 1995 bp, synthetic construct
  misc_feature 1..1995: note = source = /note="Description of Artificial Sequence: Synthetic coding sequence"
  source 1..1995: mol_type = other DNA
atgccccaggcccccagcaccggcagcagcctgatccgggacccctctattgcacaccggaatacccagatcttgtggaccgaggcgggacgtgacctggctcaggacaccaggtacacaggggaggagagcctgaccatatttgtggacaaacggaaactttcgaagcgcgccgaaggctccgattccactacaaattcgagctcagtgacactggagactttgcatcaactcgccgcatcttactttatcgatagggactccacacttagacggctccaccacatccagattgcctccaccgcaataaaggtcactgagacccgcacaggacctctcgggtgctctaactacgataacctcgactcagtttcttccgtgctggtgcagtctcccgagaataagatccagctgcagggcctgcaggtacttctgccggactacctccaggagcggtttgttcaggccgcattatcctatatagcatgcaattctgaaggcgagtttatatgcaaagagaacgattgctggtgccattgtgggccaaagttccccgaatgtaactgccccagcatggatatccaggccatggaggagaatcttcttcggatcactgagacatggaaggcatataatagcgacttcgaggagtctgatgaatttaagttgttcatgaaaaggttgccaatgaactatttcctaaatacctccactataatgcacctatggaccatggattctaattttcaaagacgatacgagcaattagaaaactccatgaaacaactctttttgaaggcacagaagatcgtacacaagttattcagcctgtccaagaggtgtcacaagcagcctctgatctccctgcccaggcagcggacatccacatattggttgactcggatccaatcgtttctatattgtaacgaaaacggcttgctgggctccttttcagaggaaacccactcctgcacctgccctaacgaccaggttgtctgcaccgcatttctgccttgtaccgttggggacgcctctgcctgtctgacctgcgcccctgacaatagaacacgttgtggcacatgtaatacagggtatatgctgtcacagggcctgtgtaagcctgaggttgccgaatctactgatcattacattggctttgagactgacctccaagacctagagatgaaatacttactccagaaaaccgacagacggatagaagttcacgccatctttatctctaatgacatgcgcctgaactcgtggttcgacccgtcctggcggaaaagaatgctcttgaccctaaagtccaataagtacaagtcttccctggtccatatgatacttggtctttctcttcaaatttgcctgaccaagaacagtacccttgaacctgttttagccgtgtatgtcaaccctttcggcggaagccactccgagagttggttcatgccggtgaatgaaaattcctttcccgattgggagcgcacaaaactcgatcttccactgcagtgttacaattggacactgacactgggcaataaatggaaaacatttttcgaaacagtgcatatctatctgaggtcccgcatcaagagcaacggccctaacggcaacgagagcatctattacgaaccactagaatttattgatccaagtaggaatcttggctacatgaagatcaataacattcaggtctttggctatagcatgcattttgatccggaagcgatcagagatctgattctccagttggactatccgtacactcagggatcgcaggacagtgcactgttgcagcttctagagatccgcgaccgagtgaataaactcagccctcctggccagcgaaggctcgatttgttcagctgcctgctgcgacatcgtctaaaactgtccactagtgaggttgttagaattcaatctgccttacaagcctttaatgccaagctgcctaatacaatggattatgatacaaccaagctgtgctcatag

SEQ ID NO: 9975 - DNA, 459 bp, synthetic construct
  misc_feature 1..459: note = source = /note="Description of Artificial Sequence: Synthetic coding sequence"
  source 1..459: mol_type = other DNA
atggcccgggactacgaccacctgttcaagctgctgatcatcggcgacagcggagtggggaagtcgtccctcctcctgcggttcgctgacaatacctttagcggctcttacatcacaacaatcggcgtggattttaagattcgcactgtcgagataaatggggagaaggtgaaactacagatttgggacacagccggacaggaacggttcagaaccattacctctacttattatagggggacacacggagtaattgtcgtctatgacgtgactagcgccgagagctttgtcaatgttaagcgctggcttcacgaaatcaaccagaactgtgatgacgtatgcaggattctggatgtacagctccatcacggcgcaggccctccttccaaagaacggcaaccagggaaaaccgctgccgccacgaccgagcgctgcggggaggcccacgaggagcagtag

SEQ ID NO: 9976 - DNA, 696 bp, synthetic construct
  misc_feature 1..696: note = source = /note="Description of Artificial Sequence: Synthetic coding sequence"
  source 1..696: mol_type = other DNA
atgctgtacatcggcatcgccgagtacttcttcaagagcgccagcttcgcccacttcactgctggggtctttaatgttactctgtccaccgaagagattagtaaccatttcgtccagaacagccaaggcctgggcaacgttcttagccggatcgctgagatctacatcctgtcgcagcccttcatggtgaggataatggcaactgagccaccgattataaatttgcagccaggcaattttactctcgacatccccgctagtattatgatgctgacccagccaaagaacagtacagtcgagacaatcgtctccatggatttcgtggcctccacgtcagtaggcttggttatcctcgggcaacggctggtctgttccctgtccttaaatcgcttcaggctcgcactgcctgagagcaaccggtccaacatcgaggtgcttaggtttgagaatatactgtcctcgatactgcacttcggtgtgctccccctggccaatgccaaattgcagcagggattcccgctaagcaacccccataaattcttgttcgtcaattcagacatagaggtgttggaaggtttcctgctaatatctacagacctgaaatatgaaactagctcaaaacaacagccctcgttccatgtttgggaagggctgaacctgatcagcaggcagtggcgaggcaaatcagccccctag

SEQ ID NO: 9977 - DNA, 1911 bp, synthetic construct
  misc_feature 1..1911: note = source = /note="Description of Artificial Sequence: Synthetic coding sequence"
  source 1..1911: mol_type = other DNA
atgaccacctggagcctgcggcggcggcccgcccggaccctgggcctgctgcttctagtggtcttggggttcctcgtgctccggcgcttagattggagtacccttgttccacttagactgaggcacagacaattaggcctccaggccaagggatggaatttcatgcttgaggactccacattttggatatttggaggctcaatccactacttccgggttccacgagagtattggagagacagactgctgaagatgaaggcctgtggactgaacacgctgaccacctatgtgccctggaacctgcacgaacctgagcggggtaagttcgacttcagtggcaacctcgacctggaggcatttgtgcttatggccgcagaaatcggcctatgggtgatcctacggcccggcccttatatctgttccgaaatggatttaggcggattgccgtcctggctccttcaagacccaggcatgagactgagaacaacgtacaaaggcttcacagaagctgttgatctctatttcgaccatcttatgtcccgtgttgtgcctttgcaatacaaaagaggcggtccaattattgccgttcaggttgagaacgagtacggcagctataacaaagaccctgcatacatgccatacgttaagaaggccctcgaggaccgcggaatcgtagaactgctcctgacgagcgacaacaaagacggtctgagcaaaggaatcgtgcagggcgtcctggccaccatcaacttgcagtctacccacgagcttcagctcctgacaacattcttgtttaacgttcaaggcacacaacccaagatggtaatggagtattggactggctggttcgattcctggggaggccctcacaacatactcgactccagcgaagtcttgaagactgtctctgccatcgtcgatgccggctcctcaatcaacctgtatatgtttcatggaggaaccaacttcgggttcatgaatggggccatgcacttccacgactataagtccgacgtgaccagttacgattacgacgcagtcttgacagaggcaggagactacacagccaaatacatgaagctgagggatttctttggaagcatcagcgggatcccgcttccgcccccaccagatcttcttcccaaaatgccgtatgagccactcaccccagtactctatctgagcctctgggacgccctaaaatacctgggggaacccatcaaaagcgagaagccaataaatatggagaacctgcccgtcaacgggggtaatggccaatctttcgggtatattctgtatgagaccagtataacgtcttctgggatcctatccgggcatgtccacgatcgaggccaagtgttcgttaataccgtgtccatcggattcctcgattataagaccacgaaaattgcggtacccctgattcagggttacaccgtgctgcggatcctcgtcgagaatcgaggacgggtgaattatggcgagaacatcgacgatcagcgcaagggactgatcggaaatctctacttaaatgattcccctctgaagaattttagaatctacagcctggacatgaagaagtctttctttcagaggtttggcctggataaatggtcgtctctgccagaaacaccgactctgcctgcttttttcctgggtagcctcagcatcagcagcaccccttgcgacacatttcttaaactggagggctgggaaaaaggcgtggtgtttattaatggccagaatcttgggaggtattggaacatcggaccacagaaaaccttataccttccaggcccttggctgtcgtccggaatcaatcaagttatcgtcttcgaggagactatggcaggccctgctctgcagtttactgaaaccccccatttgggaagaaaccagtacatcaagtag

SEQ ID NO: 9978 - DNA, 1374 bp, synthetic construct
  misc_feature 1..1374: note = source = /note="Description of Artificial Sequence: Synthetic coding sequence"
  source 1..1374: mol_type = other DNA
atgggctgcagcctgcccctgagctgcatcatggtgcggagcgtggcgtgggctgggtttatggtgcttctcatgatcccctggggcagcgccgcaaagctggtgtgttactttacaaattgggcccaataccgacaaggagaagcgcgcttccttcccaaagacttggacccttctctgtgtactcacctgatatatgctttcgcaggcatgactaatcaccaactgtctaccactgaatggaatgacgagacactttaccaagagtttaatggtcttaagaaaatgttcaccgacatggttgccaccgcaaataaccgccagacatttgtaaattcagctattcgattcctgcggaagtattccttcgatggtcttgatcttgactgggagtatccaggctcacagggcagcccagccgtcgataaagaaagatttaccacactggtgcaggatctagccaatgccttccagcaggaggcccagacttcaggaaaggagagacttctgttatcagctgctgtccctgccggacagacctacgtcgatgccggatacgaggtcgataaaattgcgcagaacctggatttcgttaatttgatggcttacgactttcatggcagttgggaaaaggtcacgggccataacagccctctgtacaagagacaagaagaaagtggggctgcagccagccttaatgtagacgccgctgttcagcagtggctccagaaaggaactcctgcgagcaagttaatcctgggaatgccaacatacggtaggtcttttacccttgcttccagttctgataccagagtgggtgctcctgccacgggttccggcactccgggtccgtttaccaaggagggtggcatgctggcctattacgaggtatgttcctggaagggcgctactaagcaacgtatacaagaccaaaaggtgccttacatatttagagataatcagtgggtgggattcgacgatgttgagagctttaaaaccaaggtgagttacttgaaacaaaaagggctcgggggtgcaatggtgtgggcgttagatctcgatgacttcgctgggttttcgtgtaatcaggggagataccctcttatccagaccctccgccaggaactcagtttaccctacctgccttccggcaccccagagcttgaggtgccaaagcctggccagcccagtgagcctgagcacgggcccagtcccgggcaagatacattctgccagggtaaagctgacggtctgtacccaaatcctcgcgaaagaagctcattttatagctgcgccgctggccgcctgttccaacaatcctgtcccactgggttggtgtttagcaattcctgtaaatgctgtacatggaattag

SEQ ID NO: 9979 - DNA, 1125 bp, synthetic construct
  misc_feature 1..1125: note = source = /note="Description of Artificial Sequence: Synthetic coding sequence"
  source 1..1125: mol_type = other DNA
atgtacgtgagcacccgggagcggtacaagtggctgcggttcagcgaagactgtttatacctgaatgtttacgcgccagcccgggcgcctggagacccacagcttcctgttatggtttggttccctggtggagccttcatcgtgggcgctgcatccagctacgagggctctgatctcgctgcccgagagaaagtggtgctggtgttcctgcagcacaggctggggatttttggattcctgagatggcgggggcgaacagatgattcacatgcccgaggcaactgggggctcctggaccagatggcagccctgcggtgggtgcaggagaacatcgcggccttcggaggcgacccagggaatgttacattatttgggcagtcagccggagccatgtcgatcagcggcttaatgatgtctcccttggcaagcggcctgtttcatagggccattagccagtccggcaccgcactcttccggctgttcataacttccaatcccctgaaagttgccaaaaaagtggctcacctcgcgggatgtaatcataactcaacacagatcctggttaactgtttgcgggcactttctggtaccaaggtgatgcgggtgtccaataaaatgcgcttcttacagctcaatttccagagggaccccgaagaaataatttggtcaatgtcgcccgtggtggacggcgtggttatcccagatgaccctttggtgctgttgacccagggtaaagtatcttctgtgccttaccttctgggcgttaacaatctagaattcaattggttactgccttacattatgaaatttccgctcaataggcaggcaatgcgcaaagagacaattactaagatgctctggtccacccgtacattgctgaacatcacgaaagagcaggttccactagtggtggaggaatatttagataatgttaacgagcacgattggaagatgctacgtaaccgcatgatggatattgtgcaggatgctactttcgtatacgcaactctgcaaactgcccactaccatcgggagacaccgatgatgggaatttgtccagccgggcacgcaaccacaagaatgaagagcacatgctcgtggatactgcctcaggagtgggcatag

SEQ ID NO: 9980 - DNA, 384 bp, synthetic construct
  misc_feature 1..384: note = source = /note="Description of Artificial Sequence: Synthetic coding sequence"
  source 1..384: mol_type = other DNA
atgaagaccggcctgttcttcctgtgcctgctgggcaccgccgccgcaatcccaactaatgcacgattgctgagtgatcattcaaagcccacggccgagactgtcgctcccgacaacaccgcgatcccctccttacgggccgaagccgaagagaacgaaaaagaaacagcggtgtccaccgaggacgactctcatcacaaagccgaaaaatctagtgttttgaagtccaaagaggaatcccacgaacaaagcgccgagcagggtaaatcatccagccaggaacttggtcttaaagatcaggaggactccgatgggcatcttagtgtgaatctagaatatgcccctacagaaggaacactggacattaaggaagacatgtcctag

SEQ ID NO: 9981 - DNA, 285 bp, synthetic construct
  misc_feature 1..285: note = source = /note="Description of Artificial Sequence: Synthetic coding sequence"
  source 1..285: mol_type = other DNA
atgcggaccctggccatcctggccgccatcctgctggtggccctgcaggcgcaggccgagcctttacaagccagggccgacgaggtggccgcagcccccgaacagattgcggcagatatacctgaggtagtggtttcccttgcttgggatgagtctctggcccctaagcaccctggcagtcgtaagaacatggcgtgctattgccggataccagcctgtatcgcgggagagcggcgatacggcacatgcatctatcagggaaggctttgggcgttctgctgttag

SEQ ID NO: 9982 - DNA, 414 bp, synthetic construct
  misc_feature 1..414: note = source = /note="Description of Artificial Sequence: Synthetic coding sequence"
  source 1..414: mol_type = other DNA
atggccgccctgagccgggccctgggccccctgcggacccccgcccctcctctatggattggcctatttctggtcgctactggaagccaacagtcactcgcccagccactgcccggaaacacgaccgaggctacacctcggtcactaagggccagcggctcgctttgtgggccacatgccaaggctccttatctctgcgaagccacacacgagcctgcggccgcgcgcattagagcccaagtgcccgacactcgctggtcccgggtgggggggcaaaggttctacagccgggtcctttcgcctctgcacagaggtccgagcggacacacagaagcaagtgcacagaggagccacatggggaagttgaaggagccacagccacaggaccacaagccagggctgggcgcaagctag

SEQ ID NO: 9983 - DNA, 228 bp, synthetic construct
  misc_feature 1..228: note = source = /note="Description of Artificial Sequence: Synthetic coding sequence"
  source 1..228: mol_type = other DNA
atgctgaaggtgcactaccccaagttcggcgtgagcgaggactgcttgtatttgaatatatacgcaccagcgcatgccgacacaggttccaagctcccggtgttagtatggtttcccggcggcgcctttaaaacaggcagtgcatccatttttgacggcagcgccctcgccgcttacgaagatgttctggtggtggtcgtccagtaccgcttaggcatctttggctag

SEQ ID NO: 9984 - DNA, 1491 bp, synthetic construct
  misc_feature 1..1491: note = source = /note="Description of Artificial Sequence: Synthetic coding sequence"
  source 1..1491: mol_type = other DNA
atggcccccgcccggaccatggcccgggcccggctggcccccgccgactgtctgaattcattcactgccggggtacctggttttgtgctggataccaacgcaagcgtgtcaaacggtgctacgtttctggaaagccccacagtgcgcagaggatgggattgcgtgagagcttgttgtacgacacagaactgcaatctggctctggttgagctgcagcccgatcgcggagaggacgccattgccgcttgtttcctgatcaattgtctgtatgaacaaaattttgtctgtaagtttgctcctcgcgaggggtttattaactacctgactagagaggtgtaccgaagttatcgacaactcagaacccaaggttttggcggctcgggtattcctaaagcatgggctggcattgatctgaaagtccagcctcaggaacctctcgtccttaaagacgtagagaacacagactggaggcttcttagaggagacactgatgtgagggtagagcgaaaagaccccaaccaggtggaactctggggcttgaaggagggtacttacctgttccaattaaccgttaccagctcagaccatccagaggatactgctaacgttaccgtgacagtattgtctaccaaacagacggaggattactgtctagcctccaataaagtcggacgatgccggggctcttttccacggtggtactacgatcccacagaacagatttgcaaatcttttgtctacggaggctgtctcggtaataaaaataattatcttagggaggaagaatgcattctcgcttgtaggggcgttcaaggggggcccctgcggggatcctcaggggctcaggccaccttcccgcagggcccatctatggaaaggagacacccagtctgtagtgggacctgtcagccgacgcagttcagatgcagtaacgggtgttgcatcgattcgttcctcgagtgtgatgataccccaaattgcccggatgcatcagatgaagccgcatgtgaaaaatatactagtggtttcgatgaactgcaacgaatccattttccgtctgacaagggccactgtgttgaccttcctgacaccggcttgtgcaaagagtctataccacggtggtattataacccgttcagcgagcactgtgcacgctttacctacggtggatgctacggaaataagaacaatttcgaggaggagcagcagtgtctggaatcttgcagaggaatttctaagaaggacgtgttcggtctgcgccgcgagatccccatccctagtacggggtcagtggagatggcagttgccgtatttctggtaatatgcatcgtggtggttgttgcaatactaggctactgcttttttaagaaccaacgaaaagactttcacggccaccatcatcatccaccccccactccggcatcttccactgtttcaactacagaagacaccgagcacctcgtgtacaaccacacaactagacccttatag

SEQ ID NO: 9985 - DNA, 528 bp, synthetic construct
  misc_feature 1..528: note = source = /note="Description of Artificial Sequence: Synthetic coding sequence"
  source 1..528: mol_type = other DNA
atgccccccggcacccgggcctgccgggtgccccggcccggccggagggcgcccaggcccaggcgtgacggggagccaggtggccacggggttgctcccgctagtgccgaggaggtgggggcccgccctgggctccgtgcagttgctcgtctgctgccccagcagcacttgcaggccggctacgtctgcgaacgaaaggatcttctggtcaacggatgctgtaatgtgaatgtgccctctacaaagcagtactgttgcgacgggtgctggcctaatggatgctgctccgcctacgagtattgcgtctcatgctgtttgcagccaaataaacagctcttgcttgagcgatttctgaaccgggccgctgtggccttccagaacctcttcatggcagtggaagatcatttcgagctgtgtctcgccaagtgcagaacttcttctcagtctgtccaacatgaaaatacctatcgggacccaattgccaagtactgttacggggaaagcccacccgaattattcccagcttag

SEQ ID NO: 9986 - DNA, 1881 bp, synthetic construct
  misc_feature 1..1881: note = source = /note="Description of Artificial Sequence: Synthetic coding sequence"
  source 1..1881: mol_type = other DNA
atggacctggtgctgaagcggtgcctgctgcacctggccgtgatcggggctctactcgcagttggggctaccaaagtacccaggaatcaagactggcttggggtatcacgtcagctgcggacaaaagcatggaataggcaactttatcccgaatggacagaggcccagcgcctggattgttggcgaggcgggcaggtgagtctcaaagtcagcaatgatggccctacacttatcggcgccaatgcctcgttttctatcgccttaaatttccccggtagccagaaagtgctgcccgacggccaggtcatttgggttaacaacaccatcatcaacggggatcaggtgtggggaggtcaacctgtgtatccacaggagaccgacgacgcctgtatttttcccgatggtggaccatgtcccagtgggtcttggtcacaaaagcggtcttttgtgtacgtgtggaagacctggggacagtattggcaggtcctgggaggcccagtatcaggccttagtatcgggaccggcagagctatgctcggtactcataccatggaggtgaccgtgtatcataggaggggcagtaggtcatacgttcctttagcgcacagctcctctgcgtttacgataacggaccaagtgcccttttctgtgtcagtgtctcagctacgagccctggacgggggcaacaagcacttccttcgcaatcagccccttacttttgctcttcagctacacgatcctagcggttatctcgcggaggccgatctgtcgtacacatgggattttggtgactcttccggcaccctgatctctcgggcccttgttgttacacatacatatctagaacccggccccgtcactgcccaggtagttttacaggcggccattcccttgacaagctgcgggtcttcacctgtccctggaactacggatggtcatcggccaacggccgaggctccaaatacaaccgccgggcaggtgcctacaacggaggtcgtgggaaccacccccggacaggcccctacggctgaacccagcggtacaacttccgtccaggtacccactacagaagtgatctctacagcgccggtccagatgcctacagctgagagtactgccgcacaggtgactaccacagaatgggtggaaactacagctcgcgaattgcccattcccgagcctgaagggcctgatgcttcatcgatcatgtccaccgaatccatcaccgggtcgcttggccctctgctggacgggacagctacattgaggctggtgaagcgtcaggtgcctttagattgcgtgctgtatcgttatgggtccttttcggtgacactggatattgtccaaggaatcgaaagtgcagagatcttacaggccgtgccctccggcgagggcgacgcatttgaacttaccgtgtcttgtcagggaggtctgcccaaggaggcttgcatggagataagttctcctggttgtcagcctcccgcacaaaggctgtgtcaaccggtgctgccttctcccgcttgtcagctcgttttacatcagatacttaagggcgggagtgggacctactgcttgaacgtcagtctcgcggacactaattctctggctgtcgtctcaacacagctaataatgcctgtgcccggcatcttactgaccggccaggaagccggactgggacaagtccccctgattgtgggaattctccttgtcctgatggcagtggttctggcatccctgatctatcggcggcggctgatgaagcaggatttctcggtcccccagctgccccactcttcctcccattggctgagattaccccgaattttctgctcgtgccccattggcgaaaactcaccactgttatctggtcagcaggtctag

SEQ ID NO: 9987 - DNA, 1611 bp, synthetic construct
  misc_feature 1..1611: note = source = /note="Description of Artificial Sequence: Synthetic coding sequence"
  source 1..1611: mol_type = other DNA
atgcccaccctgtgcagcagcttcggcctgcaggtgctgctgcccgaatatctgagagagcggttcgtagcagccgccctctcatacattacatgctcaagcgaaggcgagctcgtgtgcaaggagaacgactgctggtgcaagtgttcacccacttttcccgagtgcaactgtcctgatgccgacattcaggcaatggaagactctctcctccagatccaggattcctgggcaacacataaccggcagtttgaggagagtgaagaatttcaggcccttctgaaacggttgcctgatgaccgctttctcaacagtactgccatctcacaattttgggcaatggataccagtctgcaacatcgctaccagcaacttggcgcaggcctgaaagtgctttttaaaaaaacccacagaatcctcagaagactctttaacctctgcaagagatgccaccgtcagcctaggtttcgtttgccgaaggaaagctctccaaggtcgctgtcttattggtggaataggatccagtcactcctctattgtggcgaatcaaccttccccgggacgttcctcgaacagagccatagctgtacatgtccctacgatcagtcctcatgccaggggcctatcccctgcgccctcggcgaggggccagcttgcgctcactgcgcaccagataacagcacgaggtgcgggtcctgtaaccctggatacgtgctggctcagggcttatgccgccccgaggttgccgagagtctcgaaaactttctcggtctcgagacagatttgcaggatttggaactcaagtacctgctgcaaaagcaggactcaaggatagaagtccattccatcttcatcagcaatgatatgcgactgggaagctggttcgatccctcctggcggaagcgcatgctgctcacactgaagagtaataaatataagcctgggctcgtgcacgtgatgttagctctgtcgttgcaaatctgcttgactaaaaattccaccctcgaacctgtgatggcaatctatgtgaatcccttcggcggaagccactccgaatcctggttcatgcctgtgaacgaaggctcctttccagactgggagaggacaaatgtggacgctgccgcccagtgtcaaaattggaccataaccctggggaatagatggaaaactttcttcgagaccgtccatgtctacctgcgctcccgtattaagtctcttgatgatagcagtaatgagactatttactatgagccccttgagatgaccgacccctcgaaaaacctggggtacatgaaaataaatactttgcaggtctttggttattccttgccatttgatccagacgcaattcgagacctgatcctgcagttggactacccatacacgcaagggagtcaagacagcgcattgcttcagctgattgaactccgtgatagagttaaccagctcagtcccccggggaaagtccgtctggacctcttctcctgtctcctgcgtcatcgtctgaagctagccaacaacgaagtgggtcgtatccaaagttcgttgcgagcctttaatagtaaattacccaaccccgtggagtatgagacaggaaaattatgcagctag

SEQ ID NO: 9988 - DNA, 423 bp, synthetic construct
  misc_feature 1..423: note = source = /note="Description of Artificial Sequence: Synthetic coding sequence"
  source 1..423: mol_type = other DNA
atgagccagagcatcgaggtgctgaacctgcggacccagcgggacttccaatacgtgctcaaaatggagacccaaatgaagggactcaaggctaaatttagacaaatcgaggatgaccggaagacactgatgaccaaacatttccaggagctcaaagagaaaatggatgaactcctccctctgatccctgtgttggaacagtataagacggatgctaagctaatcacccaattcaaagaggaaatacgaaatttgagcgctgtgctgacagggatccaggaagaaattggtgcttatgactatgaggagctgcaccagcgcgttctgtctctggagacccggcttagagattgcatgaagaaacttatagacttgaagaagagaaaggaggaggaaaaacggcagcagaagggggaagcctag

SEQ ID NO: 9989 - DNA, 1119 bp, synthetic construct
  misc_feature 1..1119: note = source = /note="Description of Artificial Sequence: Synthetic coding sequence"
  source 1..1119: mol_type = other DNA
atggcctacatcgagcagcggcggatcagccacgagggcagccccgtaaaacccgtggccatcagggagttccagaagaccgaagacatgaggcgctacctgcatcagaacagagttcctgccgaaccctctagcctgctgtccttaagcgcctctcacaaccaactatcccataccgatctggaactgcaccagcgacgcgaacagttggtcgagaggaccaggagggaggcccagcttgccgccctgcagtatgaagaggagaagattcgcacaaaacagatccagcgcgacgccgtgctcgatttcgtgaaacagaaagcctcacagagtccacaaaaacagcacccacttctggatggtgtggatggtgaatgcccctttcccagtcggcggagtcagcacacagacgactcagctctatgcatgagcctatccggcctgaaccaagttggatgtgctgccactctgcctcactcctctgccttcacccccctgaaatcggatgatcgtcccaacgcattgttatcctcgcccgccactgagacagtacatcatagccccgcttactcatttccagctgccatccagcggaatcagccacagcgccctgaatccttcctgttccgagcgggcgtgcgtgcagaaacaaataagggccatgcttctcctctgcctccctccgctgcaccaactacagatagcactgatagtatcaccggccagaactctcggcaacgagaggaggagttggaactcatcgaccagttgcggaaacacattgaatacagactcaaggtttcactcccctgcgacctcggcgcggcactgactgatggtgtcgtgttgtgccatctggctaaccacgtacgacctaggtcagttcctagcatccatgtgccatcccccgctgtacctaaactgacaatggccaagtgccggcgcaacgtggaaaacttccttgaggcctgccgaaagattggggttccacaagagcagttgtgcttgccactgcatatcttggaggagaaggggctgtcgcaggtagccgtgaccgtgcaagcattgcttgaactggcaccgcccaagcagcagcaacaccagctctcagccgtgtag

SEQ ID NO: 9990 - DNA, 1242 bp, synthetic construct
  misc_feature 1..1242: note = source = /note="Description of Artificial Sequence: Synthetic coding sequence"
  source 1..1242: mol_type = other DNA
atggagaacatgctgctgtggctgatcttcttcacccccggctggacgctcatagacggaagcgaaatggagtgggatttcatgtggcacctgaggaaggtacccaggatcgtgtccgagcgcacattccacctcactagcccggcgttcgaagcagacgcaaaaatgatggtcaacactgtttgcggaattgagtgccaaaaggagttaccgacgccctccctgtcagaattggaagattatctgagttacgagaccgttttcgagaatggcacaaggactctcacacgcgtgaaggtccaagatctggtgctggaaccaacccagaacattaccactaaaggtgtgtcggtgaggagaaaaaggcaggtatatggaacagattccaggttttcgatccttgacaaacgattcctgaccaactttccattttctacggcagtgaagttgtccactggctgctccgggattctgattagcccacagcacgtgctcactgcagcacactgcgttcacgatggaaaagattatgtaaagggctccaaaaaacttcgcgtaggattgctaaaaatgcgcaacaaatcggggggaaagaagcgccgggggtccaagagaagtcgacgggaagccagcgggggagaccagcgagagggaactcgggagcacctgcgagagagggccaagggggggcggaggaggaaaaaatcaggacggggccagcgcatagccgaggggcgcccgagttttcagtggacccgagtgaagaacacccacatccctaaaggatgggcacgggggggcatgggggacgccaccctggactatgattacgctttgctggagttaaagagagcacataagaaaaagtatatggaactcggaatatcgcctaccataaaaaaaatgccaggaggcatgattcatttctcaggattcgataatgatagagctgaccagcttgtttatcgattttgcagcgtgagcgacgaaagtaacgacctactgtaccagtactgtgatgcagagtctggtagtactggatcgggcgtgtacctgcggctgaaggatcctgataaaaaaaattggaaaaggaagattatcgccgtctattcaggacaccagtgggtggacgtccacggagtgcagaaagattacaatgtggccgttcgaatcacccccctgaaatatgcccagatctgtctgtggattcacggcaacgatgccaactgtgcctatggctag

SEQ ID NO: 9991 - DNA, 2541 bp, synthetic construct
  misc_feature 1..2541: note = source = /note="Description of Artificial Sequence: Synthetic coding sequence"
  source 1..2541: mol_type = other DNA
atgttcaagtgctggagcgtggtgctggtgctgggcttcatcttcttagaatctgaaggccgcccaactaaggaaggaggatacggcttaaagagctaccagccgctgatgaggctccgtcacaaggagaagaaccaggaatccagcagagttaaagggtttatgatacaggacggcccatttggaagctgcgaaaacaagtactgcgggctgggaagacactgcgttacctctcgcgagactgggcaagccgagtgtgcttgcatggatttatgtaagaggcattataagcctgtgtgtggcagcgacggtgagttttatgagaatcactgcgaagtccatcgcgcagcatgcttgaagaagcaaaagatcaccatcgttcataacgaagactgcttcttcaagggagacaaatgtaagaccaccgaatattcaaaaatgaagaatatgcttttggatctgcagaaccagaagtatataatgcaggaaaacgaaaacccgaatggcgacgacatttcaagaaaaaagttgctggtcgatcagatgttcaaatactttgacgcggattctaacggactagtagatatcaatgagctgacccaggtcattaaacaggaagaattgggcaaagacctgtttgattgcacactctacgtgctgttgaagtatgacgactttaatgccgataagcatttggctctggaggaattctacagagccttccaggtgatccaactatctcttcccgaagatcagaaactgtccattaccgctgccacggttggccaatcggctgtgttgtcctgcgcaatccagggaacattacgtcccccaatcatttggaaacgtaacaatatcattctcaataatctggatctcgaggacattaacgatttcggcgacgatggcagcctctacattaccaaggtcaccactacccatgtagggaattacacttgttacgccgatggatacgagcaggtgtaccagacacatattttccaggtgaacgtgccccccgtgattagggtgtaccccgaaagtcaggctagagagccaggggtgaccgcctcattacgttgtcacgcagaggggatcccgaagccacaattgggctggctgaaaaacggcatcgatatcaccccaaagttaagtaagcagttgacgctgcaggccaacggttctgaggtgcacatatctaacgtccgctatgaggatactggagcatatacctgcatagctaagaatgaggccggcgtggatgaagacatctcatcactttttgtggaggactcggccaggaagacactggcaaatattctgtggagagaggagggtctggggatcgggaatatgttttatgtgttttatgaagatgggattaaagtcatccagcctatcgaatgtgaattccagcggcatattaaaccctctgaaaaactgttaggttttcaggatgaggtctgtcctaaggctgaaggtgacgaggtccagcgatgtgtgtgggcatctgccgtcaacgtgaaagacaagttcatatatgtcgcacagccaacattggatcgcgtgctgatcgtggatgtgcagagtcaaaaggtcgttcaggcagtgagcaccgatcccgtgccagttaaacttcattacgataagtcccacgaccaagtgtgggtattgtcttggggcaccctagagaagacctctcctactctccaggttataaccttggccagcggcaatgttccccaccataccattcacacccagcccgtaggcaaacaatttgacagggttgacgacttcttcatcccaacaacgactctgataattacccatatgaggttcggcttcattctgcacaaagatgaggctgcacttcagaagatcgacttggagacaatgtcctacattaagacaattaatctgaaagactacaaatgcgttccacaaagcctggcttatactcacttaggaggatattacttcatcggctgtaaaccagactctaccggcgccgtgtccccacaggtaatggtggatggcgtgaccgatagtgttatcgggttcaactcggatgtgaccgggaccccgtatgtttcccctgacggccactacctggtgagcattaacgatgtgaaggggctggtgagagtacagtatataacaatacgaggagaaattcaggaagccttcgatatctataccaacctgcacatcagcgacttggcatttcagcctagctttaccgaggcacaccagtacaatatatatggatcatcctccacacagactgatgtgctatttgtcgagctgtcatctggcaaggtgaagatgatcaagagtttgaaagagccactgaaggccgaggagtggccatggaataggaaaaaccggcagatccaggactctggcctgttcggacaatacttaatgacaccctctaaagattcactgtttatcctagatgggagactcaataaactgaattgcgaaattaccgaggtggaaaagggtaacaccgttatctgggtcggggacgcctag

SEQ ID NO: 9992 - DNA, 582 bp, synthetic construct
  misc_feature 1..582: note = source = /note="Description of Artificial Sequence: Synthetic coding sequence"
  source 1..582: mol_type = other DNA
atgctgggcgtgctggagctgctgctgctgggcgccgcctggctggccggtcctgcaaggggccaaaacgagacagaacccattgtcctcgaggggaagtgcctggtcgtttgcgactcgaatccaacgtccgatccaaccggaacagcccttggaatcagcgttcgatctggatccgcaaaggttgctttctccgccattaggagtactaatcatgaaccaagcgagatgagtaatagaacaatgattatttacttcgaccaggtccttgtgaacatcgggaataattttgactctgaacgttcaaccttcatcgcgccaaggaaggggatctacagcttcaactttcacgtggtgaaggtctacaatcgccagacgatacaggtaagtctgatgctgaacgggtggccggttatcagcgccttcgctggtgatcaagacgtcacccgggaagccgcttccaatggcgtactgatccaaatggaaaaaggcgaccgcgcttatctcaaactggaacgggggaatttgatgggcgggtggaaatacagtacttttagcggttttctagtattcccactgtag

SEQ ID NO: 9993 - DNA, 813 bp, synthetic construct
  misc_feature 1..813: note = source = /note="Description of Artificial Sequence: Synthetic coding sequence"
  source 1..813: mol_type = other DNA
atgcacggcagctgcagcttcctgatgctgctgctgcccctgctgttgttgttagtcgcaaccactgggccagttggcgcactgacagacgaagaaaagcggctgatggtggaattacacaatctgtatagggcccaggtgtccccaaccgcgtccgatatgctccatatgaggtgggacgaggagctcgctgcatttgctaaggcttacgcccgccagtgtgtctggggacataataaggagcggggccggcgaggcgagaacttattcgctatcactgacgaggggatggatgtgcctctcgcgatggaggaatggcatcatgagcgagagcactataacctttctgcagctacatgcagtcctggacagatgtgtgggcattatactcaagtcgtgtgggctaagactgaaagaataggatgcggctctcacttttgcgagaagttacaaggggtggaagagactaatattgagctcctggtgtgcaattatgaacctccgggcaatgtgaagggaaaaaggccttaccaggaaggcaccccatgcagccagtgtccaagcggatatcattgcaaaaattccctctgtgaacccatcggaagccctgaggacgcccaggacctgccgtacctagtgacagaagcacccagtttccgtgctaccgaagcatcagattctcgcaagatgggagctgaaggaccggataaaccctccgtcgtaagtggactcaactcaggccctgggcatgtatggggccctctgctggggctcttactgctaccgccgttggtcctggccggcatcttttag

SEQ ID NO: 9994 - DNA, 702 bp, synthetic construct
  misc_feature 1..702: note = source = /note="Description of Artificial Sequence: Synthetic coding sequence"
  source 1..702: mol_type = other DNA
atggaccaggtgttcatgatcgacagcaagtgcgagagcggcaagggccgttgcagcttcaaccccaatgttaacaccgtgagcgtgatgattaacgaggaactgtttagcggaatgtacattgacttcatgggaaccgatgccgcaatatttaggtccctgactaaaagaaatgctgtgcggacggaccagcacaattctaaatggctgagtgaacccatgtttgtcgacgcccacgttataccggatggaaccgatcccaacgacgctaaagtgtactttttcttcaaggaaaagcttactgataacaaccggtctacaaaacagatacactctatgatcgcacgtatttgcccaaatgataccggcggcctgagaagtctggtcaataagtggacaaccttcctgaaggcacgcctggtgtgctccgtcacagatgaagacgggcctgaaactcactttgatgaactagaagatgtctttttgttagaaacagacaatccgcggactaccctggtatacggaatcttcaccactagttcctcagtcttcaagggcagtgctgtgtgcgtgtaccatctgtctgatattcagacagtgtttaatggacctttcgctcacaaggaaggacccaaccaccagttgataagctatcagggacggattccctacccacgccccggaacgaatacttgtgtatag

SEQ ID NO: 9995 - DNA, 1368 bp, synthetic construct
  misc_feature 1..1368: note = source = /note="Description of Artificial Sequence: Synthetic coding sequence"
  source 1..1368: mol_type = other DNA
atgctgcaccccgagaccagccccggccggggccacctgctggccgtgcttttggctctcttgggcacagcgtgggctgaggtttggcccccccagctgcaggagcaggccccgatggctggggcactcaatcgcaaggaatcctttctgttgctctctcttcacaatagattgcgctcctgggtacagcctcccgcggctgacatgagaaggctggactggagcgactctctggcacaactcgcccaagctagggctgcattatgtggcatacctaccccttctctggcgtccggtttatggaggacattgcaggtgggctggaatatgcagttgctgccagccggcctggctagcttcgtcgaggttgtctccttatggttcgccgaggggcagcggtactcacatgctgccggggaatgtgccagaaacgccacatgcacccactacacccaattagtgtgggcaactagcagccagctgggatgtgggaggcatctttgctcagcaggccaggcggcaattgaggcattcgtgtgcgcctattcccctcggggtaattgggaggtcaatgggaagactattgtaccgtataaaaagggcgcctggtgctctttgtgtacggcttctgtgtctggatgcttcaaagcctgggatcacgccggaggcctatgtgaagtccctcggaatccctgtaggatgtcttgccagaaccacggacgcttgaacattagcacatgtcattgtcactgtccgcctgggtatacgggtcggtattgccaggtcagatgcagccttcaatgcgtgcacggcaggtttagggaggaggagtgctcctgtgtgtgcgacattggttacggaggagcccagtgtgcaacaaaagtgcattttcccttccacacgtgtgatctgcgcattgacggggactgtttcatggtgtcttcggaagctgatacatattacagggccaggatgaaatgccagcgtaaaggcggtgtgctcgcacagataaagtcgcagaaagttcaagacattctcgccttctaccttggccgactggaaactaccaacgaggtcatcgactctgatttcgaaacaaggaatttctggatcgggctgacttacaaaaccgctaaagacagctttcggtgggcaacgggagaacatcaggccttcacaagttttgccttcggccagccagataaccatggactcgtttggctttccgccgccatggggttcggaaactgtgtggaactccaggcatcagcggcctttaactggaacaatcagcgctgtaaaactaggaatcgatatatctgccagttcgctcaggaacacatctcgcggtggggacctgggtcttag

SEQ ID NO: 9996 - DNA, 462 bp, synthetic construct
  misc_feature 1..462: note = source = /note="Description of Artificial Sequence: Synthetic coding sequence"
  source 1..462: mol_type = other DNA
atggcccggttctgggtgtgcgtggccggcgccggcttcttcctggccttcttagttctgcacagtaggttttgcggctcaccagtcctgagaaactttacctttgcggtgagttggcgcactgaaaaaattttgtataggctggacgtgggctggcctaagcacccagagtactttactggcactacattttgcgttgctgtggactccctgaatggcctcgtatacattggccagaggggtgataatatacctaaaatactggtcttcactgaggacggatatttcctaagagcatggaattacacagtggacacgccccatggtatttttgccgcctccactctgtacgagcagagtgtttggatcaccgacgttggaagtgattttatgatcctctggcttcatggtgagaacgggacaggacctgcaaagtttaacatcccccattctgtgacttag

SEQ ID NO: 9997 - DNA, 375 bp, synthetic construct
  misc_feature 1..375: note = source = /note="Description of Artificial Sequence: Synthetic coding sequence"
  source 1..375: mol_type = other DNA
atgtggcggtgccccctgggcctgctgctgctgctgcccctggccggccacctcgcactgggcgcccagcagggtagggggcgccgggagctggctcctggactgcacctccgcggcatccgggatgccggcgggcgttactgccaggaacaggacctgtgctgtagggggcgggccgatgactgcgctctgccttatcttggagccatctgctattgcgatctgttctgcaacaggacagtgtccgactgctgccctgacttttgggatttctgtttaggggttcctcccccattcccacctatccaggccccggctaggcgaactggatcgggttccgtcaccaaaaatcatgcgtggtggattcaaacatag

SEQ ID NO: 9998 - DNA, 777 bp, synthetic construct
  misc_feature 1..777: note = source = /note="Description of Artificial Sequence: Synthetic coding sequence"
  source 1..777: mol_type = other DNA
atgaagaccctgtacctggccgacaccttccccaccaacttccgggacagcgctggagccatgaagcagataaacgattacgtggccaagcagaccaagggcaagattgttgatctgttaaagaacctggatagcaacgccgtagtgataatggtgaattatatatttttcaaggctaaatgggagacttctttcaaccataagggcacccaggagcaggacttctacgtcacatctgaaactgttgttagagtccccatgatgagcagggaggatcaataccactacctgctggacagaaacctctcctgtagggtggtgggtgtcccttaccagggtaatgcaactgcgctcttcatcctacccagcgagggcaagatgcaacaggtggagaatggcctctccgagaaaactttgaggaagtggttaaaaatgtttaaaaagagacagcttgagctgtatctacctaagttttcaatagaaggctcttatcagcttgaaaaagtgctgccaagcctgggaatttcaaacgtgttcacatcccatgctgacttgagtggcatttccaatcattccaacatccaggtgtccgaaatggtgcacaaggccgtagtggaggtggacgaatccggaacccgggcagcggcagctaccgggaccatttttacctttaggtctgccagactgaactcccaacggctggtatttaataggccattcctgatgttcattgtcgataataatatactatttctggggaaggtgaatcgcccctag

SEQ ID NO: 9999 - DNA, 1731 bp, synthetic construct
  misc_feature 1..1731: note = source = /note="Description of Artificial Sequence: Synthetic coding sequence"
  source 1..1731: mol_type = other DNA
atgatcgtgttcggctgggccgtgttcctggccagccggagcctgggacaggggctgctcttgaccctggaggagcacattgcacatttcctcggtaccggaggggccgccaccactatgggtaatagttgcatttgtcgtgacgactcaggcaccgatgatagcgtcgacacccaacaacagcaagcagagaattcagcagtcccaacagcagacacccgcagccagcctcgagatccagtccgccccccccgacgggggaggggaccccatgagccacggcggaaaaaacagaacgtcgacgggcttgtcctcgacacgctggcagttattcgcaccctcgtcgacaatgaccaagagccaccctacagtatgataaccctgcatgagatggctgagacagacgagggttggctcgatgtagtgcaatcacttatccgagttattccactcgaggaccctctgggacctgcggtcataacactactgctagatgagtgccccttgccaacaaaagacgcattacagaagctgaccgaaatcctcaacctcaacggtgaggtggcctgccaggatagcagccatcccgctaagcacagaaacacctccgcagtactggggtgcctggctgaaaagttggctgggcctgcttcgatcggactgttgagcccaggaatactggagtacctgctgcagtgtcttaagctgcagtcccaccctacagtgatgctgttcgcattaatagctctggagaagttcgcacagaccagcgagaataagctgactatctccgaatccagcatcagcgatcgacttgtcactttagagtcgtgggccaatgacccagattatctgaagaggcaagtgggattttgcgcccagtggagcctggataatctgttcctcaaggaagggcgtcagttgacttatgagaaggtcaacctttcctcgatccgcgcgatgctgaacagcaatgacgtgagcgagtacctgaaaatctccccacatggcttggaggcacgttgtgacgccagcagcttcgaatccgtacgctgtaccttctgcgtggatgccggcgtgtggtattatgaagtcacagtggtcacctccggagtgatgcagattggctgggccactagagattccaagtttctaaaccacgagggctacgggataggtgatgacgagtactcgtgcgcctatgacgggtgtcgccagctaatatggtataatgccagaagtaaacctcacattcatccttgttggaaggagggcgatacagtcgggttcctgctggacctgaatgagaaacaaatgatattctttttgaacggtaaccagctgcccccagagaagcaggtattctctagcaccgtttctggattcttcgctgctgcttcttttatgtcctatcagcagtgtgagttcaactttggcgcgaagcccttcaagtatcctcccagcatgaagttctccacctttaatgactatgcattccttactgctgaagaaaagatcatcctccctcgacaccggaggctggcactcctgaagcaggtgagcattagggaaaactgctgtagtctctgttgcgacgaggttgcagatacccagctaaagccatgtggacacagcgacctgtgcatggactgcgccctgcaacttgagacatgtccattgtgtaggaaagagattgttagccgaatccggcagatttctcacattagctag

SEQ ID NO: 10000 - DNA, 1359 bp, synthetic construct
  misc_feature 1..1359: note = source = /note="Description of Artificial Sequence: Synthetic coding sequence"
  source 1..1359: mol_type = other DNA
atggccgacatgcaccggggctacgccgacagccccagcaaggccggagcagcaccctacgtccaggcattcgactctctgttagcaggaccagtggcggaatatctcaagattagtaaagagattggcggtgatgttcagaaacacgctgagatggtacataccggattaaagttggaaagggccctgctagtcaccgcctcgcaatgccaacaacccgctgaaaataaactttctgatcttctggcccctatctctgaacagataaaggaggtgataactttccgtgagaaaaaccggggttcaaagttgttcaaccatctaagtgcggtttcagagtccatccaggccctcggttgggtggccatggctcccaagccaggtccctatgtgaaggagatgaacgatgcggccatgttctatacaaatagggtgctgaaagagtacaaggatgtcgataagaaacacgtggactgggtgaaggcatatctatccatctggaccgagctgcaggcctacatcaaagaatttcatacaacgggcctcgcttggagcaaaacaggaccggttgccaaggaactatctggcctgccttcaggcccctctgcgggctcatgcccccctccaccacctccttgtccgcccccgccgcctgtgtccaccatcagctgttcttatgaatcagctagtaggtcttcacttttcgctcagattaaccagggagaaagcatcacgcacgccttaaaacatgtgagcgatgacatgaagacacacaaaaaccccgcactgaaggcacagtctggaccggtacgatccgggcctaagcctttctccgcaccgaagcctcagacgagcccatccccaaagcgcgcgacaaagaaggagcccgctgtgttggaacttgaaggaaagaaatggagagtggagaaccaggagaacgtgagtaacctggttatcgaggataccgagctgaagcaagtggcttatatttacaaatgtgtgaacacaacactgcagatcaaaggtaaaataaactctatcactgtcgacaattgcaagaaattaggcctagtttttgacgatgtggtgggaatcgtggagattatcaatagtaaggacgtgaaagtgcaggtcatgggtaaggtacccaccatcagcattaataagacagacggatgccatgcttatctctctaagaatagtctcgattgcgagatcgtctccgcaaagtcctccgagatgaacgtgttgattcctacagagggaggcgattttaatgaattccccgtacccgaacagttcaaaaccctttggaatggtcaaaaacttgtgacaacggtgactgagatagcggggtag

SEQ ID NO: 10001 - DNA, 1533 bp, synthetic construct
  misc_feature 1..1533: note = source = /note="Description of Artificial Sequence: Synthetic coding sequence"
  source 1..1533: mol_type = other DNA
atgggccggcccacccagtggcccagcctgctgctgctgctgctgctcccgggccctccccctgtcgccgggttggaagatgccgctttcccacatcttggtgaaagtttgcaacccttgcctcgtgcttgtccactgcggtgttcgtgcccacgggtcgacacggtagactgcgacggcctagacttacgcgtgttcccagacaatattactcgggctgcccagcacctgagtctgcaaaataatcagctgcaagagttgccgtataacgaattaagtagactctccggactgcgaactctgaatcttcacaacaacctgatcagttcagagggacttcccgatgaggcgttcgagtctctcacccaattgcagcacttatgcgttgctcacaacaagctgtcagttgctccccagtttctgccccgcagcctgagggttgccgacctagcggctaaccaggtgatggaaatctttcccctcacctttggtgagaaacctgccctgcggtccgtttacctgcacaacaatcagctctccaatgcaggcttaccgccagatgccttccgcggttcagaggcgattgcgactctcagcctgagcaataaccagctctcctatctcccgccctctctccctccttccctggaaaggttgcatctccaaaataatttaatttccaaagttcctagaggtgcactgtcccgacagacccagctgagggagttgtatctgcaacataatcagctgactgactcaggcctggacgcaaccacattcagcaagctccactcgcttgaatacctggacctctcccataatcagctgaccactgtccccgcagggttgccaaggacactagccattctacacctgggccggaatcgtattagacaggttgaggcagcccgattgcacggggctagagggctgcgttatctgctgctccagcacaatcagttggggagcagcggcctgcccgccggggccttacggcccctgcgggggctacatactcttcatctgtacgggaacggcctcgaccgcgttccacccgccttgccacgaagactccgagccttggttttaccgcacaaccatgtggctgccctcggggcccgcgatctggtggctacgccaggcctgacagaactgaacctcgcatacaatcgtcttgcaagcgcccgcgttcaccacagagcttttaggaggcttagggccttgaggtctcttgacttggccggcaaccaactgacgcgactcccaatgggactgccaacaggtcttaggacgttgcagctgcagagaaatcagttgagaatgttggaaccagagcctctggccggcctcgatcaactccgggagctcagtttggctcataatcgtctgagagttggagacatcggccctggcacatggcatgagttgcaggctctccaagtcagacacagattggtgtctcatacagtgcccagggcccccccatctccctgtctgccatgccatgtgccaaacattctggtttcatggtag

SEQ ID NO: 10002 - DNA, 114 bp, synthetic construct
  misc_feature 1..114: note = source = /note="Description of Artificial Sequence: Synthetic coding sequence"
  source 1..114: mol_type = other DNA
atgaacagcaccctgaacttcttcatccagagctacaacaacgccagcaatgatacttatttgtaccgtgtacagaggcttatacgcagccaaatgcagcaggttcactgttag

SEQ ID NO: 10003 - DNA, 1266 bp, synthetic construct
  misc_feature 1..1266: note = source = /note="Description of Artificial Sequence: Synthetic coding sequence"
  source 1..1266: mol_type = other DNA
atgggccggcccacccagtggcccagcctgctgctgctgctgctgctcccaggcccccctcccgtcgctggcctcgaagacgctgcctttccccatctcggcgagagtctacagccgctgcccagagcatgtccacttcggtgcagttgtccgagagtggataccgtggactgcgatgggctcgacctcagagtcttccccgataatattaccagagccgcacagcacctgagtcttcagaacaatcagctccaggagctcccatataatgagctgtcccgattatccggcttgcgcaccctgaacctacataacaacctcatcagctcagaaggcctgcccgatgaagcttttgaatccttgacccagttacaacatctgtgcgtggcccacaataaaaataatctgatcagcaaagtgcctcggggggccttatctagacagactcaactgagggagttgtacctgcagcataaccaactcactgacagtgggctggacgccaccacctttagtaagctccattccctggaatacttggatctgagccacaatcagcttaccacggtccccgcagggctgcccaggacgctggctatattacacctgggccggaatcgaatacgacaggtggaggcggccagacttcacggagctcgtggtttgcgctacctgctgctgcaacataaccagttagggagtagcggcctgccagccggggccctgaggccgctacgcgggctccacaccttgcacctatacggaaacggactagaccgtgtgcctcccgctttacctcgtcggctgcgcgccttagtgttgccacacaatcatgtggccgcgctcggcgcccgcgatttagtggccacacccgggctcacagaactcaacctggcttacaaccgcctggcatctgctcgggtgcaccatcgagcttttaggagactgagggcgctaagaagcttagatttagctggcaaccagttgaccagactgcctatggggttgcctacaggactgcgcactctccagctgcaacgtaatcagctgcgtatgctcgagcccgagcctctcgcaggcttggatcagttacgcgagctgagtctcgcccacaatcgcctgcgggtgggcgacatcggacccggtacatggcacgaactgcaggcactgcaggtcagacatcgtctggttagccacacagtccctcgggcaccaccttccccctgcctgccttgtcatgtacctaacatcctggtgagctggtag

SEQ ID NO: 10004 - DNA, 993 bp, synthetic construct
  misc_feature 1..993: note = source = /note="Description of Artificial Sequence: Synthetic coding sequence"
  source 1..993: mol_type = other DNA
atgagcagctggagccggcagcggcccaagagccccggcggcatccagccccacgtgtctcgcaccttgtttctgttgttgttactggctgcatctgcttggggcgtgacactctcccccaaggattgccaagtcttcagatcagatcacggaagttccatctcatgccagccccctgctgaaattcccggttacctgccagctgacaccgtgcatctggctgtggaattcttcaatctcacacacctccccgcaaacctgttacaaggcgctagcaagctgcaggaattgcatctgagctctaacggcctggagtctctctcacctgaatttctgcgccctgtaccccagctcagagtccttgatcttacgcgcaatgccttggtcctgaaagagaatcagttggaggttctggaggtgagctggctccacggactgaaggccctgggacacctggatctgtcaggaaatcgcttacggaagttaccccccggcctgttggcaaacttcactctcttgcgcaccctggatctcggtgagaaccaattggaaactctccccccagacttgctgcgcggacctttacaactcgagcgcctgcacttagaggggaataagctccaggtcctcggaaaagacctgttactccctcagcccgaccttcggtacctgtttctgaatgggaataagctcgcccgagtggccgctggggctttccagggcctccgacagctcgatatgctggaccttagcaacaatagcttagcgtcagttccggagggcctgtgggctagcttgggacagcccaattgggacatgcgcgatggatttgacatttctggcaacccctggatctgcgaccaaaacctctctgacttatacagatggttacaggcacagaaggataagatgtttagtcagaatgatacccggtgtgctggtccggaggccgtcaaggggcagaccctcctcgcagtggctaagagccaatag

SEQ ID NO: 10005 - DNA, 1815 bp, synthetic construct
  misc_feature 1..1815: note = source = /note="Description of Artificial Sequence: Synthetic coding sequence"
  source 1..1815: mol_type = other DNA
atgatgcgggccgtgtgggaggccctggccgccctggccgccgtggcttgcttagtgggtgctgttcgcggcggccctggcctgagcatgtttgccggccaggccgcccagcccgatccgtgctcagacgaaaatgggcaccctcgacggtgcatcccagactttgtcaatgccgctttcggtaaggacgtgagagtctcatcaacgtgtggcaggccacccgcgcggtactgtgttgtcagcgagcgaggtgaggagcgactgcgatcttgtcatctgtgtaacgccagtgaccctaagaaagcccatcccccagcgtttctgacggatttgaataacccccacaaccttacctgttggcagagcgaaaattatttacagttccctcataatgtcacactaacactgtccctcgggaaaaagtttgaagtgacttatgtgtctctgcaattctgctcacccaggcctgagtccatggccatctataaaagcatggactacggccgaacttgggtgccttttcagttctattctactcagtgccgcaaaatgtacaacaggccgcaccgagcccccattaccaagcaaaatgagcaagaagccgtgtgtaccgacagccacaccgacatgaggcccctgagtggtgggctcattgccttctccaccctggacggccggccgtcggcccatgatttcgataattctccagtgttgcaggactgggtgactgccacagacatccgagtggcctttagtaggttacatacatttggcgatgaaaacgaggatgacagtgagctggccagggacagctatttctatgccgtatctgacctgcaagtcggagggcgctgtaagtgcaatggccatgctgctcgctgtgtgagggatcgcgacgatagcctggtctgtgactgccgtcacaatactgcgggaccagaatgtgaccgctgcaagccatttcattacgaccgcccttggcaacgggccaccgcaagagaagcaaacgagtgtgtcgcatgcaattgcaacctgcatgccaggcggtgccggtttaatatggagctctataagctgtctggaaggaagagtggtggcgtctgcctcaactgcaggcataacactgcaggacgccactgccactattgtaaggagggctactatcgggatatgggtaagcccattacccacaggaaggcttgtaaggcatgcgactgtcaccccgtgggtgctgctggcaagacctgtaatcaaactacaggtcaatgcccttgtaaagatggggtgacaggcattacatgcaatcggtgcgcgaagggctatcagcagtccagatcacccattgcgccctgtataaaaatcccagttgccccacctacaaccgctgcatcgagtgtggaggaacccgaggattgtgattcctattgcaaggctagcaaaggcaaattaaaaattaacatgaaaaagtattgcaaaaaggactatgccgtgcagatacatatcctaaaagccgataaagccggagactggtggaaattcacagttaatattatttccgtttacaaacagggaacctcccggattcgccgtggagaccagtccttatggatccgcagccgtgacatcgcgtgcaaatgccccaagattaagcccctgaagaagtacctcctcttgggtaatgccgaagattctcccgatcagtcaggcatcgttgccgacaagtcttccctcgtgattcagtggagagacacctgggctcgcaggttacggaaattccaacagcgcgagaagaaaggcaaatgtaaaaaagcctag

SEQ ID NO: 10006 - DNA, 948 bp, synthetic construct
  misc_feature 1..948: note = source = /note="Description of Artificial Sequence: Synthetic coding sequence"
  source 1..948: mol_type = other DNA
atgggccaggaccgggaggagaccaacatcgagctgctggtgtgcaattacgagcctccagggaatgtgaagggcaaacggccctaccaggaagggactccatgtagccagtgtccttctggctaccattgtaaaaattcgctctgcgaacctattggcagtcccgaggatgcgcaagacctgccatacctggtcacggaagccccaagcttcagggccactgaggcctccgattccagaaagatggggacacccagctctctcgcaacggggattccagcctttctagtgacggaagtctccggatcgttagcaacaaaggcccttcccgcagtagagacacaggccccaacctctttagccacaaaggacccgccttcgatggccacagaagctcccccttgcgtcaccacagaggtgccgtctatacttgctgcacactctctcccaagcctggacgaggaaccagtgacattcccaaaaagcactcatgtgcccattcctaagtcggcagataaggtaaccgacaaaactaaggttccttcgaggagtccagaaaattctttggatccaaagatgagcctcaccggtgcacgagagctgcttccccacgcacaggaagaagctgaggctgaggcagaactgccaccgtccagcgaggtgctggcgagcgttttccctgcacaggacaagccaggagaactgcaggctacactggatcatactggccacacttccagcaagtctttgccaaactttcctaacacttctgccaccgccaacgccaccggaggacgcgcgcttgccttacagagcagtcttcctggagccgagggccccgacaaaccaagcgtcgtgtcagggttgaattccgggcctggacacgtttggggacccctgctgggattgcttcttctccccccacttgtgttggccggcatcttttag

SEQ ID NO: 10007 - DNA, 207 bp, synthetic construct
  misc_feature 1..207: note = source = /note="Description of Artificial Sequence: Synthetic coding sequence"
  source 1..207: mol_type = other DNA
atgcaggtgagcaccgccgccctggccgtgctgctgtgcaccatggccctttgtaaccaggtgctgagtgcgccgcttgctgctgatacacccaccgcctgctgtttcagctataccagtagacagattcctcagaacttcattgcagattacttcgagacttcttcccagtgctccaaaccttccgtgatggcagcccctgggtag

SEQ ID NO: 10008 - DNA, 3369 bp, synthetic construct
  misc_feature 1..3369: note = source = /note="Description of Artificial Sequence: Synthetic coding sequence"
  source 1..3369: mol_type = other DNA
atgagcctgcaggagatgttccggttccccatgggcctgctgctgggtagtgtgctcttagtggctagtgcgccagccacactcgagcctccgggatgtagtaataaggagcagcaagtgacagtgagccacacgtacaaaatagatgtccctaagtcagctctggttcaagtggacgccgatcctcaacctctcagcgacgatggtgcatctctgctggccctgggcgaggcgagagaggagcagaacatcatttttagacacaacattcggctgcagacacctcagaaggactgcgagcttgctggctcagtccaggacctgctagcgagagtgaagaagctggaagaggaaatggttgaaatgaaagaacagtgtagtgctcagcggtgctgccagggtgtaacggacttatccaggcactgttctggacacggcacatttagtctggaaacctgttcctgccattgcgaggaggggcgagaaggcccagcctgcgaacggctcgcctgcccaggagcttgctcgggtcacggcaggtgtgtcgacgggcgctgcctctgccacgagccatacgtgggagcggattgcgggtaccccgcatgcccggaaaactgctcaggccacggagagtgtgtgcgtggcgtgtgtcagtgtcacgaggactttatgtccgaagactgttcagaaaagaggtgtcctggggactgttctggtcacggtttttgcgacaccggcgagtgttactgcgaggaggggtttactggtctggattgtgctcaggtggtcacaccccagggcttgcaactgctcaagaataccgaggatagtttgctcgtctcgtgggagccctcgtcccaggtggaccactacctcctgtcatactatccgcttggcaaagagctctctggcaagcaaatccaagtgcctaaagagcaacacagctatgagattctgggtttactgcctgggacaaaatatattgtgacactccggaatgtaaagaacgaggtgtctagttcaccgcagcaccttctagctaccaccgacttggccgtgctgggcacagcgtgggtcactgacgaaacggagaactctctggacgtggagtgggagaatccgtcaaccgaggtggactactataagctcaggtatgggccaatgaccggccaggaggttgcggaagtgacggtcccaaaaagttcggaccccaagtctagatacgatattacgggtttgcaccctggaaccgagtacaaaatcacggttgtgcccatgaggggagaactggaaggtaaacctatcctgctgaacgggcggacagaaattgactccccaacaaatgttgtgacagaccgggtgaccgaagataccgcaaccgtgtcctgggatcctgtccaggctgtgatagacaaatacgtcgttagatacacttccgcggatggagacactaaggaaatggcagttcacaaggacgaaagctctaccgtgctgacaggcctcaagcccggtgaggcctataaagtctacgtttgggctgagagggggaatcagggtagcaagaaggcagacacaaacgcactgaccgagatcgactcaccagcaaatctggtgaccgatcgagtcacggagaacacggccacgataagctgggacccagtgcaggctaccattgaccggtacgtggtccggtatacctcagccaaagacggtgagacccgcgaggtgcccgttggaaaagagcagtcaagcacagtgttgacagggttgaggcccggtgtagaatatactgtgcacgtgtgggctcaaaagggggcacaggagtctaagaaggccgacacgaaagcccagacagacatagactctccccagaacctggtgacagattgggtaacagaaaatacagctaccgtgtcatgggatcctgtccaggctaccatcgaccgctatgtggtacattatactagcgcgaacggagaaactcgagaggtgcccgtcggcaaggaacaatcaagcacagtgctgactggcctgagacccgggatggagtacacagtacatgtctgggcgcagaaaggaaatcaggagagcaagaaagccgatactaaagctcaaacagagattgatgggccaaagaacctcgtgaccgactgggtcaccgagaatatggccaccgtctcgtgggatcctgtccaagcaactatcgataagtatatggtgagatacacatcagccgatggagagactcgagaggtgcctgtcggcaaggagcatagctcaacagtgctgaccgggctgaggcctggaatggaatatatggtgcacgtttgggctcagaaaggagcgcaggaatcaaaaaaggctgataccaaagctcagactgaactggatccaccccgcaatcttcggccgtctgccgtcacacagtccggaggaatactcacctggacacccccatccgcacagattcacggctacatattgacttaccagtttcctgatgggacggtgaaagaaatgcagctaggacgggaagatcagagatttgctctgcagggcctggaacagggtgccacctatcccgtgtcactggtcgccttcaaaggggggcgccgcagtaggaacgtgagtactacactatccacagttggggctcgatttccacacccatctgactgctcacaggtgcaacagaacagcaatgccgcttcaggcctgtatactatttatctccacggagacgcttctagaccactccaggtatattgcgatatggagacggacggcggtggttggatcgtgttccagcgtagaaataccggacagcttgattttttcaaaaggtggcgatcctacgtcgagggatttggtgatcctatgaaagaattctggttgggactggacaagctgcacaacttgactaccggaactccagcgagatacgaagtgcgggtggatcttcagaccgcgaatgagtcagcctatgcgatctatgacttttttcaggttgcatcgagtaaagaaagatacaagctgactgtgggcaaatacagggggacggcaggggatgcactcacctaccacaacggatggaagtttaccacttttgacagggacaacgatatcgctctaagcaactgcgcccttacacaccacggtggctggtggtataagaattgccatctggccaatccaaacggaagatatggtgagacaaaacacagcgagggagtgaactgggagccatggaagggccacgaattctcaatcccctacgtggagctgaagattaggccccacggatacagcagagagcccgtcttaggacgcaaaaaaaggaccctcaggggccggctcagaacgttctag

SEQ ID NO: 10009 - DNA, 897 bp, synthetic construct
  misc_feature 1..897: note = source = /note="Description of Artificial Sequence: Synthetic coding sequence"
  source 1..897: mol_type = other DNA
atgctgcaccccgagaccagccccggccggggccacctgctggccgtcttgctcgcgctcctaggcactgcctgggccgaggtctggcccccccaattacaggagcaggcacccatggccggtgctctgaatcgaaaggagagctttctgctgttgagcttacataatcgccttcggtcttgggtgcaaccccccgcggccgatatgaggaggctggactggtccgattcactgaattggctgaagccaggccccctctggaacccaaaccccgagcctggtgtgagacctgtcgcacaccctgcctcaggcttggagcatgcagcctgccctcgggcatggcgccctcttctcaagtggtccttatggtttgctgaaggccagaggtattcccatgcagccggagaatgcgcaaggaacgctacatgcacccattacactcagctggtgtgggccaccagcagccagctgggttgcggaaggcacctgtgctccgcaggtcaggcggcaatcgaggccttcgtttgtgcttactcccccagaggaaactgggaggtgaacggtaagacaatcgtgccctacaaaaagggcgcatggtgttccctatgtaccgcctcggtatccggttgttttaaggcctgggatcacgccggagggctgtgcgaagttcctcgcaatccttgtaggatgtcctgtcaaaaccacgggcgtcttaatatatccacttgtcattgccactgtccaccgggctacaccggaagatactgccaggtgcgctgcagtctgcagtgtgtgcacggcagattcagagaggaggagtgcagttgcgtgtgcgatatcggctacgaaccctctgtgcctcctcggtgcatctttccctctacacccgttacctag

SEQ ID NO: 10010 - DNA, 1728 bp, synthetic construct
  misc_feature 1..1728: note = source = /note="Description of Artificial Sequence: Synthetic coding sequence"
  source 1..1728: mol_type = other DNA
atggacctggtgctgaagcggtgcctgctgcacctggccgtgatcggtgcgcttctggctgtcggggcaacgaaaggctctcaggtgtggggcgggcagcccgtgtaccctcaggaaactgatgacgcttgcatcttccctgacggaggcccatgcccatcaggctcctggtctcagaaacgatcttttgtgtatgtttggaagacttggggccagtattggcaggtactaggcggccctgtcagcggtctgagtataggcaccggccgagccatgctaggcacacatactatggaagtaactgtgtaccacagaaggggaagtagatcctatgtgcctctggcacatagtagcagtgcctttacgattacagatcaggtgcctttctccgtaagcgtttcccagctgcgagctttggatggcggcaacaagcattttttgagaaatcaaccacttacgttcgccctgcaactgcatgatccctccggctacctcgccgaggcagatctgagctacacctgggatttcggagactcctccggcaccctgatcagcagagcacttgtggtgacccacacttacctggagcctggcccagtgaccgcccaggtcgtgctccaggccgctatcccactgaccagttgcggatccagtccagtgcccgggactaccgatggacaccggccaaccgccgaagctcctaacaccacagccggccaggtcccaactacggaagtggtgggaaccacccccggacaggcacccaccgcagagccctcaggcaccactagcgtccaagtgccaacgaccgaagttatttccaccgcgcctgtgcagatgcctaccgccgaatctaccggcatgacccctgaaaaagtacccgtatctgaggtgatgggcaccactctggccgaaatgtctacacccgaagccacaggtatgactcccgctgaggtgagcatcgtcgtgctgtccggaaccacggctgctcaggtgaccaccaccgagtgggtggagactacagctagagagttaccaattcccgagccagaggggcctgatgcttcaagtataatgtcaacagagtccatcactggttccctgggcccacttctggatgggaccgccactctgcggcttgtcaagagacaggtgcctctcgattgcgtgctctatcgctacgggagctttagtgtgaccctggacattgtacagggaatcgaatcagctgagatcctgcaggctgtaccgagcggggagggagacgctttcgaacttaccgtgtcctgtcaggggggtcttcccaaggaagcctgcatggagatcagcagccctggctgccagcccccggcccagaggctttgccagcccgtgttgccttcacccgcatgccaattggtgctccatcagattctgaaaggaggctctgggacttactgcctgaacgtgtcactcgcagacaccaattctctggcagttgtctctacccagctgattatgcccgggcaggaagctgggctgggccaggttccattgattgtaggcatcttgttagtcctgatggccgtggttctggcaagtctaatatataggcgaagacttatgaaacaggatttttctgtgccacagttgccccactcatcctcacattggttgcggctgccacggatattttgctcctgtcctatcggtgagaactccccacttcttagcggacagcaggtgtag

SEQ ID NO: 10011 - DNA, 330 bp, synthetic construct
  misc_feature 1..330: note = source = /note="Description of Artificial Sequence: Synthetic coding sequence"
  source 1..330: mol_type = other DNA
tgaagcggccagagcctgaagagcctgaacgccagcagcggccacttggcccttattctctctagcatcttcggactactcctgctggtgctgtttatactgtttctcacttggtgcagggtgcagaaacagaagcacctcccactgagagtgtctacacgaagaaggggatctctcgaggaaaacttgttccacgaaatggagacatgcctcaaaagggaagatccccatggcaccagaaccagcgatgatacgcctaatcacgggtgcgaggatgccagcgatacaagcctgcttggcgtgctcccagcctccgaagctacgaaatag

SEQ ID NO: 10012 - DNA, 312 bp, synthetic construct
  misc_feature 1..312: note = source = /note="Description of Artificial Sequence: Synthetic coding sequence"
  source 1..312: mol_type = other DNA
atgagcggccggggcaagggcggcaagggcctgggcaagggcggcgcgaaaaggcatcggaaggtgctgcgggataatatccagggaattacaaagcccgctattcggcgcttggccagacggggaggggtgaaaagaattagcggcctgatttacgaagaaacgcgcggagtgctcaaggtctttcttgagaacgtcatacgggatgcagtcacttatacagaacacgcgaagcggaagactgtaaccgccatggacgtggtgtatgccctcaagcgccagggcagaactctgtatgggttcggcggatag

SEQ ID NO: 10013 - DNA, 2889 bp, synthetic construct
  misc_feature 1..2889: note = source = /note="Description of Artificial Sequence: Synthetic coding sequence"
  source 1..2889: mol_type = other DNA
atgctgcggcggcccgcccccgccctggcccccgccgcccggctgctgctggctggattgctgtgcggcgggggcgtgtgggcagccagagttaataaacacaagccatggcttgagcccacttaccacggcatagttacggagaacgacaacaccgtcctcctggatcctcccctgatagcgttggataaggacgcaccattacggttcgccgagtcattcgaggtgaccgtgacgaaagaaggtgagatttgcgggttcaagattcatggccaaaatgtcccgtttgatgcagttgttgtggataaaagcacaggggaaggcgtgatccgtagcaaggagaagctcgattgtgaactacagaaggactactcattcactatccaagcatatgactgcggaaagggacccgatggaacaaacgtaaagaagtcacacaaggccacggtgcacatccaggtgaatgacgttaacgagtacgcgccagtgtttaaggaaaagagttataaggccactgttatagaggggaaacagtacgatagtattttgcgcgtagaagccgtcgatgctgactgtagtccccaattcagccaaatctgcagctacgagataatcactccggacgtcccttttaccgtggataaagacgggtacataaagaatacggaaaaactcaattacggcaaagagcatcaatataaacttacagtcaccgcatatgattgtgggaagaagcgggcgaccgaggacgtgttggtgaagatcagtattaagcccacctgtactcccgggtggcagggttggaataacagaatcgagtacgagccaggcacaggggctctggcagtttttccaaacatccacctagagacttgcgacgagcccgtggcttccgtgcaggcgacagtcgagctggagacatcacatattggtaaggggtgtgaccgagacacctattctgaaaagtcgctccaccggctgtgcggtgccgcggccgggacagcagaattgctgccatccccctccggaagcttaaactggactatggggctgcctacggataacgggcacgattctgatcaggtgtttgaatttaatggaacccaggcagttagaatcccagatggggtagtctctgtgtcccccaaggaaccatttactatatccgtctggatgcgtcatggccccttcgggagaaaaaaagagaccattctttgtagtagcgataagacagatatgaatagacatcactactccctgtatgtccacggttgtcggttgatcttcctgttccgacaggatccttcagaggaaaagaagtataggccagctgagttccactggaagctcaaccaggtgtgcgatgaggaatggcatcattacgttttaaatgtggaattccccagtgtgaccctgtatgttgacgggacttcacacgagccgttttccgtaactgaagattaccctctgcaccccagtaaaatcgaaacccagttagttgtgggagcctgctggcaaggcggcgacctgcatatgacccaattttttcgtggaaatctcgctggtttgaccctgaggagtggcaaactggctgacaagaaggtcatcgactgtttgtacacttgtaaagaaggcctcgatctccaggttttggaggatagcggcagaggggtgcaaatacaggcccacccgtcccagctggtgctcaccctcgaaggcgaagacttgggtgaattggacaaggcaatgcagcacatctcttacctgaacagtcggcagttccctaccccaggcatccgaagactgaagataacatcaaccataaagtgttttaacgaagctacttgtatatcagttccgccggtggacggctacgtcatggtcttacagcctgaggaacctaagatctctttgtccggggtacatcactttgcccgcgcagcaagcgagttcgagtcaagcgaaggcgttttcctatttccagagctgaggattatctccaccatcacgagagaggtcgagcctgagggggatggagctgaagaccctaccgtacaagagtccctggtaagcgaggagattgtacacgaccttgacacatgtgaagtgacagtggaaggggaagagcttaaccatgagcaggagtctctggaagtagacatggcccggctccagcagaaggggatagaagtctctagcagcgaacttggaatgacattcactggggtcgacacgatggcctcttacgaggaagtgttgcaccttttgagatatcgaaattggcatgcacgtagcctcctggacaggaaattcaagcttatttgtagtgaactgaatggcaggtacatcagtaacgagttcaaggtagaggtcaatgttatccatactgccaatcccatggaacacgcaaaccacatggccgcgcagccacagttcgtacacccagaacaccgttcctttgtcgatcttagcgggcataacttggcaaatccacacccttttgcagttgttcccagtaccgccacggtggtgattgtcgtgtgtgtgtcctttctcgtgtttatgatcatactgggcgtgtttcgaatccgcgctgcacatcgccgaaccatgcgagatcaggacaccggaaaggaaaacgagatggactgggacgattctgctttgaccatcaccgtgaacccgatggagacctatgaggatcagcacagcagtgaggaggaggaagaagaagaagaggaggaggaaagcgaagatggtgaggaggaggatgacattactagcgctgagagtgagtcatctgaggaagaggaaggagagcagggcgacccccagaacgctacaagacagcaacagctagagtgggatgacagcactttatcttattag

SEQ ID NO: 10014 - DNA, 912 bp, synthetic construct
  misc_feature 1..912: note = source = /note="Description of Artificial Sequence: Synthetic coding sequence"
  source 1..912: mol_type = other DNA
atgctgcaccccgagaccagccccggccggggccacctgctggccgtcctgctggcgttactggggacagcctgggccgaagtgtggcccccacagctccaggagcaagcaccaatggctggggctcttaacagaaaagagtcattcttgttattgtctctgcataatcggttgaggtcctgggtgcagccccctgcagccgacatgaggcggctggactggagcgacagccttgctcaattagcccaggctcgcgccgccttatgcggcacaccaacaccctccctcgcaagcggcctctggcgtacgttacaagtcggctggaatatgcagctgttgcctgccgggttggtgagtttcgtcgaagttgtaagtttgtggtttgctgagggccagagatactcgcacgctgcgggagagtgcgctcgcaatgccacatgtacgcactacacacagttggtgtgggctactagctcacagctcggatgtggccggcatctttgcagcgccgggcaggccgcaatcgaggcatttgtttgcgcgtatagcccccggggtaattgggaggtcaatggcaagactattgttccctacaaaaagggcgcgtggtgtagtctatgcactgcctctgtgtcggggtgctttaaagcttgggatcacgcaggaggtctgtgtgaggtaccgagaaatccctgtagaatgagctgccagaatcatggtcgtctcaacatcagcacttgtcattgtcactgccctcccggctacactgggcggtactgtcaggtaaggtgctcactccagtgtgttcacgggcgattccgagaggaagagtgctcatgcgtgtgtgatatcggatacggagaaccctccgtccctcccagatgtatatttccctccactccagttacctag

SEQ ID NO: 10015 - DNA, 1356 bp, synthetic construct
  misc_feature 1..1356: note = source = /note="Description of Artificial Sequence: Synthetic coding sequence"
  source 1..1356: mol_type = other DNA
atggaggccaccggcaccgacgaggtggacaagctgaagaccaagtttatctcagcctggaataacatgaaatacagctgggtgctgaagacaaaaacctacttctcccggaacagccccgtcctcctcttggggaaatgctatcactttaagtacgaagacgaagataaaactcttcccgccgagtcaggctgcaccatagaggatcacgtgatagcaggcaacgttgaggagtttcgtaaggatttcatctctcgaatttggctcacttatagagaagaattccctcaaattgaaggctctgccttgaccacagactgcggatgggggtgtacgctacggacagggcagatgcttttggcccaaggcctgatccttcacttcctcggacgcgcatggacgtggccggatgccctgaacatcgagaatagtgattctgaatcctggactagtcacaccgtaaagaaatttacggccagttttgaagcttctctatcaggtgagagagagtttaaaactcctactatctccctgaaggagactataggaaagtatagcgacgaccacgaaatgcggaatgaagtgtaccacaggaaaatcatctcttggtttggagacagcccactcgccctgttcgggcttcaccagcttattgaatacggtaaaaagtctggcaaaaaggccggtgactggtacggaccggccgttgtggctcacatattgcgtaaagcagtggaagaagctcgccacccggatctgcaggggatcactatttacgtggctcaagattgcaccgtatataattctgatgttatcgacaaacagtcagcgtccatgacctctgacaacgcagatgacaaggcggttattatcctggtgccagtgcgactcggaggagaacggactaacaccgactacctcgagttcgtgaaaggcattctgtccctggagtactgcgtgggcattattggcgggaagcctaagcagtcttattacttcgcgggatttcaggatgattcactgatttacatggatcctcactactgtcagtcatttgtcgacgtgagtatcaaggactttcctcttgaaacattccactgccctagcccgaaaaaaatgtcattcagaaagatggatccctcttgcaccattggtttttattgtcgtaacgtgcaagatttcaagcgcgccagtgaagagatcaccaagatgctcaagttttcttcaaaggagaaatatcctctcttcacattcgttaacggccactcacgcgactacgacttcacctccacaacaactaatgaagaagatctgtttagcgaggacgaaaagaaacagaaaaagaaaaagaagtag

SEQ ID NO: 10016 - DNA, 1557 bp, synthetic construct
  misc_feature 1..1557: note = source = /note="Description of Artificial Sequence: Synthetic coding sequence"
  source 1..1557: mol_type = other DNA
atgcggacctgggactaccggtggagcctggccctggtggcccagaccggcgttcactgctgtaacctttcctccctgcagcctcttccgccgaggttcaaacggtttagttgcctgagcctaagcagtggttgggattattccaatagtggcaatatgaaacctccactgcttgttttcatagtctgtttattatggctcaaggatagtcactgcgccccgacctggaaggataagactgcaatatcagagaacttgaagtctttctccgaggtcggcgaaatagatgcagatgaggaggtaaaaaaggccctgactggcatcaagcagatgaaaatcatgatggagagaaaggagaaggagcacaccaacctgatgagcacactgaagaaatgtcgggaagagaagcaagaggcgctaaagctcttgaatgaagtccaagagcacctcgaagaggaggaacggctttgccgcgagtcacttgccgactcctggggcgaatgtaggtcatgtctcgagaataattgtatgcgcatctacacgacgtgccagcctagttggtcatctgttaagaacaaaattgaacgctttttcagaaagatataccaatttcttttcccctttcacgaggacaatgagaaggaccttccgatttctgaaaaactcattgaagaggatgctcagttgacccagatggaagatgtgttctcccagcttacagtggacgttaatagcttgttcaaccgatcctttaatgtttttcgacagatgcagcaggagttcgaccagacctttcagagtcattttatatccgacacagacctcaccgaaccctatttcttccctgccttcagtaaggaaccaatgacaaaagcagacttggaacagtgctgggacattcccaacttctttcagctcttttgtaatttcagtgtgagcatttacgagtctgtctccgagactatcacaaaaatgctaaaggccatcgaggatttgccaaaacaagataaagctccagatcacggcggactcattagcaagatgctcccaggccaggataggggcctctgcggcgaattggaccagaatttatctcggtgctttaagttccacgaaaagtgtcaaaagtgtcaggcgcatctttccgaggattgtccagatgtgcctgctttgcacacggaactggatgaggctatccgactggtcaatgttagtaaccaacaatacgggcaaatcctgcaaatgacaagaaagcacctggaggacactgcgtatttggtagagaagatgagaggccaattcgggtgggtctccgaactcgccaatcaggcccccgaaaccgaaattatcttcaactctattcaagttgtaccccgaattcacgaaggcaatataagtaagcaagatgagaccatgatgactgatctatccatactacccagctctaattttacgctgaagatccccttggaagagtccgctgaatccagtaacttcataggttacgtcgtggcaaaagcgctacagcactttaaggagcactttaagacctggtag

SEQ ID NO: 10017 - DNA, 1716 bp, synthetic construct
  misc_feature 1..1716: note = source = /note="Description of Artificial Sequence: Synthetic coding sequence"
  source 1..1716: mol_type = other DNA
gtggagatgcggaagtggagcagcgagcccggccccgagcccgacaccgtcgaggcagtgatagaatatatgtacacaggacggatccgggtgtcaactggaagcgtgcacgaggtgctagagctcgcggacagattcctcttgattcggctcaaggagttctgtggcgaattcttgaaaaagaagcttcacctgtcgaattgcgtagccatccattccctggctcacatgtataccctctctcaactggctttgaaagctgccgatatgatacggcgcaatttccacaaggttatccaggacgaggaattttacactcttcccttccacctgattcgcgattggctgtcggatcttgaaatcactgtcgacagtgaggaagtactctttgaaacagtgcttaaatgggtgcaacgtaatgccgaggaacgagagagatattttgaggagctgtttaaacttttgagactgtcccagatgaaaccaacctatctgacaagacatgttaagcccgagcgcctcgtggctaacaacgaagtgtgtgtcaaactcgtggccgatgctgtggagcggcacgctctgcgggcagagaacattcagtctgggacctgtcagcatcccacttcgcatgtgagtctcttgcccagatatgggcagaatatggacgtgatcatggttatcggcggcgtctctgaaggaggtgactacttgtcggagtgcgtggggtactttgtggatgaagaccgttgggtgaaccttcctcacatccataaccatctggatggtcacgcggtcgccgtgaccgagagctacgtttacgtggccgggtctatggagccaggctttgctaaaacagttgagcgctacaatcccaatctgaatacttgggagcacgtgtgcagcctcatgacaaggaagcacagctttggtctgacagaggttaaaggcaagctgtattccattgggggacacggtaatttttcacctggctttaaggatgtgacagtctacaatcctgagctcgacaaatggcataacctagaatccgcacccaagatcctgcgcgacgttaaagccttagctatcgaggaccgcttcgtgtacatcgctgctaggacccctgtggatagagacaccgaagatggactcaaggcagtgattacttgctatgacacggagaccagacagtggcaagacgtcgaaagcctgcctttgatcgataactactgcttcttccagatgagcgtagtcaactccaacttctatcagacggcctcttgctgtcccaagtcctattgcctcgaaaacgaggaagcagtgcgaaagatcgcttcgcaggtcagtgacgaaattctcgagagcctcccccccgaagttctgtccatagagggagctgctatctgttactataaggatgatgtgttcattatcggaggttggaaaaatagcgatgacatagataagcagtacaggaaggaagcctacagatactgcgcagagagaaagcgctggatgcttcttccacccatgccccaacctaggtgcagagctaccgcttgtcatgtgagaataccctataggtacctgcatggaacgcagaggtatccaatgccacagaacctgatgtggcagaaagacagaatacggcaaatgcaggaaatccacagacacgctctgaacatgcggcgggttccatcctcacaaattgaatgctag

SEQ ID NO: 10018 - DNA, 729 bp, synthetic construct
  misc_feature 1..729: note = source = /note="Description of Artificial Sequence: Synthetic coding sequence"
  source 1..729: mol_type = other DNA
atgctgaagaagatcagcgtgggcgtggccggcgacctgaacaccgttactatgaaattggggtgcgtgctgatggcttgggccctctatctgtccttgggcgtgctctgggtggcacagatgctgttggccgccggatgccacgctgaattgttcccagctccaatacttagagctgtgccctccgctgaaccacaggctggctctccaatgacacttagttgtcagaccaagctgcccctgcagcggagtgccgccagactgcttttttcattctataaagatggcaggatcgtacagtcaagggggttaagttcagagttccagatcccaacggcttccgaggatcactcaggctcttattggtgcgaggctgctacagaggacaatcaggtatggaagcagagcccccaactggagattagggtgcagggcgcttcttcaagtgcagctccgcccaccctaaaccctgccccccaaaagtcggctgcccccggcacagcgcccgaggaagcgcccggccctctccccccgccacctacaccctcgtccgaggaccctggattcagttcgccacttggtatgccagaccctcatctgtaccatcagatgggcctcctgcttaaacatatgcaggacgtcagagttttactgggacacttactgatggagctgcgagaacttagtggccataggaaacctgggactaccaaagcaactgccgagtag

SEQ ID NO: 10019 - DNA, 1392 bp, synthetic construct
  misc_feature 1..1392: note = source = /note="Description of Artificial Sequence: Synthetic coding sequence"
  source 1..1392: mol_type = other DNA
atgtacgtgagcacccgggagcggtacaagtggctgcggttcagcgaggactgcctgtacctgaatgtctacgcaccagccagggcccctggcgatcctcaattgccggtaatggtgtggtttcctggaggcgcgttcatcgtgggagctgcttcatcatacgaggggagcgatctcgcagcccgagaaaaggttgttctagttttccttcagcatagactggggattttcggtttcctcagcaccgacgatagtcatgcacgggggaattggggtttactggaccagatggccgccctcaggtgggtgcaggagaatatagccgcctttggaggggatcctggaaacgtgacactattcggccaatctgctggcgccatgtctatcagcggccttatgatgtctcccttggcctctgggctgtttcaccgcgccatttcccaatcaggtaccgctctgtttagacttttcattacctcaaaccccctcaaggtggcgaagaaggtggctcacttagctggttgtaatcacaacagcacccaaattttggtgaattgtctgagggccctttctgggacaaaggtgatgcgggtgtctaacaaaatgaggtttcttcaattgaattttcagagagaccccgaggaaattatttggagcatgtcgcctgtggtggatggcgtggtgattccagacgaccccctggtcttgttgacgcaaggcaaggtgtcatccgtcccatacctcctcggcgtgaataatctggagttcaactggttgctcccctacatcatgaagtttcctttgaaccgtcaggcaatgcgcaaggaaaccatcactaaaatgctctggagcacccgcaccctgctgaatatcactaaagaacaggtccccctagtggtggaagagtacctggataacgtgaatgaacacgattggaaaatgcttcgcaacaggatgatggacatagtgcaggacgcaaccttcgtgtatgccaccttacaaaccgcccattaccacagagacgctgggctgccagtttacttgtacgagttcgaacaccacgccagaggaatcatcgtcaagccacgtaccgacggagctgaccacggggacgagatgtattttctgtttgggggtccgttcgcaaccggtctcagtatgggaaaggagaaagcactctccctgcagatgatgaaatattgggcgaatttcgccagaactgggaatcctaacgacgggaacctgccgtgctggcctaggtataataaagatgagaagtatcttcagctcgacttcactactagggttggcatgaaactcaaagagaaaaaaatggctttctggatgagcctctaccagtctcaacgccctgaaaagcagagacaattttag

SEQ ID NO: 10020 - DNA, 1215 bp, synthetic construct
  misc_feature 1..1215: note = source = /note="Description of Artificial Sequence: Synthetic coding sequence"
  source 1..1215: mol_type = other DNA
atgttctaccacgcctacgacagctacctggagaacgccttcccctttgacgagttacggcctctgacatgtgacggacacgacacttgggggagcttttcccttacattgatcgacgcactggataccctgctaattctggggaacgtaagcgaatttcagcgagtcgtggaggtgcttcaggacagcgtggactttgatatcgacgttaatgcatcagtgtttgaaacgaatatcagggtggtgggcggccttctgtccgcccatctactgagcaaaaaagcaggggtcgaggttgaggcaggctggccttgttctggacctttgttgcgtatggccgaggaggctgctcggaagttgctgccggcattccaaaccccaactggtatgccttatggcacagtgaacctgctacacggggtaaatcctggcgaaacgccggtgacatgcacagcagggattgggacctttattgtggagtttgctactcttagttctctgacaggagaccctgtatttgaagacgtggcccgagttgccctgatgcgactttgggaaagtagatccgacattgggctcgtgggcaaccacatagacgtgttaacaggcaagtgggtggcacaggatgctgggatcggagccggcgtggattcctatttcgaatatctggtgaaaggggccattttactgcaagacaaaaagctaatggctatgttcctggagtataacaaggccatcagaaactacaccagattcgacgattggtatctgtgggtgcagatgtacaagggcacagtctcaatgccggtcttccagagtctggaggcttactggcctggccttcaaagcttaatcggtgatattgacaatgcgatgcgcacattcctgaattactataccgtttggaaacagttcgggggacttccagagttttacaatataccccagggatataccgttgagaaacgggaaggttacccactccgcccagaactgatcgagtcagccatgtatctctacagggctactggtgacccaactcttttggaactgggacgtgatgccgtcgagagcatagagaagatttccaaagttgagtgcggatttgctacagtttccgtgtgcatggccccccggacgggaaagagcctcccattactactgaagtccctgttcaaaggcagagcactgggcgtccttacctatcagcactag

SEQ ID NO: 10021 - DNA, 1281 bp, synthetic construct
  misc_feature 1..1281: note = source = /note="Description of Artificial Sequence: Synthetic coding sequence"
  source 1..1281: mol_type = other DNA
atgggctggaccgacaccctggagagcgccgaggacatcttctggaagcaggcggactttgggtatgcgagggaaagattggaagagatgcatgttctctgccaacctaaggaaacctccgacagctctctagtctgtagtagatacttacagtattgccgggccacaaatctttatttagatctgcgcaatataaagcggaatcatgatagattcaaagaggatttttttcagagcggagaaattggtggtcactgtaagctcgatatccgcacactgacaagcgaaggacagagaaaaagtccattacagtcttggtttgccgaacttcaaagttacacacaactaaacttccgcccgatcgaggatgctaaatgcgatatcgtgattgagaaacctacctatttcatgaaactggacgctggggttaatatgtaccatcacttttgtgacttcatcaatttatatattacccagcatgtgaataacagcttcagtacagacgtctacattgttatgtgggatacatcaagttacggatatggcgatctgttcagtgacacatggaacgcattcacagactatgatgtcattcaccttaagacctacgacagcaagcgcgtgtgttttaaggaggccgtgttttcactcctaccgaggatgagatacgggctcttttacaataccccactgatcagtggttgtcagaacaccggacttttccgagctttcgctcaacacgttttgcacagacttaacatcacgcaggaaggaccaaaagacgggaaaattagggtcacaatactcgcaaggtccactgagtatcgcaagatactcaaccagaacgaattggtcaatgctctcaagacggtctccacatttgaggtacaaattgtggactataagtaccgcgagttgggattcttggatcagctccggatcacacacaacaccgacatttttatcggaatgcacggggcaggactcacccatctcctcttcttaccagactgggcagctgtgttcgaactctataattgtgaggacgagcgatgctaccttgatttggcgaggctccgtggggtgcactacattacctggcgaagacagaacaaggtcttccctcaggacaagggacaccacccaacccttggtgaacatccgaaatttacgaactactcctttgacgtcgaggaattcatgtacctggtgcttcaggccgctgaccatgtcctgcagcaccctaagtggcctttcaagaagaagcacgatgaactttag

SEQ ID NO: 10022 - DNA, 1098 bp, synthetic construct
  misc_feature 1..1098: note = source = /note="Description of Artificial Sequence: Synthetic coding sequence"
  source 1..1098: mol_type = other DNA
atgaagctgggctgcgtgctgatggcctgggccctgtacctgagccttggtgtgctgtgggtggcacagatgctactggtcgcaagtagcttttccgccgccagctttgaaacccttcagtgtgaaggccccgtttgtactgaagagtcatcttgccacaccgaggacgatcttacagacgctagggaagctgggttccaggttaaggcctacacttttagtgaaccttttcacctgatagtctcttacgattggttgatcctgcaaggtcctgccaaaccagtgttcgagggcgacctcctggtacttcgatgtcaagcatggcaagattggccactgacccaggtgaccttttacagagatgggtccgcactggggccccctggcccaaatagagagttctccattacagtggttcaaaaagcagattctggccactatcattgttccgggatattccagagccctgggcctggaattcccgaaactgctagtgttgttgctatcacggttcaagaactattccccgccccaattctgagagccgtcccttccgccgaaccacaggcagggtcccccatgaccctgagctgtcagaccaaactgccgctccaaaggagcgcggccaggcttctgtttagtttttataaagatggtagaatcgtccagtccaggggattgtccagtgaattccagattcccacagcctctgaagatcattcaggctcatattggtgtgaggcagccactgaggataaccaagtgtggaagcaatctccgcagcttgagatccgagtccagggagcctcatcatcggcagctcccccgacccttaatcccgctccacagaagtcagcagctccggggaccgcccccgaggaggcacccggccctcttccgccaccccctacccctagttctgaggatcctggattcagttctcctcttggcatgccggaccctcacctgtaccatcagatggggctactccttaaacatatgcaggatgtccgcgtgctgcttggccaccttttaatggagctgcgcgagctgagcgggcacaggaagccgggaaccacaaaagccactgcagagtag

SEQ ID NO: 10023 - DNA, 1407 bp, synthetic construct
  misc_feature 1..1407: note = source = /note="Description of Artificial Sequence: Synthetic coding sequence"
  source 1..1407: mol_type = other DNA
atgcggtggatcctgtgctggagcctgaccctgtgcctgatggcccaaacagcattaggggcgttacatacgaagagaccacaggtggtgacgaagtatggaacactgcaggggaagcagatgcacgtcggcaagacccctatacaggtttttttaggcgtacctttttcacggcccccgctggggatcttacggttcgcacctcccgagccacctgaaccgtggaagggtatacgcgacgccacaacataccctccaggctgtctgcaggagtcatggggccaactggcgagcatgtatgtatctacacgggaacgatataaatggctgcgattcagcgaggattgtctctatttgaacgtctacgcaccggctcgcgcccccggggaccctcaactgccagttatggtttggttccctggaggcgcattcattgttggggcggctagctcctacgagggaagcgatttggcagcccgtgaaaaggtcgttctggtgtttctccagcaccggcttggcatctttggcttcttgtcaaccgacgactcacacgccaggggtaactggggattgctcgatcagatggcagcgcttcggtgggtgcaagagaatatcgctgcgtttggaggggatccgggcaacgttacactattcggacagtcagcaggggctatgtccatcagcggtctgatgatgtcaccgctcgcctctggattgttccatcgggccatatctcaaagcgggaccgctctcttcagactgtttattacgagtaaccccctcaaagtggctaaaaaggtggcgcacttagccgggtgtaaccacaacagtacccagattttagtaaattgtctgcgggcgttgtccggtactaaagttatgagggtttcaaacaagatgcggttcctacagctgaattttcaaagagatcccgaggaaattatctggtcgatgagccctgtcgtcgatggcgtcgtcatcccagacgatcctctcgtgctgctcactcaggggaaggtcagctcggtaccttacctgctgggggttaataacctggaattcaactggttactgccctatatcatgaaatttcctctgaatcggcaggccatgcgaaaagagacaattacgaaaatgctctggtccactcgaactcttttgaacattactaaggaacaagtgcccctcgtggtggaggaatacctggacaacgtcaatgagcatgactggaaaatgctgagaaatagaatgatggacattgtccaggacgccacctttgtttatgctacactccaaaccgcacattaccaccgagagacacccatgatgggcatctgtcctgcaggccatgcaaccaccaggatgaagtcaacctgcagttggatcctgccccaggaatgggcttag

SEQ ID NO: 10024 - DNA, 756 bp, synthetic construct
  misc_feature 1..756: note = source = /note="Description of Artificial Sequence: Synthetic coding sequence"
  source 1..756: mol_type = other DNA
atgagcagctacggctacggcgacctgttcagcgacacctggaacgcgttcaccgactatgatgtgatccacctaaagacctatgatagcaagcgggtgtgctttaaagaagcagttttttccctcctgccacggatgcgctacggcttattttacaacacgcctcttatcagtgggtgccagaataccggccttttccgcgcctttgcccagcatgtgcttcacaggctgaatatcacgcaagaaggcccgaaggatgggaagatccgggtgacaatcctggcacggtcaaccgagtaccgaaaaatcctgaaccagaatgagctagtcaatgccctgaaaacagtctccacatttgaggtgcagattgtcgattataaatatcgcgagctcggctttctcgaccagctccgcataacccacaacacggatatattcatcggtatgcacggggccggcctaacccacctcctgttcttgcctgattgggctgccgtgttcgagttgtataactgtgaggatgaaaggtgttacctggatttagcaaggctgcggggagtacactacataacctggagacgtcagaacaaagtcttccctcaggataagggccaccaccccacactcggcgagcaccccaagtttacaaattacagctttgatgtagaagagttcatgtatctcgtcctccaggccgccgaccatgtcctgcaacatccgaaatggcccttcaaaaagaagcacgacgagctctag

SEQ ID NO: 10025 - DNA, 927 bp, synthetic construct
  misc_feature 1..927: note = source = /note="Description of Artificial Sequence: Synthetic coding sequence"
  source 1..927: mol_type = other DNA
atgatccccgtggagctgctgctgtgctacctgctgctgcaccccgtggacgcaacttcatatgggaagcaaacaaacgttctgatgcactttccactgtccctggagtcacagactccgagtagtgaccccctgagttgccagttcctccaccccaagtctctccccgggttttcccatatggcacctctaccaaagtttctggtatctttggccttacggaatgccctggaagaggccggatgccaggctgatgtgtgggccttgcagctccagttatacaggcagggcggcgtgaatgctacacaagtgctgatccagcacctgaggggacttcagaaaggtagatctacagagcgcaacgtaagtgtggaggcccttgcctccgctctgcagctactcgctcgcgagcagcagtccaccgggagagtgggccgcagtctgcccactgaggactgcgaaaacgagaaggaacaagccgttcacaatgtggtgcagctgcttccgggagtgggaaccttctataatctgggcacagctctttattacgctacgcaaaactgcctgggcaaggctcgggagcgggggagagacggggcaatcgatctgggctacgacctgctcatgacaatggctggaatgtcgggcggacccatgggactggctatctccgccgccttaaagccagccttgaggtctggcgtgcagcaactgatccagtactatcaagatcaaaaggacgcaaacataagccagccagagactacgaaggaaggactccgagctattagcgacgtgtccgacctggaagaaactaccacactggcatctttcatttctgaagtggtctcatctgcgccttactggggatgggcaattattaaaagctacgatcttgatcctggggccggatccctcgaaatttag

SEQ ID NO: 10026 - DNA, 2862 bp, synthetic construct
  misc_feature 1..2862: note = source = /note="Description of Artificial Sequence: Synthetic coding sequence"
  source 1..2862: mol_type = other DNA
atgcgggtgctggcctgcctgctggccgccctggtgggcatccaggctgttgaaaggctcagattggctgatggtccccacggctgtgctggccgactggaagtgtggcatgggggcaggtggggaactgtttgcgatgatgggtgggacctaagagacgccgccgtggcctgcaggcaacttgggtgcgggggcgcgctggcggcaccaggcggcgccttttttggcgaaggtgccggcccagtatggctgtctgagctggcttgcaggggcaatgagggccagttgggactctgtcatcacagggggtggaaagcccatatctgtagccatgaggaagatgccggcgtggtgtgcgccgggcagcgggtggccaatagtcgcgatgactctaccagcccattggatggcgctccttggccaggcctgctgctggagttgtcaccatctactgaagagccgctggtgactcacgccccgcgcccggccggaaatccccagaacgcttcaaggaaaaagagcccgcgacccaaacaggcgaagtcaactagggcccctttgctcactacaggcgcacctaggcaagaacgcctgcgcctggtgagcggaccacatcggtgtgccggacgattggaagtctggcacggcggcaggtgggggactgtgtgcgatgacggttgggacctgagagatgccgcggtcgcttgtagagagctgggttgcggcggtgcattggctgctcctgggggcgctcggtttggcccgggagcgggacccgtgtggatggacgacgtaggctgcggcggcggcgaacaggcgttaagagactgtccacgtagcccctgggggcggtccaattgtgatcattccgaggatgctggcctagtgtgcaccggtcccgcccctagacttcgcctcgctgatggtccacacggctgtgctgggcggctcgaagtatggcatggcgggcgctggggctccgtttgtgacgacgcatgggatctgcgcgacgcagccgtcgcttgcagagagctcgggtgtgggggagcattggccgcgcccggcggcgcctttttcggcgagggttccggaccgatcatcttggatgacctgaggtgtcgcggcaatgaaaccgcgctgcgcttctgtcccgccaggccttggggacagcatgattgtcatcatcgagaggacgcaggtgccgtgtgcgatgggatgcccctggggtacgtgccccccaccgctccgacagactctaacaatagcacaccaagagaagccgctagccgtccccccagcaccatgacttcgcaagcaccgggcaccgctggagttagtccacctcctgctagccctacagttctttgggagccaggccctgaggctggaagtccacaactgcggctggttgccgggccatcaaagtgctcaggcaggctggaggtttggcatgaccagagatggggtacagtgtgcgatgattcttgggacatgagggacagcgctgtcgtctgcagggagctgggatgtggtgggccccaacagcctgatcctgctgccggccgctttggctggggcgccggccccatatggctcgacgatgtgggctgcgtggggactgaggcctctttgagcgactgccctgctgccccttggggaaaacacaactgcgctcataatgaagacgtgggagttacctgcacagggccaccgggactggacagcataagtgaccccttcagctggtcatggatccccggtcttggtcgtgacagagatgcctggctcccaggggaacttgctacgaaaccctcggcatccgtgactgcctcagttcttgagaaaaccaccacaaaggcgccggggaagatgcccaaaagcaccaaaaaatgggtgaccaagaatgcaaagcggcctaccactcagccaccagttatgcctacaaccaagcattcaagggcccagagcccgccagatctcacctcacaaacaaccgctgccttgacgaccgaagcctccaggcggcccacctcagagtttacacgtagacccacaaccgaggctccccagagatggacatcccacacgacagctaccttaacaccacaagcgccaagagaacgtacgactaaaacaatggctatgctaacaacgcagggacctcaggagatgaccagcgaatctaccatcaagagcattccacaggcctcactggaaccctcagcggagatccctgagggttctcctgagtcacccaaagaccccgccccatccccctcagtcagcaccactggagagtcaggtttattccgcgtcaggctggcagacggaccgaatcggtgcgccgggagattggaggtatggcatgctggcagatggggaacagtttgcgacgacaattgggatttgcgggatgcaacagtggcatgttgggagctcgggtgcggaaaggtgagaccaagggttggcaaaacacactacggaccagggaccggaccgatttggctcgatgatatgggctgcaagggttccgaggccagcctctcggactgcccttctggcgcctgggggaaacacaattgcgaccacgaggaagatgtcggtctcacttgcacagggtacactgactatgatgactatccaccatggacatgggaccccacgtcgagagaggacctggctaaggggactacgaccgcgggagtaccaggacacacactgccatggagaactacccggcggccaggcagcagctcacctgcaatccgcagacttcccgacactgaacccgaagcaggtttgagagaggtcatgctccttgtacaaggactgcctggactccagcggctgcccagtccgtag

SEQ ID NO: 10027 - DNA, 474 bp, synthetic construct
  misc_feature 1..474: note = source = /note="Description of Artificial Sequence: Synthetic coding sequence"
  source 1..474: mol_type = other DNA
atgctgcggaccgagagctgccggccccggagccccgccggccaggtggcagcagcatccccccttctcctcctgctcctgctgctcgcatggtgtgcaggcgcatgtcgcggtgctcctattctgcctcagggtctgcaacctgagcaacaactccagttatggaacgagatcgatgatacctgcagcagcttcctgtccattgactctcagccacaagcttccaacgcacttgaggagctgtgctttatgataatgggaatgctccctaagccccaggaacaggacgaaaaggataatacaaaacgctcaagcgtggtgcaccccctgttgcaactggttcctcacctccacgaacggcggatgaagcgcttccgggtggatgaggagttccaatctcccttcgcttcacagtctaggggctactttctctttcgacctaggaatggcaggagaagcgccgggttcatttag

SEQ ID NO: 10028 - DNA, 1545 bp, synthetic construct
  misc_feature 1..1545: note = source = /note="Description of Artificial Sequence: Synthetic coding sequence"
  source 1..1545: mol_type = other DNA
atgcccagcaccgtgctgcccagcaccgtgctgcccagcctgctgcccactgccggggctgggtggagcatgagatggattctctgctggtcactgactctatgcctgatggcccagaccgcactcggtgctttacataccaagaggccccaggttgtgacaaagtatggcacccttcaggggaagcagatgcatgtagggaagacgccgatccaggtgttccttggtgtgcctttcagtcgcccaccccttgggatactccgttttgctcctcctgagcctcccgagccatggaaggggattcgagatgctaccacatatccgccaggctgcttacaggagtcctgggggcagttagcttctatgtatgtgtccacccgcgaaaggtacaagtggctgagattttctgaagactgcctgtatctgaacgtctacgcccccgcccgcgcacctggagacccccaattgcccgtaatggtttggttccccggcggagccttcattgtcggagctgcctccagctacgaagggagtgaccttgccgcaagagagaaagttgtccttgtgttcctgcagcaccggctcggtattttcggatttctctcgaccgatgactcccatgctcgaggcaactggggccttctcgaccagatggctgcccttaggtgggtgcaggagaatattgccgctttcggtggcgacccaggcaatgttaccctattcgggcagtcagcaggggccatgtctatttctgggctgatgatgagtcccctcgccagtggtctgttccatagggcgatcagtcagagtggcactgcgttgtttagactttttattaccagtaacccattgaaggttgctaaaaaggttgcccacctcgcaggctgcaaccacaattctacgcagatattagtgaactgcctgcgggctctcagtgggactaaagtcatgcgcgtgagcaataagatgagattcttacagctcaactttcaacgggatccggaagagatcatttggagcatgagtcccgtggtggacggagtggtcattcccgatgatcccctcgtgttgctgacacagggcaaggtgtcaagcgtaccctaccttcttggagtcaacaacctcgagttcaattggttgttaccatataatatcacaaaggagcaggtgccccttgtagttgaggaatacctggacaatgtaaatgaacacgactggaagatgctgaggaacaggatgatggacatcgtacaagatgccactttcgtctacgcaacactccagacggcacactaccaccgcggtcttagcatgggtaaggagaaagccctttccctccaaatgatgaaatactgggcaaattttgcgcgaaccggaaacccaaacgacggaaatctgccttgctggccccggtacaataaggatgaaaaatacctgcagcttgattttacaacacgggttggcatgaagctgaaagaaaaaaagatggcattctggatgtcattatatcagtcacaacgaccagagaaacagaggcagttctag

SEQ ID NO: 10029 - DNA, 1062 bp, synthetic construct
  misc_feature 1..1062: note = source = /note="Description of Artificial Sequence: Synthetic coding sequence"
  source 1..1062: mol_type = other DNA
atgagcaaccccacccagaccgacgccgacagcgacctggtgggcgacgtttgcgatacaaatgaagactctgatggagacgggcaccaggacaccaaggacaactgccctcaactgccaaattcaagccagcttgattccgacaatgatggtctgggagacgaatgcgacggagacgacgacaacgacggcatacctgattatgtcccacctgggccagataactgccgactagtacctaacccaaaccaaaaggactcagacggcaatggcgtgggcgacgtgtgcgaagatgacttcgacaatgatgcagttgtcgaccctctcgacgtgtgcccggagagcgcagaggtcaccctgacagactttcgggcctatcagaccgtggtcctcgaccccgagggcgacgcgcagatcgaccccaactgggtagtacttaaccaaggaatggaaatcgtccagaccatgaattcggaccctggactggccgtaggctataccgccttcaacggcgtggattttgagggcaccttccatgtcaacaccgtgaccgacgacgactacgccggctttctgttcagctaccaagattctgggcggttctatgtggtgatgtggaaacaaacagaacagacctactggcaggccacccctttccgcgctgtggcccagcctggcctgcagcttaaggcggtgacgtccgtgagcggaccaggtgagcatctcagaaacgcactgtggcacactgggcatacgccagaccaagtaagactgctgtggacagaccccaggaacgtcggctggcgggataaaacgagctaccgctggcagctgctgcacagaccacaggttggctatattagagtcaaactatatgagggcccccagttggttgctgactctggagtgatcatcgataccagtatgcggggcgggaggctgggtgtcttttgttttagccaggaaaatattatctggagtaatctacagtatcgctgcaacgacacagtgccagaggattttgaacctttcagacgccagctcctgcagggcagggtctag

SEQ ID NO: 10030 - DNA, 1074 bp, synthetic construct
  misc_feature 1..1074: note = source = /note="Description of Artificial Sequence: Synthetic coding sequence"
  source 1..1074: mol_type = other DNA
atggagatcgagcacaccctggaccagatgatcagcaaggtgggcaaccacatcgatgtgcttacaggcaaatgggtcgcacaggacgccgggataggcgccggcgtggacagttactttgagtacctcgtgaaaggggccattctgctccaggataagaagctaatggccatgttcctggaatacaacaaggcgatacgcaactatacacggtttgatgattggtatttgtgggtgcagatgtataaaggtactgtgtcaatgccagtatttcaaagcctggaggcctactggccaggactgcagtcgctgatcggtgacatcgataatgccatgaggacctttctgaattactatactgtctggaagcagttcggcggccttcctgaattttacaacatacctcagggctacacagtagaaaagcgagaagggtatcctctgagaccagagcttatcgaaagtgctatgtatctgtacagggctaccggcgacccaaccctgctggagctgggtcgagacgccgttgagtctatcgagaaaatcagcaaagtggagtgcggcttcgccaccatcaaagacctaagagatcataaacttgataataggatggaatcattcttcctcgccgaaactgtcaagtacctgtacctcctgttcgaccctaccaatttcatccacaacaacggatccacttttgatgcagtgattactccctatggtgaatgtatccttggcgccggcggttatatattcaacacagaggcccatcccatagatccagcggccctccactgctgtcagaggctgaaagaagagcaatgggaggtggaagacttaatgagagagttctactccttaaagcgatctcggtccaagtttcagaaaaacaccgtgtcaagcggaccctgggagccccctgcccgtccgggtaccctcttcagtccggaaaaccatgaccaagccagagaaaggaagccggccaaacagaaagttcctctcctgtcatgcccctctcagccatttacatccaaactcgccttacttggccaagtgttcctggatagtagctag

SEQ ID NO: 10031 - DNA, 1341 bp, synthetic construct
  misc_feature 1..1341: note = source = /note="Description of Artificial Sequence: Synthetic coding sequence"
  source 1..1341: mol_type = other DNA
atgctgcaccccgagaccagccccggccggggccacctgctggccgttcttcttgccctgctggggacagcctgggccgaagtgtggccaccacagctgcaggaacaagcaccgatggcgggggcgctcaaccggaaagagtcttttctgttgctcagcctacacaaccgactccggtcctgggtccaacctccagccgctgatatgaggcggctcgactggtctgacagcctagcgcagctcgcgcaggccagggccgctctctgcggcatccctaccccctccctcgcctctgggctgtggcgcacactgcaggtgggatggaatatgcaacttctgccagccgggctggccagctttgttgaagtcgtttctctgtggttcgcagagggccagcggtattcccacgcagccggtgagtgcgcgagaaacgcaacatgcacgcattatacacagctggtgtgggccacaagctcacaactcggctgtggtcggcatttatgctccgcgggacaggccgccatcgaagcatttgtgtgcgcgtacagccccaggggcaactgggaagtcaacggcaagacaattgtcccatacaagaaaggagcctggtgctcactttgtactgcgtcagtctcgggttgctttaaagcttgggatcacgcgggagggctgtgcgaggtgcccagaaacccctgcagaatgtcttgccagaatcacggacgactgaatatctcaacctgtcactgtcactgtccacctggctacaccggtaggtattgccaggtacgatgtagcctccagtgcgttcatggacgctttagagaggaggaatgcagttgtgtgtgtgacataggctatggtggtgcccagtgtgccacgaaggtgcactttcccttccacacctgcgatcttcgaattgatggcgattgctttatggttagctccgaggcggacacttattaccgagcgaggatgaagtgtcagagaaaaggcggggtcctggcccaaattaaatcccaaaaggttcaggacatactcgccttctatctagggcggctggagacgaccaacgaggtaattgattccgacttcgagacccgcaacttctggattggcctcacttacaagactgccaaagattccttccgatgggcaactggcgaacaccaggcatttacctcctttgcttttggacaacctgataaccatggcttcggcaattgcgttgagttgcaagccagcgcggcatttaattggaacaaccaaaggtgtaagactcgcaaccgctacatctgtcagttcgctcaagaacatatatccaggtgggggcccgggtcttag

SEQ ID NO: 10032 - DNA, 900 bp, synthetic construct
  misc_feature 1..900: note = source = /note="Description of Artificial Sequence: Synthetic coding sequence"
  source 1..900: mol_type = other DNA
atgggcggcccccgggccctgctggccgccctgtgggccctggaggccgctggaacagcggcactgagaatcggagcgttcaatatccaatccttcggcgattctaaagtgtcagaccccgcgtgtggatccatcatagccaagatcctggccgggtacgacctggccctagtgcaagaggttcgcgatcccgatctctccgccgtgtccgccctcatggaacagattaattccgtgtcagagcacgaatactcttttgtgagctcccaaccattaggcagagatcagtacaaggaaatgtatctctttgtgtatagaaaagacgcagtatccgtcgtcgacacatacctttatcctgaccccgaagatgtgttttcccgtgaacctttcgtggtgaaattttcagccccgggaacaggcgagcgtgctccccccctcccatcccggcgagcgctcaccccgccacctcttcccgccgccgcacagaacttggtactcattccactgcacgctgctccacaccaggcagtcgcggaaatcgatgccctttatgatgtttacttagatgtgatcgacaaatgggggaccgatgatatgctctttctcggtgactttaatgctgattgctcttacgtcagggctcaagattgggccgcgatccggctccggtccagtgaggttttcaaatggctcattcctgactccgccgacaccaccgtggggaattcagattgtgcctatgaccgtatcgtggcctgtggcgcccggctccggaggtctctgaaaccacaaagcgccaccgtacacgatttccaggaggaatttggtctggaccagacccaggctctggcgatctctgaccacttccccgtggaagtcaccttaaagttccataggtag

SEQ ID NO: 10033 - DNA, 1458 bp, synthetic construct
  misc_feature 1..1458: note = source = /note="Description of Artificial Sequence: Synthetic coding sequence"
  source 1..1458: mol_type = other DNA
atggacaacaacaagcactgcaagcaggacaactgcctgctgacccccaattcggggcaggaggacgctgacaacgatggtgtgggagaccaatgtgacgacgatgccgacggggacggtatcaaaaacgtagaggataactgccgactgttccccaataaggatcaacagaactctgataccgacagtttcggtgacgcctgcgacaactgtccaaacgtgcctaataacgaccaaaaggacaccgacggtaacggtgagggcgacgcctgtgataatgacgtggatggggacggcatccccaatggcctcgataattgcccaaaggtgccaaacccattgcagaccgaccgggacgaggatggtgtgggagatgcctgtgattcctgtcccgagatgtcaaaccctacacagaccgacgccgacagcgatctcgtaggggacgtgtgcgacactaacgaggacagcgatggcgatgggcatcaggatactaaagacaattgtccacagctgcccaacagtagtcagctggattcggataatgatggccttggtgacgagtgcgacggcgacgatgataatgatggtattccagactatgtccctcctggaccagacaactgccgtctagtccctaaccctaaccagaaagactctgacggaaatggggtgggcgacgtgtgcgaagacgactttgataatgatgccgtggttgatccactggacgtgtgtcctgaaagcgccgaagttacactgaccgatttcagggcctatcagacggttgtactcgacccggagggtgacgcccagatagacccgaattgggtggttctgaatcaggggatggaaatcgtgcaaacaatgaattcagaccctggactggcagtcggctataccgcattcaacggcgtggactttgagggcacgtttcatgttaatactgtaaccgacgatgactatgctggctttctcttcagttaccaagactctggacggttttacgttgttatgtggaaacaaacagaacagacctactggcaggcaactccctttcgggctgtggctcagccaggcctgcagttgaaggcggtaacaagcgtctctgggccaggagaacatctgcgcaatgccctgtggcacactgggcacaccccagatcaggtgcgtctcctgtggaccgatccaaggaacgtgggatggagagacaagacctcctatcggtggcagctattacaccgcccacaagtagggtatatccgtgtcaaattgtatgagggaccacagctggtagccgactctggggtgattattgatacttctatgcggggcggccgccttggagtgttttgtttctcgcaggagaatataatctggagcaatctccagtatagatgcaatgacacagtccctgaagactttgaaccctttagaagacagcttctccagggacgggtctag

SEQ ID NO: 10034 - DNA, 2358 bp, synthetic construct
  misc_feature 1..2358: note = source = /note="Description of Artificial Sequence: Synthetic coding sequence"
  source 1..2358: mol_type = other DNA
atgaagcacaccctggccctgctggcccccctgctgggcctgggccttggcctggccctgagtcaactcgcggccggagccaccgactgcaagttccttggtcccgctgagcacctcactttcacaccagcagccagagcccggtggttagctccgagagtgcgcgcacctggactgcttgactcgttgtacggtaccgtaagaagattcctcagcgttgtgcaactgaacccgttcccctctgagctggtgaaagctttgctgaatgaactggcaagtgtaaaagtaaatgaagtcgtccgttatgaagccgggtacgtagtgtgtgccgtcattgcaggcctttatttacttttagttcccacggctggcctgtgcttctgctgctgccgatgccacagacgatgcggaggtagagtgaaaactgaacacaaggccttggcctgcgaacgggccgcactgatggtatttctactgctgaccacattacttctgctgatcggagtcgtgtgtgccttcgtcacaaaccaacgaacccacgagcagatggggccgagtattgaggcgatgcccgagacactgctgtctttgtggggtctagtgagtgacgtaccacaggagttgcaagctgtcgcacagcagtttagcctgcctcaggaacaagtctcggaggaactcgatggtgtaggtgtgtctattgggtccgctatacacacacagcttcgaagctcagtgtatccacttctcgccgcagtgggcagtctgggtcaagtgctccaggttagcgtccatcatctgcaaactctaaacgccacagtggtggagttacaggctgggcagcaggacttggagccagccattagagagcaccgcgacagattgctcgagttgctccaggaggcaagatgccaaggagactgcgcaggcgccctgagctgggcccggacactcgaacttggggcggattttagtcaggtcccgagcgtcgaccacgtcctgcaccagctgaaaggagtcccggaggctaacttttcgtccatggtgcaggaagaaaattctacgtttaacgcgctcccagcactggctgccatgcagacctccagtgtggtacaggagttgaaaaaggccgtggcgcagcagcccgagggagtgaggactctggcagaggggtttccaggacttgaggctgcctcccggtgggcccaggcactgcaggaggtggaagaatcatctcggccttatctgcaggaggtgcagaggtatgagacctatcggtggattgtcggctgcgtgctgtgttctgttgtgttgtttgtagttctgtgcaacttactgggccttaatttgggcatctgggggctaagcgctagagatgacccctcccatcccgaggcaaaaggcgaggccggagcccgcttcctcatggccggtgtgggcttaagcttcctgtttgctgccccactgatcctgcttgtttttgccacttttctggttggtggcaacgtccagaccctggtctgccagagttgggagaacggggagttgtttgagtttgcagacacgcctgggaatcttccgccttcaatgaatttatcgcagctgttgggtctacgcaaaaatatctctatccatcaggcttaccagcagtgtaaggaaggagcagcgctatggacagtattacagctgaacgatagttatgatcttgaggaacacttggacataaatcagatccagcggcctgttgtcaagacttccatggagcagttggcccaggagctgcaaggcctggcccaggcccaagacaattctgtgctgggacagaggctgcaagaggaggctcaggggctgcgcaatcttcatcaagaaaaagtggtgcctcagcagtccttggtggcgaagttaaatttgtctgtgcgcgccctggagtcttccgcgcctaatttgcagctagaaacgagcgatgtgctggccaacgtcacttacttaaaaggagaactgcctgcttgggccgcccggatccttcgcaacgtgtctgaatgttttcttgcccgcgagatgggatatttctcacaatacgtggcgtgggtcagagaggaggtgactcaaaggattgccacctgccagccattatcgggagctctggacaattctagggtgatcctgtgcgacatgatggctgacccttggaatgccttctggttctgtctagcctggtgcacgttcttcctgatcccttccatcatttttgctgtcaaaacttccaagtacttcaggcctataagaaaaagactttcatcaacctcgagcgaggagacacagctgtttcacattcctagggtgactagcttgaaactgtag

SEQ ID NO: 10035 - DNA, 792 bp, synthetic construct
  misc_feature 1..792: note = source = /note="Description of Artificial Sequence: Synthetic coding sequence"
  source 1..792: mol_type = other DNA
atgggccgggtgctggaggaggcccggttcgccgtggccttcaccgagtccatgaaagagatggcacaggcccaatggaaggccaggcagataagcctggctgtcacatcggcagtccccgtgcagccccacgccaaaggcaaggtatacgttcagagccaaggcatagcgacaacccccaacgccgcctttaactggaacacgttcctgcagcgctccgaaataaatcagtccgccgataatttgcacatctttctcctgatttgcggcctgaggcaggtcaaagatccattatacctcgtagacgccttctctgcctggcatcaggaggaaccgaatgttcatctggtaatcgttgggccagaggtggatccagtatttacgcgtgaggtcaaggccaaagtgaagcgtgcggcgggagttcgtttaattggcgaaatgccacaggaagacctgcatgctgtggtgaagaattgttttgcggtggttaattcttcagtgtccgagggcatgagcgctgctatcctggaggcaatggatctcgaggtgccggttctcgccaggaacatccccggcaacgccgctgttgtcaaacatgaagtgactggcctgcttttctcgaatccccaagagttcgttcatctggctaaaagactggtctctgatccagctctggaaaaggaaatcgtggtgaatggacgcgaatatgtgcggatgtaccactcgtggcaagtggaaagggatacttatcagcagctcatccgtaagctcgagggcagcacggaagattag

SEQ ID NO: 10036 - DNA, 456 bp, synthetic construct
  misc_feature 1..456: note = source = /note="Description of Artificial Sequence: Synthetic coding sequence"
  source 1..456: mol_type = other DNA
atgaagaccgccgtgatgaaggagctgtacagcttcctgcaccaccaaaatagatatggcagcgagcaagaatttgtggatgatctaaaaaatatgtggttcggcttatattctagaggcaacgaggaaggtgatagctcaggatttgagcatgtcttttccggtgaagtgaaaaaaggtaaagtgacagggttccacaattggatcagattttatcttgaagaaaaagaagggctggttgattattattcacacatctacgacgggcccgtccctgtgaagcccggcagaatatcactaagctgtcccgacatctatttaggtcaggtgcatctttgggaatggcaggaagtccaccggcactccctgcactccgtgttccacctgatcgaattgagggcccgcaagggacacgagggatcgtgtgagacggaagtgctgtcgagccttgactag

SEQ ID NO: 10037 - DNA, 363 bp, synthetic construct
  misc_feature 1..363: note = source = /note="Description of Artificial Sequence: Synthetic coding sequence"
  source 1..363: mol_type = other DNA
atgctgccccagtggctgctgctgctgttcctgctgttcttcttcctctttctattaacaagaggctccctgtcacccacgaagtataatctccttgaactcaaggagtcttgcatccgcaaccaggattgcgaaacgggctgctgccaaagagcccccgacaactgtgagagtcattgtgccgaaaagggctctgaagggtccctgtgccagactcaggtgtttttcggtcaataccgcgcgtgcccttgtttgcggaatctgacatgcatctacagcaaaaatgagaagtggctgagcatcgcttacggccgctgccagaagataggcagacagaaactagccaaaaagatgtttttctag

SEQ ID NO: 10038 - DNA, 951 bp, synthetic construct
  misc_feature 1..951: note = source = /note="Description of Artificial Sequence: Synthetic coding sequence"
  source 1..951: mol_type = other DNA
atggccgaggccgccctggaggccgtgcggagcgagctgcgggagttcccagcagccgctagggaactctgtgtacctttggcagttccctacttagacaaacctccaacacctctgcatttctaccgggattgggtctgcccaaatagaccatgtattattcggaatgcactgcagcattggcccgcactccaaaaatggtcattaccctactttcgagccacagtgggctctacagaggtgagtgtggctgtgacaccagacggttacgctgacgctgtcagaggcgatcggttcatgatgcccgcagaacggcgcctgcccctcagcttcgtccttgacgttctggaaggtcgggcccaacaccccggggtgttgtacgtccagaaacagtgtagcaatctcccttcagagctccctcagctgttacctgatctggagtcccacgtgccatgggcgtcagaggctctcgggaagatgcctgacgcagttaacttttggctgggcgaagctgcggcagtgaccagtttgcacaaggaccattatgagaatctctattgcgtcgtatctggagaaaaacatttcctctttcaccctccatccgacagaccatttatcccttatgagctgtacactcctgctacgtaccagctgacggaagaggggacatttaaagtcgtggacgaggaagctatggagaaggtcccatggatcccactggaccccctcgcccctgacctcgccaggtacccctcctattcccaggcgcaggctctacgttgcaccgtgcgggccggagagatgctgtacctccctgccctctggtttcatcatgtgcagcagtcccagggctgcattgctgtgaacttctggtatgatatggagtacgacctgaagtactcctactttcagttgttggatagcctgactaaggcatccgggctggactag

SEQ ID NO: 10039 - DNA, 657 bp, synthetic construct
  misc_feature 1..657: note = source = /note="Description of Artificial Sequence: Synthetic coding sequence"
  source 1..657: mol_type = other DNA
atgggccgggtgttcctgaccggcgagaaggccaacagcatcctgaagcgttacccgagggccaatggcttcttcgaagaaatacgtcaggggaacattgaacgcgaatgtaaggaggaattttgtacctttgaggaggctcgggaggcgtttgagaacaatgaaaagactaaggaattttggagtacctatactaaggcccagcaaggcgagagcaacagaggctccgactggttccagttctatctgaccttccccctgatcttcggcctgttcataatcctactggttatcttcttaatctggaggtgttttctcagaaataaaacaaggagacagacggtgactgaggggcatattccatttccccaacatctcaacataatcacaccaccccccccaccagatgaagtgtttgatagcagcggcctttcccccgggtttctgggctatgtggtgggtagatcagactccgtctctacacgactttccaactgcgaccctcctccaacttacgaagaagctacaggccaggtgaacttgcagaggtccgagactgagccacacctcgatccaccacctgaatatgaagacatagtgaactcgaattctgcatcggctattccaatggttccagtggtgacaaccattaaatag

SEQ ID NO: 10040 - DNA, 909 bp, synthetic construct
  misc_feature 1..909: note = source = /note="Description of Artificial Sequence: Synthetic coding sequence"
  source 1..909: mol_type = other DNA
atggccatgttcctggagtacaacaaggccatccggaactacaccaggttcgacgactggtatctgtgggtccagatgtataaaggaacagtcagcatgccggtgtttcagagcttggaggcctactggccaggcctgcagtctctgataggcgacatagacaacgcgatgaggaccttcctcaactactacactgtgtggaagcaatttgggggtctccctgagttctacaacattccacagggttataccgttgagaagcgagagggttacccattacgaccggagttgatcgaaagcgcaatgtacctttatcgcgctaccggagatccaacgctgcttgagctgggacgcgatgctgtagaaagcattgaaaaaatcagcaaagtagagtgcggatttgctaccatcaaggatttgagggatcacaaacttgataaccgtatggaatcctttttccttgctgaaactgttaagtacctatacttattattcgatccaacaaacttcattcataacaatggatcaacgtttgatgcagtgatcacgccctacggcgagtgcatcctgggggccggcggctatatatttaataccgaggctcatccaattgaccccgccgctttacattgctgccagcgactgaaggaagaacagtgggaagtcgaggacttaatgcgtgagttttattctctgaagaggtcacggtctaagttccagaaaaatacagtctccagcggcccctgggaaccccccgctcgccccgggacactgttctctccagagaaccacgatcaggcacgcgaacggaaaccagctaaacagaaagtgcccctcctcagttgtccgtctcaaccatttacctccaaacttgcactgctgggccaagtcttccttgactctagctag

SEQ ID NO: 10041 - DNA, 459 bp, synthetic construct
  misc_feature 1..459: note = source = /note="Description of Artificial Sequence: Synthetic coding sequence"
  source 1..459: mol_type = other DNA
atgctggtggacggccccagcgagcggcccgccctgtgcttcctgcttctggccgtggcaatgtcattctttgggagcgccttgagcatcgatgagacgagagctcatttattgcttaaggagaaaatgatgagactcggagggcggttggttcttaacactaaagaggagttagccaacgaacgccttatgacactgaagatcgcggagatgaaagaagcaatgcggactctgattttcccaccaagtatgcacttttttcaggccaaacatttgatcgaacgcagtcaggtctttaatatcctgagaatgatgcccaaaggcgcagccctgcatttacatgatatcggaatcgttactatggactggctggtcagaaacgtgacctatcggcctcactgtcatatttgctttacacctcgcggaattatgcagtttcgtttcgcccaccctacctag

SEQ ID NO: 10042 - DNA, 3951 bp, synthetic construct
  misc_feature 1..3951: note = source = /note="Description of Artificial Sequence: Synthetic coding sequence"
  source 1..3951: mol_type = other DNA
atggagccccggctgttctgctggaccaccctgttcctgctggccgggtggtgtctgcccggccttccatgccctagcaggtgtctgtgcttcaagtctactgtgagatgcatgcaccttatgctcgaccacattccacaggtcccacagcagaccactgttctggatctgaggttcaacaggatccgagaaattcctggatccgcctttaagaaactcaaaaacctgaatactttgctcctgaataacaaccatattcgaaagatttcccgcaatgcgtttgaaggtctagagaatctcctatacttgtatctgtataagaacgagatccacgcactggacaaacagacattcaagggcctcattagtctggaacacctttacatccacttcaaccaattagaaatgcttcagcctgagactttcggggatctactgcgactagagaggcttttcctccacaacaataagctaagcaaaattccagccggatccttcagtaaccttgactccctgaagcgactccggttggactcaaacgcattagtctgtgactgcgacctgatgtggctaggggaactactgcaagggtttgctcaacatgggcatacccaggccgcagccacttgtgagtatcctaggcgactacacgggcgtgccgtggcatctgtgactgtcgaggaattcaactgtcagtcaccccgcatcacttttgagccccaggacgtggaagtgcctagcggtaatactgtttacttcacttgtcgggcggagggcaacccgaagcctgaaatcatttggattcataacaaccactcgctggatctggaggacgatactcgccttaatgtctttgacgatggcaccttgatgatccgcaatacacgggaatccgatcagggagtctaccaatgtatggcacgcaactccgccggggaggctaaaactcagtctgcgatgttgaggtactcatccttgccagctaaaccctctttcgtgatccagccccaggataccgaggtactgataggaaccagcactactcttgaatgcatggccactggtcatccccaccccctcattacctggacccgcgataatgggctggaactggacggcagtcggcacgtggcgacgagcagtggactgtatcttcagaacatcacccagagggatcacggcagatttacctgtcacgccaataatagccatgggacagtccaggctgcagcaaacattatagtccaagcgcctccccagttcactgtgaccccaaaggaccaggtcgtgttggaggaacacgccgtcgaatggttgtgcgaggctgatggcaaccctccaccagtcattgtctggaccaagacgggaggacagttgcccgtcgaagggcagcacactgtgttgtcaagcggtacgctccgcattgacagagcggcccagcacgaccagggccagtacgaatgccaggctgtgtcctccctgggagtgaaaaaggtgagtgtgcaactgaccgtcaaacccaaagcactcgccgtgttcacacaattacctcaggacacttcggtggaggtaggaaaaaatatcaatatatcttgtcacgctcaaggcgaaccgcagccaatcatcacgtggaataaagagggggtacagataacggagtcggggaaattccacgtagacgacgagggtactctcacaatttacgatgcagggtttccggatcaggggcgctatgagtgcgtcgcgcgcaatagcttcgggttggccgtcacaaatatgtttctgacggtgaccgccattcaaggacgccaggcaggcgacgactttgtggaaagtagcatactggacgctgttcagagagtggacagcgccataaattctacacgacgacacctcttcagtcagaaaccccacacgtctagtgacctcttagcccaattccattacccacgcgatcctctgatcgtggagatggcccgcgctggcgagatcttcgaacatactctgcagctgattcgagagcgagtgaaacagggcttaaccgtagatctggaaggtaaggagttcagatacaatgatttagtgtcccctcggtccctgagcctgattgcaaatttgtcaggctgtaccgcaaggagacctctacccaattgtagtaatcggtgcttccacgcgaagtacagagcccacgacggtacatgcaataacctccagcagccaacgtggggcgctgcactgaccgcctttgctcgcctgttgcaacccgcctacagagatggtattcgagccccacgtggcctcggactacccgtcggttcccgacagcccctcccgcctccacgcctcgtggcaaccgtatgggccagggcggctgctgtcacccctgatcattcgtacactagaatgctgatgcactggggatggttcttagaacatgacctggatcacacggtcccagctctgtccacggctcggttttccgacggcaggccatgctctagcgtttgtaccaatgatcccccttgctttcccatgaacaccaggcacgcggatcctagaggaacacacgctccttgtatgctgttcgcgaggtcttctccagcatgtgcttccggccggccctcagctactgtcgactctgtgtacgcccgtgagcagataaatcaacagacggcttacattgatggtagtaacgtttatgggtcgtccgagagagagagccaagctctgagagaccccagcgtcccccgggggctgcttaaaacaggatttccatggccacctagcggcaagcctctgctcccctttagcacaggaccccccaccgagtgcgctaggcaggagcaggagtcaccctgcttccttgctggcgatcacagagccaacgaacacttagcactcgcggctatgcataccctctggttccgtgagcacaaccgcatggctacagaactctctgccctgaaccctcattgggaaggcaacacggtatatcaggaggcacgaaagattgtgggcgccgaattgcaacacatcacctacagccactggttgcctaaggttttaggagatcccggcaccagaatgcttagaggctatcgaggatataatcctaatgtcaatgccgggattatcaactccttcgctacagccgcatttcgctttggtcatactttgattaatcccattttgtacaggctgaacgcgacccttggagaaatttctgagggacacctccccttccacaaagccctttttagtccttctaggatcatcaaagagggcggcatcgatcccgttcttcgtggactgtttggggtggctgctaaatggcgcgccccaagctatctgctgtctcccgagctgacacaacggctctttagcgctgcgtacagcgccgccgtagacagcgcggctacaatcattcagaggggtcgggaccacggtattcccccatacgtagacttccgggttttttgtaatttaactagcgtgaagaatttcgaggatctccagaatgagattaaggatagtgaaatccggcagaagctgaggaagctctatgggagtcccggcgacatcgacctttggcctgctttgatggtggaagatctcattcctggcacaagggttgggcccacgctaatgtgcctcttcgtgacccagttccagaggctgagagacggtgatcggttctggtacgaaaaccctggagtgttcacaccggcacagttgacacagttaaaacaggcttcacttagcagagtgctgtgcgacaatggcgattccatccagcaggttcaggccgatgtatttgttaaggcagagtacccccaggactacctgaactgcagcgagatcccgaaggtggatttaagagtgtggcaggattgctgcgccgacaagcaggctgggggcactccggaggctgggagggtttaccgctgctag

SEQ ID NO: 10043 - DNA, 891 bp, synthetic construct
  misc_feature 1..891: note = source = /note="Description of Artificial Sequence: Synthetic coding sequence"
  source 1..891: mol_type = other DNA
atggaccccagcaagatcgcccacaccgagtaccccgtgaacaccattatcatccatgaggacttcgacaataatagcatgagcaataatattgccctgcttaaaaccgatactgcgatgcactttggcaacctcgtgcaatcaatctgtttcctgggccggatgctgcataccccccccgtgcttcagaactgctgggtgagcggctggaatccgacatccgctactggcaaccacatgaccatgtctgtgctgcgtaagatctttgtgaaagacctagatatgtgtcccttatacaagttacagaaaaccgaatgcggatcccatacaaaggaggaaacaaagaccgcgtgtctgggcgatcctggctctccaatgatgtgtcagctgcagcagttcgacctgtgggttttgagaggagtcctcaactttggtggcgagacatgcccaggcttattcctgtacacgaaggtggaagactacagcaagtggataacaagcaaagcagagcgcgccggcccaccactctcctccctgcaccactgggaaaagctcatcagtttcagccatcacggacctaatgcgactatgacccagaagacatactctgacagtgaattgggtcacgtgggatcctatctgcagggtcagcgccggaccatcacccattcaaggctgggcaattcatcgagagactcactggacgtgagggagaaagatgtgaaggaatccggacgatcacccgaagcatccgtgcaaccattatactacgattactatggcggagaagtgggagagggaagaatttttgccgggcagaatcgactttaccagcctgaagagataatcctcgtatcgtttgttctggtctttttctgtagctcaatttag

SEQ ID NO: 10044 - DNA, 2808 bp, synthetic construct
  misc_feature 1..2808: note = source = /note="Description of Artificial Sequence: Synthetic coding sequence"
  source 1..2808: mol_type = other DNA
atgcggaagccccggcggaagagccggcagaacgccgagggccggcggtctccatccccttactctctgaaatgttccccaacacgagaaaccctcacttatgctcaggcccagagaatagtggaggtagacatagacgggcgattacatagaataagtatttacgatcctctaaaaattattactgaagatgagctgaccgctcaggacatcacagaatgcaacagcaacaaggagaattctgagcaaccacagtttcccggcaagagcaaaaagccatcctccaagggtaagaagaaggagtcttgcagcaagcatgcttccggtacaagctttcacttaccccaaccttcattccggatggtggattctggaatccagccagaggctcctccactgcctgcagcgtattacaggtacattgagaagcctccagaggatcttgacgctgaggtcgaatatgacatggatgaagaggatcttgcctggctggatatggttaatgagaaaaggcgcgtcgatggccactctttagtgtctgccgatacctttgagctactcgttgatcgcttggaaaaggagagttacttggagtctcgctcctcaggggctcagcagtcccttattgatgaggatgcgttttgctgcgtgtgtcttgatgacgaatgccacaattcaaacgtaatcctcttctgcgacatttgcaaccttgcagtgcatcaagaatgttacggggtgccatatatcccagagggccagtggttatgtaggtgctgtctgcagtcaccttcccgtccagtcgattgtatcctgtgtccgaataaggggggcgcatttaagcagacaagcgacggacactgggctcacgtcgtgtgcgccatctggatccccgaggtttgcttcgcaaacactgttttcttggagcctattgagggaattgataatataccccccgctaggtggaagctcacttgctatatatgtaagcagaagggtctgggcgctgccatccagtgtcataaagtgaattgttatacagcctttcacgtcacatgtgcccagcgggccggcttgtttatgaaaatcgaacctatgcgggaaacctccctcaatggcacaatttttacagtgcgtaagacagcatattgcgaggcgcactccccccccggagccgccactgcccgccgcaaaggcgattcgccccgatctatctccgaaacaggcgatgaggagggcctaaaagagggcgacggggaagaagaggaggaggaggaagtggaagaagaagagcaggaggcccagggaggagtgtctggttccctgaaaggtgtgcccaagaagagcaaaatgagtttgaagcagaagatcaagaaagaaccagaagaagccggacaggataccccttccacactgcccatgctggccgtccctcaaatcccctcatatagactgaataagatctgtagcgggctctcattccagagaaagaatcagttcatgcaacgcctccataactattggctcctcaagaggcaagctaggaacggtgtgcccctgatccgtagattacactcccacttgcagtctcaaagaaacgccgaacaaagagaacaagacgagaaaacctcggccgtgaaggaagagttgaaatactggcagaagctccgtcatgatttggaacgggccagattacttattgagctgatcagaaagagggaaaaactgaagcgcgaacaggttaaagttcagcaagccgcaatggaactggaattaatgccatttaatgtgctgttacgcactacactggatctgttacaagagaaagaccctgcgcatatatttgctgagcctgtcaacctgtcagaagtgcctgactacttggagtttatctcaaagccgatggacttttcgaccatgcggcgcaaactggagagccacctgtaccgtacgcttgaagagtttgaggaggattttaatctgattgtaactaactgcatgaaatacaacgccaaggatactatttttcatagggcggccgtcagattgcgggatttaggcggcgcaattctgcgacacgctcgcagacaggcggagaacataggatatgaccctgaacggggcacacaccttcctgagtccccgaagttagaagacttctaccggttcagttgggaagatgggatgactaacggctttggcaagcatacagaaagtggatcggacagtgagtgctcacttggtttgagcggcggtctggcttttgaggcttgctcaggcctgactccccctaagaggagccggggaaaacctgccctctccagagtgcctttcctcgagggcgttaacggcgacagtgattacaatggctcagggcggtcactgctgctcccctttgaggataggggagacctggagcccctggagctggtgtgggctaaatgcagaggatacccctcctacccagccctgatcatagatcccaaaatgccgcgcgaagggctgctgcataacggcgtaccaatccccgtgcccccacttgatgtcctgaaattgggcgaacagaagcaagctgaggctggcgagaaactgtttctggttctgttcttcgataataagcgcacatggcagtggctgccccgtgataaagtgttgcctctgggggttgaggacaccgtggataaactgaaaatgctcgaaggccgaaagacatctattagaaaatccgtgcaggtcgcttacgatagagcaatgatacatttgagccgggtccgcggtcctcactccttcgttacatctagttatctgtag

SEQ ID NO: 10045 - DNA, 270 bp, synthetic construct
  misc_feature 1..270: note = source = /note="Description of Artificial Sequence: Synthetic coding sequence"
  source 1..270: mol_type = other DNA
atgaagaccggcctgttcttcctgtgcctgctgggcaccgccgccgctataccaacaaacgctcgcttactgagcgatcacagcaagccaaccgccgagacagtggccccagacaatactgcaatccctagcctccgcgcagaagccgaggagaatgaaaaagagactgccgtcagcaccgaggacgacagtcaccataaggccgagaaatccagtgtacttaagtccaaagaagagtcccacgaacagagtgctgagcagggaaagtag

SEQ ID NO: 10046 - DNA, 657 bp, synthetic construct
  misc_feature 1..657: note = source = /note="Description of Artificial Sequence: Synthetic coding sequence"
  source 1..657: mol_type = other DNA
atgggccgggtgttcctgaccggcgagaaggccaacagcatcctgaaacggtacccccgcgccaacggctttttcgaggaaattcgccagggtaacatcgaacgagagtgtaaggaggaattctgtacgtttgaggaggctagagaagcctttgagaacaatgagaagaccaaggaattctggtcaacctatactaaagctcaacagggggagagcaatcgtggaagcgattggttccagttctacctcacattccctctaattttcggcctcttcattatcctcctggtgatcttcctaatctggcgttgcttcctgcgcaacaaaactcgcaggcagactgttaccgagggccacatcccatttccccagcacctgaacatcataacccccccgcccccccccgatgaggtgttcgactcttccgggctctctcctggtttcctgggatatgtcgtggggcggagcgacagcgtctctactaggctctcaaactgcgacccccctcctacatacgaggaagccaccggacaggtgaatctgcagcgaagtgaaaccgaacctcacctggacccaccacccgagtatgaagacattgtgaacagtaatagcgcttcagctatacctatggtgccggtcgtcacaaccattaaatag

SEQ ID NO: 10047 - DNA, 540 bp, synthetic construct
  misc_feature 1..540: note = source = /note="Description of Artificial Sequence: Synthetic coding sequence"
  source 1..540: mol_type = other DNA
atgagcctgggccccgaggtgttcctgggcccccccgaggcccagagcttcctgtcatcccacactcgaatcccaagggcaaatcattgggaccttgaactcctcacccctggcaacctcgagcgagagtgtctcgaggaaaggtgttcatgggaagaggccagggaatatttcgaggataataccttgaccgagagattctgggagtcttacatatacaatggcaaaggggggagagggcgcgtcgatgtggcctctttagcagtggggctgacaggcggaatcctcctgatcgtgctggccggactcggagccttctggtatttaaggtggcgccagcataggggtcagcagccatgtccccaggaagccggactgatttctcctctgtccccgctgaacccgttaggacctccgaccccactgccaccaccccccccccccccccccggcttacccacatatgagcaggctctggccgcgtccggggtccacgatgccccacccccaccatacacatcccttaggcggccccactag

SEQ ID NO: 10048 - DNA, 765 bp, synthetic construct
  misc_feature 1..765: note = source = /note="Description of Artificial Sequence: Synthetic coding sequence"
  source 1..765: mol_type = other DNA
atgaccctggaggacatcgtgcagcgggaggtgtggggcaccgtggtggcgcgtggagcccccgcaccccctggtccggtgcctactcgcggggcggcttcaagaagactgtccgtgtcccccgcttctacctcagagacgtccctctaccaggtccttttaggggcaaggcaattagtgcagccaggccctcacgcaatgtacgcaagagtgagacaggtagagagtaacccgctgtatcagggtactgcctcttctgcggatgtggctttggtcgagcttgaggcgcccgtacccttcactaactatatattaccggtctgtctacctgacccatctgttatttttgaaaccgggatgaactgctgggtgacaggctggggtagcccgtcagaggaggacctccttcccgaaccccgaatcctgcagaaacttgccgtcccgatcatcgacacgccaaaatgcaacttattatattcgaaggacaccgaattcgggtatcagcccaaaacaatcaagaacgacatgctgtgtgcaggctttgaagaaggaaagaaagatgcgtgtaagggtgatagtggggggccgctggtgtgccttgtgggacagtcctggctgcaggcaggggtgatcagctggggggaaggctgcgcccgacagaacaggccgggcgtgtatatccgcgtcacagcccaccacaattggatacatagaatcattcctaaactgcaatttcaacctgcccgtctgggtggccaaaaatag

SEQ ID NO: 10049 - DNA, 1899 bp, synthetic construct
  misc_feature 1..1899: note = source = /note="Description of Artificial Sequence: Synthetic coding sequence"
  source 1..1899: mol_type = other DNA
atgaccccccccgtgctgaccaccgccgagaccagcgtgaagccctcagtcagtgctttcactcacagtccccctgagaatacaactggaatcagcagcactatttcctttcactccagaacactgaacctgactgacgtaatagaggagctggcacaggcttcaacccagaccttaaagtctacaatcgcctccgaaactaccctttctagtaaaagtcaccagagcactacaacccgaaaagcgataatccggcattcaaccatccccccgttcctgagctcctccgctaccctgatgcctgtccccatatctccgcccttcacacagagagcagtgaccgacaacgtggcaaccccaattagcgggctgatgacaaacacagtggtgaagctacacgagagctcccgccacaacgctaagcctcaacaattggtggccgaagtggccacctctcccaaggtgcaccctaatgctaagttcaccattgggacgacccattttatttactctaacttgctacattcaacccctatgcccgcactaacaacagtcaagtcgcagaattctaagcttaccccatcaccttgggcagaaaaccagttctggcacaagccctattctgagatcgccgaaaaaggcaaaaaaccggaggtgtccatgttggctacgaccgggctgtccgaagcaaccaccctggtgagcgactgggacggccaaaagaacactaagaaatccgattttgacaaaaagcccgtccaggaggctacaacctccaaactccttccattcgactccctctcaagatacatctttgagaagccgaggatcgttgggggtaaggcagccagctttacaatacccgctaactctgatgcatttctcccatgcgaagctgtgggcaaccccctgccgaccatccattggacacgggtcccatctggactggatttatctaaacggaaacagaattcacgcgtccaagttttacctaacgggactttgtctattcagagggttgagattcaagatcgtggtcagtatctgtgcagtgcaagcaatctattcgggacagaccatcttcacgtgaccctctctgttgtgagttacccccctcgcatcctagaaaggcgtaccaaggaaatcaccgtgcatagcggttcaactgttgaacttaagtgcagggcggaggggcgacccagcccaacggttacctggattctggctaaccagacagtggtctctgaaagtagtcagggatctcggcaggcggtggtaacagtggatgggacgctggtgctacacaatttatcgatatatgacagagggttctataagtgcgtggccagcaatcccgggggacaggattcgctcttggtcaagatccaggtgatagcggccccaccagtcatcctggaacagaggcggcaggtcatcgttggaacatggggagagagccttaaactgccatgcaccgcaaaagggaccccccagccctcggtgtactgggtgctaagcgatggaactgaagttaaacccttacagttcacaaactcaaagctgttcctgtttagcaatggtaccttgtacatcagaaacctcgcctctagcgacagagggacctacgagtgcatcgccacctcgagtacaggctctgagagaagagtggtcatgctgactatggaggagcgggtcacttcacccaggatcgaagcagccagtcaaaaaagaactgaagtgaactttggggataagcttctgctgaactgtagcgctaccggcgaacctaaaccacagataatgtggaggctgccctctaaggccgtcgtcgatcagcagcaccgggttgctgcgggctcgaccagtaccctgatggatccctgtctgctggaccagtag

SEQ ID NO: 10050 - DNA, 681 bp, synthetic construct
  misc_feature 1..681: note = source = /note="Description of Artificial Sequence: Synthetic coding sequence"
  source 1..681: mol_type = other DNA
atggacatcatcgtgctgctgcccaagggccactgcaccaagatccaagagcttcagatgactacagtcctcaaacagaacgtgcatgttttcggggtggaaggcaatagtgacgaactagacgaacccatcaagaccgtctttgcggatgtggcgttcgtgaaaaaacacaacttgatgagcttgaacagtattaattggtcaagggtcctggttcagatggctcatcattttttcgcttacttccagtgtaccccatcgcttgatactcaccccttgccactcgtggaggttgtggtccctactggcgctgccggcaatcttgcagcggggtatatcgcccagaaaataggccttccaattcgtctcgtggtggccgttaataggaatgatataattcaccgcactgtacaacagggggatttttctttgtccgaagctgtcaagtccacccttgcatccgctatggacattcaggttccgtacaatatggagagggtgttttggctgctgagcggctctgatagccaggtgactcgcgctttgatggaacagtttgaacgcacgcagagcgtgaacttacctaaggagctgcacagtaagcacagccctgtgttgccgaggccttgcctgtgctcccaagttcctgggagctgccccggctgctggcctgatccctag

SEQ ID NO: 10051 - DNA, 729 bp, synthetic construct
  misc_feature 1..729: note = source = /note="Description of Artificial Sequence: Synthetic coding sequence"
  source 1..729: mol_type = other DNA
atgttccagaccggcggcctgatcgtgttctacggcctgctggcccagacccttccactcaatgtgaatcccgcactacccttgagtccaaccggactggccggtagtctgacgaacgcgctcagtaacggacttttatctggcggcctcctgggtatcctggagaacttgccacttctggatatcctgaagccaggaggcggcaccagcggagggctgctcggcgggttgctgggcaaggttacgtccgttattcctggactgaacaacatcattgacattaaagtgactgatcctcaattgcttgagctcggtctcgtccagtcaccagacgggcataggctgtatgtcacaatcccacttggaattaaattgcaagttaacactccgctggtgggggcttctttactgaggctcgcggtgaagctcgatataacggctgaaatcctggcggtcagggataaacaggagcggattcatctggttctgggggactgcacgcactcccctggctccctccagatctcactgctcgacgggctggggcccctgccaatccaaggactcctggacagcttgaccggtatccttaacaaagtgctcccagagctggtgcagggtaacgtgtgcccactggtaaatgaggttctgagaggtttagatatcactctcgttcatgatatcgtgaatatgttgatccacggcctccaattcgtcattaaggtctag

SEQ ID NO: 10052 - DNA, 1422 bp, synthetic construct
  misc_feature 1..1422: note = source = /note="Description of Artificial Sequence: Synthetic coding sequence"
  source 1..1422: mol_type = other DNA
atgagcctggaggccagcctgtgcagcctggaggagtgcgccgcctttcagccttcttccccatcgccactgcaaccacaaggtcccgttaagtctaacaatatagtcacagtgacagggatatctctctgtctgttcattattatcgcaaccgttctcatcactctgtggaggcggttcggtcggccagcaaaatgtagtacaccagcgcgccataactctattcactctccctcatttagaaagaactcagacgaagaaaacatctgcgaattgtccgaacaaaggggctcctttagtgacggaggggatggacccactggtagccccggggataccggtattcccctgacatacaggcgatctggacctgtgcctcccgaagatgatgctagcggttcagagtctttccagagtaatgcacaaaaaatcatccccccattgtttagttatagactggctcagcaacaactcaaggagatgaagaagaagggcctcactgagactacgaaagtttaccacgtgtctcagtctccactgaccgatacagcaattgatgccgcacccagcgcaccactggacctcgaatccccagaggaagcggctgccaataagtttcgcattaaaagcccctttcctgaacagcctgctgtttcggccggggaacgtccaccatccagattggacttgaacgtcactcaggccagctgtgcgatctcaccatcacaaaccctcattcggaagtctcaggcgaggcatgtcggctctagagggggtccatctgaaagaagccacgctcggaatgcacatttcaggaggactgcttcattccatgaagccagacaagcacgccccttcagggagcggtctatgtccactctgaccccgcggcaagctcccgcctatagctcccgtacaagaacctgtgaacaggcagaagatcgcttcagaccccaaagtcgtggtgcccatttatttcctgagaagttggaacattttcaggaagcaagcggtaccagaggcccattaaaccctcttccaaaatcgtataccttgggtcagcccttgcgcaagcctgacctgggtgaccatcaagccggcctcgtggcggggattgagagaaccgaacctcatagggctcgtcgcggaccaagtccttcacacaaaagcgtgtctagaaagcaaagttcgccaatctccccaaaagataattatcagcgcgtaagctccctctctccctcgcaatgtcgcaaggacaagtgtcaaagctttcccactcatccagagttcgccttttacgataacaccagtttcggcctaactgaggccgaacaacgcatgctggatttaccaggctatttcggctccaacgaagaggacgaaaccacttctacactgtctgttgaaaagctcgtgatttag

SEQ ID NO: 10053 - DNA, 2310 bp, synthetic construct
  misc_feature 1..2310: note = source = /note="Description of Artificial Sequence: Synthetic coding sequence"
  source 1..2310: mol_type = other DNA
atgctgagcaagaagggcatcttcccctggatcctgacctgcatcagtgaggaaatggcattccggaccatatgtgttctagttggtgtgtttatttgctcaatatgcgtaaagggcagttcacagcctcaggcacgggtgtatcttacctttgatgagcttagggagactaaaacatccgaatacttctccctgtctcaccatccattggattatcggatcctgctgatggacgaggaccaggatcgtatctatgtagggtcaaaggaccacatcctgtccctaaacattaacaacattagccaggaagccctttctgtgttctggccagcatccacgatcaaagtcgaggaatgtaagatggcagggaaagaccctacacatggttgtgggaatttcgtgcgcgtgattcagacctttaaccggacacatttgtatgtctgtggtagcggagccttttcccctgtatgcacgtaccttaacagaggtcgacggtctgaggaccaagtctttatgatagacagcaaatgcgaaagcggcaagggcaggtgttcttttaatcccaacgttaatacagtgtctgtcatgattaacgaggagcttttcagtggcatgtatatcgactttatggggacagacgcagccatattccgtagcctgactaagcgcaatgctgtaaggaccgaccagcacaattctaaatggctgagcgagcctatgtttgtggacgcgcatgttatccctgatggaacggaccctaatgatgctaaagtctactttttctttaaggaaaagctgaccgataacaaccgtagcaccaagcaaatccactcaatgattgcccgaatttgtccaaatgacacgggcgggcttcgcagtctggtaaataagtggaccaccttcctaaaggctcgcctcgtgtgcagcgtaactgacgaggacggccccgagactcactttgacgaactcgaggacgtgttcctgctggaaaccgacaacccccgcacgacgctggtgtatggcatctttaccacctcgagctccgtgtttaagggctcggcggtgtgcgtgtatcacctaagtgacattcaaacagtgttcaatggacccttcgcacacaaggaggggcctaaccatcagctcataagctatcaaggccgaattccttacccgaggccaggaacctgtccaggcggtgcctttacaccaaatatgcggactactaaagaattccctgacgatgtggtgacattcattagaaatcatcctttgatgtacaatagtatttatcctatccacaaacgacccctgatcgtacgcatcgggactgactataaatatacaaaaatcgcagtggatcgggtcaatgctgcggacggtagatatcatgtgcttttcctggggacagatagagggacagttcagaaggtcgttgtgctcccgaccaacaactccgtgtctggcgagttaattcttgaagaactggaggttttcaagaaccacgcaccaatcactactatgaaaatcagctccaaaaagcaacagctctacgtgagctcaaacgagggcgttagccaggtgtcactccacagatgccacatttacgggaccgcctgtgcagattgttgtctagctagagacccatattgtgcatgggacgggcacagctgtagccggttttatcccactggcaaacgccggtcccgtaggcaggacgtccgccacggaaatccactcacccagtgccgcggatttaatttgaaggcctatcggaacgcagctgagatcgtacagtacggggttaagaataacacaacctttctcgaatgcgcccctaaaagcccgcaggcctctattaaatggctcctccagaaggataaggacaggaggaaggaagtcaaattaaacgaacgaatcattgccacctcccagggcctgctgatccgttcagtccaggggagcgatcaggggctgtaccattgcattgccactgagaattccttcaaacaaacaatagctaaaatcaactttaaggtgctggatagcgagatggtagctgtagtaacagataagtggtcaccatggacctgggcatcaagcgtgagagctcttcccttccatcctaaggatattatgggagcgttctcccacagtgagatgcagatgattaaccaatattgtaaggacactcggcagcagcatcaacagggtgatgaaagccagaaaatgaggggagattatggcaaactcaaggcactgataaattccaggaaaagccgaaaccggcgtaaccagctgcccgagagttag

SEQ ID NO: 10054 - DNA, 942 bp, synthetic construct
  misc_feature 1..942: note = source = /note="Description of Artificial Sequence: Synthetic coding sequence"
  source 1..942: mol_type = other DNA
atgcccggctggctgaccctgcccaccctgtgccggttcctgctgtgggcttttacaatctttcataaagctcagggggacccagccagccacccaggcacaactccaccaagttataaagtccgctggtcaaaggttgaacctggggagctgcgcgagactctgatcctcatcactaatgggctgcacgcccgaggttacggacctcttggcggtagagcccgcatgaggcgaggccatcggctggatgcttctctggtaattgctggcgtgcgcctggaggacgaggggcgctataggtgcgagttgataaacgggatcgaggacgaaagtgtagctctgacattatctcttgagggggtggtgttcccatatcagccctcaagggggagataccagtttaactactatgaagcaaagcaggcctgcgaagagcaagacgggaggctggcaacctactctcaattgtatcaggcctggacggaggggctcgattggtgtaatgcaggctggctgctggagggctccgtgcgttaccctgtgcttactgccagagcaccctgcggcggccgtggcaggcccggaatccggtcctatggccctcgcgaccgtatgcgcgataggtatgatgctttttgcttcacatccgcactggctgggcaggtatttttcgttcctggccgcttaactctgagtgaagcacatgccgcatgccggcgtcggggtgccgtggtggccaaggtgggacacctttacgcagcatggaaattcagtggcctggaccagtgcgacggtggctggctggccgacggatccgtgcgttttccgatcacaacccctcgtccaagatgcggggggctacctgacccaggcgtccgctcttttggcttcccacgaccccagcaggcagcatacggcacctactgttacgctgagaattag

SEQ ID NO: 10055 - DNA, 1089 bp, synthetic construct
  misc_feature 1..1089: note = source = /note="Description of Artificial Sequence: Synthetic coding sequence"
  source 1..1089: mol_type = other DNA
atggcctggaccttcgagtgcagccggaccaccagccccgagcccctctcgacctctccatgccggaccaccagttcaagaaattccccaaccatgagctgtccggcctccgtagcctgtgagccctctactagtactaccacctcgtctccccccaaggcttgtctcacgaggccaagttctccctcgcccagctgcagcacctcagcctggcacaataagaataatctgatctccaaagtgccacgaggtgccttatcaaggcaaacacagcttcgggagttgtatttgcagcacaaccagctcacagactctggtttggacgcgacgaccttttctaagctgcactctttggaataccttgacctttcccacaatcagttgacaactgtgccagccggccttcccaggaccctggccattctgcatctgggacggaatcggatccgacaagttgaggccgctagactccacggagctcgcggacttcggtacctcttgctgcaacataaccaattaggaagcagtggcttgccagccggagctcttcgcccgctgcgaggactgcatactctccacctgtacggaaatgggctcgatagagttcctccagccctgcctcggagactaagagcgctggtcctaccacataaccatgtggccgccctgggggctagagacttggtcgctactcccggtctgaccgagctgaacctcgcctataacagattagcttccgccagggtgcaccaccgggccttcaggcgattaagagccctacgttcgctggatctcgccgggaaccagctcacccggctgccaatgggcttaccaacaggactgaggactcttcagcttcagcgcaaccaactgcgcatgctagaacccgagcctttggccggacttgatcaactgcgagagctatcactcgctcacaataggctcagggtgggtgacatcgggccggggacttggcatgagttacaggccctccaggtcagacacaggctcgtctctcataccgtgcccagggcacccccctcgccttgtttaccttgtcacgtgccgaacattctcgtgtcatggtag

SEQ ID NO: 10056 - DNA, 900 bp, synthetic construct
  misc_feature 1..900: note = source = /note="Description of Artificial Sequence: Synthetic coding sequence"
  source 1..900: mol_type = other DNA
atgctgcaccccgagaccagccccggccggggccacctgctggccgtgctactagccctgctcggcactgcatgggctgaggtatggccaccacagctgcaggagcaggctcccatggcaggcgctcttaataggaaagagtcctttttattgctctctctgcacaatagacttaggtcatgggtgcagccgccagcagccgacatgcgaaggctggactggtcagactcgctggcacagctggcgcaaggtagccccctgtggaaccccaaccctgaaccgggcgttagaccagtcgcacatcctgcctctggactggagcatgccgctgcccccagagcctggtgccctttatcaaagtggagtctgtggtttgccgagggacagcggtactctcatgctgcaggagagtgcgctcgcaacgccacctgtacccactatactcagctggtgtgggctacttcttcccagctgggctgcggtcggcacttgtgtagtgccggacaggccgcaatagaagcgttcgtatgcgcctactctccaagaggaaactgggaagtgaacggtaagacaattgtgccttacaaaaaaggagcatggtgtagcctgtgcacagcctcggtctcaggctgtttcaaggcctgggatcacgccggcggcctgtgcgaagtgcctagaaacccttgcaggatgtcatgccagaaccatggcaggctcaatattagtacttgccactgccattgcccacctgggtacaccgggaggtactgtcaggtccggtgtagtctgcagtgcgtccacggtaggtttagagaggaggaatgctcttgcgtgtgtgacattggctatgaacccagtgtcccgccacggtgcatcttcccctctacccctgttacttag

SEQ ID NO: 10057 - DNA, 1047 bp, synthetic construct
  misc_feature 1..1047: note = source = /note="Description of Artificial Sequence: Synthetic coding sequence"
  source 1..1047: mol_type = other DNA
atgctggacaccaacctgatcctgctgcccctgttccagttcatcgtacccaaagagtggaacagcaaataccgacctgtctgcatccacttggctggaaccggggaccatcactactggaggagaaggacactaatggccaggccaatgatcaaggaggcaaggatggctagcttactccttgaaaatccttactacggatgtagaaagcctaaggatcaggtcaggtcctccttaaagaatgtgagcgacctgttcgtgatggggggggcactggtactcgagtcagccgctctgctgcattggctggaacgcgagggctatgggccactcggcatgaccggcatttcaatgggaggccatatggcatctcttgccgtgtcaaattggccaaagccaatgccgcttataccttgcctgagttggtcaactgccagtggtgtgttcacaaccaccgactcgtttaaaatggggcaggagtttgttaaacattttacatcttctgccgataaacttacaaacctgaatctggtgagtaggactctgaacctggacatctcaaaccaggttgtctcccaaaaacccgccgactgccacaacagcagtaaaacaagcgtgagcgctaccagcgagggtttgttgctgcaagatacctctaaaatgaagcgattcaatcagacactgtctactaacaagagcggctacacatcaaggaaccctcagtcttaccatcttctgtccaaggaacaatcaagaaattcattacggaaagaatctctgatctttatgaaaggagttatggacgaatgcacacacgttgccaacttctctgtgccagtcgatccaagtctcattatcgtggtacaggctaaggaggacgcctatatcccccgcactggggtgcggagtcttcaggaaatctggcccggatgtgagataaggtacttagaggggggacacatatctgcctacctgtttaagcagggcctttttcggcaggccatctacgacgcatttgatagattcctgcataagtacgctaactag

SEQ ID NO: 10058 - DNA, 1044 bp, synthetic construct
  misc_feature 1..1044: note = source = /note="Description of Artificial Sequence: Synthetic coding sequence"
  source 1..1044: mol_type = other DNA
atgcgggcctgcatcagcctggtgctggccgtgctgtgcggcctggcttgggccgatctgtactctgctcctacttcctgccaaggaaggtgttacgaagcattcgacaaacaccatcaatgtcattgcaatgctagatgccaggagttcggaaactgctgtaaggacttcgagtctttatgctccgaccacgaggtgagccactcctcagatgcgatcactaaggaggagattcaatccatctcagagaaaatataccgtgctgacacaaacaaggcgcagaaagaggatatcgttctgaattcgcaaaactgtatttccccttccgaaacacgcaatcaggtggacagatgtcccaaacctcttttcacctacgtgaacgaaaagctgtttagtaagcccacctacgcagcattcatcaatctgttaaacaactaccagcgagcaaccggccacggagagcatttctctgcacaggaattggcggagcaggacgcattcctgagggaaattatgaagactgctgtgatgaaagagctatacagctttctgcaccaccagaaccgctacggaagcgagcaggagttcgtcgatgatctcaaaaacatgtggtttggcctgtatagcagggggaacgaggaaggcgacagttctgggtttgagcatgttttcagcggggaagttaaaaagggaaaagttacaggcttccacaactggattcggttctacttggaagaaaaggaagggctcgtggactattactctcatatatacgacggcccctgggactcctacccagatgtactagcaatgcagttcaattgggatggctactataaggaagttggatcagcgttcataggaagttcccctgagttcgagttcgccttatacagcctttgctttattgctcgtcctgggaaggtgtgtcaactttcgctcggagggtacccgctcgcagtgcggacttatacctgggacaagagcacttatggaaacgggaagaagtacatagcaaccgcctatatcgtgtcctccacatag

SEQ ID NO: 10059 - DNA, 864 bp, synthetic construct
  misc_feature 1..864: note = source = /note="Description of Artificial Sequence: Synthetic coding sequence"
  source 1..864: mol_type = other DNA
atgctgaagaagatcagcgtgggcgtggccggcgacctgaacaccgtgactatgaagctcggctgtgttttgatggcttgggccctatacctgtccttgggagtcctgtgggtggcccagatgctactcgccgctagctttgagaccctgcagtgtgaagggcctgtgtgcaccgaggaatctagttgccacacagaagacgaccttactgacgcgcgtgaggcaggcttccaggttaaggcctatacatttagtgagccgtttcacctgatcgtcagttatgagttgttcccagcccccatcctgcgggcagttccttcggcagagcctcaggctggctctccgatgacactgtcctgccagactaagctgcccctccaacggtccgcagcccgactactgttttctttctacaaagatgggagaatcgtacagtccagaggtctttcatcagagttccagatcccgacggcttcggaggaccactctggatcatattggtgtgaggccgctacagaagataaccaggtctggaaacagagccctcagctggaaatcagggtgcaaggagctagctcatctgctgccccccctactctaaacccagctccgcagaaatccgccgccccggggaccgccccggaggaggctccaggaccgctgccaccacctcccacaccctccagcgaggatcccggtttcagttcacctcttggaatgcccgatccacacctataccatcaaatggggctgctgctgaaacacatgcaggatgtccgagtactactgggccatctcctcatggaactaagggagctctccggccatagaaaacctggcactaccaaagccactgccgagtag

SEQ ID NO: 10060 - DNA, 1815 bp, synthetic construct
  misc_feature 1..1815: note = source = /note="Description of Artificial Sequence: Synthetic coding sequence"
  source 1..1815: mol_type = other DNA
atgatgcgggccgtgtgggaggccctggccgccctggccgccgtggcctgcctggttggggctgttagaggcggacctgggttgtcaatgttcgctggacaggcagcccagcctgacccttgctccgacgaaaatgggcatccccgaaggtgtatacctgattttgtgaatgccgcattcgggaaggatgtgcgagtgagctccacatgcggacgccctcccgctaggtattgtgtggtgtctgagcggggggaggaacgtctaagatcttgtcatttatgtaatgcctcggaccctaaaaaagctcaccctcctgccttcctgaccgatctcaacaacccccacaacctcacgtgttggcagtccgagaattaccttcagtttccacacaacgtaacactgactctttccctggggaagaaattcgaagtcacctatgtgtctctacagttctgctcccctagacctgaatccatggctatctacaagtctatggactatggaaggacatgggtgcccttccagttctacagtacacagtgtagaaagatgtacaacagaccccatagggccccaatcacgaagcagaatgaacaggaagccgtgtgcaccgactcacataccgacatgaggccgttatccgggggcctgatcgctttctctacccttgacggtcgcccttccgcccacgattttgataattcccccgtgttacaggattgggtgaccgctacagatattcgcgtggctttctcccgactccacaccttcggtgatgagaatgaggacgacagcgaactggcacgagacagctacttttacgctgtgtcggatcttcaagtcggggggcgctgcaagtgcaacggccacgctgcccggtgcgtgagggacagggatgactctttggtttgtgactgtcgccacaacacagcaggtcccgagtgcgataggtgcaagccctttcattatgatagaccttggcagagagcaaccgccagagaggccaatgaatgtgtggcttgcaactgcaacttgcacgctagaaggtgcaggtttaatatggaactctacaaactctccggccgcaagtcgggtggagtatgcctgaattgccgccacaatacagctgggaggcactgccattattgtaaggaaggttactaccgagatatgggtaagcccatcacacatcgcaaggcttgtaaggcctgtgattgccacccagtgggagccgccggaaaaacctgtaaccagaccacaggtcagtgcccctgtaaggatggagttacaggcatcacatgcaaccgctgcgcaaaggggtaccaacagagtagaagtcccatcgcaccatgcatcaagataccggtcgccccccccacaacagccgctagtagcgtggaggaacctgaggactgtgattcctactgcaaggccagcaaaggcaagttaaagatcaatatgaaaaagtattgtaaaaaggactacgccgtccagatacacattctgaaagctgataaggcgggagattggtggaagtttaccgtgaatataatctcagtgtataagcaaggtaccagtaggatccggcgcggcgatcaatctctctggattcgtagtcgtgatatagcatgtaagtgtccaaaaatcaagcctttaaagaagtatctccttctggggaacgcagaagattcaccagaccagagtggaattgtcgcagataagtcctccctcgtgatccaatggcgtgacacatgggcacgccggctgcgcaagttccaacagagggaaaagaaaggcaagtgtaaaaaagcctag

SEQ ID NO: 10061 - DNA, 1005 bp, synthetic construct
  misc_feature 1..1005: note = source = /note="Description of Artificial Sequence: Synthetic coding sequence"
  source 1..1005: mol_type = other DNA
atgcggagcgccggcggccggggcgagatcaaggtgcggcgggagttacagcccagcaagcaggtcagcggcctgacaaaccacgccagaaccgggcaggaaaagagaaacttacagaggcttgttctggaaacccctagccaaaacatcttcttctctccagtatctgttagcacctccctcgctatgctgagtctaggcgcccacagcgtcaccaagactcagatcctccagggcctaggattcaatttaacacacacccccgagtccgcaatccaccagggttttcagcacctggtgcattccctcaccgtaccctccaaagaccttacgcttaaaatggggtcggctctgtttgttaagaaggaactccagctacaggcaaactttctcgggaatgttaaacggttatacgaagctgaggtcttctccacggattttagtaatcccagcatagcacaggccaggatcaacagtcatgtgaaaaaaaagacccaggggaaagtcgtggatattatccaaggactggacctgctgacagccatggtattggtgaaccatatcttctttaaagctaaatgggaaaaaccattccaccctgagtacactcgaaaaaatttccctttcctggtgggagaacaggttaccgttcatgtgcctatgatgcaccagaaggaacaattcgcattcggcgtggataccgaactgaattgcttcgtactgcaaatggactacaagggagacgccgtggcttttttcgtgcttccgagcaagggaaagatgaggcaactggaacaggccctgtccgcccgaacacttcgcaagtggtcacactcgctgcagaagaggtggatcgaggtatttatccctcgattttcaatctcagccagctataacctggagactattctgcctaaaatggggatacagaatgtgttcgacaaaaacgctgatttcagcggtatagcgaaaagagacagcctgcaggtcagcaaagttagctag

SEQ ID NO: 10062 - DNA, 1065 bp, synthetic construct
  misc_feature 1..1065: note = source = /note="Description of Artificial Sequence: Synthetic coding sequence"
  source 1..1065: mol_type = other DNA
atggcccccgcccggcggcccgccggcgcccggctgctgctggtgtacgctggcctcttggcggcagcggccgccggcttagggagcccagaaccaggcgcaccttctcgcagccgggctcggagggagcctccaccgggaaacgaactgccacgcggccccggcgaaagccgagctggcccagcagcacgacctcccgaaccgactgcagaaagagctcatagtgtggatcctcgagatgcttggatgctgttcgtgagacagtcagataaaggggtgaacggaaagaagagaagcaggggtaaagccaaaaagctcaagtttggcctgccagggccacctggccctcccggtccgcagggcccccccggccctatcattccccccgaggctctcctcaaagagttccaactactgctcaaaggggccgtccgccagcgcgaacgagccgagccagagccctgtacctgcggccccgctggccctgtcgcagcttcactggcccctgtatccgctacggctggcgaggatgacgacgatgttgtcggagatgttctggctctacttgctgcaccgcttgcccctggaccccgcgcaccacgagtagaagccgctttcctctgccggctcagacgtgacgcgctggtggaacggcgggctttgcacgagctgggcgtctactacctccctgacgccgagggggcatttaggagagggccaggattgaatctcacctctggccaatatcgagcgcctgtcgcggggttctatgcgctggccgcaactctgcatgtcgcactcggcgagcctccccgcagagggccccctcggccccgggatcacttgcgcctgctgatttgtattcagtctaggtgccagagaaacgccagtttggaggccatcatgggattggagtccagctcagaattattcacaatcagcgtgaacggtgttctttaccttcaaatgggccagtggactagtgtatttctggacaacgcctcgggttgtagcttaacagtgaggagtggtagccacttttcagcagtgctgctcggcgtctag

SEQ ID NO: 10063 - DNA, 2685 bp, synthetic construct
  misc_feature 1..2685: note = source = /note="Description of Artificial Sequence: Synthetic coding sequence"
  source 1..2685: mol_type = other DNA
atgagcctgccccggtgctgcccccaccccctgcggcccgagggctcaggagcaatgggccctgaggccttgtcttctctcctactgctgcttctggtggcatctggagacgcggacatgaagggccattttgatccagctaaatgtagatatgcactgggcatgcaggaccggacaattcccgacagcgacataagtgcaagctcaagttggagtgactccacagccgcacgtcactcacggctggaaagtagcgacggagacggcgcctggtgtcccgctggttcagtgttccctaaggaggaagaatatctgcaggtggatctccagagactccacctggtagctctggtgggcacccagggaagacacgcaggtggcctgggtaaagaattttccagatcttacagactgagatattctcgggatggacgtcgttggatgggatggaaagatagatggggccaggaagttatctccggaaatgaagatcccgaaggcgtggtgttaaaagatctcggcccccccatggtggcacgactcgttaggttctatcctagggctgatagggtgatgtccgtctgtttgcgcgtggagctgtacggttgcctgtggcgggacgggttactgtcttacactgccccagtggggcagacgatgtaccttagcgaggcagtgtacctcaatgacagtacctacgacggacatacagtcggcggactacagtatggggggctcggccagctggccgacggagtggtcggcctcgatgacttcaggaaatctcaggagttgcgcgtgtggcccggctacgactatgtaggctggtcaaatcacagtttctcctccggttatgtcgaaatggagtttgagttcgacaggttgagagcatttcaggccatgcaggtgcactgcaacaacatgcataccctgggcgctcgcttgcctggcggcgtggagtgtcgttttagaaggggccccgctatggcttgggaaggagaacctatgcgccacaatctcggggggaatctgggagatccccgagcaagagctgtgagcgtgccactgggagggagggttgcgaggtttctacagtgtaggttcctattcgcaggaccatggctcctgttctccgagatcagctttatatcagatgtcgttaacaatagctcccccgcactcggtgggacgtttccaccagccccatggtggccaccgggcccaccccctacgaacttttcatccttggaactagagcccagaggccaacagccggtcgcaaaagccgagggctcacctacagcaattttaatcggctgcctggtagccataatactgcttctcctgctgatcatcgcgttgatgctgtggagattgcactggcgccgcctcctgtccaaggcggaaaggcgcgtcttagaggaagaactcaccgtgcacttaagcgttccaggcgatacaattctgatcaacaatcggcctggtccacgcgaaccccccccttaccaggaaccccgtcctcgagggaaccccccgcacagtgcaccttgcgttcccaatggaagcgcgtatagcggagactacatggagccggaaaaaccaggtgctccacttcttccccctccacctcaaaactccgtacctcactatgctgaagccgacattgtaaccctccagggcgtgaccggagggaatacttacgctgtccctgcgctgccaccaggtgctgttggcgatggccctcccagggtggactttcccaggtcccggcttcggttcaaagagaagctgggggaaggtcaattcggcgaggtgcacctgtgcgaggttgacagcccccaggatctggtttccctggattttcctctgaacgtgagaaaagggcatcccctactggttgctgttaaaattctgaggcctgacgcgacaaaaaatgctcggaatgactttctgaaggaggtaaagataatgagcagattgaaggaccctaacatcattcgactgcttggtgtatgcgtgcaagatgacccactgtgcatgattaccgactacatggagaacggtgacctgaaccagtttttgtctgcacatcagctggaggacaaggctgcggaaggcgcccctggcgacggacaggccgctcaaggcccaactatttcctaccccatgctccttcatgtggctgcccagattgcttcaggcatgaggtatttggctacactgaacttcgtacacagggacctggcaactcggaattgtctggtgggcgagaacttcacgattaaaattgccgactttggaatgtcccgaaacctttacgcgggcgattattacagagtccagggcagggctgtgctgcctattagatggatggcttgggaatgtatcttgatgggcaagttcaccacggcctccgatgtctgggcatttggtgtgaccttgtgggaagtgctcatgctttgccgtgcacagccattcgggcagttgaccgatgagcaagtaatagagaacgcaggggaattcttcagggatcagggtaggcaggtgtacctgagccgaccacccgcttgcccccaggggttgtatgagctaatgctgcgctgttggagccgggaaagcgaacagagaccacccttcagtcagctccaccgctttctggccgaggatgctctcaatacggtgtag

SEQ ID NO: 10064 - DNA, 2685 bp, synthetic construct
  misc_feature 1..2685: note = source = /note="Description of Artificial Sequence: Synthetic coding sequence"
  source 1..2685: mol_type = other DNA
atgagcctgccccggtgctgcccccaccccctgcggcccgagggcagtggcgcaatgggtcctgaagccctgagcagccttctgctgttgctcttggtggcttcaggtgacgccgatatgaaggggcattttgatccagcgaaatgcagatacgccttaggcatgcaggacaggacaatccccgacagtgacatcagcgcttcctcgagttggagtgactccacggcagcaagacactctaggctggaaagtagcgacggcgacggcgcctggtgccctgccgggtccgtctttcctaaggaagaggaatacctgcaagtcgacctgcaaagattacatctggtggccctcgttgggacccaaggaaggcatgcaggtgggttgggaaaggagttctctcgttcttaccggctcaggtatagtcgtgacgggcggcgatggatggggtggaaggaccgctggggccaggaggtgatctccggtaacgaggatcccgaaggcgtggtcctcaaggacctggggcccccaatggtggccagactggtgcggttttatccccgggccgaccgagtgatgtcggtgtgtttacgcgtcgagctatatggatgcctgtggcgtgatggtctcttgagctacacagcacctgtcggacagacaatgtacttatctgaggcagtctatctaaacgacagcacgtacgacggccacacagttggtggactccaatatgggggcctcgggcagctcgccgatggtgtggttggtctcgacgatttcagaaagtcacaggagctgagagtgtggcccggctacgactatgtgggctggagcaatcactcttttagtagtggatacgtagagatggaatttgagtttgaccgattgagagcctttcaagcgatgcaggtccattgcaacaatatgcacacgctgggcgcaagattacctgggggcgtcgagtgtagatttagacgcggacccgccatggcttgggaaggagaaccaatgaggcataacctgggaggcaacctcggcgaccccagggcgcgggcagtctcagtgcccctgggaggacgggtcgccaggttcttacaatgccgatttttgtttgccggtccctggttgttgtttagcgaaatctctttcatatctgatgtggtcaacaatagcagcccagccctcgggggaacattcccgcctgccccatggtggccccctggccccccaccaaccaattttagctcactcgagctggaaccaagagggcagcaacccgtggcaaaggccgagggctcccctacagcaatacttattggctgtctagtagctattatcctactgctcctcttgattatcgcattgatgctgtggaggttacactggcgaaggttgctgagtaaggctgagcgacgggtgctggaggaggaattgactgtgcacctgtctgtccctggcgatacaatccttatcaacaatcggcccggcccccgcgaaccccccccttaccaggagccaaggccgagaggcaatcccccacactcggcgccatgcgtcccaaatgggagcgcttactctggggactatatggagcccgagaaacctggagcaccgcttctcccccctcctccccagaattccgtgcctcactacgccgaagccgatattgttacgcttcagggtgtgactggcggcaatacttatgctgtcccggctctgcctcctggggctgttggggacgggcccccacgcgtggactttccacgttccaggctgcgatttaaagagaaactcggcgaggggcagtttggagaggttcatttatgtgaggttgatagcccgcaagatctggtttcgctcgactttcctctgaatgtgcgcaaaggtcatccattgctagttgccgttaagatcctcaggccagatgctacaaaaaatgcccggaatgattttcttaaagaagtcaaaattatgtcacgccttaaagatccaaatataatccgactactgggggtgtgcgttcaggatgatccactctgtatgatcactgactacatggagaatggcgaccttaaccagttcttgagcgcacatcagctggaggacaaggccgccgagggcgcccctggcgacggccaggcagcccagggcccgactataagctatccaatgctcttacacgtggccgcccagattgccagtggtatgagatacctcgccactctgaatttcgtgcaccgggacctggccacccggaattgtctggtgggtgagaactttacaattaagatcgctgacttcggtatgtctcggaatttatacgctggggattattaccgtgttcaaggtagggctgtcctgcctatcaggtggatggcatgggagtgcatcctgatgggaaagtttaccacagcctccgacgtgtgggcctttggcgttactttgtgggaagtacttatgctttgccgggcccaaccgttcggccagctcactgacgagcaggtgatcgaaaacgctggggagttcttccgagaccagggcagacaggtttacctgtccagaccacctgcttgtcctcagggcctctatgagttaatgctgaggtgctggtcacgtgagtcggaacagagaccaccattttcccagttgcaccgcttcctagccgaggatgcactgaataccgtgtag

SEQ ID NO: 10065 - DNA, 2886 bp, synthetic construct
  misc_feature 1..2886: note = source = /note="Description of Artificial Sequence: Synthetic coding sequence"
  source 1..2886: mol_type = other DNA
atgctgctgctgctgctgctggcccccctgttcctgcggccccccggtgccggtggggcgcagacaccgaatgccactagtgagggatgtcagataatccatcccccctgggagggagggatcagataccggggcctgacaagggatcaggttaaggccattaacttcctaccagtcgattacgagattgagtatgtgtgcagaggcgagcgcgaagtggtgggcccgaaagtgcgtaaatgccttgccaacggatcctggaccgatatggacacaccaagtcgctgtgtacggatctgtagtaaatcatacctgacactggaaaacggcaaggtgttcctcaccggaggcgatctgccggctctggatggggctcgcgtggattttcgctgcgaccctgactttcacttggtaggcagctcccgttccatctgttctcagggccaatggtccacccctaaacctcattgccaagtgaaccgaacaccccactccgagcggcgggctgtgtatatcggagcgctatttccaatgtccggggggtggcccggaggccaggcctgccagccagccgtagaaatggccctggaagacgtcaatagccggcgtgacattctgccagattatgagctgaaactgatacaccacgacagcaaatgtgaccccggccaggcgacaaaatatctgtacgaactgttatataacgatcctatcaaaatcattctaatgcccggctgcagctctgtgtccactcttgtggcagaagcagcccgcatgtggaatctgatcgtgcttagctacggatccagctctcctgctctgagtaacagacaacgatttcctacctttttcagaactcacccaagcgccaccctccacaatcccacacgggtgaagctctttgagaagtggggctggaagaaaatagcaaccatacaacagacaactgaggtgtttacctccacgctggacgatctggaagaaagagtaaaggaggcgggaatcgaaataacatttcgccagagttttttctctgatcctgccgtacctgtgaaaaatctaaagcggcaggacgccagaattattgtcgggctattctatgagacagaggccaggaaggtgttctgcgaggtgtataaagaaagactcttcgggaagaagtacgtgtggttcctgattggctggtacgccgataactggtttaagatctacgacccttcaatcaactgcactgtggacgaaatgaccgaggctgtcgaggggcacatcaccacagagattgtgatgctgaaccctgcaaatacccgatcaattagtaacatgacatcccaggagttcgtggaaaaacttacaaagaggttaaaaaggcatccagaagagactgggggtttccaggaagctcccctcgcgtacgatgccatctgggccttggcccttgcacttaacaaaacctccggcggtggcggccgatctggggtgagactcgaagactttaattacaacaaccagaccataacagatcagatatatcgggccatgaattcttctagcttcgaaggagtctccggccacgtcgtctttgatgcaagcgggtctcgaatggcctggacactcattgaacagctgcagggaggctcatacaagaagataggatactacgatagcaccaaggatgacctctcatggagcaagacggataagtggattggtgggtctccccccgctgaccagaccttggtgatcaagacctttcgatttctgtctcagaaattgtttatcagcgtaagtgtattgtcgagccttggcatagtgcttgccgtagtgtgcctcagctttaatatttacaactcccacgtccgctacattcagaacagtcagccaaatctgaataatctaacagccgtgggttgtagtcttgcactggctgcagttttccccctgggactggatgggtatcacatcggcagaaaccaattcccgtttgtttgccaagctcgactttggctgctgggcctgggattctccctgggctacggttcaatgttcacaaagatctggtgggtccatacggtgtttacgaaaaaagaagaaaagaaagagtggaggaagacgctcgaaccttggaagctatatgcgaccgtaggcttgctggtgggcatggatgtcctgacactggctatttggcagattgtcgaccccctgcacagaaccattgagacgttcgctaaagaggagcccaaggaggatatcgatgtgtctattctgccacagttggagcactgctcatcaaggaagatgaacacctggctcggcatattctatggctacaagggcctgctgttactgttgggcatttttctggcatacgagactaagtccgtctctacggaaaagattaatgaccaccgggcagtgggtatggcaatctacaatgtggcggtgctttgtctgatcaccgccccagtgacaatgatcctgtccagtcagcaggacgctgccttcgcattcgcgagccttgctattgttttctcaagctatattacactagtcgtcctgttcgtccccaaaatgaggcgtttaatcaccaggggcgagtggcaatctgaggcacaggacacaatgaagacgggatcatccaccaataacaatgaagaggaaaaaagcaggctgctcgagaaagagaatagagaactcgagaagattatcgcagaaaaggaagagcgggtgagcgagctccgccaccagcttcaaagcagacaacagctgcgcagtagacgacaccccccaactccgccagagcccagcgggggcctcccaagaggcccacccgagcccccagatcggttgagctgtgacgggtcccgagtgcacctgttatacaaatag

SEQ ID NO: 10066 - DNA, 2559 bp, synthetic construct
  misc_feature 1..2559: note = source = /note="Description of Artificial Sequence: Synthetic coding sequence"
  source 1..2559: mol_type = other DNA
atgctgcccaccgaggtgccccagagccaccccggccccagcgccttgctcctgctgcaactgctcctgccgcctacttctgccttttttccaaacatctggtccctcctggccgctccaggctccatcactcaccaggacttaacagaagaggctgcacttaatgtgacacttcaactgttcctggaacagcccccacctggccgaccaccactgcgcctggaagactttctaggcaggactcttcttgctgacgacctttttgccgcatacttcggacccggctcctctcgccggttccgggccgcgctgggggaggtgtctcgggcgaacgcggcccaggactttttgccaacaagccggaatgatcctgatctccatttcgatgctgagcggctgggccaggggagagcccggctggtgggcgcgctgcgggagactgttgttgccgccagagcgttggatcacactctcgcccgccagcgcttgggagcggccttacacgcgttgcaggatttttattcacacagtaactgggtcgagctgggcgagcagcagcctcacccccatctcctttggcctagacaggagctacagaatctggctcaagtggccgatcccacatgtagcgactgcgaagagttatcctgtccgcgtaactggctcgggtttacactcttgacatcaggatattttggcactcaccccccaaagccaccaggcaagtgctcacacggcggacacttcgataggtcctcaagtcagccccctcggggagggatcaacaaagactctaccagtcctggattctccccacaccatatgctgcacctccaagctgccaaactggcactactggccagcatccaggctttttcactgctgagatcacgtctgggggatagagacttcagcagactcctggatattaccccagcctccagtctcagctttgtactagacaccacaggtagtatgggcgaggaaataaatgctgccaagatccaagcgcgccacttagtggagcagagacgcggcagcccgatggagcctgtccattacgtactggttcctttccacgatccaggatttggtcccgtctttactacctctgaccctgactccttctggcagcaactgaacgagatacacgccctgggggggggcgacgagcctgaaatgtgcctcagtgcgctgcagctcgccctcctgcacacaccacccctgtccgacatctttgtcttcaccgacgcctcaccaaaagacgcctttctgacgaatcaggttgagagcctgacgcaggagcggcgttgtcgagtgacctttcttgtgactgaggatacctcacgggttcagggacgggcaaggagagagatcttgagtcctctccgcttcgagccctataaagccgtggcgctcgcctctggcggagaagtcatcttcaccaaggaccaacatattcgcgacgtggctgctattgtcggcgagagcatggcagcattggtcaccctgcctctagatccccctgttgtggttcccggacagcctttagtcttcagtgtggatggactcttgcagaaaatcaccgttcgaatccatggtgacatttcctccttctggatcaaaaatcccgccggcgtttcgcagggacaggaggaggggggtggccctcttgggcacacacggcgctttggccagttttggatggttaccatggatgatcccccccagactgggacctgggaaatccaagtgaccgcagaggatacacctggtgtgcgggttcaggctcagacgtcactagacttcctgttccatttcggcatccccatggaagacggccctcacccggggctctatcccctgacacagccagtggccggactgcagacgcagctgctcgtggaggttactggactcgggtcaagagcaaaccccggtgatccccagccccactttagtcacgtgatactgcgcggagtcccagagggcgccgaattagggcaggttccactagagccggtgggccctccggaaagaggcctgctagctgccagcttgtcaccgactctattatcaactcctcgaccattctcactggaactcataggccaggacgccgctggtcgacggcttcatcgagctgcacctcaaccaagcactgtcgtccccgtcctgttagaactgagcgggcccagtggattcttagcgcccggatccaaagtccccctcagcctaaggatcgccagcttttcagggccccaagacctcgacctgagaaccttcgtgaacccgagtttttcacttacttctaacctttcacgagcccatcttgaactaaacgagtcagcctggggtcgactgtggctggaggtccccgactccgcggcccctgacagcgtagtgatggtgactgttactgccggaggtagggaagccaaccccgtgccgccaactcacgcttttctgagactgctggtgagtgcacctgcaccgcaggtgcggaatcattatttcccaagccaggggcccgcccaccacccttaccgtcttatatag

SEQ ID NO: 10067 - DNA, 756 bp, synthetic construct
  misc_feature 1..756: note = source = /note="Description of Artificial Sequence: Synthetic coding sequence"
  source 1..756: mol_type = other DNA
atgccccacctggccagcctgttcaccgccagcagccggtgctgcccacatccccttcggcccgagggatctggagcaatgggtcctgaggccctgagttccttactgctgctgctgctggtggcttccggagatgccgacatgaagggccacttcgacccggccaagtgcagatatgccttggggatgcaagataggactattcccgactcagatatcagtgccagctctagctggagcgactcaacagccgcccgccatagtcgcctagaaagttctgacggggacggggcatggtgccccgccgggtctgtcttcccgaaagaggaggagtacctgcaggtggatctgcagcgcctccaccttgtcgcgctggtaggtacgcagggaagacacgccggagggctggggaaagagttttcccgttcttaccgcttacgctattcccgtgacggtcggcgctggatgggatggaaagacaggtggggacaagaggtcatatccggcaatgaggaccccgagggcgtggtgctgaaggacctgggtcctcctatggtagcaagactggtgcggttctaccctcgcgcggatcgcgtgatgtccgtttgcctcagagtcgaactgtacggatgcctgtggcggggggagtggctgtccttcttggggatttgcttcctgtcccgcgggctcgaggggggcgagtgcggagagtgggcatcaagaatcccaagcccagccgggaagctctctctgtag

SEQ ID NO: 10068 - DNA, 726 bp, synthetic construct
  misc_feature 1..726: note = source = /note="Description of Artificial Sequence: Synthetic coding sequence"
  source 1..726: mol_type = other DNA
atgaagttcatcctgctgtgggccctgctgaacctgaccgtggccctcgctttcaaccccgactatacggtgtcctccacccccccatacttagtgtatttgaaatcagattacctcccctgtgccggcgtactgattcatccactttgggttatcacagcagcccactgtaacctcccaaagctgcgggttatcctaggcgtcaccattcccgccgactctaatgaaaaacacctgcaggtgatcggctacgagaagatgatccaccatccacatttttctgtcacctcaatcgatcacgacattatgctcattaagctgaagactgaggctgagctgaatgactatgttaagctggccaatctaccctaccagacaattagcgaaaacacaatgtgctcagttagtacttggtcatataatgtgtgtgacatatacaaggagcccgacagcctgcagacagtgaacataagtgtgatttccaagccgcagtgccgagatgcatataaaacttacaatatcaccgagaacatgctctgcgtgggaatcgtccccggcagacggcagccttgcaaagaggtctccgctgcccctgccatttgtaatggaatgcttcagggcattctcagctttgccgacggatgtgttttacgagccgacgtgggcatatacgccaaaattttttactatataccctggatcgaaaacgtgattcagaacaactag

SEQ ID NO: 10069 - DNA, 1536 bp, synthetic construct
  misc_feature 1..1536: note = source = /note="Description of Artificial Sequence: Synthetic coding sequence"
  source 1..1536: mol_type = other DNA
atggccaagggcctgagcgtgcagaacgacaagcaccccggctaccagccagcactgctgttgtcccccggggccccgctgtttgctgatggccccgcgtacgccctgttgcatctactgctgcacgaaggaaaagctgagatggccgaccaggccgccgcgtggcttacgcgccagggatcattccagggcggtttcaggtctacacaggacactgttatcgccctggacgcactctccgcatattggatcgcttcacacaccacagaggagcgaggactgaatgtcactctctcttcaactgggagaaacggatttaaaagtcatgcattgcagctcaacaaccggcagattcgtgggttagaggaggagctacagtttagcctggggtctaagattaatgtcaaagtcggcggaaattccaaggggacccttaaagtgttgcggacctataacgtcctggatatgaagaacacaacctgtcaggacctgcagatcgaggtgaccgtgaaaggtcacgtcgaatacacaatggaggccaatgaggattatgaggattacgagtacgatgaactccctgcaaaggacgaccctgacgccccactgcaaccggtgaccccactgcaattgtttgagggaaggaggaatcggagacgcagagaagcccctaaagttgtggaagaacaggagtctagggtgcattataccgtttgcatctggcgcaatggaaaagtaggcctatctgggatggcgatcgctgacgttactctgttgtcaggattccatgccctgcgagctgacctggagaagctgacctccctctccgacaggtatgtcagccacttcgagaccgaagggcctcacgttttgctatattttgactcagtaccaactagcagggaatgcgtgggattcgaggccgtccaagaggtgcctgtaggactagtacagcctgccagcgccacattgtatgattactacaaccccgaacgccgatgtagcgtgttctacggggcaccatcaaaaagcagattgcttgccactctgtgctctgcagaggtttgtcagtgtgcagaggggaagtgcccccgtcagcggcgtgcgctcgaacgcgggctacaggatgaagatggctatcgcatgaaattcgcctgttattatccccgggtggagtatgggttccaggtgaaggtattgagggaggacagtcgcgctgcttttcggctctttgagaccaagatcacccaggttttacacttcaccaaagacgtcaaagccgcagctaatcaaatgcggaactttctggtcagggcctcctgtagacttcggctggaacctggcaaggagtacctgattatgggtctcgacggcgccacttacgacctagaggggcatccccagtacctattggactctaacagttggatagaagagatgccatccgagcgcttatgccggtcgactcgacaacgggctgcgtgtgcccaactgaatgattttttgcaggagtacgggacccaagggtgccaggtgtag

SEQ ID NO: 10070 - DNA, 2067 bp, synthetic construct
  misc_feature 1..2067: note = source = /note="Description of Artificial Sequence: Synthetic coding sequence"
  source 1..2067: mol_type = other DNA
atgctgcccaccgaggtgccccagagccaccccggccccagcgcccttctcctactccaactcctcctgccaccgacctctgcattttttccaaatatttggtcactgttagccgcccccggaagcattacacaccaggacctgactgaggaggctgctctgaacgtaacattacagcttttccttgagcagccacccccggggcgcccccccctgagactcgaggatttcctgggacgcaccctgctggccgatgaccttttcgccgcctatttcgggccaggttccagtcgaaggtttagggcagccctcggcgaagttagccgcgcgaacgccgcccaggacttcctacctacgtccagaaatgatcccgatctgcattttgacgccgagagactcgggcagggccgtgctcgcctggtgggcgctctccgcgagacagtcgttgccgctcgcgccctggaccatacccttgcccgccagaggcttggagctgcccttcacgctctccaggacttctacagccacagtaactgggtggagttgggcgagcagcagccgcatccccaccttttgtggcctcgccaggaactgcagaacctggcccaggtagcggaccctacatgctccgactgtgaggaactgtcctgcccccggaattggctaggattcaccttgctgacgagtggctactttggcacacacccaccaaaaccgcccggcaagtgctcgcacggagggcacttcgaccgatctagcagccaaccacctcggggcggcatcaacaaggacagcactagtccgggttttagtccacatcacatgcttcacctccaggctgccaagctggcactactggcctctatccaggcattcagtctactccggagtagattaggggatagagatttctctcgcttgttagacataacccctgcatccagcctgtccttcgtgctcgatacaaccggcagtatgggggaggagattaatgcagcgaaaatccaggcgcggcacctcgtggagcagcgacgtgggagccctatggagcctgttcattacgttctggttccctttcatgacccaggtttcggccccgtgttcacaactagcgatcctgactctttctggcagcagcttaatgagatccacgcactcggagggggggatgagccagagatgtgcctgagcgctctgcaactcgccctgctccacacacccccactgtcggatatatttgtcttcacggatgcttctcctaaagatgctttcctgacaaaccaggtcgaatccctgacacaagaaaggcgatgcagagtcacattcttggtcaccgaagataccagtagggtgcaaggccgggctcggagggaaattctgtcccccctgcggtttgagccctacaaggctgtggctctcgcttcggggggtgaggtgatctttacaaaggatcagcatatacgcgatgtcgccgcaattgtgggcgaatcgatggcagccctcgtcacactgccactggacccgccagtcgtggtaccagggcaacctctggttttcagtgttgatggattgcttcagaagattacagtcagaatccacggcgacatctcaagcttctggataaagaaccctgctggagtcagccaaggtcaggaggagggcggcggaccattgggacacacacgacgctttgggcagttctggatggtcaccatggacgatcctccccagacggggacgtgggagatccaggtcaccgccgaggacacccccggggtccgggtgcaggcacaaactagcctagacttccttttccatttcggtatccctatggaagacgggcctcacccggggctgtatcccctgacacaaccagttgccgggttacagacgcaactgttggtggaaagccaatcttggggctccagtgccgcctttctcccacgacatccttctagagggccccgcggctgcagaaccaggccgggagccctaggagcgcgcgggacatcaggtgcgagaagtccgcggtcactggcagtggcccatgcggcagtgcacccatag

SEQ ID NO: 10071 - DNA, 2559 bp, synthetic construct
  misc_feature 1..2559: note = source = /note="Description of Artificial Sequence: Synthetic coding sequence"
  source 1..2559: mol_type = other DNA
atgctgcccaccgaggtgccccagagccaccccggccccagcgccttgttactgctgcagcttttgctcccgccaacctccgcctttttccctaatatctggagtctgctggcggcaccggggagcattacccatcaggacctgaccgaagaggctgctctcaatgtgacactgcaactgtttctggagcagcctccacctggccgcccacccttgcgattagaggacttcctgggccggactttgctggctgacgatcttttcgccgcctactttgggcctggaagttcacggcggttccgcgctgcgctgggcgaggtgagccgggctaatgccgcccaggattttctgccaacctctcggaatgatccagatctccatttcgatgccgagagactgggtcagggaagggctagactagtgggggccctgcgggaaaccgtcgtggctgctcgggctctagatcataccctggccaggcagaggctcggtgcagctctacacgccttacaggacttttactctcatagcaactgggtggaactgggggaacaacagccccacccccacctactgtggccgcgccaagagcttcaaaatctggcccaagtggcggacccaacttgctccgattgcgaggaactgtcctgcccccggaactggcttggcttcacactactgacatctggctacttcggtactcatcctcctaaacccccaggcaagtgctctcacggaggccattttgaccgcagctcctcccagccacctcggggtggcatcaataaggacagtacttcacccgggttctcccctcaccatatgctgcaccttcaggccgcgaaactggccttacttgccagtattcaggctttcagtcttttgagatctcggctgggggaccgcgatttctctaggttgctggacatcacccctgcatcatccctttctttcgtgctggatacaacgggatcaatgggagaagaaattaacgctgccaaaatccaggcaagacacctggtggaacaacgtcgtggttcccccatggaacccgtacattacgtgttagtgccatttcatgaccccgggtttgggcctgtcttcacaaccagcgatccagacagcttctggcagcagctgaacgaaattcacgctttgggaggcggggatgagcctgaaatgtgcctctcggctttgcaattggcattgcttcacaccccaccattgtccgatatttttgtctttacagatgcatcacccaaagatgccttcctgacaaaccaggtggagtccctaacccaagaaagaaggtgccgcgtgacattccttgtgaccgaggatactagtcgtgtacaaggccgagccaggcgcgaaatcctgagtccactcagattcgagccttataaggccgtggctctggcctcagggggcgaagttatctttacaaaagatcaacacatccgtgacgtggctgcgatcgtcggcgagtcaatggccgcacttgttacattgccattagacccccctgtcgtcgtccccggacaacctttggttttcagtgtcgatgggctgctgcagaaaatcaccgttcgcatccatggagacatctccagcttctggattaagaatcccgcgggagtgtcgcagggtcaggaggagggaggaggccccctgggtcacacgcgccggttcggccagttttggatggtaacaatggacgatccaccacagacaggaacatgggagattcaagtcaccgccgaggatacgcccggggtcagggtgcaggcacagacatcgctcgatttcctgtttcacttcggcattccaatggaggatggtcctcatccaggtttgtatcccctgactcaacctgtggccggacttcagacgcagcttttggtagaggtgacaggcctaggatcacgagccaaccccggtgaccctcaaccccacttcagccatgtgatactgcgcggcgtcccggaaggagccgaactcggccaggtgcccctcgagcctgttggcccgccagaaagaggtctgttagctgcaagcctgtcacccacactgctgagcactccacggccttttagccttgagctgatcggccaggatgccgccggccgccgcttgcaccgagcagcccctcagcctagcaccgttgtgccggtacttctagagttgagcggcccgagtggcttcctggcacctggcagtaaagtccctctgagcctgcgtatagccagtttctccgggcctcaagatctcgacctgaggactttcgtaaatccatcatttagtctcactagcaatctcagccgagctcaccttgaacttaacgaatccgcatggggtagactctggcttgaagtgcctgattcagccgccccagactctgtggtcatggtgacggttactgctggcggacgagaagctaaccctgtccctccaactcatgctttcctgcgactcctggtttcagcccccgcacctcaggttaggaatcattacttccccagtcaaggccctgcacatcacccttaccggttaatctag

SEQ ID NO: 10072 - DNA, 1737 bp, synthetic construct
  misc_feature 1..1737: note = source = /note="Description of Artificial Sequence: Synthetic coding sequence"
  source 1..1737: mol_type = other DNA
atgctgctgctgctgctgctggcccccctgttcctgcggccccccggagccggcggggctcagacccctaatgccacgtccgaaggctgccagattattcaccccccatgggagggcggaattcgatatcggggattgacccgggaccaggtaaaagccattaattttttgccggttgattacgagattgagtatgtatgccggggagagagggaggtagtcggccctaaggtgcgcaaatgtctggcaaatgggtcatggacagacatggacaccccttcccggtgtgttaggatctgctccaaatcatacctgacgctggagaatggcaaagttttcttgacgggtggggacctccctgctcttgacggagccagggtggactttaggtgcgaccctgatttccacctggtcggctcctcacgatctatctgttctcaggggcagtggtctactcccaagccccactgtcaggtgaacaggactcctcatagcgaacgaagagcagtctacattggagctctgttccctatgtctgggggttggccgggtggccaggcctgccaacccgccgttgaaatggccctggaagacgtaaattctcgccgggacatccttcctgattacgagctgaaattgatccatcacgactctaaatgcgacccaggtcaggccactaaatacctctacgaacttttatacaacgaccccattaagatcatactaatgccagggtgttcatcagtgagtacccttgtggccgaggccgccagaatgtggaatttgattgtgctgtcctacggatcctcatcgcctgctctctccaatcgacagcggtttcctacattttttcgtactcatccttcggccacccttcacaacccaactcgggtcaagctgtttgagaagtggggatggaaaaagattgctactatacagcagacaaccgaagtatttacgtcaacgctggacgatctggaagaacgggtgaaggaggccggtatagaaatcacattcagacaaagcttcttctcagaccctgctgtgcctgtgaagaacttaaagaggcaggacgcccggataatcgtcggccttttttacgaaaccgaagccagaaaagttttttgtgaggtctataaggaacggctgttcggcaaaaagtacgtatggtttctgattggctggtatgccgacaattggtttaagatttacgatccgagcatcaactgtactgtggatgaaatgacagaggcagtggaaggccacattacaactgagattgtgatgttgaatccggcaaatacccggtccatatcaaatatgacctcccaggaattcgtggagaagctgaccaagagactcaagcgccatcctgaagagacaggcggctttcaggaggcacctctggcctacgatgcgatatgggccctggccctggcactcaataagacaagcggaggcggaggacgatcaggcgttagactggaagactttaactacaataatcaaacaatcactgaccagatctacagggccatgaacagtagttcattcgaaggagtgtccggccacgttgtcttcgatgcttccggaagccggatggcgtggacactgattgaacagcttcagggcgggtcatataagaagatcgggtattacgacagtacaaaggatgatctgtcctggagtaagaccgacaaatggatcgtcatatcccgaacccattctccgacttag

SEQ ID NO: 10073 - DNA, 1326 bp, synthetic construct
  misc_feature 1..1326: note = source = /note="Description of Artificial Sequence: Synthetic coding sequence"
  source 1..1326: mol_type = other DNA
atggagttcgagttcgaccggctgcgggccttccaggccatgcaggtccattgtaacaacatgcacacactgggggcaagactgcctggtggcgtggagtgtcggttcagacgcggcccggccatggcttgggaaggagagcccatgcgccataacctgggaggaaatctcggggacccaagagcacgggctgtcagcgtacctctggggggccgagtagcgaggttcctacagtgcaggttcctgtttgccgggccctggttgttattttccgaaatctcctttatcagcgatgtggtcaataactcttctcctgccctgggcggaacatttccccccgcaccttggtggccccccggacccccccctacgaacttttcgtctctggagctcgaacctcgcggccagcagcccgtggccaaggcagaggggagccccaccgcaatactgatcgggtgtctcgttgctataatcctccttttgctgctgatcatagctcttatgctgtggcgactgcactggcggaggctactgtcgaaggtactggaatctcatcccagaacacggagccctggtcttgttggtatacgccctactccccttccagtgagccccatggcactgcgatgctgctcccccattcagcctaccgcctcattctggccactcacccctgtgccactggaggcgcgcgcgcccccacatcccccaggaccaaaccctcccaccccacgaggcgtcaccggtggtaatacatatgctgtgccggccctgcctcccggcgctgtaggcgacggaccacccagagtagactttccccggagtaggctgagattcaaggagaagctcggcgagggtcaattcggtgaagtgcacctgtgtgaggtggattccccacaggacttagtgtcccttgacttcccccttaatgtgagaaaaggccatcccctgctcgtggcagtgaagatcctgcggcctgatgctactaaaaatgcccgaaacgacttcctgaaggaggtgaagattatgagccgacttaaagacccgaacatcattcgactgctcggggtgtgcgtacaggacgacccgttatgcatgatcactgattatatggaaaacggtgaccttaaccaatttctatctgcgcaccagctggaagataaggcagctgaaggtgcccccggcgacggccaagcagcccagggacctaccatctcatacccaatgctgttgcacgttgctgcccagatagcatcaggcatgcggtatttggctaccctgaactttgtacatttttggggcgagcggcacagattcctacattag

SEQ ID NO: 10074 - DNA, 2685 bp, synthetic construct
  misc_feature 1..2685: note = source = /note="Description of Artificial Sequence: Synthetic coding sequence"
  source 1..2685: mol_type = other DNA
atgagcctgccccggtgctgcccccaccccctgcggcccgagggcagcggggcaatgggcccagaagcactgtccagtctgctgctgttattgttggtggcaagtggcgacgcagatatgaagggccacttcgatccggcaaaatgtaggtacgctctgggcatgcaggatcggacaatcccagatagcgatatttcagcttcgtcctcttggtcagattctacagccgcaaggcattcgcgcctcgaatccagcgacggcgatggggcctggtgccccgccgggtcggtattccccaaggaagaagaatacctgcaggtggacttgcagcggttacatctcgtggccctggtcgggacccagggaaggcacgcaggtggcctcggaaaggaattcagtagatcatacaggttgcggtacagtcgggatggaaggagatggatggggtggaaagaccggtggggtcaagaggtcatctcaggtaacgaagacccagagggggtcgtactgaaagacctggggccccctatggtggcgagattagttagattctacccacgcgcggacagagtaatgtctgtctgcctgagggttgagctgtacggctgtctttggcgggatggacttctgagttatacagctcctgtaggccagacaatgtatctgtctgaagcagtctatcttaacgatagcacttatgacggccacacagtcggagggctccaatacggaggacttgggcaactagccgacggcgtggtcggtctggacgattttcggaaatcgcaggagctgcgcgtatggccagggtatgattatgtggggtggtcaaaccacagtttctcttctgggtacgtagaaatggagttcgagtttgacagactgagggccttccaggccatgcaggtccactgtaataatatgcacacactgggagcccggctccccgggggagtggagtgcaggttcaggcgaggacccgccatggcatgggagggagagcctatgagacacaacttgggcgggaacctaggagaccccagggcgcgggctgtgagcgtacccctcggaggcagagtcgctcgcttccttcaatgtaggttcctcttcgccggcccctggcttctcttctccgagatcagcttcatctccgacgtcgtgaataactcatctcctgcgctcggtgggacctttccccctgcaccctggtggccacctggaccgccccccacaaacttttccagcctggagctggagccacgcggccaacagcccgttgccaaagcagagggctcccccaccgcaattctcatcggctgcctcgttgcaattatcctgctgctgctgctgattatcgccctcatgctctggaggctgcattggcgaaggctactgagcaaggcagagcgtagagtgctggaagaggagctgacagtccatcttagcgtgccaggagacacaattctgatcaataaccgacccgggccacgggaacccccaccttaccaggaaccgaggcctcgcggaaatcctccccacagcgcaccctgtgtaccaaatggctcagcatatagcggggattatatggaacctgagaaaccaggtgcccccctgctccctccaccaccacagaatagcgtgccccattatgccgaagctgatatcgttacattacagggagtgacagggggcaacacatacgctgtgccagccctcccccctggcgccgtaggtgacgggcctcctagggttgacttcccccgaagtcgcttaaggtttaaagaaaaactcggcgaggggcagttcggggaggttcatttgtgtgaggtcgatagtccgcaagatttagtttccctggattttccactgaacgtcagaaaagggcaccccctcctagtcgcagttaagatcctgaggccagacgctaccaaaaatgctaggaacgactttctgaaggaggtcaagatcatgtctagacttaaagaccctaacatcatccgactgctaggggtgtgcgtccaggacgacccgctgtgtatgattacggattatatggagaacggtgacttgaaccaattcctgagcgcccaccagttggaagacaaagctgctgagggagcgcctggtgacggtcaggctgcccagggtccgaccatatcctaccctatgttgctacacgtggctgcacagattgcgagtggcatgaggtacttagccacattaaatttcgtgcacagggatctcgctaccagaaactgtcttgtcggtgaaaatttcaccattaaaatcgccgatttcggaatgtccagaaatctgtatgctggagattattacagggttcagggtagggctgtcctgcctatacgttggatggcctgggagtgcatccttatggggaaattcacaactgcgagcgacgtgtgggcatttggggtgacactatgggaggttttgatgctgtgtcgagctcagccattcggccagctgactgatgagcaggtgattgaaaacgccggggagttcttccgggatcagggaagacaagtgtacctgagtagaccacctgcatgtcctcaggggttatatgagcttatgttgcgatgctggagcagggaatctgagcagaggccgccttttagtcagcttcatcggttcttggccgaagatgctctcaatacagtgtag

SEQ ID NO: 10075 - DNA, 216 bp, synthetic construct
  misc_feature 1..216: note = source = /note="Description of Artificial Sequence: Synthetic coding sequence"
  source 1..216: mol_type = other DNA
atgcccgccggcgtgcccatgagcacctacctgaagatgttcgccgcctccctcctggctatgtgcgcgggagccgaagttgtacacaggtactacaggcccgatcttactatacccgaaatcccaccaaaacgaggggagctcaaaaccgaactgttaggccttaaggaacgtaagcataagccccaagtgagccagcaggaggagctcaagtag

SEQ ID NO: 10076 - DNA, 2760 bp, synthetic construct
  misc_feature 1..2760: note = source = /note="Description of Artificial Sequence: Synthetic coding sequence"
  source 1..2760: mol_type = other DNA
atgggccccgaggccctgagcagcctgctgctgctgctgctggtggcttccggcgatgcggatatgaagggccatttcgaccctgcgaagtgccgatatgccctggggatgcaggataggacgatccctgattcagacatatctgcaagttcgtcttggtccgacagtaccgctgctcgtcactcaaggttggaaagctctgatggagacggcgcttggtgccccgcaggctccgtgtttcctaaggaggaagagtacctgcaagtggacctgcagcggctccaccttgtggctttggtgggtacacaaggacgacacgcggggggactggggaaagaattcagccgcagctatcgtctgcgctacagtagagacgggcgcagatggatgggctggaaagatagatggggccaagaagtaatttctgggaacgaagatcctgagggggttgttctgaaagacttagggccccctatggtggcgcggctggtgagattctatccaagagcagacagggtaatgtcagtttgcttgagagtggaactgtacggatgcttatggcgggacggccttctttcatatactgccccggtgggccagacaatgtatctgagcgaggctgtgtatctgaatgactctacatacgacgggcacacagtgggaggacttcaatatggcgggttgggacagctcgccgatggagtggtgggactggacgacttccgcaaatctcaggaactgagagtgtggcctggctatgattacgtggggtggtccaatcacagcttttctagtggctatgtggagatggagttcgagtttgatcgtctgcgggctttccaggcaatgcaggtgcactgtaataatatgcacacgcttggcgcccggcttccgggaggcgtagagtgccggttcagacgcggtcctgcaatggcctgggagggcgaacctatgcgacacaatctcggcggaaatctcggagatccaagggctagagccgtatcagtgccccttggaggacgcgtggcaagattccttcaatgtagatttcttttcgccggtccgtggctgctattcagcgaaataagttttatttctgatgtggtgaacaattcctctcccgctttgggcgggacgtttcctccggcaccatggtggccccccggtccacccccaaccaacttttcatccttagagctggagcctcgcggccaacagccagtagccaaggccgaaggcagcccaaccgcaattctgatcgggtgcttggtcgcgatcattctactcctgttgctaatcatcgccctgatgctctggcgtcttcactggaggcggctcctcagcaaggccgaaaggcgtgtgttagaggaggagctaaccgtgcatctctcagtacccggcgatacgattctgattaataaccggccaggtccacgtgagccccccccttaccaggagcccagacccaggggcaacccaccccatagcgctccttgcgtgcccaatggtagcgcgttattgctgtccaacccagcatatcgcctgctcctggccacatatgcccggcctcctaggggcccaggcccccctacaccagcctgggctaaacctactaacacacaggcttattctggtgactatatggagccagaaaagcctggcgccccgctgttacccccccctccccagaatagtgttccacactacgcggaggccgatattgtcaccctccagggagtgacaggtgggaatacttatgccgtccccgctctcccccccggagccgtgggcgacggccccccgagggtggatttcccacgttccagactgcgatttaaagagaaactgggcgagggccagttcggagaagtgcacctgtgcgaagttgactccccccaggacttggtgagtctcgactttccattgaacgtcagaaaggggcatcctctgctcgtggctgtgaaaatactgcggcccgacgccacaaaaaacgccagcttctcactgttttcaagaaatgacttcttaaaggaagttaaaattatgagcaggctgaaggacccgaatatcattcgcctgctcggggtgtgcgtgcaggacgatccattgtgcatgatcacggactacatggagaatggggacctcaaccagttccttagtgctcatcagcttgaagacaaggctgcagagggcgcgcccggtgacgggcaggccgcgcagggccccaccatcagctatcctatgctgctccacgtggccgcacagatcgcttcagggatgagatatctggccacactcaactttgtgcaccgagatctggccacccgcaactgcctggtgggcgaaaactttacgataaagatcgctgattttggcatgagtcgtaacctctacgccggagattactacagagtgcagggcagggcagtgctgccaataagatggatggcttgggagtgcattcttatgggtaaattcaccactgcgtcagacgtttgggcattcggggtgaccctctgggaagtgctgatgctgtgtcgggcccagcccttcgggcagttgaccgatgaacaggtcatcgagaacgccggtgagtttttcagggatcagggtcgtcaggtctacttgagcaggcctccggcatgtccccaagggctctacgagctgatgctgcgatgttggagccgggagtcagagcagagaccacccttttctcaactccatcgatttttggcagaggacgcgctaaatacagtctag

SEQ ID NO: 10077 - DNA, 447 bp, synthetic construct
  misc_feature 1..447: note = source = /note="Description of Artificial Sequence: Synthetic coding sequence"
  source 1..447: mol_type = other DNA
atgcagaccttccccgtggccggcgccctggaccccgccatcctggacaccagctcaccccaggccctttataccgtcctcttgatcgtgctggtgatgatgtcacttgtgttcggcaagttcgtccccgttaactgggagcccccccagcctcttcccttcccaaagtatctcagatgctacagatgtctgctcgagaccaaggagctgggctgcctactgggaagcgatatttgcctgactcccgcaggcagcagttgcatcaccctgcacaagaaaaactcttcaggaagcgatgttatggtatcagactgcagatcaaaagagcaaatgagcgactgcagcaacacacggacaagtccggtcagtggcttctggatcttctctcaatactgctttttagatttttgcaacgatcctcagaacagaggcctgtatactccctag

SEQ ID NO: 10078 - DNA, 5097 bp, synthetic construct
  misc_feature 1..5097: note = source = /note="Description of Artificial Sequence: Synthetic coding sequence"
  source 1..5097: mol_type = other DNA
atgcggctgctgtggggcctgatctgggccagcagcttcttcaccctgtcactacagaagcccagactcttgttgttctctccatcggtggtgcatttgggcgtgccactgtcggtgggggtccagctccaggatgttccccgtggtcaggtggtcaaagggagtgtgttcctccgtaacccttccagaaataatgttccctgctcgcccaaagtcgatttcactttgtcgtctgagagggactttgctctgttatcccttcaggtccccctgaaagacgccaagtcttgtgggctgcaccaactccttagaggacctgaagtccagcttgtggcccacagcccctggttaaaggattccctgtcgcggacaaccaacattcagggcataaacctgctcttttcttctagacgaggccatttgttccttcagactgaccagcctatctacaatcccggacagcgggtgaggtacagggtatttgccttggaccagaaaatgagaccctccacagatacgatcactgtaatggtggagaattcccatggtttgagagtgaggaagaaagaagtgtacatgccgagctccattttccaagacgatttcgtgataccagacatctccgaaccgggcacatggaaaatctccgcccgattttccgatggcctggagtctaactcttccacccagtttgaggtgaagaagtatgtactgcccaacttcgaggttaagatcaccccagggaagccctacattctgactgtgccgggacacctggatgaaatgcagttggatattcaggcgagatatatctacggtaagcccgtccagggagtggcctacgtgaggttcggcctgttagacgaagacggcaagaaaacttttttcaggggattagagagccagaccaagctggtgaatggtcagtctcacatctctctctccaaggctgaattccaggacgccttggagaagttaaatatggggattactgaccttcagggactccggctgtacgtagccgcggccattatagaatatcctggaggggagatggaggaagctgagctcacgagctggtacttcgtatcttctcccttcagtctggacctgtccaaaaccaaaagacatttggtgcccggtgccccattcctcttgcaggccctggtgagagaaatgtccggcagtcccgccagtggcataccagtgaaagtgtctgctaccgtgtctagccccggaagtgttcccgaagtccaggatatccagcagaacacagatgggagtggacaggtcagtatcccaatcattatccctcagactatttccgaattgcagctgtctgttagcgccggcagcccacaccctgctatcgcaagactcactgtggccgcccccccatctggcggaccagggtttctgtcaatagagcggcctgacagtagacccccaagagtgggggatacactcaacctaaacctcagagccgtaggttccggagctacgttcagtcactactattacatgattctgtctcgggggcagattgttttcatgaaccgggagcctaagcggaccctcacctcggtttcggttttcgtggaccaccacctggcaccatctttctattttgttgctttttattatcacggcgaccaccctgtggcgaactctttgcgcgtagatgtgcaagctggggcatgcgaaggcaagttggagctgagcgttgacggtgcgaagcagtacaggaacggagagagcgtgaagctgcatctcgagacagatagtctagctctggtggcccttggagctctcgacactgcactatatgctgccgggagtaagagccacaaacccctcaacatggggaaagttttcgaggccatgaattcatatgacctcggatgtgggcccggcggcggagacagtgccttgcaggttttccaggcagcggggttagcgttttctgacggcgaccagtggacgctgagtcgtaagcgattgagttgtccaaaggaaaagactacgcgcaagaaacgcaacgtgaactttcagaaagcaatcaatgagaaacttggccagtacgcttccccaacggccaagcgctgttgtcaggatggtgtaacacggcttcctatgatgcggagctgtgagcagcgtgcggcccgagtgcagcagcccgattgccgggagccttttctctcctgttgtcagttcgccgaatctctgcgcaagaagagtagggacaaaggccaggctggactccaaagagcactcgaaatcctgcaagaagaggaccttattgacgaggacgacattcctgtcagatcattttttcctgagaactggctctggagagttgagacggtggatcggtttcagattctgacattatggctgcctgatagcctgactacttgggaaatacatggtctctcgttatcaaagacaaaaggtctatgcgtggctacacccgtgcaactgcgcgttttccgcgaatttcatctccatttgcgacttcccatgtctgtgcgcagatttgagcagcttgagctgcggcccgtgctgtacaactacttggataagaatctgactgtgtccgtgcatgtgtcccctgtagaaggactctgcctcgccggagggggagggctcgctcagcaggtgctggtccccgcaggaagcgcacgccccgtggcttttagtgtcgtacccacggctgccgcggcagtgtccctgaaggtagtcgcccgtggctcattcgaatttcccgtcggtgatgcagtgtcaaaggtgttacagatagaaaaggaaggcgctattcatcgtgaagagctcgtttatgagctgaatccgttggatcaccgcggcagaacactggagatacccggcaactccgaccccaatatgattccagacggggacttcaatagttacgtccgggtgacagcttccgatcctctggataccttaggatccgaaggggcactcagtcctggcggcgtcgcctcgctcttaaggttgccaaggggatgcggagagcagacaatgatttacctggcgcccacgttggctgcatctcggtatctagacaagaccgagcagtggtcaaccctcccacctgaaacgaaggaccacgccgtggatctcatccagaagggttatatgagaatccagcaattccgtaaggccgatggcagctatgctgcatggctgagcagaggcagctctacctggctcacagccttcgtgctgaaggtgctctcgctcgcgcaggagcaggtggggggctctcctgagaaactgcaagaaacatccaactggttattaagtcaacagcaggcagacggctctttccaggacttgagccctgtcattcaccgttccatgcaaggcggcttggtgggaaacgatgagactgtcgcgctgaccgctttcgtcactatcgccctgcatcacggactggccgtgtttcaagatgaaggggcggagcctctcaagcagagggtggaggctagcatatctaaagcaagttcattccttggagaaaaggcatcagctggcctgctaggagctcatgccgccgcgatcactgcctatgccctcacgcttaccaaagctcctgctgatctccggggtgtagcacacaataacctcatggctatggctcaggagactggcgacaacctgtattgggggtcagtgacaggaagtcagtcaaacgccgtctcccccactcctgcaccacgcaacccttccgatcccatgccccaagctccggctctgtggatcgagacaaccgcctacgccctgctgcacctgctactccatgaagggaaggccgagatggctgaccaggccgccgcctggctgacaaggcaaggcagttttcaagggggctttcgcagtacacaggacacggtcattgcacttgatgccctgagtgcgtactggatcgcctcacacactacggaagaacgcggcctgaacgtcacactttcaagcacaggcaggaatggatttaagtcgcatgccttacagctcaacaatagacagatcaggggcctcgaagaagaactacagttcagcctcggctctaaaattaatgtgaaggtgggtggaaactcgaaaggaactctcaaagtgcttaggacttataatgtgctagacatgaaaaacaccacttgccaagacctacagatcgaggttactgtcaaaggccatgtcgagtatactatggaggccaatgaggactacgaagattacgagtacgacgaactgccggcaaaggacgatcccgacgctccactccaaccagttacccccctgcagctttttgaggggcggagaaaccggagacgaagagaggccccaaagttgacgtcattgtcggaccggtacgtatcacacttcgaaacagagggaccacacgtgctcctctactttgattcagttcccacttctagagaatgcgtcggcttcgaggccgttcaggaggttcccgtaggcctggtgcaacccgcctctgcaactctatatgactactacaatccagagaggcgctgttcagtgttttatggcgcgccttccaaatcaagactcttagctaccctgtgctctgctgaagtgtgtcagtgtgcggaggggaagtgtccacgccagcggagggctttggagcgcggcctgcaggacgaagacggctatagaatgaaatttgcctgttactacccccgggtggaatacggtttccaagtgaaggtgctccgggaggatagtagggcagcttttcgactgttcgaaacaaaaataacgcaggtgctacacttcacaaaggacgtgaaggccgccgcgaatcagatgcgaaactttctcgtcagagcctcgtgccgactacgactggagcctggaaaggagtatctgatcatgggcttggacggcgccacttacgatctggaagggcacccccagtacttgctggatagcaacagctggatcgaagagatgcctagcgagaggctgtgccgatcaactagacagcgggctgcttgtgcccagctcaacgatttccttcaagagtatggcacacaaggttgccaggtgtag

SEQ ID NO: 10079 - DNA, 1986 bp, synthetic construct
  misc_feature 1..1986: note = source = /note="Description of Artificial Sequence: Synthetic coding sequence"
  source 1..1986: mol_type = other DNA
atggacctggtgctgaagcggtgcctgctgcacctggccgtgatcggcgcactactggccgtgggggccaccaaagtcccacgaaaccaggactggttaggggtgtcacgacaacttagaactaaggcttggaacaggcagctgtatcctgaatggacggaagctcagcggctagactgctggaggggtggccaggtgtcactgaaggtcagcaacgacggccctaccctgataggagcaaacgcttccttctccatcgccctcaattttccaggaagccagaaagttctgcccgatgggcaggtgatatgggtgaacaacaccattatcaatggctctcaggtgtggggaggccagcccgtgtacccccaggagaccgatgacgcctgtatttttcccgacggcggaccgtgcccaagtggcagttggagccagaagcggtccttcgtatacgtttggaaaacatggggacagtactggcaggtgctgggagggcccgtttccggacttagtattggaaccggccgggcaatgctgggtactcataccatggaagtgacagtgtatcatcgcagggggagcagaagttatgtccctttggcacatagttcctccgcatttactatcacagaccaggtcccgttttccgtgtcagtctcacagctgagggcccttgatggtggtaataaacactttctcaggaatcagcctcttacctttgcactgcagctacacgatcccagcggttacctggccgaggcagacctgtcctacacatgggactttggggactcctctggcaccctgatctctcgagctctagtggttactcacacatatctggagcccggtcccgtcacagctcaggtggtcctccaggcggctattccgctgaccagctgtggatcgagccccgtccctggtacaaccgatggtcatcggcctaccgccgaggctcccaatacgacagctggtcaggtacctacaactgaagtcgtggggaccacccccggacaggcccccaccgcagaaccaagtggcaccactagcgttcaggtgcccaccaccgaagttatttccaccgcgcccgtgcagatgccaaccgctgaatctaccggaatgactcccgagaaggtacctgtgtccgaagtcatggggaccaccctggccgagatgtccacacccgaggccaccggaatgacccccgcagaggtctcaatcgttgtgctgagcggtacgaccgccgcccaagtaacgaccacagaatgggtcgagacaacggcaagggaattgcctattccagagcctgagggcccggatgcttcatccatcatgtcaactgagtctatcactgggagcttgggtcccctgcttgatggaaccgcgacactgagattggtgaagcggcaggttcctctggattgcgtattgtaccgttacggcagtttctccgttacacttgatattgtgcagggtatcgagtctgcggaaatcttgcaagctgtcccttcaggcgaaggcgatgccttcgagctaacagttagttgccagggcgggcttcccaaggaagcttgcatggagatctcttccccaggatgtcagccaccggcacagaggctgtgtcaacctgtgctgccatctcccgcctgtcagcttgtcctccaccagattttaaaagggggttcaggcacttattgcctaaatgtgtctttagcagacactaactctctcgcagtcgtctcaacccagctgataatgcctggacaagaagcaggcctcgggcaagttccactgatcgtcggcatactgctggtgctcatggcagtggtcttggcaagcctgatctatcgaagacgccttatgaagcaggatttctctgtgccccagctacctcactcttctagccattggttgagactcccaaggatcttctgcagctgcccgatcggtgagaattctccacttctgagtggtcagcaggtgtag

SEQ ID NO: 10080 - DNA, 516 bp, synthetic construct
  misc_feature 1..516: note = source = /note="Description of Artificial Sequence: Synthetic coding sequence"
  source 1..516: mol_type = other DNA
atgcggcacaacctgggcggcaacctgggcgacccccgggcccgggctgtctccgtgccattagggggtcgagtggcccgctttttgcagtgtcggtttctcttcgctggcccctggcttctgttctcggaaatctcttttatctctgatgtggtgaacaattcatccccggcgttaggcggcacctttcctccggccccatggtggccaccgggccccccgcctacaaatttttcaagtctggagctagagccccgcggccagcagcccgtagccaaggcagaggggagcccgacagcaatcctgattggctgtttggttgcaattatcctgttattgctgctgattatcgccctgatgctgtggagactgcattggcggcgactcctgagtaaggtgttagagagtcacccccgaacccgctcaccagggcttgtgggcatacgacctacaccgctgcccgtctcccccatggctctcgtgcacctttgcgaagtggactccccccaggattag

SEQ ID NO: 10081 - DNA, 1986 bp, synthetic construct
  misc_feature 1..1986: note = source = /note="Description of Artificial Sequence: Synthetic coding sequence"
  source 1..1986: mol_type = other DNA
atggacctggtgctgaagcggtgcctgctgcacctggccgtgatcggcgccctcctggcggtgggagccacgaaggtgcctagaaatcaagattggctcggcgttagtcgacaactccgcactaaggcatggaacagacaactatacccggaatggacagaggcgcagaggctcgactgttggcgaggagggcaggtgtccctgaaagttagcaatgacggccccactcttattggcgccaatgccagctttagcattgctttaaactttccggggtctcaaaaggtgctcccagacggccaggtgatttgggtgaataacactatcatcaatggctctcaggtttggggcggccagcctgtttacccccaggaaaccgatgatgcttgcatctttcccgacggcggtccttgcccttctggctcctggtcgcagaaacgctcattcgtgtatgtctggaagacttgggggcagtattggcaggttttgggcggcccggtgagcggactgtctatcggaacaggtcgggcaatgctgggcacccacactatggaggtgacagtgtaccaccggcggggcagtcgcagctacgttcctctcgcccactcttcgtccgctttcactatcaccgatcaggtgcccttctcggtgagcgtgtcccagctgcgagcgcttgacggaggaaacaaacacttcctcagaaaccagccacttactttcgctctgcagctccacgacccctctgggtacctggcagaagccgatttatcctacacatgggactttggggacagctccggcactcttatttcccgagctctggtggtcactcatacctatctggagcctggtcccgtaactgcacaggtggtcctccaagctgcaattcccctaaccagctgcggatccagcccagtgcctggaacgaccgatggccatcgccctactgcagaggcccccaacaccacagccggccaggtcccaaccaccgaagtggtggggactactccagggcaggctccaaccgcagagccttccggtaccacctccgttcaggtgcctacaactgaggtgatttccaccgcccctgtccaaatgccaaccgctgaatctaccggcatgaccccagaaaaggtacccgtgtccgaggtgatgggcaccaccttggccgaaatgtcaacaccagaggcaactgggatgactccagctgaagtcagcatcgttgttctgagcggcaccactgcagcccaggtgactacaacagagtgggtggaaaccacagccagagagttgcctatccctgagccggaaggccctgatgccagctcaattatgtcaaccgagagcataaccggatctttgggtccgctgttagacggaacagcgaccctccgactggtgaaacggcaggttcccctggactgtgtactgtacagatacggctcctttagcgtgaccctagatattgtgcaaggaatcgagagtgccgagattctacaggcagttccttcgggcgagggagacgcatttgagcttaccgtttcttgccagggaggactgccaaaggaggcgtgtatggaaatttcctccccaggctgtcagcctccggcacagcgcttgtgccagccagtgctgccttctcctgcctgtcaacttgttctgcatcagattctcaagggagggtccggtacttactgtcttaatgtgagtctggccgatactaactccttagccgttgtgagtacacaactgataatgcccggacaggaggctggtctcggccaggtcccactcatcgtgggcatcttattggtgctcatggcggttgtgcttgccagcttaatttataggaggcgcttaatgaagcaagattttagcgtacctcaattgcctcactccagtagccactggctccgactccctagaattttttgttcttgcccaataggagagaacagcccattgttgagcggccagcaggtgtag

SEQ ID NO: 10082 - DNA, 1737 bp, synthetic construct
  misc_feature 1..1737: note = source = /note="Description of Artificial Sequence: Synthetic coding sequence"
  source 1..1737: mol_type = other DNA
atgctgctgctgctgctgctggcccccctgttcctgcggccccccggggctggcggcgctcaaaccccgaacgccacctcagaaggctgtcagatcattcacccgccgtgggagggtggcatacgttaccgcgggctcacacgcgatcaggttaaggccataaacttcctgcccgtggactacgaaattgaatatgtttgcagaggcgagcgggaggtggtcggtcccaaggtgaggaaatgtctggccaacgggtcgtggaccgatatggacaccccgtcacggtgtgtgcggatctgctctaagtcttacctgacccttgagaacggaaaggtttttctgaccggaggcgatttacctgctctggacggagctcgcgttgacttccgttgtgatcccgattttcacttggtgggctctagtcgatctatttgttcccaggggcagtggagcacacccaagcctcattgtcaggttaaccgcactccccacagtgagagaagagccgtgtacatcggggcccttttccctatgagtgggggctggccaggagggcaggcctgccagcctgccgtggagatggctttggaagatgtgaatagccgccgcgatatcctgcccgactacgagctaaagctcatccaccacgatagtaagtgtgatccaggtcaggccaccaaatatctctacgaactcctgtataatgaccccataaagattattctaatgccaggctgttccagtgttagtacactggtcgccgaggccgccagaatgtggaacttgattgtgctgtcttatggctcgtcatcacctgccctaagcaataggcagcgcttcccaacctttttccgtacccatcccagtgccacactgcataacccaactcgagtgaaactctttgaaaaatggggttggaaaaaaatcgcgacaatccagcagactacggaagtcttcacctcgactcttgatgacctggaagagcgagtgaaggaagccggcatcgagatcactttccgacagagcttcttctcggatcctgctgtgcccgtgaagaatctcaaacggcaggacgctagaatcatcgttggcctgttttacgagacagaggcacgtaaggtcttttgtgaggtatacaaggagagactcttcggcaaaaaatacgtgtggtttcttattggctggtatgccgacaattggtttaaaatatatgacccaagtatcaattgtacagtggacgagatgacagaggctgtggaaggccacatcaccacggagatcgtcatgcttaatcctgcaaatacccgaagcatctcaaacatgacatcacaggagttcgttgaaaagctaacaaagcgtctcaaacggcatcccgaggaaactggcggcttccaagaggcccctcttgcctacgacgcaatctgggccctggcactcgcactcaacaagacttctggtggaggtgggcggtctggcgtgcgactggaagattttaattataacaaccagaccatcaccgatcagatttacagagcgatgaactcgtcttctttcgagggagtttctggccatgtggtgtttgacgcttccggctctagaatggcttggacgctgatcgagcagcttcaggggggctcctacaaaaaaatcggctattacgactccactaaagacgatctgtcatggtcaaaaacagacaagtggatcgtcatctcgaggacacacagccctacctag

SEQ ID NO: 10083 - DNA, 1326 bp, synthetic construct
  misc_feature 1..1326: note = source = /note="Description of Artificial Sequence: Synthetic coding sequence"
  source 1..1326: mol_type = other DNA
atggagttcgagttcgaccggctgcgggccttccaggccatgcaggtacactgtaataacatgcacacgctcggcgccagactacctggtggagtagagtgccggttcagacggggtcccgcaatggcatgggagggcgagcctatgcgccacaacctcggcggaaacttgggcgatccccgcgcccgggctgtatccgtccctttaggaggccgcgtggccagattcttacagtgtcgcttcctctttgcaggcccatggctcctgttcagcgagatctccttcatctctgacgtggtgaacaacagtagccccgcgttaggtggtactttcccccccgcaccttggtggccccccggcccaccccctaccaacttttcgagcctggagttggaaccccgggggcagcagccagtggctaaagctgagggctcacctaccgccatcctgataggctgtctggtggcaatcattctcctgctcctactgataatagccctgatgctgtggagactccactggaggcgcctactatctaaagtgcttgagagtcatccgcggacaaggtcccctggattggtgggaattcgccccacaccgttaccggtatcaccaatggccctgagatgttgcagtcctattcagccaactgcatccttctggccactgacgcctgtcccgctagaagcccgtgcgcccccgcatcctcccggcccgaatccacccactccacgcggggtcacaggggggaacacctacgccgtacccgcactcccaccaggggccgtcggagatgggccacctagagttgactttccaaggtccaggctcagattcaaagagaagctcggtgaaggacagttcggagaagtgcatctatgcgaggtcgattccccccaggatttagtgagccttgattttccactgaacgtacggaaaggccatcccctattggtggccgttaagatacttcgcccagatgcaacaaaaaacgctaggaacgattttctaaaagaagtcaaaattatgtcaagactaaaagacccaaacattatccggttgttgggtgtgtgtgttcaggacgaccccttgtgtatgatcacagactacatggagaatggcgatcttaaccagtttctgagcgcccatcagctagaggataaagcagcagagggtgcacctggggatggccaggctgctcagggacccacgataagttatccgatgctccttcatgtggcggcccaaattgcgtccggcatgcgctatctcgcaactctgaatttcgtgcatttctggggtgagcgtcaccgttttctccattag

SEQ ID NO: 10084 - DNA, 447 bp, synthetic construct
  misc_feature 1..447: note = source = /note="Description of Artificial Sequence: Synthetic coding sequence"
  source 1..447: mol_type = other DNA
atgcagaccttccccgtggccggcgccctggaccccgccatcctggacacttcatcaccacaggccctctacaccgtcctgcttattgttttggtgatgatgagtctggtattcggaaagtttgttcccgttaactgggagcctcctcagccacttcctttccctaagtacttacggtgctacagatgtttactcgagacaaaagagctcgggtgcctgctgggttccgatatctgtctcacaccggcaggcagcagctgcatcacacttcataaaaagaattcatctggttctgatgtgatggtctccgactgtagatcgaaggaacagatgagtgattgtagtaatacgcgcacctcccccgtgagcggattctggatcttcagccagtactgcttcctggatttctgtaacgacccacagaatcggggcctttatacgccttag

SEQ ID NO: 10085 - DNA, 732 bp, synthetic construct
  misc_feature 1..732: note = source = /note="Description of Artificial Sequence: Synthetic coding sequence"
  source 1..732: mol_type = other DNA
atgggccccgaggccctgagcagcctgctgctgctgctgctggtggcctccggcgatgcggacatgaaaggccactttgatcccgcaaaatgccggtatgccttggggatgcaggaccgcactatcccggattcagacatatctgccagctcgtcatggagcgacagtacggccgcccggcactcccgcttggagtcatcggatggggacggcgcctggtgccccgcgggcagcgtcttcccaaaggaggaggagtacctgcaggtggacttgcaaagactccaccttgttgctctggtggggacgcagggcaggcacgccggcggcctgggaaaagagttttctcgaagctacagactaaggtactctagggacggtcgcaggtggatgggctggaaggacagatggggacaagaggtgatatcaggcaatgaagatccagagggggttgtgttaaaagatctcggccctccaatggtcgcccgactagttcgcttttaccctcgagctgaccgcgtgatgtctgtgtgtctccgtgttgaattgtacggctgcctgtggcgggattgctctatgggcgtgtgggcttcatggcagatggtctggtggggttggatgaccctaggccgggtgagaagttgcggctcaggccaggctatgaccatgtgggatggtgctactacagccagccccgtggccatgtggcggtggagcttatcactgaccggatag

SEQ ID NO: 10086 - DNA, 732 bp, synthetic construct
  misc_feature 1..732: note = source = /note="Description of Artificial Sequence: Synthetic coding sequence"
  source 1..732: mol_type = other DNA
atgggccccgaggccctgagcagcctgctgctgctgctgctggtggcctccggtgatgcagacatgaagggacattttgatccagccaaatgtcgctacgctctaggcatgcaggaccgaactatccctgacagcgacatctcggcttcaagctcttggagcgattcgacagcagcccgacacagcagactggaatccagcgatggtgacggggcttggtgtccagcaggcagcgttttccccaaggaggaggaatacctccaggtggatcttcaaagactccatctcgtggccctcgtgggaacacagggaaggcacgccggaggccttggcaaggagttctctcgctcttatcggctgcgctatagtcgggatgggaggcgttggatgggttggaaagatcgctggggacaagaagtgatatctggcaatgaggaccccgagggcgttgtgttgaaagacttaggtccaccaatggtagctaggttagtgagattctatcccagagctgaccgcgtcatgagtgtatgtctgcgcgtggaactatacggatgcctttggcgcgactgcagtatgggagtctgggcaagctggcagatggtgtggtggggatggatgactctgggtcgagtccggtcctgcggaagcggccaggccatgacaatgtgggacggggctaccaccgcgtcaccagtggccatgtggcggtggtccctgtcattgaccggctag

SEQ ID NO: 10087 - DNA, 1224 bp, synthetic construct
  misc_feature 1..1224: note = source = /note="Description of Artificial Sequence: Synthetic coding sequence"
  source 1..1224: mol_type = other DNA
atgcggctgctggcctggctgatcttcctggccaactggggcggcgcacgcgctgagccagggaagttctggcatattgcagatctgcatcttgatccggactacaaggtctctaaagacccctttcaagtgtgtcctagcgcggggagccagcccgttcctgacgcgggcccttggggggactatttgtgcgactctccatgggcactcataaactctagtatctacgctatgaaggagatcgagcccgagccggatttcatcttgtggacgggcgacgacactcctcacgtaccggacgagaagctcggagaggctgccgtacttgaaatcgtggagcggctaacgaaactaatccgggaagtattccctggggccttttattgcgaaaagctcccggggcccagcggcgctggcaggatcgtggttctgaatactaatctgtactatacttccaatgccttgaccgcagatatggctgatccagggcagcaatttcagtggctcgaagacgtactgacagatgcctctaaagcaggcgatatggtgtatatcgtcggccatgtaccccccggattttttgaaaaaacccaaaacaaggcgtggttccgcgaggggttcaacgagaaatacctgaaggttgtgcgcaaacaccacagagtgatcgccgggcagttcttcgggcaccatcataccgactcatttcgaatgctctacgacgatgccggagtacccatttccgcaatgtttatcacccctggcgtgaccccttggaaaaccacacttcccggtgtggtgaacggcgccaacaaccctgctatccgcgtatttgagtacgatagagctacattgtcgctgaaggatatggtgacttactttatgaatctcagtcaggccaatgcacagggcaccccacgttgggagttggagtaccagctgacagaagcctacggcgtgccagacgcaagcgcccacagtatgcacacagtgttggacaggatcgctggggaccagtccactctgcagcggtactacgtttataacagtgtaagttacagcgccggagtgtgtgatgaggcctgttctatgcagcacgtttgcgcaatgcgtcaggtcgacatcgacgcttatacaacttgtctctacgccagcgggaccacccccgtcccccagctgccactccttctgatggcactgctcggcctgtgcacattggtcctgtag

SEQ ID NO: 10088 - DNA, 756 bp, synthetic construct
  misc_feature 1..756: note = source = /note="Description of Artificial Sequence: Synthetic coding sequence"
  source 1..756: mol_type = other DNA
atgccccacctggccagcctgttcaccgccagcagccggtgctgcccccatccattgcgccctgaaggctcaggggccatggggcccgaggccctctcaagcctgctcttgctccttctggtcgcatcgggcgacgccgatatgaaaggccacttcgaccctgcaaaatgtagatatgccctcggcatgcaagatcggaccatcccggactctgatattagcgcaagctccagttggtctgattcaacggctgctcgccactcaagactggagagttccgatggtgatggtgcctggtgcccagctggttccgtgttccctaaggaagaagagtatctgcaggtcgaccttcagcggctgcatctcgtggccctggttggaacccagggccgacatgcggggggtctgggcaaagaattctcacgcagttacaggctacggtacagtagggacgggagacgatggatgggatggaaggatcgatggggacaagaggtcattagcgggaacgaggatccggaaggagttgtactgaaggacctgggaccacccatggttgctcggctcgttagattctatccacgggccgatagagtgatgtctgtctgcctgagggtggagttgtacggctgcctgtggaggggcgagtggctctcgtttttagggatctgtttcctgtcgcgcggactcgaagggggggagtgtggtgaatgggcctcccgaattccctcaccagcagggaagttatcgctatag

SEQ ID NO: 10089 - DNA, 756 bp, synthetic construct
  misc_feature 1..756: note = source = /note="Description of Artificial Sequence: Synthetic coding sequence"
  source 1..756: mol_type = other DNA
atgccccacctggccagcctgttcaccgccagcagccggtgctgccctcacccgttgcgtcccgaggggtctggagccatggggcctgaggcactgtcgagcctgctgctactccttctggtggctagtggggatgccgacatgaagggtcactttgatcctgcaaagtgtcgctatgcactgggcatgcaggatagaaccattccagatagtgacatatctgcctcctcctcttggtctgactccactgcagcaagacacagcaggttggagtcatccgacggcgatggggcgtggtgcccagcaggctcagtattcccaaaagaagaagagtatctgcaggttgatctccaacgcttacaccttgtcgctctggtggggacgcaggggcgacacgctggaggtctgggaaaggagttctccaggtcatataggctgaggtactcccgagatggaagaagatggatgggatggaaagaccgctggggccaggaggtcatctcaggaaatgaagaccctgaaggtgttgtcctgaaggatctgggtccacccatggtggcacggttagtgagattctaccctcgggctgatcgggtcatgagcgtctgtctgcgagtcgagttgtatgggtgtctgtggcggggagaatggctttcattcttgggaatttgcttcctttcacgcgggttggagggcggagagtgcggcgaatgggcttcccgaattccctctcctgctggcaaacttagtttgtag

SEQ ID NO: 10090 - DNA, 456 bp, synthetic construct
  misc_feature 1..456: note = source = /note="Description of Artificial Sequence: Synthetic coding sequence"
  source 1..456: mol_type = other DNA
atggacctggtgctgaagcggtgcctgctgcacctggccgtgatcggcgccctcttagccgtaggggctactaaggtgccaaggaatcaagactggctgggagtgtcccgccaactgcgtacaaaagcatggaatcgacagctgtatccagagtggaccgaagctcagcgcctggattgttggcggggcggccaagtgagtcttaaggtgtcgaacgatggcccgacactgatcggggctaacgcctccttctctatcgccctcaatttcccaggatcacagaaggtgctgcccgatgggcaggtcatctgggtgaacaatacaattataaacgggagccaggtgtggggcgggcaaccagtgtatccccaagagaccgacgatgcatgcatatttcccgatggcggaccgtgcccaagcggaagctggagtcaaaaaagatcttttgtttactag

SEQ ID NO: 10091 - DNA, 216 bp, synthetic construct
  misc_feature 1..216: note = source = /note="Description of Artificial Sequence: Synthetic coding sequence"
  source 1..216: mol_type = other DNA
atgcccgccggcgtgcccatgagcacctacctgaagatgttcgccgctagcctcctggccatgtgcgccggagccgaagtcgtgcatagatattacagacctgatcttacaataccggagattccccctaaacgcggggaactcaagacggaattactgggtctaaaagagcggaagcataaacctcaagtgtctcaacaagaggagctgaaatag

SEQ ID NO: 10092 - DNA, 447 bp, synthetic construct
  misc_feature 1..447: note = source = /note="Description of Artificial Sequence: Synthetic coding sequence"
  source 1..447: mol_type = other DNA
atgcagaccttccccgtggccggcgccctggaccccgccatcctggacacatcctccccgcaagccctgtacacagttttgctaattgttcttgttatgatgtccctggtgttcggcaagttcgtaccagtaaattgggagcctccccagccattaccattccccaaatacctgaggtgttatcggtgtctcctggagaccaaggaattgggctgcctccttggatccgatatctgtcttacccccgccggtagcagctgcatcacgctacacaagaaaaattcttccggctctgatgtgatggtgtcggattgcaggtccaaggaacagatgtctgattgtagtaatacacgaacttctcccgttagcggtttttggatcttttcacaatactgctttctggacttctgtaacgatcctcagaacagaggcctgtacaccccatag

SEQ ID NO: 10093 - DNA, 447 bp, synthetic construct
  misc_feature 1..447: note = source = /note="Description of Artificial Sequence: Synthetic coding sequence"
  source 1..447: mol_type = other DNA
atgcagaccttccccgtggccggcgccctggaccccgccatcctggatactagctcccctcaggccttatataccgtgctcctgatagtgctggtcatgatgtcactcgtcttcgggaaatttgtgcctgtgaattgggaacctcctcagcctctgccattccccaagtacctgcgttgctaccgatgccttctggagaccaaggagcttgggtgtctgttggggtccgatatatgtctgacccccgccggttcttcctgtattaccctgcacaagaaaaacagctccggcagtgacgtaatggtgtcggactgcaggagtaaggaacagatgtctgactgtagcaacacacggacatctcctgtttccggattctggatcttttcacagtactgttttctggatttctgtaatgacccacagaaccgaggactctacactccatag

SEQ ID NO: 10094 - DNA, 1326 bp, synthetic construct
  misc_feature 1..1326: note = source = /note="Description of Artificial Sequence: Synthetic coding sequence"
  source 1..1326: mol_type = other DNA
atggagttcgagttcgaccggctgcgggccttccaggccatgcaggttcattgcaataatatgcatacgttgggagcccggttgccaggaggtgttgagtgtagattcaggagggggcccgccatggcgtgggagggggagcccatgcggcataatctgggaggaaacttgggcgacccaagagctagagccgtgagcgtgcctcttggtggacgggtcgccagatttctgcaatgcagatttctgttcgccgggccttggttactctttagcgagataagcttcatcagtgatgttgttaacaatagttcacctgcattgggcggaacgttccctcctgctccatggtggcctcctgggccgccccccacgaatttttccagcctggagctggaaccccgaggccaacagccggttgccaaagccgaaggatctccaacagccatcctgatcgggtgcttggtggccattattcttctgctcctgctaataatcgctctcatgttgtggagactccattggcgacgcttactgagcaaagtgttagagagccaccctagaacacgcagccccggtttggtaggaatccgaccaacaccattacctgtgtcaccaatggcgttacggtgctgctccccaatacagcctacagcttccttctggcctctgacaccagtgccactggaagcacgcgctccccctcaccctcccgggccaaatccccctactccccgaggagtgaccggtggcaatacttatgccgtcccagccctgccaccaggggccgtaggtgacgggcctcctcgggttgattttccgcgaagtcgactgcgctttaaggagaagctgggagagggccagtttggagaagtgcatttgtgtgaagtggactcacctcaggatctggtgagcttggactttccattaaacgttagaaaaggtcatccactccttgttgcagtcaagattttgcggcctgacgccaccaagaacgcacgaaatgactttctcaaggaggttaagatcatgagccgcctgaaggacccaaacattatcaggctcctgggtgtgtgcgtacaggatgaccccctttgtatgattaccgactatatggagaatggcgacctaaatcaattcctgtccgcccaccagttagaggataaagcggccgaaggggccccgggcgacggacaagcagcgcagggaccaacgatcagttatcccatgctcctccacgtggcggcacagatagcttcaggcatgcggtatctggccaccttgaactttgtgcatttctggggggaaagacacaggttcctgcattag

SEQ ID NO: 10095 - DNA, 2067 bp, synthetic construct
  misc_feature 1..2067: note = source = /note="Description of Artificial Sequence: Synthetic coding sequence"
  source 1..2067: mol_type = other DNA
atgctgcccaccgaggtgccccagagccaccccggccccagcgccctgctgctgctgcagctgctcctaccaccaacaagcgctttctttccaaacatttggtcacttctcgcggccccaggctcaatcactcaccaggacctgacagaggaggcagcactgaatgtgactctacagctgtttttggagcagcctccaccgggaagaccacctcttcgactggaggatttccttgggaggactctcttagcagatgacctatttgcagcctatttcggccccggatccagtaggcggttccgagcagctctaggcgaggtgagccgagcaaacgccgcccaagacttcctccctactagccgtaatgatcccgatttgcacttcgatgcagagaggctcggacaaggcagagcacggctcgtgggggccctgcgggaaactgttgtggcagcccgggcgttagaccatactctcgcccggcagagactgggggccgcgcttcacgccctgcaagacttctactcacattctaattgggttgaactgggagagcagcaacctcaccctcacctcctgtggcccaggcaagaacttcagaaccttgcacaggtcgcagatcctacttgtagcgactgcgaggaattaagttgccctaggaactggctgggttttacactgctaaccagcgggtacttcggcacacacccacccaagccgcccggaaagtgctcacacgggggccacttcgaccgatcatctagccagcctcccagaggaggcatcaataaagactcaacatctccgggctttagcccccaccacatgcttcacttgcaagcagctaagctggcgctactggccagcatccaggccttttccctcctaagaagcagactgggcgacagagatttctcacgcctcctcgacataacgcccgctagttctctgagcttcgtcctcgacactactggcagcatgggtgaagagatcaacgctgccaagatccaggccagacatctcgtggagcagagaagaggctctcctatggagcctgtgcattacgtgcttgtacctttccacgaccctggctttggaccagtctttacgactagcgaccccgacagcttctggcagcaactgaacgaaatccacgctctcggtggcggcgacgagccagaaatgtgtctctctgctcttcagctggccctgcttcatactccgcctctaagtgacattttcgtcttcactgacgcctccccaaaggacgcattcctcaccaatcaggtggaatccctcacccaagagaggcggtgtcgtgtcacatttctggtgactgaggatactagccgcgtgcagggaagggcccgccgcgagattctctcccccttgcgatttgagccttataaggccgtagctctggcgagtggcggagaagtgatcttcaccaaggatcagcacattcgcgatgtagccgctatagtgggcgagtctatggctgctctggtcacccttccactggatccaccagtcgttgtaccaggacaacccctggtgttctccgtggatggactcctgcagaaaatcactgtacggatccacggcgatatctccagtttttggattaagaatcctgctggcgtgtcgcagggtcaggaggaaggcgggggcccactgggccacacgagacgtttcgggcagttctggatggtcactatggatgacccgcctcaaaccgggacgtgggagattcaggttacagcggaagacaccccaggagtgcgcgtgcaggcccagacgtccctggatttcctcttccactttggaatcccgatggaggatgggccccaccctggtctgtaccctctgacccagcctgttgcgggtcttcagacccagttgctggtggagtctcagtcttggggctcaagtgctgcatttttgcctcgacacccaagtcgcggcccacgggggtgccggactcgtccaggcgcgttgggagcccgtggtactagtggcgcaagaagccctaggtcactggctgttgcccatgctgccgtgcatccttag

SEQ ID NO: 10096 - DNA, 1326 bp, synthetic construct
  misc_feature 1..1326: note = source = /note="Description of Artificial Sequence: Synthetic coding sequence"
  source 1..1326: mol_type = other DNA
atggagttcgagttcgaccggctgcgggccttccaggccatgcaggtacactgcaacaatatgcacaccctgggagcgcgcctgcccggcggagtggagtgccgattcagaagaggacccgcaatggcctgggaaggtgagcctatgcggcataacctgggaggaaatttgggggaccccagagctagagctgtgagcgtgccactcgggggccgggtagcacggttcctgcagtgccgattcttattcgcgggcccatggctcctgttctccgaaatctcattcattagcgacgtagtgaacaattcgtcacctgccctcggcggaaccttcccacctgctccatggtggcctccaggaccaccgcctacaaactttagcagcctagaactcgagccccgcggccaacagcccgtagcaaaagctgaaggatccccaacagccatattgattgggtgcctggtcgccatcatcttgctcctattactgatcatagccctcatgctgtggcggttacactggcgtcgtcttctcagtaaggtgctggaatcccacccgcgcacccggtcccccggattagtgggtattagaccaaccctgcttcctgtctctccaatggctctgagatgctgcagccctattcagccgacagccagcttctggccactgactcccgtgccactcgaagccagagctccgccccatcccccaggtcccaatcctccgacacccagaggggttaccggcgggaatacatacgccgtgcccgcccttcctccaggggccgttggcgacgggcccccacgggtagactttccacgctccagactgcggtttaaggaaaaactcggtgagggacagtttggggaagtgcacttgtgtgaggtagactcacctcaagatcttgtgtctttagactttcccctgaacgtccggaagggccatccccttcttgtcgcagtgaagatactcagaccagacgccaccaagaacgctagaaacgacttcctaaaggaggtgaaaattatgagcaggctgaaagatccaaatatcatccgccttcttggagtgtgtgtgcaggacgaccccctgtgtatgatcacagactacatggagaacggagacctgaaccaatttttatccgcacaccagctagaagataaggcggccgagggagcaccgggggatggacaggctgcccagggccctaccattagctatccaatgctgctgcatgtggccgcccagatcgcttccggaatgagatacctcgccaccctgaacttcgtgcatttttggggagaaaggcataggtttctgcattag

SEQ ID NO: 10097 - DNA, 2559 bp, synthetic construct
  misc_feature 1..2559: note = source = /note="Description of Artificial Sequence: Synthetic coding sequence"
  source 1..2559: mol_type = other DNA
atgctgcccaccgaggtgccccagagccaccccggccccagcgccttactgctgttgcaacttttactgcctccaacaagcgcattcttcccaaacatctggtctcttcttgcggcccctggctccattacacatcaagacctcaccgaggaagccgctctcaacgtaacgctccagctttttctggagcagccccctcctgggcggcctcccctgcggctagaagatttcctcgggcgaacgctgctggccgacgatctcttcgccgcttattttgggccggggtcttcccggcgcttccgcgcggccctcggagaggtcagtcgggcaaatgcagcacaggacttcctccccacctccaggaatgaccccgacttgcacttcgacgccgaaagactaggacagggccgcgctaggctcgtcggggccctaagggagacagtagttgccgctagggctctggatcataccctagcaaggcagcggctgggcgccgcactccatgctctgcaggatttctattcacactcaaattgggtggaattgggggagcagcagcctcacccacaccttctctggccccggcaggagctacaaaatcttgcacaggtggccgatcctacatgctccgactgtgaggaactgagctgcccacggaactggcttggtttcactctgctcacatcgggttacttcggaacccacccccccaagcctccgggcaaatgcagtcatggggggcacttcgaccggtctagttcacagccgccaagaggcgggatcaataaagactccacgtccccgggattctccccccatcatatgcttcacttgcaagctgccaagctggccctgctggcttcaatccaggccttctccttactgaggagtcgactgggcgaccgcgacttcagtcgtctcctagatatcacaccggcgagctcactctccttcgtccttgacaccaccgggtctatgggagaagaaattaatgctgcaaagatccaggcccggcacctggtagaacagcggcgaggatcaccgatggaaccggtacattacgtgctggtcccctttcatgacccaggcttcggaccagtgtttacaactagcgacccagactcattttggcagcagctaaatgagattcacgccttgggcggtggcgatgaaccagagatgtgcctgtctgctctgcagctggctcttctgcacacgccaccattaagcgatatctttgtgtttactgatgcctctccgaaggatgcctttttaacaaatcaggtggaatcactcacccaggagagaaggtgtcgtgttacttttctggttacagaagacacctctcgggtacaggggagggcgagaagggagattttatcaccgctcagatttgagccgtacaaagcagtggctctggccagcgggggagaggtgatcttcacaaaagatcagcacatcagagacgtcgcagcaatcgtgggtgaatccatggccgccttagtaaccctccccttggacccccccgtggtggtccccggccagcccctcgtgttcagcgttgacggcctcctgcagaagattacggtgaggattcacggagacattagctcattttggataaagaatccagccggggtgagccagggtcaagaagagggtggagggcccctagggcatacccggcgatttggacaattctggatggtcacaatggatgaccccccacaaactggaacttgggaaatacaggtaaccgctgaagacacacccggcgtccgcgtgcaagcccagacaagcttagacttcctgtttcattttggcattcccatggaagacggccctcatcctgggttgtaccctctgacacagccagtagcgggccttcaaacacagctccttgtggaagttacggggctcggttcccgggcaaaccccggagacccacagcctcatttttcccatgtgattctgagaggagtccctgagggagccgaactgggacaagtgcccctggaacctgtgggaccaccagaacgagggcttctcgctgcttcgctgagccccacccttctgagtacacctcgaccattcagtctggagcttatcggtcaggatgccgcaggcagacgcctgcacagggcagcaccccaaccgagtactgtggtaccggtgcttctggaactgtccggaccgtccggttttctcgctccagggagcaaagtcccactttctttacgcatcgcttccttctctggacctcaggacttggacctgcgcacatttgttaacccttccttctccctgacttctaatcttagtcgggctcacctggagctgaacgagagtgcgtggggtcggttgtggcttgaggtgccagatagcgctgcacccgattcagtggtaatggtgacagtaacggcaggtggtagagaggccaaccccgttcccccaacccacgctttcctcagattattagtctccgctccggcgccccaggtgcgcaatcattatttcccatcacaaggtccagctcaccacccttaccgcttgatctag

SEQ ID NO: 10098 - DNA, 732 bp, synthetic construct
  misc_feature 1..732: note = source = /note="Description of Artificial Sequence: Synthetic coding sequence"
  source 1..732: mol_type = other DNA
atgggccccgaggccctgagcagcctgctgctgctgctgctggtggccagcggggacgctgatatgaagggacactttgaccccgccaaatgcagatatgcactcggaatgcaggacagaacaatcccagacagtgacatttccgccagttcttcatggtccgactccacggccgcccgccactcgcgtttggagtcatctgacggcgacggcgcttggtgccctgcaggaagtgtcttccctaaagaggaggagtatctgcaggttgacctccagcggcttcaccttgtcgcattagtggggactcagggaaggcatgcggggggactcggaaaagaattctcgagaagttatcggttgcgttactcccgcgacgggagaagatggatgggctggaaggatcgatggggtcaggaggtcatttcagggaacgaggacccagagggtgtcgtacttaaggatctgggaccgcctatggtcgcaaggctcgtccgcttctacccaagggcagatcgtgtcatgtctgtgtgcctgcgggtggagctgtatggatgtctgtggagagattgttctatgggagtttgggccagctggcagatggtatggtggggctggatgacgctggggcgtgtacgaagctgtgggtctggccaggcaatgacgatgtgggacggcgcgacgacagcaagccccgttgctatgtggcgctggagcttgagtcttacaggatag

SEQ ID NO: 10099 - DNA, 2760 bp, synthetic construct
  misc_feature 1..2760: note = source = /note="Description of Artificial Sequence: Synthetic coding sequence"
  source 1..2760: mol_type = other DNA
atgggccccgaggccctgagcagcctgctgctgctgctgctggtggcttccggtgatgctgacatgaaaggccactttgacccggccaagtgtcggtatgcattgggaatgcaggacaggaccattccagactctgatatcagcgccagctccagctggtcagattccactgcggcccgacattccaggttggaatcttccgatggagacggggcttggtgcccagctggtagcgtgttcccgaaagaggaggagtatctccaggtggatttgcaacgattgcacctagtcgccttagttggcacccagggacggcacgcggggggtctgggtaaagagttctcaaggtcttaccgcctcagatacagtcgggatggccgcaggtggatgggatggaaggatagatggggacaggaagtgatctcaggcaacgaagacccagaaggcgtggtactgaaggaccttggtccacctatggtggcacgcttggttagattttatccgcgtgccgatcgagtgatgtccgtgtgcctgagggtcgagctctacggctgtctgtggcgagacggtctgctctcttacaccgcacccgtgggacagactatgtatctgtctgaagccgtgtatcttaatgactcaacttacgacggccacacagtaggcggactccagtacggcggactcgggcagctcgccgatggtgttgtgggattggatgattttcgcaaaagtcaggagttaagagtgtggcctgggtatgattatgtgggttggagtaatcacagcttctcatccggttacgtagagatggaattcgagttcgacagactgcgagccttccaggctatgcaggttcattgcaacaacatgcacacgctgggcgcgaggcttccaggcggtgtggagtgtcgttttcggcgcggcccagccatggcttgggagggcgaacccatgcgacacaacctcggcggtaacctcggagaccctcgagcgagagccgtctccgtccctctgggaggtagggtcgctagattcctgcagtgccggtttcttttcgccgggccctggctccttttcagtgagattagcttcatctcagatgtggtgaacaattccagcccagccctgggtggaaccttcccacccgccccatggtggccaccggggccaccgcccacaaatttttcatctttagagctggagcctcgtggccagcagcctgttgccaaagcagagggcagcccaacagctatcctcatcggatgccttgtggccatcatcttgctactccttctcataattgccctgatgctgtggcgcttacattggaggcggctcctcagcaaagccgagcgccgggtcttggaggaggaactgacagtgcacttgtctgtgcccggcgatactatccttatcaacaaccgccccggccctagggaaccccccccctatcaggaaccaagacctcgggggaacccccctcatagtgctccctgtgttccaaacggatcagcccttttgctgagcaatcctgcctatagactgttgctagcaacctatgcgaggccacctaggggacctggcccacccacccccgcatgggcaaagccgacaaacacacaggcatactctggagactatatggaaccagagaaacccggcgcccccttgctcccacccccccctcaaaatagtgttccccactatgctgaagctgatatcgtgaccctgcagggggtgacaggtggaaatacctacgcggtaccagctcttccccccggggccgttggcgacggcccacctcgggttgatttccccaggtcgaggctgcgctttaaagaaaaacttggggagggacagtttggcgaggtacacttgtgtgaggtagactctcctcaggatttggtgagcctggactttccactgaatgtgagaaaagggcatccactgttggtggcagttaagattctaagacccgacgcgaccaagaacgcctctttctcactcttcagtagaaacgacttcctcaaggaagttaagattatgtctcggctcaaggatcctaacatcattagactgctgggggtttgtgtgcaagacgatccactgtgcatgatcaccgattacatggagaacggcgacttgaatcagttcctgagcgctcaccaactggaagataaggcagccgagggggcgccaggtgatggccaggcagcccaaggtcctactatcagttatccgatgttgctgcatgtggccgcccaaatcgcatccggcatgcgctacttagctacactgaatttcgttcatagggatctagcaacaaggaactgtttagtcggcgagaacttcactatcaagattgcagacttcggaatgagtcgtaacctgtacgcaggagactactaccgggttcaggggcgagcagtgctgcctatcaggtggatggcatgggagtgcatcctaatggggaagtttacgacagcctccgatgtttgggcatttggggtgactctgtgggaggtgctgatgctgtgtcgcgctcagccatttggacagctgacggacgaacaggttattgagaatgccggggaattcttcagagatcaaggtaggcaagtctatctctctcggccccccgcctgtccccagggtctctacgagctgatgctgcggtgctggtcaagagagtccgagcaacggcccccgtttagccagctgcatcgattcctggccgaagacgcactgaacactgtgtag

SEQ ID NO: 10100 - DNA, 2700 bp, synthetic construct
  misc_feature 1..2700: note = source = /note="Description of Artificial Sequence: Synthetic coding sequence"
  source 1..2700: mol_type = other DNA
atgctgctgctgctgctgctggcccccctgttcctgcggccccccggtgcggggggagcccagactccgaatgctacgtcagagggttgccaaattatccatccgccttgggaaggaggtatacggtaccgaggattgacacgagatcaggtcaaggccatcaattttctccccgtagactacgaaatagaatacgtgtgtcgcggggaacgggaggtggtgggccccaaggttagaaagtgcttagccaatggctcgtggaccgatatggataccccctctagatgtgtcaatcgcaccccacattcagagagacgggctgtctatataggcgctttgttcccaatgtccggcggctggcccggaggccaagcctgccagcctgcagtagagatggctttagaagatgtaaactccagaagagacatattgcctgactacgaactaaagctcatccatcacgactctaagtgtgatccagggcaggccaccaagtacttgtatgaactgttgtataacgatccaatcaagatcattctgatgcctggctgttcctctgtatcaaccctggtcgcagaagcagcacgtatgtggaaccttatcgtcctctcttacggatcgagttccccagctcttagtaaccgacagcgcttcccaaccttttttcggacacacccgtcagccactcttcataaccctacacgggtgaaactatttgagaaatggggttggaaaaagatcgcaacaatccagcagactaccgaggtcttcactagcacgctcgatgacctcgaagaacgcgtgaaggaggccggcatagaaattacctttagacagtctttcttcagcgacccagcagtgccagtgaaaaatctgaagagacaggatgcaaggatcattgttggcctgttctatgagaccgaggcacgcaaagttttttgcgaggtttataaggagcgactcttcgggaagaaatacgtgtggttcttgataggctggtacgcggacaattggttcaagatttacgatccttctatcaactgtacagtggacgagatgactgaagcagtggaaggtcacatcacaactgagattgtgatgctgaaccctgccaatacccggagcatctccaatatgacgtcacaagaatttgtggagaaattgaccaaacgccttaaacgccaccccgaggagaccggcggctttcaggaagctcctctggcgtatgacgcgatctgggcccttgcacttgccctgaataaaacctccggaggcggaggtcgctctggtgtccggctggaagacttcaactacaacaaccagacgatcaccgatcagatctatcgcgctatgaactcgtcctcctttgaaggcgtgagcgggcacgtggtattcgacgcatccggaagtcgcatggcatggaccctgatagagcagctgcagggcggctcatacaagaaaatcggatattatgactccacaaaagatgatctgtcctggtccaaaaccgacaagtggatcggcggctccccacccgccgaccaaacactggtgatcaagacgtttaggtttctctcccaaaagctttttatttctgtcagcgttctctccagcctgggaatagttctcgccgtggtatgcctgtcttttaacatttacaacagtcacgttcgttatatccaaaactcacaacctaacctcaacaacctgacagccgtagggtgcagccttgcgcttgctgctgtgtttccgctcggactggacggctaccatatcgggcgcaaccagttcccattcgtctgccaggccagactgtggctcttaggactgggcttttctcttggttacggttccatgttcacaaaaatatggtgggtgcatacagtcttcaccaagaaagaggaaaagaaagagtggaggaagaccctggaaccctggaagctgtatgctacagtgggcctgctggttggcatggacgtgttgacattagctatctggcagatcgtagacccattacacagaaccatcgaaacattcgccaaggaagagccgaaagaagatattgatgtgtcaatcctgccacagctcgagcactgtagcagccggaagatgaacacgtggttagggatcttctatgggtataaaggactgcttttactgttgggaattttcctggcttacgagacaaagagcgtgtcgactgaaaaaattaacgaccacagggccgtgggcatggcaatctataatgtagcggtgttgtgcttaataacggctcccgtgacgatgattctttcgtctcagcaggatgccgcgttcgccttcgcaagcctcgctatcgtgttctcttcttatattacactggtggtcctctttgttccgaaaatgaggaggctcatcactcggggagaatggcaatctgaggctcaggataccatgaaaacgggctcaagtaccaataacaatgaagaggaaaaatcaagactgctggaaaaagagaacagagagctggaaaaaattatcgctgagaaggaggaaagagtgtcagaacttagacaccagttgcaatcacgccaacagctgcggtcacgcaggcatcctccaactccaccagagccatcggggggcctgccaaggggtccccctgagcccccagaccggctcagctgtgacggctctagagtgcacctactatataagtag

SEQ ID NO: 10101 - DNA, 447 bp, synthetic construct
  misc_feature 1..447: note = source = /note="Description of Artificial Sequence: Synthetic coding sequence"
  source 1..447: mol_type = other DNA
atgcagaccttccccgtggccggcgccctggaccccgccatcctggatactagctctccccaggctttatatacggtgttactgatcgttctcgtgatgatgagcctggtcttcggaaagtttgtccccgtcaattgggaacctccacaaccacttcctttcccaaaatatctccggtgctacaggtgtctcctggaaactaaggagctgggttgcctgttgggaagcgacatctgtcttacacccgccgggtcaagttgtataactctgcataagaaaaattctagcggctcagacgtgatggtgtccgactgcagatccaaagaacaaatgtctgactgcagtaacacaagaacgtccccagtcagtgggttttggatattctcgcagtactgttttttggatttttgtaacgacccccaaaacagaggcctctacactccctag

SEQ ID NO: 10102 - DNA, 516 bp, synthetic construct
  misc_feature 1..516: note = source = /note="Description of Artificial Sequence: Synthetic coding sequence"
  source 1..516: mol_type = other DNA
atgcggcacaacctgggcggcaacctgggcgacccccgggcccgggccgtatccgtcccactcggcggccgcgtcgctcgcttcctccaatgtcgatttcttttcgctgggccttggttgctattctcagagattagctttatcagtgatgtggtgaataatagttcccctgcacttggtgggacctttccccccgccccctggtggcctcctggcccgcctccaacaaacttctcgagccttgaactggagccccgcggacagcaacccgtagcaaaggccgagggaagccccacagccatcttgatcgggtgcctcgtcgccatcatcctcctactacttctgataattgcgttgatgctctggcgactgcactggcgcagactgctctcgaaggtgctggagtcccatcctcggaccaggtctcccggtctggtgggaatccgacccaccccgctgcctgtctctccaatggcgctggtccacctgtgtgaggtggatagtccccaggattag

SEQ ID NO: 10103 - DNA, 666 bp, synthetic construct
  misc_feature 1..666: note = source = /note="Description of Artificial Sequence: Synthetic coding sequence"
  source 1..666: mol_type = other DNA
atgaccacccagctgcgggtggtgcacctgctgcccctgctgctggcttgctttgtccagacaagccccaagcaggagaaaatgaagatggattgccataaagacgagaaaggtaccatctatgattacgaggctattgccttaaataaaaatgaatatgtgtccttcaaacagtacgtcggaaagcacatcctgtttgtgaatgtggccacctactgcggtctcactgcacaatacccagagttgaatgctctgcaggaagagctgaaaccctacggtctcgtcgttctgggcttcccttgcaatcagtttggcaaacaggaaccaggagataataaagagattctaccaggcctcaaatacgtgcgcccaggcggtggctttgtcccatcgtttcaactgttcgaaaaaggagatgtaaacggtgagaaagaacaaaaagtgttcagttttctgaagcattcatgcccacacccctctgaaattttaggtaccttcaagtcgatctcttgggacccagtgaaggtacacgatatccgatggaacttcgagaagttccttgtcgggcctgatggtatccccgtgatgcgatggagccatagagctaccgtgagttcagtgaaaaccgacatcctggcctatcttaagcaattcaagaccaaatag

SEQ ID NO: 10104 - DNA, 447 bp, synthetic construct
  misc_feature 1..447: note = source = /note="Description of Artificial Sequence: Synthetic coding sequence"
  source 1..447: mol_type = other DNA
atgcagaccttccccgtggccggcgccctggaccccgccatcctggacaccagctctccacaagcactgtacacagttctgctgatcgtgttagtgatgatgtcacttgtcttcggaaaatttgtacccgttaactgggagccaccacagcccctccctttccccaagtacctccgatgctaccggtgtctgctcgagaccaaagagcttggatgcctccttggctccgatatctgtttgacacccgcagggagcagttgtatcactttacacaagaagaactccagtggaagcgatgtcatggtgagtgattgtaggtcaaaggagcagatgtcagattgtagcaacacacggacatcccccgtgtccggcttctggattttttcacagtattgttttttggacttctgcaatgatcctcagaatagaggcttgtataccccgtag

SEQ ID NO: 10105 - DNA, 1737 bp, synthetic construct
  misc_feature 1..1737: note = source = /note="Description of Artificial Sequence: Synthetic coding sequence"
  source 1..1737: mol_type = other DNA
atgctgctgctgctgctgctggcccccctgttcctgcggccccccggcgcaggtggggcacagacaccaaacgcaacgtccgaagggtgccagatcattcaccccccctgggagggcgggatacgctaccgaggacttactagagaccaagtcaaagccattaactttttgccagtggactatgaaatcgaatatgtttgcaggggagagcgggaggtcgtggggcctaaggtgaggaaatgcttggccaacggaagttggactgatatggacactcccagcaggtgcgtgcgaatctgttctaagagttatctgaccttggaaaacgggaaggtgttcctgaccggaggagatttgcccgctcttgatggagctagagtggactttaggtgtgaccccgatttccacttagtcggctcttctagatccatttgcagtcagggccagtggagtacacctaagccacactgtcaggtaaatcggactccccattctgagcggagagccgtctacataggcgctttgttccctatgtcaggaggatggcctggcggccaagcttgtcagccagctgtcgagatggctctggaggatgtgaactctcgccgagatattctgcctgattacgagcttaagcttatccaccacgattccaagtgtgaccccggccaggccacaaagtacctctacgaactcctgtataatgaccccatcaaaattatcctgatgcccggatgctcaagcgtatctactctcgtcgctgaggcagctcggatgtggaaccttatcgttctgagctatggttcctcatctcccgccctgagcaatagacaacggttcccgaccttctttaggacccatccttccgccacccttcacaatcctacccgggtcaagctgttcgagaagtggggatggaaaaaaatcgcgactattcagcaaaccactgaagtctttacttctaccctggatgacttagaggagcgcgtgaaagaggcaggaatcgaaataacgttcagacagagcttcttcagtgaccccgccgttcctgtgaaaaaccttaagcggcaggatgctaggataatcgtggggctcttttacgagacagaagctcgaaaggtgttctgcgaggtgtataaggagagactcttcggcaagaaatatgtgtggtttctaataggctggtacgcagacaactggttcaagatatacgacccttccataaactgcacagttgatgaaatgacagaagctgtggaggggcacattactactgaaattgtgatgctgaaccctgccaatactcgctccatctccaacatgacatctcaggaatttgttgagaagttaacaaagcgccttaagcgccatccagaggagacgggtggttttcaggaggccccgctagcctacgatgctatctgggccctggctttggctcttaataagacaagtgggggcggcgggcgctccggcgtgcgcttagaggattttaactacaataaccagaccattacagatcagatctacagagccatgaactctagctctttcgagggggtttctggccacgttgttttcgacgcctcaggttccagaatggcctggaccttgatagagcagctgcagggtggatcgtacaagaagatcggctactatgacagcacgaaagatgacctctcctggtcaaaaaccgacaaatggattgtaatttctagaacacactctccgacttag

SEQ ID NO: 10106 - DNA, 1737 bp, synthetic construct
  misc_feature 1..1737: note = source = /note="Description of Artificial Sequence: Synthetic coding sequence"
  source 1..1737: mol_type = other DNA
atgctgctgctgctgctgctggcccccctgttcctgcggccccccggcgccgggggggctcaaaccccaaatgccacatcagagggctgccagataattcaccccccatgggaagggggcatacgatacagaggtctgactcgggatcaggttaaggcaataaattttctgccagtcgattacgaaatcgaatatgtttgtcgaggcgagcgagaagtggtgggacccaaggtgcggaaatgcctcgcaaatgggtcttggactgacatggatacacctagtagatgcgtacgcatctgctcaaagtcctatttaacccttgagaatggcaaggtttttttaactggtggggatctcccagccctcgacggcgcccgcgtcgattttagatgtgatcccgattttcatctggtcggcagctcgaggtccatctgttctcaaggtcagtggtctacccccaagcctcattgtcaggttaatagaaccccacactccgaacgtagagctgtttatataggggcccttttcccaatgagcggagggtggccgggggggcaggcttgtcagccagccgtggagatggccttagaagacgttaactcaagacgcgacattctgcccgattatgagcttaaactgatccatcatgacagcaaatgtgaccccggacaggcaactaagtatctctacgagctcctctataacgaccccattaaaatcatcctcatgccaggatgctcctccgtgagcacgttggtagccgaggccgccaggatgtggaatctaatcgtgctgtcatacggaagtagctccccagcactgagcaacaggcaaaggtttcctacattctttaggacccatccttccgctaccctgcacaatcctaccagagtgaagctcttcgaaaagtggggctggaagaagattgcaaccatccaacagacgaccgaggtgtttacatctaccctggatgacttagaagagagagtgaaagaggccggcattgagattaccttcagacagtctttctttagtgacccggcagttccagttaagaacctgaaaaggcaagatgccagaatcatcgtgggactattctatgagacagaggccagaaaagttttctgtgaagtctataaagaaagactgttcgggaagaagtatgtatggtttttgattggctggtacgctgacaactggttcaaaatttacgacccgtctattaactgcaccgtggatgagatgactgaagccgtggaggggcacattaccaccgagattgttatgttaaatcccgcaaatacaaggtccatctcaaacatgacgagccaggagtttgtcgagaaactgacaaagagactcaaacgtcaccccgaggagaccggcggatttcaggaggcccccttagcctatgacgccatctgggccctggccttggctctgaacaaaacgtccggagggggtggacgctctggcgtccgattagaagatttcaattataataatcaaactattacagaccaaatttatcgagcaatgaactcgagttcttttgagggagtaagcggccacgtggtgttcgatgcatcagggagccggatggcctggactttaatcgaacagctgcaaggtggcagctataaaaagatcggctattatgacagcacaaaggatgatctgtcgtggtccaaaactgacaagtggatagtgatttcgcgaacacacagtccaacatag

SEQ ID NO: 10107 - DNA, 756 bp, synthetic construct
  misc_feature 1..756: note = source = /note="Description of Artificial Sequence: Synthetic coding sequence"
  source 1..756: mol_type = other DNA
atgccccacctggccagcctgttcaccgccagcagccggtgctgcccgcatccgttgcgacctgaaggatccggcgcaatgggccccgaggccctgtcctcactgctgcttctgttacttgtggcttcaggagacgctgacatgaaagggcactttgatccagccaagtgcaggtacgcactgggaatgcaagatcggaccattcccgactcagacatctctgcttcgtccagctggtccgacagcacagccgcccgacactctaggctggagtcctccgatggcgatggcgcctggtgccctgctgggtcagttttcccaaaagaggaagagtatctccaggttgatctgcaaaggctgcatctggtggccctcgtaggcactcagggtcgacacgcggggggcctcggcaaagagtttagtcgatcctatcggctccgttacagccgcgacggccgtcggtggatgggctggaaggacaggtgggggcaggaagttatttctggcaacgaggatccagagggtgttgtattgaaggatctcggaccccctatggtggctcggctggttagattctacccgagggctgaccgggtcatgtcggtctgcctgcgtgtcgaactgtatggttgcttgtggcgtggggaatggctgagctttctcggcatctgttttctgtcaagaggtctggaaggaggtgagtgcggcgaatgggcttcgcgcatccccagtcccgccggcaaattaagcttatag

SEQ ID NO: 10108 - DNA, 1764 bp, synthetic construct
  misc_feature 1..1764: note = source = /note="Description of Artificial Sequence: Synthetic coding sequence"
  source 1..1764: mol_type = other DNA
atgcggccccggggcctgccccccctgctggtggtgctgctgggctgttgggcatcggtgagtgcacagactgatgccactcccgcagtcactactgagggattaaatagtaccgaggcagctctcgctaccttcgggaccttccctagtacccgtcctccagggacaccacgggcgcctggcccttccagtggaccccgcccaacgccagtaacagatgtggccgtgttgtgcgtgtgtgacctgtccccggcccagtgcgatataaattgctgttgtgaccccgattgtagtagtgtggactttagtgtgttcagcgcatgcagcgttccggtcgtgacaggcgatagtcaattttgttctcagaaagccgtaatctattctctgaacttcaccgctaacccccctcaaagagtattcgagctcgtagaccaaatcaaccccagtattttttgtatccatatcaccaactacaaacccgccctgtcttttatcaatccggaggtccccgatgagaataacttcgatacactcatgaaaacctctgacgggtttacccttaatgccgaaagctatgtgtcgttcacaacaaagctggacattccaaccgctgctaagtatgaatatggcgtccctctgcaaactagcgatagcttcctgagattccctagttcccttacatcatctttatgcacggataacaatccagccgcttttctcgtgaatcaggccgtcaaatgtacaagaaaaatcaatctggagcaatgcgaagaaattgaagctttgtcgatggctttctatagcagtcccgaaatcctgcgcgttccagacagtcggaagaaagtcccgattactgttcagagtatcgtgatacagtccctgaacaaaaccttaacacggcgagaggacaccgatgtgttgcagcccacactggtcaacgccggccacttctcactgtgcgtcaacgttgtactggaggttaagtacagtctgacatacaccgacgctggcgaagttaccaaagccgatttatcttttgttctggggactgtgtcttcagtggtggttccgcttcaacaaaaattcgaaatccactttcttcaggaaaatacccaacccgtgcctttgtccggtaatcccggctatgtggttgggctccctttggctgctggattccagccacacaaaggcagtggaatcatccaaactacgaatcgctatggccagctgacaattctgcactctactacagaacaggattgtctggcgctggagggggtgcgcactcccgtgctcttcggctataccatgcagtctggatgtaagttgcggttgacgggagcgctcccatgtcaactggttgcccagaaggtgaagagtttgttgtgggggcaggggtttccagattacgtagccccctttggaaattctcaggcccaggacatgctggactgggtgcctattcactttatcacccaaagcttcaaccgaaaggatagctgccagctgcccggcgctttggttattgaagttaaatggacaaagtatggatccctgctcaatccgcaggcaaaaatcgtcaatgtgactgctaatctgatcagcagcagtttcccggaagccaattcaggtaatgaacgcacaatcctgatcagcaccgcagtgacctttgtcgacgtctctgccccagccgaagccggatttagagccccccccgccattaatgccagactccctttcaacttcttctttcccttcgtgtag

SEQ ID NO: 10109 - DNA, 2067 bp, synthetic construct
  misc_feature 1..2067: note = source = /note="Description of Artificial Sequence: Synthetic coding sequence"
  source 1..2067: mol_type = other DNA
atgctgcccaccgaggtgccccagagccaccccggccccagcgccctgctcctgctgcagctgctgttgccacccacctccgctttcttccccaacatttggtcattactcgcagctccgggttcaatcacgcatcaggatctgacggaagaagcagctttaaacgtgacactacagctgtttctcgagcagcctccccccggacgcccaccactgcgcctggaagatttcctgggacggactctgctcgctgacgatcttttcgctgcatacttcggcccagggtcaagccgtagatttagggcagctctgggggaggtctcccgggcaaatgcagcacaggatttcctccccacaagtcgaaacgaccctgacctacattttgatgccgaacgcctgggccaaggcagagcccgtctggtgggagctctgcgagaaacagtagttgccgccagggcactcgaccatacactcgcacgccagcgattaggggcggctctgcacgcgctgcaagatttctacagccatagcaactgggtcgaactgggcgaacagcagccacatccccacttactttggccaaggcaggagcttcagaacctggcgcaggtggctgacccaacgtgctccgactgcgaggaactctcttgccctcggaattggctgggattcactctgctgactagtggatattttggcacgcacccgcctaaacctcctggtaagtgttcacacggcggccacttcgaccgatcatcaagccagccgcccagaggaggtattaataaggatagtacctctcctggcttctcccctcatcacatgttgcacctccaggccgcaaaacttgcgctgctggcttccatacaagccttcagtctgctgagatcaaggttaggcgatagggacttttcccggctgctggatatcactccagcttcatccctgagtttcgttctggacacaacaggcagtatgggcgaggaaatcaacgctgccaagatacaggctcggcacctcgttgagcagagacgaggatcgcccatggaacccgtgcactatgtccttgtgcctttccacgaccccggcttcgggccagtttttacgacgtctgatcctgacagtttctggcagcagcttaatgaaatccatgcactcggcggtggcgacgagcctgagatgtgcctttcagccctgcagctggccctgctgcatactccgcctctcagcgacatattcgtctttaccgacgcttctccgaaagacgcctttttgaccaatcaggttgagtcactgacccaggaaagacggtgtcgggtcacatttctggttactgaagataccagtcgagtgcaggggagggcccgccgcgaaatccttagtccactgagattcgaaccttataaggctgtggctttagcgtcaggaggagaagtgatcttcaccaaagaccagcatattcgcgatgtcgcggctattgttggcgagtcaatggcggccttagtgaccctgccgttagatccccccgtagtggtgccaggccagccgctcgtgttctcggtggatggcctactgcagaaaatcacagtaaggatccatggagatatctcctctttttggatcaagaaccctgcaggagttagccaagggcaagaggaggggggtggcccactgggacatacacggcgattcggacagttctggatggtgacaatggatgatcccccgcagacagggacctgggaaatccaggtgacagctgaagacacccctggggtgcgtgttcaggctcagacctccttggactttttgttccacttcgggatcccaatggaggacggaccccacccaggactgtatcccctcactcagcccgttgccgggttgcagacccagctgcttgtggagagtcagagttggggatcttccgcagccttcctcccccgacacccgtctcggggccctagagggtgtaggacgcgccctggtgcccttggagccaggggaacttccggggctaggtcacctaggtctctagctgttgcacacgccgcagtgcacccctag

SEQ ID NO: 10110 - DNA, 303 bp, synthetic construct
  misc_feature 1..303: note = source = /note="Description of Artificial Sequence: Synthetic coding sequence"
  source 1..303: mol_type = other DNA
atgaccacccagctgcgggtggtgcacctgctgcccctgctgctggcgtgcttcgtgcagacctcacccaaacaggaaaagatgaaaatggattgccataaggatgaaaagggaacaatttatgattatgaggcaattgccctcaataaaaacgagtatgtgtccttcaaacagtatgtgggtaaacacatcctgtttgtgaacgtggctacttattgcggactgacagcacagtatcccggaatgagtgtgcagggggaggatctgtaccttgtaagttccttcttaagaaaaggaatgtag

SEQ ID NO: 10111 - DNA, 705 bp, synthetic construct
  misc_feature 1..705: note = source = /note="Description of Artificial Sequence: Synthetic coding sequence"
  source 1..705: mol_type = other DNA
atgaagaccctggccggcctggtgctgggcctggtgatcttcgacgccgccgtcaccgctccgaccctggaatcaattaactacgatagcgagacctacgacgcgactctggaggacctggataatctgtataattacgaaaacatccccgtcgataaggtcgagattgagatcgcaactgttatgccatctgggaatcgcgagctcttgacccctccgccccagcccgaaaaagctcaggaggaggaggaggaggaagaaagcactccccgactcatcgatggcagtagcccgcaggaaccagaatttaccggtgtgttgggcccccacaccaacgaggattttcctacctgcttgctgtgtacatgcatttccaccacagtctactgtgatgaccatgaactagacgcaatccccccactgccgaagaatacagcctacttctactcacggttcaatcgaataaagaagattaacaaaaacgattttgccagcttgtctgacctgaaacggatcgacttgaccagcaacctgatcagcgagatcgacgaggacgctttccgtaaactgccacagctgcgggaattggttttaagagataataaaattcgccagctacctgagctgcccaccaccttaactttcattgacatttccaacaatcgcctgggccgcaagggtatcaaacaggaggccttcaagtag

SEQ ID NO: 10112 - DNA, 2559 bp, synthetic construct
  misc_feature 1..2559: note = source = /note="Description of Artificial Sequence: Synthetic coding sequence"
  source 1..2559: mol_type = other DNA
atgctgcccaccgaggtgccccagagccaccccggccccagcgccctcttattgctgcagctccttctcccacccacaagcgccttctttcctaatatctggagcctcctggccgccccaggcagcattactcaccaggacttgacagaggaggccgctcttaacgttactctccagttgttcctggaacagcccccccctggccgcccgccattaaggctagaagattttctcggtcgcaccctcctggcagatgacctctttgctgcctactttggccccggatcgtcacgccgtttccgtgcggcactgggcgaagtaagcagagcaaatgcagcacaagattttttacccactagtaggaacgacccggatctgcacttcgatgccgaaagattaggacaaggacgggcaagactagtgggggcattacgggagactgtcgtggccgcccgtgctctggaccacaccctggcccgacagcgactgggcgccgccctgcacgcgttacaggatttctattcccatagcaattgggtggagttaggagaacagcagccccacccgcatctgctgtggccaagacaggagctccaaaatctggctcaagtggccgaccccacttgttctgactgtgaagaactttcttgcccaaggaactggttaggcttcacactcctgacttccgggtattttggcactcatcctccgaagccgccaggcaaatgcagccacggcgggcactttgacaggagctctagtcaaccccctagagggggaattaacaaagacagcacaagccctgggttctcccctcaccacatgctgcatctccaggctgctaagctcgctttgctggccagcatccaggccttcagcctgctgagatctcgcctgggagacagagatttctctagactcctcgatataacacccgcgagttccctgtctttcgtattggacaccacaggttctatgggggaagagatcaacgccgcaaagatccaagcaagacatctcgtggagcagcgacgagggtcacccatggaacccgtgcattatgtgctggtaccgttccatgaccctggttttgggcccgtgtttaccactagtgatccggactccttttggcagcagttgaacgaaattcacgctttgggggggggggacgagccggagatgtgtctcagcgctctccagctggcactgttacacacacctcctctctccgacatcttcgtgttcacagacgcctcccctaaggatgccttcctgaccaatcaggttgaatcgctgacccaagagagaagatgtcgcgtgaccttcctggtcaccgaggatacctccagggtccagggtagagcccgtcgcgagatcctttcacctctccgctttgagccttataaggcagttgctcttgcaagcggtggcgaggtgatctttactaaagatcagcatatccgggatgtggctgcgatcgtcggcgagtctatggccgcgttagtcaccctaccactcgatccgcccgtcgtggtccctggtcagccccttgtgtttagtgtggatggattattacaaaagatcacagtgcggatacacggtgacatctcaagcttttggatcaagaacccagctggtgtctcacagggccaggaagaaggcgggggtccattagggcatactcgacgttttgggcagttctggatggtcactatggacgatcctccccagactggcacatgggagattcaggtgacagcagaggatacacctggggtgagagtccaggctcagacatcactcgatttcttatttcattttgggatccccatggaggacgggccacacccaggcctatatcccttgacccaaccagtcgctggactgcagacccagttactcgtcgaggttactgggctcggcagcagggctaatccaggcgatcctcagccacacttttcacacgtcatactgagaggagtgccagagggcgcagaattaggacaagtacccttggagccagtgggacctccagagcgcgggctgttagcggccagtttaagtcctacactgctctcaactccccgccccttctctttggagctaatcggacaggatgccgctggtaggcggctccatcgtgctgctcctcagccatctaccgtcgtccccgtcctccttgagttgtctgggcccagcggttttctggcaccaggctcaaaagtgccactcagtctgcggatcgcaagcttttccggaccccaggatcttgacctgcgcacctttgttaatcccagcttcagtctaacgagtaacttatcccgtgcccatctggagctgaatgagagcgcttggggaaggctgtggctcgaagtcccagatagcgccgcgccagattctgttgtcatggtaactgtgaccgccggcggcagagaagccaatcctgtgccacctacacatgcattcctgcgtttgctggtgtcagccccggctccacaggtgcgcaatcactatttccccagtcaaggacccgctcaccacccgtaccggctgatttag

SEQ ID NO: 10113 - DNA, 2760 bp, synthetic construct
  misc_feature 1..2760: note = source = /note="Description of Artificial Sequence: Synthetic coding sequence"
  source 1..2760: mol_type = other DNA
atgggccccgaggccctgagcagcctgctgctgctgctgctggtggctagcggtgatgccgacatgaagggccatttcgacccagccaaatgtagatatgcacttggaatgcaggaccgcaccatccctgatagcgatatctccgcgagctcctcttggagtgactcaacagccgcacgccacagtcgcctggagtcgagcgatggcgacggtgcatggtgtccagcgggctcagtgttccccaaagaggaggaatacttgcaggtggatctccagagactacatttggtggcccttgtgggtactcaggggcgtcacgcaggaggcctcggtaaggagttcagtcggagctataggctgagatacagtagggatgggcggagatggatggggtggaaagatagatggggacaggaggtgatcagtgggaatgaagacccagagggggtggtccttaaagacctgggcccaccgatggtggcccgtctagttcgcttttatccaagggctgacagagtcatgagtgtgtgcctgcgagttgagttatacggatgtctctggcgggacgggctgctcagctataccgccccagtgggacaaaccatgtacctctccgaagcagtgtatttgaacgattctacgtacgatggacacactgtggggggccttcagtacggcggcctgggccaattagccgatggggtcgtaggcctggatgatttcaggaaatcccaggaattgagagtctggcctggatacgattatgtgggatggtctaaccatagcttctcatctggatacgtcgaaatggagtttgagtttgaccggcttcgggcattccaggccatgcaagtgcactgtaacaatatgcacaccttaggcgccagactgccaggtggagtggaatgtcggttcaggagagggcctgccatggcatgggagggtgaacctatgcggcacaatctgggtggtaacctgggagatcctcgcgcaagagctgtatccgtgccactaggtggtagggtggccaggttcctgcagtgtcggttcttgttcgcaggcccgtggctgctgttttctgagattagttttatctctgacgtggtgaacaatagtagcccagccctcggcggtacctttccccctgctccctggtggcctcccgggccccctcctacaaatttttcttccttagagttggagcctaggggccagcagcccgtggccaaagccgaggggagtcccacagcaatcctcatcgggtgtctggtggccataattctcctgctgctgcttatcattgcacttatgctgtggcgcctgcattggcggaggctgctgagcaaggctgaacgacgtgtgcttgaggaagaactgacagtacatctgagcgtacccggggacacaattttgattaacaatcgccctggtccccgggagccgcccccataccaggaaccccggccgagaggaaatcctccccactcggctccctgtgtgccgaatggtagcgcgctgctgctctcaaaccccgcctatagactgttgctggctacttacgctagaccccctcggggaccaggccctccgactcccgcctgggccaaaccaaccaatactcaggcctacagtggcgattatatggagccggaaaagcctggtgctcccctactgccccccccacctcaaaatagtgttccccattacgccgaggctgacattgtaacgctacagggggtgactggaggcaacacgtacgccgttcctgctttgcctcctggcgcagtgggcgacggcccaccccgcgtcgatttcccacgttcacggctccgcttcaaggagaagcttggagagggtcagtttggcgaagttcacctttgcgaagtggactctcctcaggatctagtctcgttggatttccctctgaatgtaaggaaggggcaccccctcctcgtcgccgtgaaaattctgagacccgacgcgacgaagaatgcgtccttcagtctattcagtcgaaacgatttcctgaaggaagtgaaaattatgtcaaggttaaaggatccaaacatcatccggctgctgggagtgtgcgtccaggatgacccattgtgtatgatcacagactacatggaaaatggggatctaaatcagtttttaagtgctcaccagttagaggataaggccgcagaaggtgcccccggtgatggccaggcagcccaaggaccgacaatcagctacccgatgctcttgcatgtcgccgcccaaatcgcaagtgggatgcgttatctagctacactgaacttcgtgcaccgtgatttggccaccagaaactgccttgtcggagagaatttcaccattaagattgccgatttcggaatgtcgcgaaatctctacgcaggcgactactaccgcgtacaggggagggcggtgctccccattcgttggatggcatgggagtgcattttgatgggaaaatttaccacagcttctgatgtgtgggcattcggagtaactctgtgggaagtcttaatgctctgtcgtgctcagcccttcgggcagttgactgacgaacaagtaatagaaaacgccggtgaatttttccgcgatcagggccggcaagtttacctgtcacggcctcctgcgtgcccccaggggctgtatgagctaatgcttcgttgctggtctcgggaatcggaacagagacctcccttttcgcaattgcatagattcttagccgaagatgcgctaaatactgtgtag

SEQ ID NO: 10114 - DNA, 1737 bp, synthetic construct
  misc_feature 1..1737: note = source = /note="Description of Artificial Sequence: Synthetic coding sequence"
  source 1..1737: mol_type = other DNA
atgctgctgctgctgctgctggcccccctgttcctgcggccccccggagctggtggggctcagactcctaacgccactagtgaaggctgccaaatcatacatcctccttgggagggtggaatcaggtatagaggcttgacacgtgatcaggtgaaggctatcaactttctgcccgtggactacgagatcgagtacgtgtgccgcggcgaacgggaagtcgttggccccaaggttaggaaatgtctcgccaacgggagctggacggacatggatacgccatcccgctgcgttcggatctgttctaagtcctacctgactttggagaacggcaaggttttcctcacaggcggcgacctgcccgccctggacggagcacgcgtggatttccgttgcgaccctgattttcaccttgtggggtcttccaggtccatttgttcacagggccagtggagtaccccaaaacctcactgtcaggtgaaccgcacccctcactctgaaaggcgcgccgtgtatattggcgctttatttccaatgagcggagggtggcctggaggacaggcatgtcaacctgcagtcgaaatggcactggaagatgtgaacagcaggagggatatcttaccagactatgaactgaagctgatccatcacgactctaagtgcgacccgggccaggccactaagtatctgtacgaactcctgtacaacgatccaatcaagattattcttatgccagggtgctcctcagtcagtacattggtggcggaagcagccagaatgtggaacctgatagttctttcctacggcagttcctctcctgcattatccaaccgccagaggttccccactttctttcgcactcatcccagtgctacacttcacaaccctactagagtaaaactgttcgagaagtgggggtggaaaaagatcgcaacaatccagcagacaactgaagttttcacgtctactttggatgacttggaggagcgcgtaaaggaggccggcatcgagatcaccttccgacaatccttcttttcagaccccgcagtgcccgtcaaaaatctgaagcggcaggacgccagaatcatcgttggactgttctatgagaccgaggctaggaaggtgttctgcgaggtttacaaggaacgcctctttggtaagaaatacgtgtggtttctgatcggctggtacgctgacaattggttcaagatttacgacccttccatcaactgtactgtcgatgagatgaccgaggccgtggaggggcatatcactacagagatcgtgatgctaaaccccgccaatacgaggtcaattagcaacatgacttcccaggagttcgttgagaagctgacaaaaaggctcaagcgccacccggaggagaccggcggcttccaggaggctcccttagcatacgacgcaatatgggctctcgccctggcactgaataagacttcagggggaggcgggagaagcggcgttagactggaagatttcaattataacaaccaaacaatcactgaccagatttatagagcgatgaattcatccagtttcgagggcgtttctggacacgtcgtgttcgacgcttctggttcacgaatggcatggaccctgatcgagcaactgcaggggggtagttacaaaaagatcggctactatgacagtacaaaggatgacctctcttggagcaagacagacaagtggatcgtgatttccagaacccacagcccgacgtag

SEQ ID NO: 10115 - DNA, 516 bp, synthetic construct
  misc_feature 1..516: note = source = /note="Description of Artificial Sequence: Synthetic coding sequence"
  source 1..516: mol_type = other DNA
atgcggcacaacctgggcggcaacctgggcgacccccgggcccgggctgtcagtgtgcccctgggtggtagagttgccagattcctgcaatgtaggttcctcttcgctggtccttggttactgttctcagaaatttcattcattagtgatgttgtgaacaatagttctcccgcgttaggcgggacctttccacccgctccgtggtggcctcctggcccacctccaactaattttagcagcctggaactggagcctcgtggccagcaaccagtagccaaagccgaaggttcacctactgccattctgatcggctgtctagtcgctattatcctgcttttattgctgataatcgctctgatgctgtggagactccactggagaaggcttctctctaaggttcttgagtctcatccccgaactcggtcccctggcctcgttgggatccgacccacacctctgcccgtttctcctatggcacttgtgcacctgtgtgaggtggattcaccccaggattag

SEQ ID NO: 10116 - DNA, 2067 bp, synthetic construct
  misc_feature 1..2067: note = source = /note="Description of Artificial Sequence: Synthetic coding sequence"
  source 1..2067: mol_type = other DNA
atgctgcccaccgaggtgccccagagccaccccggccccagcgccttgctgctccttcagctgctgctcccgcctacatcagcatttttccctaatatttggtctctactcgcagctcccgggtctatcacccaccaggatctgacggaagaggccgctctaaacgttactttacagctgttcctggaacaaccacctcctggaagaccacctctgagactagaggatttccttgggcggactttactagcagatgacctcttcgccgcatacttcggaccagggtccagccgcagattcagagcggctctgggtgaagtgtctagagcgaatgccgcgcaggactttttgcctacctcaaggaacgatcccgacctgcatttcgacgctgagaggctgggccagggccgggcacgtcttgtcggggctttgcgcgaaaccgtggtggctgcaagggcgttagaccacaccttggcccgccagcggctcggcgcagctttgcatgccttacaagacttctacagccactctaactgggtggagttgggtgagcaacaacctcacccacacctcctgtggcctcgccaggagcttcagaacctggcccaggtggccgaccctacctgcagtgactgtgaagagctctcttgtccaagaaactggttgggattcacactgttgacctccggatacttcggaacccaccctccaaagcctcccggaaaatgctctcacgggggccacttcgataggtcatccagccagccaccccgtggtgggataaacaaggatagcacatctcctggattcagtccccatcacatgttgcacctccaggcggccaagctggccttgcttgcttcaattcaggctttttctctcctcaggtcgcgactcggtgacagagacttttctcggctgctggatatcactcccgcaagttctctttccttcgttttggacactacaggttccatgggcgaggagatcaacgcagccaaaattcaggctcggcacctcgtcgagcagaggcgaggctcgcccatggagcccgtgcactatgtgcttgtaccttttcatgatcccgggttcggcccggtcttcaccacctctgatcctgattccttctggcaacagttgaacgaaatccacgccctggggggcggagatgaacccgagatgtgtctcagtgcactccagttggctctccttcacacccctccgctgagtgatatatttgtgtttacggatgcaagtccgaaagacgcattccttactaatcaggtcgaaagcctgacccaggaacggcggtgcagagtgaccttcttagtgactgaggacaccagtagagtgcagggacgggccagacgggagatcctgagcccactccggtttgagccatacaaagccgtagctctggcaagcggcggcgaagttatttttactaaggaccaacacatccgggacgtggccgcgattgtgggcgagtccatggccgctctcgtaactcttccactagatccccctgtggtggtgcctggacagcctcttgtgttcagtgtagacggactcttacagaagatcacagtgcgtattcacggtgacatttccagcttttggattaaaaacccagctggcgtctcccagggccaggaggagggcgggggaccgctgggccacacccgacggttcggccagttctggatggtcaccatggacgacccacctcagactggaacctgggagatccaagtcacagccgaggacaccccaggcgttcgcgttcaggcccagacaagcctggacttcttattccacttcgggattcccatggaggacggcccacatcccggcttgtacccactgacccagcccgtggctggattacagacacaactcttagtagagtcccagagctgggggtcgagcgccgcttttctgcctcggcatccctctagaggacctcgtggatgtcggacaagacctggagccttaggtgctcgcggcacatcaggcgcacgtagccctaggagtttggcagttgctcatgccgcagtacatccgtag

SEQ ID NO: 10117 - DNA, 5097 bp, synthetic construct
  misc_feature 1..5097: note = source = /note="Description of Artificial Sequence: Synthetic coding sequence"
  source 1..5097: mol_type = other DNA
atgcggctgctgtggggcctgatctgggccagcagcttcttcaccctttctctgcagaaaccaaggctgctcctgttctcaccctctgtagtgcatctaggcgtgccgctgagtgttggtgtccagctgcaagacgtgccaagaggacaggtcgtaaaaggaagtgttttcctgaggaatccaagccggaataacgttccctgcagcccaaaagtagactttacactgagctctgagcgggactttgcgctgttgtctctgcaggttcccctgaaggatgccaagtcttgtggtctgcatcagctcctgcgcgggcctgaggttcagctggttgcccactcaccctggctcaaagacagcttaagcagaactaccaacatccaaggtattaatctgctgttctccagccgaagggggcatctgttcttacagactgaccagcctatctacaacccaggtcagagagttaggtatagagtcttcgcactggaccagaagatgcgtcctagcaccgatactatcactgtcatggtcgaaaattctcacggactccgcgtgcgaaaaaaggaagtttatatgcctagttcgatttttcaggacgacttcgtcattccagacatcagcgagcccggtacctggaagatctcagcgagattctccgatgggctggagtctaacagctccacgcagtttgaggttaaaaaatatgttctacccaacttcgaggtgaagataaccccagggaagccctacattctgacagtccctgggcatttagacgaaatgcagctggatatccaggctaggtatatttacggaaagccagtacagggggtggcctacgtcaggttcggactgctggacgaggacgggaaaaaaactttcttccggggtctggagtcccaaaccaagctggtcaacggccaatctcacatatctctgagcaaggctgaattccaggacgcactggaaaagcttaatatgggaatcactgatctgcaaggtctgaggctatatgtggccgcagccatcattgaatatcccgggggcgagatggaggaggccgagttaacttcctggtacttcgtctcctctcctttctccttggacctgagcaagacaaaacggcatctagtgcctggagccccattcctgttacaggccctggtgagggagatgtccggatctcccgccagcggaatacccgtgaaggtcagcgctactgtgagctcgcccggcagcgtgccggaggtgcaggacattcagcagaacaccgacggctccgggcaggtgtcaatccccattataatcccacagactatatctgagctgcagctgtccgtgtctgccggatcccctcaccctgccattgctagactgaccgtagccgcacctccctccgggggccccggatttttgtcgatcgaacgcccggacagcagaccacctcgcgttggcgataccctgaatttgaacctacgcgcggtaggcagcggagctaccttctcacactactactacatgattctgagtagaggccagatcgtcttcatgaatagagagccaaaacggacactgacttccgttagcgttttcgtggaccatcatctcgcccctagcttttacttcgtggcattctactaccacggtgaccacccagtggccaattcattaagggttgacgtgcaagccggcgcatgtgagggcaagttggaactctccgttgacggagccaagcaatatagaaacggcgagtcagtgaagctgcacctagagactgattcattagctttagtggctctgggagcactggacactgctctctacgctgccggttccaaaagtcacaagcctctcaatatgggaaaggtgtttgaagccatgaactcctacgatctcggatgtggacctgggggaggagacagtgccctgcaggtgttccaggccgctggtctcgctttttccgatggggatcagtggactctgtccaggaaaagattatcatgtccgaaggagaagacaacaagaaaaaagcgcaatgtcaattttcagaaggcaataaatgagaaattgggtcagtacgcttccccaacagccaagcgctgctgccaggatggagtaacacggctgccaatgatgcgctcttgcgagcagagggctgcccgggtgcagcagcctgattgccgtgaaccatttttgtcatgctgccagttcgccgagtcactgagaaagaaaagccgcgacaagggccaggccggcctgcagagggcgctggagatccttcaagaggaggatctgatcgatgaggatgacatcccagttcgctcgttttttccggaaaactggttgtggcgtgtagagacggttgatagattccagattctcacactgtggttaccagactccctaaccacttgggagatacacggcctgtccttgagcaagacaaaaggtctctgcgtggccacccccgtgcagctcagagtattccgggaattccacctgcatctgcgtctgcctatgtccgtgcgccggtttgaacagctggaacttagacctgtcctctataactacttagataagaatctcacggtctccgtgcacgtctctcccgtggagggcttgtgtttggccggcggaggcgggctagcccaacaggttcttgtgcctgccggaagcgcccgacccgtcgcattctccgtggtgccaacagccgctgccgccgtgtccctgaaggtcgtggcacggggctcgtttgaattccctgtaggagacgctgttagcaaggtgctgcagatagaaaaggaaggggctatccacagggaggagctggtgtatgaactcaacccactggaccataggggtcgaacattagaaatccctggaaattctgaccctaatatgatcccggacggtgatttcaattcctatgtacgcgtcacagcctctgaccctctggatacattgggcagtgaaggcgccctctccccaggtggagtggcctcacttctacgattgccccgcggctgtggtgaacaaaccatgatctacctggcacccactctcgccgccagccgatacctggacaaaactgagcagtggagcactcttccacccgaaaccaaagatcacgcggtcgacctgatccagaagggatacatgcggatccagcagttccgaaaagcggatggctcgtacgccgcctggctttctcggggatcaagcacctggctgacagcgtttgtcctaaaggttcttagcctagcgcaggaacaggtgggcggctctccagagaaactgcaagagacatctaactggctgctcagccagcagcaggcggatgggagtttccaagacctgtccccggtcatccacagatcaatgcaaggcggcctggtagggaatgacgaaacagtcgccctcaccgcctttgtcacaatcgctctccatcatggcctggccgtattccaggatgaaggggctgaacccctgaagcagagggtggaggcctcaatatcgaaagccagcagctttcttggagaaaaggcgagcgctggattattgggagcccacgcagccgctatcaccgcttacgcgttaaccttgacgaaagcacccgcagacctcaggggagttgcccataacaatctgatggccatggcacaagagactggagacaacctttactgggggtccgtcacaggatcccagtccaacgccgtgtcacctacgccggcccccaggaatccctctgatccgatgccacaggctcctgccctctggatcgagactacagcatacgctctcctgcacctgctgctgcatgaaggaaaggcagaaatggccgatcaagcggccgcctggttaacgcgacaaggctcgtttcagggagggtttcgttctactcaggataccgtgatcgctttagacgctctcagcgcctattggattgcctcccacacaacggaagagagaggtctgaatgtgacgctgagctcaactggtcgtaacggatttaaatcacatgcacttcaactcaacaatcggcagattcgcggcctcgaagaagagctgcagttctcgctcggctctaaaatcaatgtaaaggtcggcggcaacagcaaggggacactgaaagtgttacggacttacaatgtgcttgatatgaagaacaccacctgccaggatctccagatcgaagtgaccgtcaagggacacgtcgagtacaccatggaggccaacgaagactacgaagattacgaatacgatgaattaccagccaaagacgatccagacgcccccttacagcccgtcacccccttacagctttttgaagggcggcggaacagaaggcggcgtgaagctcctaaacttacatccttgtccgatagatatgtcagtcattttgagacagaaggacctcatgtgctactctacttcgacagtgtccctacctctagagagtgtgtgggctttgaggccgtgcaagaggtcccggtcggccttgtgcaacctgcgtcagccactctctacgactactacaatccggagagacgttgttctgtgttctatggggccccaagtaaatctagactcctggctacgttatgttctgccgaggtgtgccagtgtgcagaaggaaaatgcccccgtcagaggagggcgcttgaacgagggctgcaggacgaggacggttatcgaatgaagttcgcctgctactaccctagggtggaatacggattccaggtgaaagtgctgagggaggactcgcgcgccgcgttccgactgtttgaaacgaaaatcacacaggttctccactttactaaggacgtgaaggcggctgccaatcaaatgaggaacttcctcgtgagggctagttgccggctgcggctggaacctggcaaggagtacttaattatggggctagacggggcgacatatgacctagaggggcatccgcagtatttgcttgatagtaattcatggattgaagaaatgccaagcgagcgcctttgccggagtacccgccagcgcgcggcctgcgctcagctcaatgactttctacaagagtatgggacccagggctgccaggtgtag

SEQ ID NO: 10118 - DNA, 726 bp, synthetic construct
  misc_feature 1..726: note = source = /note="Description of Artificial Sequence: Synthetic coding sequence"
  source 1..726: mol_type = other DNA
atgaagttcatcctgctgtgggccctgctgaacctgaccgtggccctcgcctttaatcctgattatacagtgtcctccacccccccgtacttggtgtacctcaaatccgactacctgccttgcgctggggtcttgatccatcccctgtgggttatcacggctgcccactgtaatctccctaaattgagagtgattttaggtgttactataccagctgacagcaacgagaagcacctccaagtgataggctatgagaagatgatacaccacccacacttctcagtgactagcattgaccacgatataatgctcattaagctcaaaactgaggccgagctaaatgattacgttaaacttgccaatctgccataccagactatttctgagaacactatgtgctccgtctcgacctggtcatataacgtctgcgatatctacaaagagccagactccctgcagacagtgaacatatctgttatttctaagcctcagtgtcgtgacgcctacaagacttataatattacagagaacatgctgtgcgtaggcatcgtgcccggtcgtaggcagccttgcaaggaggtctccgcggcaccagcaatttgtaatggaatgctgcaaggaattctgtcattcgctgacggctgtgtacttcgagctgacgtaggcatctacgccaagattttttactatatcccctggatagaaaacgttatccagaacaattag

SEQ ID NO: 10119 - DNA, 732 bp, synthetic construct
  misc_feature 1..732: note = source = /note="Description of Artificial Sequence: Synthetic coding sequence"
  source 1..732: mol_type = other DNA
atgggccccgaggccctgagcagcctgctgctgctgctgctggtggcttctggtgatgcagatatgaaaggccatttcgaccccgccaaatgtagatatgccttgggaatgcaggacaggaccattcctgactcagatatctccgccagctcttcgtggagcgacagcactgctgcaagacattccaggctggaaagctctgatggagacggggcttggtgccccgctggctcagtgttcccaaaagaagaggagtatctgcaggtggatctgcagcgactccacctggtggctctagtggggactcaggggaggcacgccggcggactgggcaaagagttcagccggtcctaccgccttcggtactcacgagacggccgtagatggatgggatggaaagatcgatggggacaggaggtgatctcaggaaatgaggaccctgagggagttgtcttgaaagacctggggcctccaatggtagctcgcctggtgagattctatcctcgtgccgaccgcgtgatgtctgtgtgcctgcgggtggagttgtacggctgcctgtggcgggattgctcaatgggagtctgggcatcctggcagatggtatggtggggctggatgaccctcggaagagtgcgcagttgtggttcaggtcaggctatgactatgtgggatggagcgaccactgcgtcgcccgtggccatgtggaggtggagtctcagtttaacgggttag

SEQ ID NO: 10120 - DNA, 1986 bp, synthetic construct
  misc_feature 1..1986: note = source = /note="Description of Artificial Sequence: Synthetic coding sequence"
  source 1..1986: mol_type = other DNA
atggacctggtgctgaagcggtgcctgctgcacctggccgtgatcggagcactccttgcagtgggcgccactaaggtgcccagaaaccaagattggctgggtgtaagcagacaactccgaactaaggcctggaaccgtcagctttatcccgaatggaccgaggctcaaaggttggattgctggcgaggcggacaggtcagtcttaaagtgagtaacgacggacccacattgattggagcgaacgcctccttcagtatcgcactaaatttcccaggctcccagaaggttctgccggacggtcaggtgatttgggtgaacaataccattatcaatgggagccaggtgtggggggggcagccggtgtatcctcaggaaaccgatgatgcgtgcatcttcccagacggcggtccgtgtccctccggctcatggtctcagaaacgatctttcgtgtatgtgtggaaaacatgggggcaatactggcaagttcttggcggtcctgtctctggactttccatcggtacaggcagggcaatgctgggcacacatacaatggaagtgaccgtatatcaccgacggggttcacgatcttatgtgcctctagcccactcctccagcgctttcaccatcaccgatcaggtccccttcagcgtttctgtgtcccaactgagggccctggacgggggtaataagcactttctgcgcaatcagccattgacattcgcgttgcagttgcatgatcctagcggttacctcgccgaagccgacttgtcctatacatgggacttcggcgactcgtcaggtactctcatctctcgggctctggtggtgactcatacatatcttgaacccggcccagtcacagcacaggtggtccttcaggcggccatcccgctcacgagctgtggaagcagccctgtcccaggtactacagacggacacaggcctacagctgaagccccaaacactacagccggccaggtcccaaccacagaggtggtcggtaccacacccgggcaggcccccacggccgaaccgtcaggtacgacatccgttcaggtgcccaccacagaggtgatctcgaccgcccctgtgcagatgccgacagccgagagcacagggatgactccagaaaaagtccctgtttcggaggtaatgggaactacattggccgaaatgagtacccccgaggctaccgggatgacacctgcggaggtatcgattgtggtgctttccggtactacagcagctcaggtcaccaccaccgagtgggttgagacaacagcgcgggaactgccaatccctgagccggaaggccctgatgcatcttccataatgtcgaccgaatcaattacagggagtttgggtccacttttagatggcaccgccactctccgcttagtcaagcggcaagttcccctcgattgcgtgctgtatcgctacggaagcttttctgtgacactcgatatagtgcagggaattgagagcgccgagatcctgcaggcagtgccatcaggagaaggtgatgctttcgagctgacagtttcatgccaaggcggccttcccaaggaagcatgtatggaaatttcttctccaggctgccaaccacctgctcagcgtctgtgccagcccgtgctcccaagcccagcgtgtcagctggtcctgcatcagatactgaaaggaggatctggcacatactgtctcaatgttagtctcgcagatacaaactccctcgccgtggttagcacccagttgatcatgcccggtcaagaggcaggcctagggcaggtcccactgatcgtcggcattttactggtgttaatggctgtggtccttgcctcgctgatttataggcggcgtcttatgaagcaggacttctccgtgccccagttgcctcacagctcttcccattggctcaggcttccaagaatattttgtagctgccccatcggcgagaattcgcctctcttgagcgggcagcaggtgtag

SEQ ID NO: 10121 - DNA, 2760 bp, synthetic construct
  misc_feature 1..2760: note = source = /note="Description of Artificial Sequence: Synthetic coding sequence"
  source 1..2760: mol_type = other DNA
atgggccccgaggccctgagcagcctgctgctgctgctgctggtggcttctggagacgccgatatgaagggacatttcgacccggccaagtgtcggtacgcactcggaatgcaggacagaaccattcccgattccgatatctccgcctctagctcttggtccgactccacggccgcaagacatagcaggttggagagttcggatggcgacggagcgtggtgccccgcgggctcagtcttccccaaggaggaggagtatcttcaggtcgacttacaaagactacacttggtcgcactggtgggaacacaagggcgacacgccggcggcctgggtaaggaatttagcaggtcctaccgactgaggtattctagagacggccgcaggtggatgggatggaaagatagatggggacaggaagttatctctggtaacgaggatccagagggagtggtgctgaaggatttggggccgcctatggtagctcggctggtgcggttctacccgagagccgatcgtgtcatgtccgtttgtttgagagttgaattatatggatgcttgtggcgagacggcctacttagctacacagctccagtgggtcagaccatgtacttgtctgaggcagtttacctcaacgattcgacctatgacggccataccgttggggggctgcagtatggagggttaggtcagctggccgacggggtggtgggtctggacgacttccggaagtctcaggagctacgcgtgtggcccggctatgattacgtgggctggagcaatcattctttctcgtcgggctacgttgaaatggaatttgaattcgacagactcagggcatttcaggcgatgcaagttcattgtaacaacatgcatacactgggagctagattaccagggggtgtggagtgtcgctttcgccgcggaccggccatggcctgggagggcgagcccatgcggcacaacctgggaggtaacctgggggatccaagagcacgcgctgtctcagtccctttaggtgggagagtggcacggtttctccagtgtagattcctgtttgccgggccttggttgctgttctcagaaatatcattcatatctgatgtggtaaacaactcaagtcctgcactgggtggtacctttccccccgctccttggtggccacctggtccaccacccactaacttctcctctctagaactagagcctagaggacagcaacctgtagccaaagcagaggggtcccctacggcaatcctgattggctgcctggtcgccattatccttcttttactcttaatcattgccctgatgttgtggcggttgcactggaggcgtctgctgtcaaaagcagaaagacgggtgcttgaggaggagctgactgtacatctgtcggtgcccggagacaccatcctgatcaataatcgtcctggcccacgagagccacccccttatcaggaacctcggccgcgcgggaacccgccccatagcgctccgtgcgtgccaaacggctccgcgttgttgttgtccaatcctgcttacagacttcttctggcgacatatgcccggccccctagagggcccggtccaccgacacctgcctgggctaagccaacaaatacacaggcatattctggagactacatggaacctgagaagcccggggcgcctcttttaccccctcccccacaaaacagcgtaccccactacgctgaggctgacattgttacgctccagggggtcacagggggaaacacctacgcagtccctgctctgccccccggtgctgtgggcgacggacccccacgggtcgactttccaagatcccggctgagattcaaggaaaagcttggagagggtcagtttggcgaagtgcacctctgtgaggttgattctccacaagatcttgtttcccttgacttcccactgaatgtccgcaagggccaccccctgctggttgcggtgaaaattcttaggcctgacgccaccaaaaatgcttccttcagtttgttctcccgcaacgatttcctcaaagaggttaaaatcatgtccagacttaaggaccccaatataattcgcctgttgggggtctgcgtgcaggacgatccattatgtatgatcaccgattacatggagaatggggacctgaatcagttcttgagcgcacaccagctggaggataaagcagctgaaggcgcccccggcgacggacaggcagcgcaggggcccaccatttcttaccctatgctgctgcacgtggcggcacagatcgcatcggggatgaggtatttggccactctgaacttcgtccacagggatctcgccacgagaaattgcctagtgggtgagaacttcactatcaaaatcgccgattttggaatgagcagaaatttgtacgcaggagactactatagagtccaagggcgggccgtcctgcctattagatggatggcctgggagtgcatattaatgggaaaattcacaaccgctagcgacgtgtgggctttcggtgttacgctctgggaggttctgatgctgtgtcgagcgcagccctttgggcaattaaccgacgaacaagtcatagagaatgccggggaatttttccgggaccaggggcgtcaggtgtacctgtcaagacctcccgcatgtccacagggcttatatgaactgatgctaaggtgctggagcagggagagcgagcagcgtcctcctttttctcaattgcatcgatttcttgccgaggatgcgctgaataccgtctag

SEQ ID NO: 10122 - DNA, 216 bp, synthetic construct
  misc_feature 1..216: note = source = /note="Description of Artificial Sequence: Synthetic coding sequence"
  source 1..216: mol_type = other DNA
atgcccgccggcgtgcccatgagcacctacctgaagatgttcgccgcttcattgctcgcgatgtgtgctggggccgaagtggttcataggtactatcggcccgatctaacaattcccgagattccccccaagcggggagagctcaaaaccgaactccttggactgaaagagcgcaaacataagcctcaggtgagccagcaggaagagctgaagtag

SEQ ID NO: 10123 - DNA, 2685 bp, synthetic construct
  misc_feature 1..2685: note = source = /note="Description of Artificial Sequence: Synthetic coding sequence"
  source 1..2685: mol_type = other DNA
atgagcctgccccggtgctgcccccaccccctgcggcccgagggcagcggcgctatgggcccggaggctcttagcagcctgttactcctactgttggtggccagcggagatgcggatatgaaaggacatttcgatcccgccaagtgcagatatgctctgggaatgcaggacaggaccatccccgacagcgatatctccgctagcagttcctggtctgattccactgcagcccggcattcccgcttggagtcgagcgatggagacggagcatggtgtccagctggcagcgtctttccaaaggaagaggagtacttgcaggtagaccttcagagacttcatctggtcgccctggtcggcactcaaggaaggcacgccggcggcctcgggaaagaattttcgagatcatatcgactgcgctacagccgggacggtagacgctggatgggatggaaggatcgttggggccaggaggtcatctctggcaatgaagatccagaaggggtcgtactgaaggatctggggccgcctatggtggccagactggtgaggttctaccctagggctgaccgagtgatgagtgtctgtttaagagtggagctgtacgggtgtttatggcgagatggtctcctatcttacactgccccagtgggtcagacaatgtacctgagcgaggctgtatatctgaacgactccacatacgacggccatacagtggggggcttgcagtacgggggtctggggcagctggcagacggcgtagtggggctggacgactttcgtaagtcccaagagcttagagtgtggcccggttacgattacgtgggctggagcaatcacagctttagtagtggatatgtggagatggagttcgagttcgatcgcctcagagcattccaggctatgcaggtgcactgtaataacatgcacactctgggggcaaggctgcctggcggagtggagtgtcgattcagacgagggccagccatggcttgggaaggcgagcctatgcgccacaatctgggagggaacctcggtgatccaagagctcgcgctgtgtcagtcccgttgggaggccgagtcgcgcggttcctgcaatgtaggttcctttttgcaggaccatggttgcttttctccgagatcagtttcattagtgacgtcgtgaataactcctctccagccttgggcggaacctttcccccagcgccatggtggcctcctgggccgcccccaacgaacttctcatcactagagctcgaaccccgcgggcagcaacctgtcgccaaggccgagggtagtcccaccgctatcctgataggctgtctagtggccatcatacttttacttctgctgatcatagctttgatgctgtggaggctgcattggcggcgactcctgagtaaagccgagaggcgagtattggaagaggaactgaccgttcacctgagcgtgccaggcgacaccatcctgatcaacaacaggcccggcccccgggagcctccgccttatcaggagcctcggccacggggtaaccccccccacagcgccccatgcgtcccaaacgggagtgcttattcgggtgattacatggaacccgaaaagccaggggctccactgctgcctcccccccctcagaactcagtaccacattacgcagaagctgatatcgtgactctacagggcgtcaccggaggcaacacctatgctgttcccgccctgcccccgggtgctgttggcgatggtcctcctagagttgattttcctcggtctcggctgcggtttaaagaaaagctgggggaaggacagttcggtgaagtccatctgtgtgaggtggactcaccacaggacttagtctcactggattttccgctgaacgttcgcaagggacaccctctacttgtggcggtcaaaatcttacggcccgatgctaccaagaatgctcgcaacgacttcctaaaagaggtgaagattatgtcaagattgaaggatccaaatatcatcagattgttgggcgtgtgcgtccaggatgacccactctgtatgatcactgattatatggaaaacggcgatctgaatcagtttttaagcgcacaccaactggaagataaggctgcagaaggcgccccgggggacggccaagccgctcagggccctacaatcagctatcccatgttattacacgtggctgctcagatcgcgagtggcatgcgctatctcgcaacattaaacttcgtccatcgggatcttgccacccggaattgtcttgtgggtgaaaattttacaatcaagatcgccgactttgggatgtccaggaacctgtacgcaggcgattactatcgcgtgcagggtagagcggttctcccaattagatggatggcctgggagtgtatacttatgggtaagttcaccaccgcttcagatgtttgggcttttggcgtgaccttatgggaagtgctgatgctgtgcagggctcaaccatttggtcagctcacagacgagcaggtcatcgagaatgcgggagagttcttcagagatcaggggcgccaagtctatctgagcaggccgcctgcatgtccgcaaggattgtacgagttaatgctgcgatgctggtctcgggagtctgagcagcggcctcccttcagccagcttcaccgctttcttgctgaagacgcactaaatacagtgtag

SEQ ID NO: 10124 - DNA, 273 bp, synthetic construct
  misc_feature 1..273: note = source = /note="Description of Artificial Sequence: Synthetic coding sequence"
  source 1..273: mol_type = other DNA
atgcagctgttcctgctgctgtgcctggtgctgctgagcccccagggcgcaagtctacaccgccaccatcctcgcgaaatgaagaaacgggtggaagatcttcacgtgggggcaaccgtggccccgtctagtcggagagattttactttcgatctctatagagctctcgccagcgctgctccctctcagtccattttcttttctcccgtgtcaataagcatgagcctcgcaatgctctccctaggggctgggtcaagcaccaagatgcagtag

SEQ ID NO: 10125 - DNA, 618 bp, synthetic construct
  misc_feature 1..618: note = source = /note="Description of Artificial Sequence: Synthetic coding sequence"
  source 1..618: mol_type = other DNA
atgatgcggaccctgatcaccacccaccccctgcccctgctgctgctgccacagcagctgttgcaactcgtgcagtttcaggaggtggacacggactttgatttccctgaagaggataagaaagaggagtttgaggagtgtctggaaaagtttttctctactgggccggccaggccaccaacgaaggaaaaagtgaagcggcgtgttctgattgaacccggcatgccgctgaaccatattgagtattgtaatcacgaaatcatgggtaagaacgtctattacaagcaccggtgggttgcagagcactactttctcctgatgcagtacgatgaattgcaaaagatttgttataatagattcgttccatgcaaaaacggaatccgcaagtgcaatcggtccaagggcctggtggagggcgtgtattgcaacctcacggaagctttcgaaatcccggcatgtaagtatgaaagcctctacaggaaaggctatgtgctcatcacgtgctcctggcagaatgagatgcagaaacggatcccccacacaatcaacgacctagtcgagccccctgaacatcgctctttcctctctgaagacggtgtctttgtgatctctccatag

SEQ ID NO: 10126 - DNA, 30 bp, synthetic construct; identical to SEQ ID NO: 5113
  misc_feature 1..30: note = source = /note="Description of Artificial Sequence: Synthetic coding sequence"
  source 1..30: mol_type = other DNA

SEQ ID NO: 10127 - DNA, 600 bp, synthetic construct
  misc_feature 1..600: note = source = /note="Description of Artificial Sequence: Synthetic coding sequence"
  source 1..600: mol_type = other DNA
atgagcttcagcgccaccatcctgttcagcccccccagcggcagcgaagcacgctgctgttgttgtgcatgcaaatccgagaccaacggaggcaataccggaagccagggagggaatccccctcctagcacgccaatcacggtgaccgggcatggactggcagttcaatcatctgagcagttgctacatgtgatttatcagcgagtggacaaggccgtgggcctggctgaagctgcactcggtcttgctagagcaaacaatgaacttctcaaaagactccaagaggaggtgggcgacctccgacaaggcaaggtatcgattccggacgaggacggggaatcccgggctcacagttccccgccagaagagcccgggccacttaaggagtctcctggcgaggcctttaaggccctgtcggctgtggaagaagagtgcgacagcgttggatccggggtgcaggtggtgattgaagagttaaggcagctgggagccgcgagcgtgggccctggccctctcgggtttcctgccacacagagggacatgcgccttcctggctgtactctggcagcaagtgaagctgccccactgctgaatccttag

SEQ ID NO: 10128 - DNA, 633 bp, synthetic construct
  misc_feature 1..633: note = source = /note="Description of Artificial Sequence: Synthetic coding sequence"
  source 1..633: mol_type = other DNA
atgagcgccggcaagatgatgcggaccctgatcaccacccaccccctgccactgttacttctcccacagcagctcctgcaactggtgcagtttcaggaggtcgataccgatttcgattttcctgaagaggacaaaaaggaagagtttgaggagtgtctggaaaagtttttctcaacaggaccggcacgtcccccgacaaaggagaaagtgaaaagaagagtgcttatcgagccaggaatgcccctgaatcacatcgagtactgcaaccatgagatcatgggcaaaaacgtatattacaagcatcgctgggtggccgagcactattttctccttatgcagtacgatgagctgcagaagatctgctacaaccgctttgtcccatgtaaaaatgggataagaaaatgtaaccggtctaaggggttagtcgagggggtgtactgcaatctgactgaggcctttgaaatcccggcttgcaaatacgaatctctttatagaaagggatatgtgctaattacgtgctcgtggcagaacgaaatgcaaaagaggatcccgcacacgattaacgacctcgtggagccccctgagcatagatcctttctcagtgaagacggcgtgttcgttatcagcccgtag

SEQ ID NO: 10129 - DNA, 1221 bp, synthetic construct
  misc_feature 1..1221: note = source = /note="Description of Artificial Sequence: Synthetic coding sequence"
  source 1..1221: mol_type = other DNA
atgcagctgttcctgctgctgtgcctggtgctgctgagcccccagggagcctccctgcaccgacaccacccccgggagatgaaaaaacgggtcgaagatttacacgttggggcaaccgtggcaccttccagtcgtcgggatttcaccttcgatctgtatcgggccctcgccagcgccgctcccagccagtccatcttcttttcgccggtctccatatccatgagcctggccatgttatcactcggagcggggtcctcaacaaaaatgcagattttagaaggattgggcctgaatttgcagaagtctagtgagaaggaacttcaccgtgggtttcagcagctgctgcaagagctcaatcaaccacgggacgggttccagctctcactggggaacgccctgtttactgaccttgtcgtcgacctgcaggacacatttgtgagtgctatgaaaaccctgtacctggccgatacattcccaacaaatttccgggattcagccggggctatgaagcagatcaatgattacgtcgccaagcagactaaaggaaagattgtcgatctgttaaaaaatttggactctaacgccgtggttattatggtgaactacattttcttcaaagccaaatgggagaccagctttaaccacaagggcacccaggaacaggacttctacgtcacgtccgaaaccgtggtgagggtgccaatgatgagtagagaagatcagtaccattatctcctggacagaaatctctcgtgccgggtggtgggcgttccctaccagggtaacgcgactgcactgttcatcctgccctccgaagggaaaatgcagcaggtcgagaacggtttgagtgaaaagacactaagaaagtggctgaagatgttcaaaaagagacagctggaactgtacctgcctaagttctctatcgaggggagttaccagctggaaaaagtgctgccaagcttgggcattagtaatgtgtttacatctcacgcagacctttccgggatctccaatcatagcaacattcaagtgagcgaaatggtgcataaggcagtggtagaggtggacgagagtggcacccgtgcagcagccgccaccggtactatatttacttttcgcagcgcccggctcaactctcagcgcctcgtgttcaatagacctttcctgatgttcattgttgacaataacattttgttcctcggcaaggtcaataggccatag

SEQ ID NO: 10130 - DNA, 600 bp, synthetic construct
  misc_feature 1..600: note = source = /note="Description of Artificial Sequence: Synthetic coding sequence"
  source 1..600: mol_type = other DNA
atggagaccttccccctgctgctgctgagcctgggcctggtgctggccgaagcctctgagtcaacgatgaaaataatcaaagaggagttcaccgatgaggagatgcagtatgatatggccaagtctggccaagagaaacagacaattgaaatactgatgaatcccatattacttgttaagaacacctccctgtcaatgtccaaggatgatatgtcaagtactctcctcacctttagatctcttcactacaacgatccgaagggcaatagctccggcaatgataaggaatgctgtaatgatatgaccgtgtggaggaaagtgtctgaggcaaacggctcctgcaaatggtcaaataactttattaggtcatccactgaggtaatgcgaagagttcaccgagctccaagctgcaagtttgtgcaaaatccagggatttcttgctgcgagtctctcgaactggagaatacagtctgccagtttactactggcaaacaatttccccgctgccagtatcattcggtcacttccttagaaaagattcttaccgttcttaccggccattctctgatgagctggcttgtttgcggctctaaactgtag

SEQ ID NO: 10131 - DNA, 411 bp, synthetic construct
  misc_feature 1..411: note = source = /note="Description of Artificial Sequence: Synthetic coding sequence"
  source 1..411: mol_type = other DNA
atgagcttcagcgccaccatcctgttcagcccccccagcggcagcgaggctcggtgttgctgctgcgcctgtaagagcgaaacaaatgggggaaatactggttcccaaggtgggaaccctccgccgtcgactccaataacagtgacaggccacggactggccgtacagtcttcagagcagctgctgcatgtgatttaccagcgagtggataaggctgtggggctcgcagaggctgcactgggcctcgcccgagccaacaacgaattgctgaagagactgcaggaggaggttggagacctcagacaaggaaaagtttctatacctgacgaggatggtgagtctagggcacactcttccccccctgaggagcctgggcccttaaaggaatcacccggagaagcattcaagtag

SEQ ID NO: 10132 - DNA, 252 bp, synthetic construct
  misc_feature 1..252: note = source = /note="Description of Artificial Sequence: Synthetic coding sequence"
  source 1..252: mol_type = other DNA
atgagcttcagcgccaccatcctgttcagcccccccagcggcagcgaggcccgatgctgctgctgtgcttgcaaatctgagaccaatgggggaaataccgggtcccaaggaggaaaccctccaccatccactcccatcaccgttacaggccacggacttgccgtgcaaagctccgagcaattgctgcatgtgatctatcagcgcgtggacaaagcggtggggctggcggaggctgcccttgggcttgcatag

SEQ ID NO: 10133 - DNA, 30 bp, synthetic construct; identical to SEQ ID NO: 5113
  misc_feature 1..30: note = source = /note="Description of Artificial Sequence: Synthetic coding sequence"
  source 1..30: mol_type = other DNA

SEQ ID NO: 10134 - DNA, 519 bp, synthetic construct
  misc_feature 1..519: note = source = /note="Description of Artificial Sequence: Synthetic coding sequence"
  source 1..519: mol_type = other DNA
atgcagctgttcctgctgctgtgcctggtgctgctgagcccccagggtgcctcactccacaggcatcacccccgcgagatgaagaagagggtggaggacttacacgtaggggccactgtggccccaagctccagacgggactttacattcgacctttaccgcgctctggcgtccgccgccccatctcagtcgatcttcttctcacccgtcagcatttcaatgtcactagcgatgctgtcactcggagccgggtctagcaccaaaatgcagatcctggaaggcctcgggctaaacctgcaaaagagctccgagaaagagctgcacagaggtttccagcagctgttgcaggagctgaaccagccgcgggacggtttccagctttccctcgggaatgcattgtttaccgatcttgtggtcgacctgcaagataccttcgtatcagccatgaaaaccttgtatctcgctgacaccttccccacgaatttccgcgacagtgcgggggccatgaaacagatttag

SEQ ID NO: 10135 - DNA, 615 bp, synthetic construct
  misc_feature 1..615: note = source = /note="Description of Artificial Sequence: Synthetic coding sequence"
  source 1..615: mol_type = other DNA
atgcccggcggcaagaaggtggccggcggcggcagcagcggcgccactccgactagcgcagccgccactgcccccagtggagtgcgtcggctggagacatccgaggggacatccgcgcaacgggatgaagagccagaagaagagggcgaggaagacctgcgcgacgggggcgtgccattttttgtaaacagaggaggcttgccagtggacgaagcaacatgggaacggatgtggaagcacgttgccaagatccaccccgacggggagaaagtagcacagcgcattagaggagccactgacttacccaagataccgattcccagtgtccccacatttcagccctccacccctgtccccgaaaggctggaggcagtccagcgctatatcagagagctacaatataaccatactggcacccaattctttgaaataaagaagtcccgaccactcaccggactcatggatctggctaaagagatgacgaaagaagctctgcccatcaaatgcctcgaggcagttattctggggatgtaccccagctcacctgagggagaaggatctggcctcttatgggcctccgcttcctgtagtgagagtgaaggaggtgtagggtag

SEQ ID NO: 10136 - DNA, 1221 bp, synthetic construct
  misc_feature 1..1221: note = source = /note="Description of Artificial Sequence: Synthetic coding sequence"
  source 1..1221: mol_type = other DNA
atgcagctgttcctgctgctgtgcctggtgctgctgagcccccagggcgcatctctgcacagacaccacccgcgggagatgaaaaagagggtggaagatctacacgtaggcgccactgtagctccgtcgagccgacgggacttcaccttcgacctgtaccgcgctctcgcctctgcagcgccttcccagagcattttcttcagtccagtaagcataagtatgtcgcttgctatgctgagcctcggggctggatcaagtacaaaaatgcagatcctcgagggtcttggcctgaacctccagaagtcttccgagaaagaacttcatcgcggcttccagcaactactgcaggaactgaatcagcccagagacggcttccagctgagcctgggcaatgcgctgttcaccgatctcgtggtcgacctacaagacaccttcgtgagcgccatgaaaacgttatatcttgcagacacattccccactaatttcagagactccgctggagccatgaagcagattaacgactatgtagccaagcagacgaagggcaagatcgttgatctgctgaagaatctggattccaatgccgttgttatcatggtgaactatatcttcttcaaagccaaatgggagacttcattcaaccacaaaggcactcaggaacaagacttctacgtaacttcagagaccgtggtccgcgttcccatgatgagcagggaggaccaataccactatttactcgacaggaacctgagctgccgtgtggtaggtgtcccctatcaagggaacgcaaccgccctgttcatattgccctcagaggggaagatgcagcaagtggaaaacggactgagtgagaagacgctccggaagtggctgaaaatgtttaaaaaacggcagcttgaactgtaccttccaaagttcagcattgaggggtcttaccaactggagaaggttctgccttcactgggcatcagtaatgttttcacgagccatgcggatttaagtggcatcagcaatcacagcaacatccaggtctcagaaatggtgcataaagccgtggtggaggtagacgagagtgggactcgcgccgcggcagccactggtacaatatttaccttcagaagcgcccgcttgaattcgcagaggctggtctttaatagacctttcctgatgttcatcgtcgacaataatatcctgttcttgggcaaagtgaaccgtccttag

SEQ ID NO: 10137 - DNA, 3837 bp, synthetic construct
  misc_feature 1..3837: note = source = /note="Description of Artificial Sequence: Synthetic coding sequence"
  source 1..3837: mol_type = other DNA
atgcggctgctgctgctggtgcccctgctgctggcccccgcccccgggagcagtgcccccaaggtacggcggcagtccgacacttgggggccatggtcgcagtggagcccatgctcgaggacatgcggcggtggcgtatcgttccgtgaacgaccgtgctattcacagaggcgagatggtgggtcttcctgtgtgggacccgctagatctcaccgatcctgcagaaccgagtcatgccccgacggcgcacgtgattttagggctgagcaatgtgctgaattcgacggagcagagtttcagggacggagatatagatggctcccatactattcggcgcccaataagtgcgaacttaattgcattccaaagggtgagaatttctactacaagcatagagaagctgtggtggacggtaccccttgtgagcccggaaagcgggacgtttgcgtggacggttcgtgccgggtcgtcgggtgtgatcacgagctcgattctagcaagcaagaagataaatgcctgcggtgtggcggggatggaactacctgctacccagtagccggtacctttgacgctaacgacctttctcgcggatacaaccagatattaatcgttcccatgggagccacatcgattctgattgatgaggccgccgccagtaggaattttctggctgtgaaaaacgtgcgcggggaatattatcttaatggacactggaccatagaggcagcgagggctctgcccgcagctagcacgattctgcactacgagagaggggctgaaggcgatctggctcccgaacggttgcacgcccgcgggccaacaagtgagcctctggtgatcgaactgataagccaagagccaaatccgggagtccactatgagtatcatctgcccttacgaaggccctcccccggtttttcttggagtcatggtagctggtcggattgcagcgccgagtgcggcggggggcatcaaagcaggttggtgttctgcacgatcgatcacgaggcgtaccctgatcacatgtgtcagaggcaacctcggcccgccgacagaaggagctgtaacctccacccttgccccgagactaaaagatggaaggctggtccatgggcaccttgtagcgcctcttgcggagggggatcccagagcaggtccgtgtactgtatatcttctgatggtgccggtattcaggaagccgtggaggaggcggagtgtgccggactgccaggcaagcctcccgctatccaagcgtgtaatcttcagcgctgtgcggcctggagtcctgagccttggggcgaatgctctgtgtcttgtggggtgggagtgcggaagaggagcgtcacatgtagaggagagcggggcagcctgttgcacacagcagcctgcagtttggaggaccgaccgcccctaaccgagccctgcgtccatgaggactgtccattgctgagcgatcaggcgtggcatgttggaacatggggtttgtgttcaaagtcttgtagcagcgggacgcggcggaggcaggtcatttgtgccattgggcccccttctcactgcggatccctccagcactcgaaacctgtggatgtggagccgtgcaatacccagccgtgtcacttgccacaggaggttcccagtatgcaggacgtccatacccccgcgagcaacccatggatgccactgggccctcaggagtcgcctgcctccgattcgaggggacaatggtgggccgcccaagaacacccgagcgcaagaggcgatcaccgaggagagaggggggacccacgaggggaccagggcacacatctgagtgcattgggtccggcaccgtcattgcagcagccaccatatcaacagcctcttagatcagggagcgggccccacgattgccgccactctccccatggctgttgtcctgacggtcacaccgccagcttgggaccccaatggcagggatgccccggcgctccctgtcaacagtctcgctatggctgttgtcccgatagagtttctgtcgccgaagggccgcaccacgccggctgcactaagtcttatggaggtgacagcaccgggggcatgcctcgttccagagcagtggcttccactgttcacaatacgcaccagccacaggctcagcaaaatgaaccatctgaatgtcgcggttcccaattcggctgctgctatgataacgtagccaccgcagccggcccactgggcgaaggatgcgtcggccagcctagtcatgcttatcctgtgagatgtcttctcccttcagctcacggtagttgtgctgattgggcagccaggtggtacttcgtggctagcgtcggacaatgcaatagattttggtatggcggttgtcacggcaacgcaaataacttcgcctcagaacaggagtgcatgagtagctgtcagggcagcctccacggaccgaggcgaccccaacctggggcgtcgggcagatcgacacataccgacggtggaggatcgagccctgctggcgagcaggaaccctcacagcaccgcactggtgccgctgttcaacggaaaccctggccttcaggtggtctctggagacaggaccagcagcccggaccgggagaagcaccccacacccaggcctttggtgagtggccatggggacaggaattaggaagtagggcgcccggcctcggtggcgacgctggctctcccgcccctcccttccacagcagctcttatagaatctccttagccggagtagagcccagcttggtccaggctgctctcggccagcttgtgcggctgtcatgctccgacgatactgctccagaaagccaggccgcatggcagaaggatggccagcccattagcagcgaccgccaccgtctgcagttcgacggctctctcataatccacccgttgcaggccgaggatgccggcacctactcttgcggtagcacaagaccaggacgggacagtcagaaaatccagctgagaatcatcgggggggatatggcggtgctcagcgaagccgaactgagccggttcccccagcccagggatccagcgcaggactttgggcaggctggtgccgccgggccactgggagcgatcccctcctcgcacccacagccagccaatcgattgagattagatcaaaaccagccccgagttgtcgatgcctctcccggccagcgcattcggatgacttgccgcgcagagggctttccaccgccagctatcgaatggcaaagagatgggcagcctgtgtctagtcctcggcatcaactacagcctgacggttcacttgtgatttctcgtgtcgcagtcgaggatggcggcttttatacttgcgtggcttttaatggtcaggacagagatcagaggtgggtgcagttaagggtcctcggggagctgacaatctcagggctacccccaacagtcacagtgccagaaggagacaccgccagattgctgtgcgtggttgctggggaaagcgtcaatatcagatggtctaggaatggtcttcctgtgcaggcagacgggcacagagtacaccagtctcccgatggcaccctcttaatatacaacctgcgggccagggatgagggatcctacacctgcagcgcctatcaggggtcgcaggccgtgagccgctctacagaagtgaaggtggtatctcctgcgccaactgctcaacctcgagatcccgggcgcgattgtgtggaccagccggagctcgccaattgtgacctgattctgcaggcccaactgtgtggcaatgaatattactcctcattctgctgcgccagttgctcaaggttccagccccatgcccaacctatttggcagtag

SEQ ID NO: 10138 - DNA, 261 bp, synthetic construct
  misc_feature 1..261: note = source = /note="Description of Artificial Sequence: Synthetic coding sequence"
  source 1..261: mol_type = other DNA
atgcagctgttcctgctgctgtgcctggtgctgctgagcccccagggtgcaagcttacatcgccaccatccaagagaaatgaagaagcgagtcgaagatctgcatgttggggctacagtcgcccctagttctaggagagacttcacttttgacctttacagggctcttgcaagcgcagcaccatctcagtctattttcttttctccagtaagcatctctatgtccctggccatgctgtctttgggcgctggctcctcctag

SEQ ID NO: 10139 - DNA, 906 bp, synthetic construct
  misc_feature 1..906: note = source = /note="Description of Artificial Sequence: Synthetic coding sequence"
  source 1..906: mol_type = other DNA
atgcagctgttcctgctgctgtgcctggtgctgctgagcccccagggcgcaagcctgcatcgccaccatccgcgggaaatgaagaaaagggtggaagatctgcacgttggcgctacagtggctccaagtagtcggcgcgactttacgttcgatttatatagggcactggcttccgcggcacctagtcaatccattttctttagtcctgtctcaatttccatgtctctcgccatgctgtctttaggtgctggctcttcaactaaaatgcagattttggaagggctggggctgaaccttcagaagtccagcgagaaggagttgcatcggggctttcagcagctgctccaagagctgaaccaacctcgagatggcttccagctgtcactagggaatgccttgtttacagatctagtcgtggatctacaggataccttcgtctccgcaatgaagacactgtacttagctgatacattccccactaatttccgggattcagcaggtgccatgaagcagattaatgactacgtggctaagcagactaaaggtaagatcgttgacctcttgaagaacctggactcaaacgcagtggtgattatggtgaactatatattttttaaggctaaatgggagacaagctttaaccataagggtacgcaggaacaggacttctatgtgaccagcgagaccgttgtacgggttccaatgatgagtcgggaggatcaatatcactacctcctggatcgaaacctgtcctgtagggtagtgggagtgccgtatcagggaaacgcaacagcactgttcatcctgccctccgaaggcaagatgcagcaagttgagaacgggctcagtgaaaaaactctgaggaaatggctcaaaatgtttaagaagcggtactttcagacctag

SEQ ID NO: 10140 - DNA, 411 bp, synthetic construct
  misc_feature 1..411: note = source = /note="Description of Artificial Sequence: Synthetic coding sequence"
  source 1..411: mol_type = other DNA
atggagaccttccccctgctgctgctgagcctgggcctggtgctggccgaggcatccgagtcaacaatgaagatcatcaaggaagagttcacagacgaagaaatgcagtatgacatggctaaaagtggtcaggaaaagcagacgatcgagatccttatgaatccaattctcttagtgaaaaatacatccctctctatgagcaaagacgatatgtcctccacccttttgaccttccgcagcctgcactacaacgatcccaagggtaatagctccggcaacgacaaggagtgctgcaatgacatgacagtctggcggaaagtgagcgaagccaatggtagttgtaaatggtctaacaatttcattcgctccagtaccgaagtgatgcggagagtgcatcgcgcaccttcttag

SEQ ID NO: 10141 - DNA, 1221 bp, synthetic construct
  misc_feature 1..1221: note = source = /note="Description of Artificial Sequence: Synthetic coding sequence"
  source 1..1221: mol_type = other DNA
atgcagctgttcctgctgctgtgcctggtgctgctgagcccccagggcgcatccctgcatcggcaccaccctagagagatgaaaaagcgggtagaggatcttcacgtgggagcgaccgtggctccatctagtagacgcgatttcactttcgacctctacagagcgctcgcctctgctgcaccttctcagagcatctttttttcacctgtctcaatctcaatgagcctggccatgctatcattgggtgctggaagctccactaaaatgcagatcctggaaggcctgggactgaaccttcaaaaatcatctgagaaggaattacaccggggtttccagcagctcttgcaggaactcaaccagccacgcgatgggtttcaactgtccttaggaaacgcactgttcacagacctcgtggtggatctccaggatacttttgtgtcggccatgaagaccctatacctcgctgacacattccctactaatttccgggatagcgcaggagctatgaagcagatcaacgactatgttgccaaacagacaaaaggaaagattgtagatctgttaaagaacttggactctaatgccgtcgtgatcatggtcaactacatcttcttcaaggccaaatgggagacctcatttaaccacaagggcacccaggagcaggacttttatgtaaccagcgaaacggttgtgcgagtgccaatgatgagcagggaagaccagtatcattacctgttggaccgaaatctgagttgccgcgtagtaggggttccttatcagggtaatgccacagctctgttcatcctacccagcgaaggcaagatgcagcaggtcgagaacgggctctcagaaaaaacgttaaggaagtggctgaaaatgttcaaaaagcgacagctggagctctatcttccgaagtttagtatagaaggctcctatcagttagagaaagtgctcccgtcactgggaattagtaatgtgtttacatctcatgcggatctcagtggcatttccaaccacagcaatattcaggtctccgaaatggtgcacaaagccgtggtggaagtggatgaatcagggacccgggcggccgccgccacagggaccatcttcacgttcagatcagcacgtctcaattctcaacgcctcgtgtttaaccggccgttcctcatgtttatagtggacaataatatactctttctggggaaggttaatcgtccttag

SEQ ID NO: 10142 - DNA, 618 bp, synthetic construct
  misc_feature 1..618: note = source = /note="Description of Artificial Sequence: Synthetic coding sequence"
  source 1..618: mol_type = other DNA
atgatgcggaccctgatcaccacccaccccctgcccctgctgctgctcccacaacagttgctgcagctggtgcagtttcaggaggttgataccgacttcgattttccagaggaggataaaaaagaggaatttgaggaatgcctagagaaatttttcagtaccggaccagcaagacctcctacaaaagagaaagtgaaaagacgtgtcctgattgaacccggcatgccattaaatcatattgagtattgtaaccatgaaattatgggaaaaaatgtctactataagcaccggtgggtcgctgagcactacttcctgttaatgcaatatgacgagctgcagaaaatttgctacaatcgcttcgtgccctgcaagaacgggatccggaagtgtaaccggagtaaggggctcgtggaaggcgtgtactgcaacctcaccgaagcgttcgagatccctgcatgcaaatatgaaagtctgtataggaaaggctacgtgctgataacctgcagttggcaaaatgagatgcagaaacggatccctcacacgatcaacgatctggtcgagccaccagaacatcgaagctttttgtcagaagacggcgtattcgttatctcgccctag

SEQ ID NO: 10143 - DNA, 240 bp, synthetic construct
  misc_feature 1..240: note = source = /note="Description of Artificial Sequence: Synthetic coding sequence"
  source 1..240: mol_type = other DNA
atgagcttcagcgccaccatcctgttcagcccccccagcggcagcgaagcgcggtgctgctgctgtgcgtgcaaatcagaaacaaatggcggaaacaccggttcccaaggagggaacccacctcctagcacccccataaccgtgaccgggcacggactcgctgttcagagctccgagcagctgttgcacgtcatttatcaacgggtggataaagccgtgggtctggcggaggcggcctag

SEQ ID NO: 10144 - DNA, 618 bp, synthetic construct
  misc_feature 1..618: note = source = /note="Description of Artificial Sequence: Synthetic coding sequence"
  source 1..618: mol_type = other DNA
atgatgcggaccctgatcaccacccaccccctgcccctgctgctgctgccccagcaactgttacagctcgtccaattccaggaagtggatacagatttcgattttcccgaggaagataaaaaggaagagtttgaagagtgcctggaaaaattcttctcgactggccctgctcgcccccctaccaaggagaaggttaagcgcagagtcttaatcgaaccgggaatgcctctgaatcacatcgaatactgtaaccatgaaattatgggaaaaaacgtctactacaaacatagatgggtcgcggaacattattttctgctaatgcaatatgacgagctgcagaaaatctgctataatcggttcgtcccctgtaaaaatgggatccgaaaatgtaaccggtccaagggcctggtagagggagtgtattgcaacttaactgaggcgttcgaaatcccagcgtgcaaatacgaatctctgtaccgaaagggatatgtgctgattacctgtagctggcagaatgaaatgcagaaacggattccgcatacaatcaacgatcttgttgagcctcccgaacacagatctttcctgagcgaagacggagtgttcgttatcagcccctag

SEQ ID NO: 10145 - DNA, 3789 bp, synthetic construct
  misc_feature 1..3789: note = source = /note="Description of Artificial Sequence: Synthetic coding sequence"
  source 1..3789: mol_type = other DNA
atgcggctgctgctgctggtgcccctgctgctggcccccgcccccggcagctccgcaccaaaggtgcgcaggcagagtgacacatggggaccatggagtcagtggtcaccctgctcacgtacttgtggtggtggcgtctctttccgcgaaaggccctgctactcccaacggagggatgggggctccagttgtgtgggacccgctaggtcacatcgtagctgccgcacggagtcttgtccagatggcgcccgtgactttagggcagaacagtgcgctgaattcgatggagcagaattccagggacgtagatatagatggctaccgtactacagcgcacctaacaagtgcgagctgaactgtatacccaagggcgagaacttttattacaagcacagggaagcagtagtagatggcaccccttgcgagcctggaaagagggatgtatgtgttgatggaagctgtcgtgtggtcgggtgtgatcatgaactggactcctccaagcaggaagataagtgtttacggtgcggtggcgacggtaccacatgttatcctgtggcaggcacctttgatgccaatgacttatcccgtgggtataaccagatacttatcgtccccatgggggccacctcaatcctgatcgatgaggctgctgcatctcgaaacttcctggcagtcaagaacgtccggggagaatactacctgaacgggcattggacaatagaagccgctcgcgcgctgccagcagcatcgacaattctgcactatgaacgcggcgccgaaggggatctggcccctgagagactgcacgcacgtgggccaacctccgagccattagttatagagctcatctctcaagagccaaacccaggtgtgcattacgagtatcacctgccactgagaaggccctccccgggtttctcttggtctcacggcagttggtcagactgttcagcagaatgcggtggaggtcaccagtcgcggcttgtgttctgtactattgaccatgaagcctatcctgaccacatgtgtcaacggcagccccggcccgctgacaggcggagctgcaacctgcacccatgcccagagacaaagaggtggaaggccggaccatgggcaccatgtagtgcctcttgtggagggggaagtcagagtcggtcagtttactgtattagctccgacggcgccggtattcaggaggcagtcgaagaagccgagtgtgccggtctcccagggaaaccacccgccatacaggcgtgtaacttgcaacgctgcgcagcctggagcccagagccctggggagagtgctctgtgtcatgcggcgtgggagtgcggaagcgaagcgtcacctgtaggggagaaaggggcagcctcctgcatacggctgcttgcagcctcgaggaccgccctccattaaccgaaccctgtgttcacgaggattgtccccttctaagtgaccaggcatggcatgttggaacatggggcctctgcagcaagtcctgctccagcgggacaaggcgcagacaggtgatttgcgctattggacctcccagtcattgcggctcccttcagcattcaaaacccgtcgatgtggagccatgcaatacacagccctgccacctaccccaggaggtgccatcaatgcaggacgtccacacgcctgcctcaaatccttggatgcccttagggcctcaagagtcacctgcgtcagactccaggggacagtggtgggccgcccaggaacacccttcggcaaggggggaccacaggggcgaaagaggggaccctcgtggagatcaggggactcacttatccgcgctaggcccagcaccttcgcttcaacagcctccataccagcagcctctccggtccgggtccggaccgcacgactgccgacacagcccacatgggtgctgccctgacgggcataccgccagcttaggacctcaatggcaggggtgtccaggcgctccttgtcagcaatctcgctacgggtgctgtcctgacagagtgtccgtagccgaggggccccatcacgccggctgtactaaaagctatggaggcgatagcacaggcggtatgcccagatcccgagccgttgccagcactgtacataacacacatcagcctcaggcacagcagaatgagcccagcgaatgcagaggtagccagttcggatgttgttatgacaacgtcgccacagctgctggccctctaggcgaaggctgcgtggggcaacctagccatgactgggctgcccgctggtattttgtggcgagcgttggccaatgtaatcgcttctggtacggcggctgtcatggcaacgcaaacaattttgcaagcgaacaggagtgtatgtcgagttgtcaggggtccttacatggaccccggagaccccagccaggagcgtccggacgaagcacacacactgatggaggcggatcaagtcccgcaggcgaacaggagccaagccagcaccgcactggggcagccgtccagcgcaagccatggccatctggcggtctgtggcggcaggaccaacaaccgggtcctggcgaagcgccccacacacaggcttttggcgagtggccctgggggcaggaattagggagcagggccccaggccttggaggtgacgccggatcccctgcccctccattccattcatcaagctatcggatctctctggctggcgtcgaaccatcccttgtgcaggccgctcttggacaattggttaggttatcatgtagtgatgatactgctccagagtcacaggcagcatggcagaaggacggccaacctatctcttctgacagacaccggctgcagtttgatggaagccttatcattcaccccctccaggcagaggatgcaggaacgtattcatgtgggagcaccagacctgggcgggacagtcagaagatacagcttaggattatcggaggcgatatggccgtcctgagcgaagctgaactcagcagatttccacagccaagagaccctgcacaagatttcgggcaagccggagccgctggaccattaggagccataccgtcatcgcacccgcagcctgcaaacaggttgaggttagatcaaaaccagccaagggtcgtggatgcatctccaggacaacgcattaggatgacatgccgggcggaaggcttcccaccacctgccattgagtggcagagggatggccagcctgtcagcagccctcgccaccagctacagcccgatggcagcttggttatctctagggtcgccgttgaagacggaggcttttacacctgtgtcgcctttaacggacaggacagggaccagcgctgggtacagcttagggtgctcggtgagttgacaatttcagggcttcctcccacagttactgtgcccgaaggagacacagcccggttactttgcgtggttgcaggcgaatcagtaaatatacgctggagccgcaacggcctcccagtccaggctgacggccacagagtgcaccagtctccagacgggaccctgctgatatataacctgcgagcgcgtgatgaggggtcttatacttgcagtgcctaccagggtagtcaggccgttagtcgcagtacagaggtgaaagttgttagcccagcaccaacagctcaacctagggacccaggacgggactgcgtggaccagcctgagttggcaaattgcgacctgattctccaggctcaactctgtggaaacgagtactacagctcattttgttgcgcctcttgctctcgcttccagccccacgcacagccaatctggcaatag

SEQ ID NO: 10146 - DNA, 321 bp, synthetic construct
  misc_feature 1..321: note = source = /note="Description of Artificial Sequence: Synthetic coding sequence"
  source 1..321: mol_type = other DNA
atgagcttcagcgccaccatcctgttcagcccccccagcggcagcgaggccagatgctgttgttgtgcatgcaagtccgaaaccaacggcgggaatacaggctcccagggtggcaacccccccccatcaacacccatcactgtgacaggccacggactggcagtgcagtcctccgaacagctgctgcatgtcatctaccagcgggtggacaaggctgtgggccttgccgaggccgccctaggtctagcccgcgctaacaatgagttactcaagcggctccaggaggaggtgggtgacctgaggcagggtaaggtaagctag

SEQ ID NO: 10147 - DNA, 444 bp, synthetic construct
  misc_feature 1..444: note = source = /note="Description of Artificial Sequence: Synthetic coding sequence"
  source 1..444: mol_type = other DNA
atggccctgcagcggacccacagcctgctgctgctgctgctgctgaccctgctcggtctgggtctggtgcagccttcttacgggcaggacgggatgtatcaacgatttctacggcagcacgtccatcctgaggaaaccggtggatctgatcgatactgcaaccttatgatgcagagacgcaaaatgacactctaccactgtaagagattcaataccttcatacacgaagatatctggaacattcgttccatatgtagcacaacaaacatccagtgcaaaaacggtaagatgaactgccatgagggggtggtcaaggtcacggactgtcgcgacaccggtagctctcgggccccaaactgtcggtatcgtgccattgccagtactcggcgcgtggttattgcttgtgaagggaacccacaggtccccgtgcactttgacggttag

SEQ ID NO: 10148 - DNA, 435 bp, synthetic construct
  misc_feature 1..435: note = source = /note="Description of Artificial Sequence: Synthetic coding sequence"
  source 1..435: mol_type = other DNA
atgcagctgttcctgctgctgtgcctggtgctgctgagcccccagggagcttcactgcatcggcaccacccccgcgaaatgaaaaagcgcgtggaggacctgcatgtgggtgctacagttgcccctagttctcgtagagattttacatttgatttgtaccgtgccctcgcaagcgcagcaccgtctcaaagcatctttttcagcccggtaagcatcagcatgagcttagcgatgctttctcttggagctggttcttccaccaagatgcaaatcctcgaaggactcgggctgaaccttcagaaatcctctgaaaaggaactccatagaggctttcagcagctgttacaggagctgaaccagcccagggatggattccagctgtcgctggggaacgccctcttcaccgacctggtcgtggatctgcaggacacttag

SEQ ID NO: 10149 - DNA, 540 bp, synthetic construct
  misc_feature 1..540: note = source = /note="Description of Artificial Sequence: Synthetic coding sequence"
  source 1..540: mol_type = other DNA
atgggcagcagcggcctgctgagcctgctggtgctgttcgtgctgctcgccaatgtgcagggacccggcctgacggactggctatttccaagacgctgtccgaaaattcgggaagagtgcgaattccaggagcgcgacgtctgcaccaaagatagacagtgccaggacaataagaaatgttgcgtgttcagctgcgggaagaagtgcttagacctcaagcaagatgtttgtgaaatgccaaaagagacggggccctgcctggcatactttctgcattggtggtatgacaagaaagataatacctgtagcatgtttgtttacgggggctgccagggcaataataataactttcaaagtaaggcaaactgtctgaatacctgcaagaataaacaaccgtgtcctaaaatcaaggtcgaatgtgaggtagaggagatagaccaatgcacgaagcctcgggattgccccgagaatatgaagtgttgcccgttttcacgtggcaagaaatgtctggatttcagaaaagcctctttaagcacctag

SEQ ID NO: 10150 - DNA, 444 bp, synthetic construct
  misc_feature 1..444: note = source = /note="Description of Artificial Sequence: Synthetic coding sequence"
  source 1..444: mol_type = other DNA
atggccctgcagcggacccacagcctgctgctgctgctgctgctgactctgttgggattgggcctagtgcaacctagctacggccaagatggcatgtatcaacgctttctgcgccagcacgtgcatccagaggaaacaggcggctctgatcgctactgcaacctgatgatgcagagaagaaagatgaccctgtaccattgcaaacgatttaacacattcatccacgaggatatttggaacatcaggtcaatttgctccacgacgaacattcaatgtaagaatggcaagatgaattgtcatgagggcgtggttaaggttaccgactgtcgagacacagggtcctcccgtgctcccaactgccgatatcgagcaatcgcctccacaaggagggtggtgatcgcgtgcgaggggaaccctcaagtcccggttcattttgacggatag

SEQ ID NO: 10151 - DNA, 600 bp, synthetic construct
  misc_feature 1..600: note = source = /note="Description of Artificial Sequence: Synthetic coding sequence"
  source 1..600: mol_type = other DNA
atggagaccttccccctgctgctgctgagcctgggcctggtgctggccgaggcctccgaaagcactatgaagatcattaaagaagaattcacagacgaggaaatgcaatatgatatggctaaatctggccaggaaaaacagaccatcgagatattaatgaatccaatcctgctggttaaaaacacctcactctccatgagcaaagatgacatgtcctctaccctgcttacttttcgctccctgcactacaacgatcctaagggcaatagcagtggaaacgacaaggagtgctgtaatgatatgacagtttggcggaaggtttctgaggctaatggcagctgcaagtggtccaacaactttattcggtccagcaccgaagttatgcgacgcgtgcatagggctccctcatgtaaattcgtccaaaacccaggcatatcctgctgcgagtctctggaactggagaatactgtgtgtcaattcacaacagggaaacagttcccacgctgccagtatcactccgttacgagcctggaaaaaattttgaccgtgctaactggccattccctcatgagctggttggtgtgtggaagtaaattatag

SEQ ID NO: 10152 - DNA, 153 bp, synthetic construct
  misc_feature 1..153: note = source = /note="Description of Artificial Sequence: Synthetic coding sequence"
  source 1..153: mol_type = other DNA
atgagcttcagcgccaccatcctgttcagcccccccagcggcagcgaagcaagatgctgctgctgtgcttgcaagtcagagacgaatggcgggaacactgggtcccaggggggtaatccgcctcctagtactccaattacggtcacagggtag

SEQ ID NO: 10153 - DNA, 75 bp, synthetic construct
  misc_feature 1..75: note = source = /note="Description of Artificial Sequence: Synthetic coding sequence"
  source 1..75: mol_type = other DNA
atgcagctgttcctgctgctgtgcctggtgctgctgagcccccagggagcttccttgcaccggcaccatccctag

SEQ ID NO: 10154 - DNA, 633 bp, synthetic construct
  misc_feature 1..633: note = source = /note="Description of Artificial Sequence: Synthetic coding sequence"
  source 1..633: mol_type = other DNA
atgagcgccggcaagatgatgcggaccctgatcaccacccaccccctgccattactgttactgcctcagcaactgctgcagctggtgcaatttcaagaagtggatacagacttcgactttcccgaagaggacaaaaaggaggagtttgaggagtgtctggagaagtttttctctaccgggcccgcgaggcctccaacaaaagagaaagtcaagaggcgggtcttgatcgagcctggtatgccccttaaccatattgagtactgcaatcatgaaataatgggcaagaatgtatactacaaacaccggtgggtcgcagaacactacttcctcctcatgcaatacgacgagctccagaagatttgctacaaccggttcgttccttgcaagaatggaatccgcaaatgcaatcgctcaaagggcctcgtcgagggagtgtactgtaacttgacagaggcctttgagattcccgcatgcaaatacgaaagcctgtatcgaaaaggctatgttctcattacttgtagttggcagaatgaaatgcaaaaaagaataccgcacacaataaatgacttggtggaacctcccgaacaccggtcattcctgagcgaagatggggtctttgtaatctccccctag

SEQ ID NO: 10155 - DNA, 36 bp, synthetic construct; identical to SEQ ID NO: 5142
  misc_feature 1..36: note = source = /note="Description of Artificial Sequence: Synthetic coding sequence"
  source 1..36: mol_type = other DNA

SEQ ID NO: 10156 - DNA, 444 bp, synthetic construct
  misc_feature 1..444: note = source = /note="Description of Artificial Sequence: Synthetic coding sequence"
  source 1..444: mol_type = other DNA
atgatcatcatggtgatcatcttcctggtgctgctgttctgggagaatgaggtgaacgacgaagctgtcatgagcaccctggagcacctgcacgttgattatccgcaaaatgatgtgccggtgcccgcgcgctattgcaaccacatgatcattcagcgggttatccgagaacctgatcacacctgcaagaaggagcacgtgtttatacacgagagacctcgaaagatcaacggcatatgtataagtcccaagaaagtagcatgccaaaatctgagcgccattttttgttttcagagcgagactaagtttaagatgaccgtatgccaacttatcgaaggaaccaggtacccagcctgtcggtaccactattcaccgaccgagggatttgtgcttgtaacctgtgacgacctgaggcctgattcctttctggggtatgtgaaatag

SEQ ID NO: 10157 - DNA, 696 bp, synthetic construct
  misc_feature 1..696: note = source = /note="Description of Artificial Sequence: Synthetic coding sequence"
  source 1..696: mol_type = other DNA
atgcagctgttcctgctgctgtgcctggtgctgctgagcccccagggggcctcactgcatcgccaccatccccgagagatgaagaagagggtggaggacctgcacgttggcgctacagtcgctccttcttcaagacgggacttcaccttcgatctgtaccgcgccctcgcatctgctgctccatcccagtctatcttcttcagccctgtgtcgatttcgatgagcttagcaatgctctctctgggagccggatcctccacaaaaatgcagattctggaggggctagggctaaatttgcaaaaaagcagcgagaaagagctgcacagaggattccagcagttgttgcaggagctcaaccagccaagggacggctttcagctgtctctaggtaacgccttgttcactgatctggtagttgacctgcaggacactttcgtttccgctatgaaaaccctttatctggccgatacatttcctaccaacttccgcgattctgccggcgctatgaagcagataaatgactatgtcgccaaacagactaaaggcaagattgttgacctacttaaaaacctcgacagtaacgcagtggtgataatggtgaattatatttttttcaaggccaaatgggaaacttcattcaaccacaaaggaacgcaggaacaagacttttacgttacaagcgagactgtggtctag

SEQ ID NO: 10158 - DNA, 1626 bp, synthetic construct
  misc_feature 1..1626: note = source = /note="Description of Artificial Sequence: Synthetic coding sequence"
  source 1..1626: mol_type = other DNA
atggccaagttcggcgtgcaccggatcctgctgctggccatcagcttaacaaagtgtttggaatcgactaaactgctcgcggacctgaagaagtgtggagatcttgagtgcgaggcactcattaatcgggtcagcgcaatgagggactatcgcggcccagactgccggtatttgaacttcactaagggggaggaaattagcgtctatgtgaagttggccggggaacgcgaggatctttgggccggtaaaggtaaggagttcggctactttccacgagacgcggtacaaatagaggaggttttcatttccgaagaaatccagatgtccaccaaggagtccgactttctttgcttattaggggtttcatacactttcgacaatgaggattcagaactgaatggggactatggcgaaaacatatacccatatgaagaagacaaagatgaaaagtctagcatctatgagagtgactttcagatagagcctggtttctatgctacctatgaatctacactgttcgaggaccaggtcccagccctggaggccccggaggacatcgggtccactagcgagagtaaggattgggaagaagtagtagtggaatccatggaacaagacaggatcccagaggtccatgtaccgccctcctctgctgtgagcggagtcaaagaatggtttgggctgggaggcgagcaagccgaggagaaggcctttgagtcggtcatcgaacctgtacaggagagttctttccgctcaagaaaaatcgctgtcgaggatgaaaacgacctggaggaactgaacaatggcgagccccagacagaacaccagcaagaatccgaaagcgagatcgatagtgtgcccaaaactcaaagtgagcttgccagcgaatccgaacatatacccaagcctcagtcaacgggatggttcgggggcggttttacttcttatctgggattcggcgatgaagatactggtctagaattgatcgccgaggaaagcaatccaccactacaggatttccctaattccatttcaagcgacaaagaagccactgtgccttgcacggaaattctcaccgaaaagaaggacactatcaccaacgacagtctgtccctgaagccttcctggttcgactttgggttcgctatattgggtttcgcctacgcaaaagaagataagatcatgctcgatgaccggaagaatgaggaggacggcggggctgatgagcatgaacatccactcacaagcgaattggaccctgagaaagaacaggagatcgagaccataaagatcattgagacagaggaccaaatcgataagaagcctgtctcagaaaagaccgacgaatccgataccatcccgtacttgaagaaattcctgtataatttcgataatccgtggaactttcagaatatcccaaaagaaaccgagctacccttccccaagcaaattctggaccagaacaacgtgattgaaaacgaagagaccggtgagttctctatcgataactaccccaccgataatacaaaagttatgattttcaagagctcatatagcctgagcggttggtacgaaaacatatacattcgaatctacttcatcttcaagcacaacctgttcctatag

SEQ ID NO: 10159 - DNA, 1245 bp, synthetic construct
  misc_feature 1..1245: note = source = /note="Description of Artificial Sequence: Synthetic coding sequence"
  source 1..1245: mol_type = other DNA
atgaaccccaccctgggcctggccatcttcctggccgtgctgctgaccgtgaagggcttgctcaaaccgtccttctctccgagaaattacaaagccttatcggaagtgcaaggatggaaacaaagaatggccgcgaaagagttggcccgacaaaatatggatctcgggtttaaacttttgaaaaaattggccttctacaacccaggccggaacatcttcttaagcccactcagcattagcactgcatttagtatgctatgtctgggcgcccaggatagcacactggacgagatcaagcagggatttaacttcagaaagatgcctgagaaagatctgcatgaaggatttcactatattattcacgagctgacccagaagacccaagacttaaagctgtccatcgggaacactctttttatcgatcagaggctccagccccaacggaaattcctcgaagacgcaaagaacttctattctgcggagaccatcctgaccaattttcagaacctggagatggctcagaaacagatcaatgacttcatctcccagaaaacccacgggaagattaacaacttgattgagaacatcgaccctgggaccgttatgctgctggccaattacatattcttccgggctcggtggaagcacgaatttgatccaaatgtcacaaaggaggaggactttttcctggagaaaaatagttccgtgaaggttcctatgatgttccggagtggtatttatcaggtgggctacgatgacaagttatcatgtacgattctcgagatcccctaccagaagaacatcaccgcgatcttcattctccctgacgaaggcaagctgaagcacttagagaaaggcctgcaggtggacacctttagtcggtggaagactctgctctctaggcgggtggtagacgtcagtgtgcctcgcctacacatgacagggactttcgatttgaaaaaaactctctcatacatcggcgtgtcaaaaatttttgaagagcacggcgatctgaccaaaatcgcaccccataggagccttaaagttggggaagcagttcacaaggcagaactcaagatggacgaacgagggaccgaaggcgccgctggcactggtgcccagactctgccaatggaaacccctctagttgtaaagatagacaagccgtacttactgctgatatacagtgagaaaattccatctgtgctgttcctggggaagatcgtaaatcccatcgggaaatag

SEQ ID NO: 10160 - DNA, 618 bp, synthetic construct
  misc_feature 1..618: note = source = /note="Description of Artificial Sequence: Synthetic coding sequence"
  source 1..618: mol_type = other DNA
atgatgcggaccctgatcaccacccaccccctgcccctgctgctgttgccccagcagctgctacaactcgtgcaattccaggaggtcgacacagatttcgacttccccgaggaggataagaaggaggaattcgaagagtgcctggaaaagtttttctccactggaccagctaggccccctactaaagagaaagtgaaacgccgagtcttgattgagcctgggatgcctctgaatcacatcgagtattgtaaccatgagatcatgggcaagaacgtttattacaaacatcggtgggtcgctgaacattattttttactgatgcagtatgacgagttgcagaagatctgctataaccgttttgtcccttgtaaaaatggcatccggaagtgtaatcgtagcaagggcctcgtggaaggtgtctactgtaatctgacagaggcctttgagatccccgcctgtaaatatgaatccctttataggaaaggatacgttctgataacatgcagttggcaaaatgaaatgcagaaaaggataccacatactattaacgaccttgttgagccacctgagcacaggagctttctatctgaagatggagtttttgtgatctctccatag

SEQ ID NO: 10161 - DNA, 516 bp, synthetic construct
  misc_feature 1..516: note = source = /note="Description of Artificial Sequence: Synthetic coding sequence"
  source 1..516: mol_type = other DNA
atggagaccttccccctgctgctgctgagcctgggcctggtgctggcagaggccagtgagtccacaatgaagattatcaaggaggaattcactgatgaggagatgcaatatgatatggcaaagtctggccaggagaaacaaaccattgagattcttatgaaccccattctactggttaaaaacaccagcctaagcatgagtaaagatgacatgtcttccaccttgttgactttcagaagcctccattataatgatcccaaagggaatagcagtggaaatgacaaagagtgctgcaacgatatgactgtatggaggaaggtctctgaggcgaacggatcctgcaagtggtcgaataactttataaggtcgagcacagaggtgatgcgccgggtgcaccgagctccatcctgcaaatttgtgcagaaccctggcattagctgttgcgagtcactagaactcgaaaataccgtgtgtcaattcactaccggaaaacagttccctcgttgtcaatattag

SEQ ID NO: 10162 - DNA, 633 bp, synthetic construct
  misc_feature 1..633: note = source = /note="Description of Artificial Sequence: Synthetic coding sequence"
  source 1..633: mol_type = other DNA
atgagcgccggcaagatgatgcggaccctgatcaccacccaccccctacccctgctgctgctgccccagcagctgcttcagcttgtgcagttccaggaggtggatactgactttgactttccagaggaggataaaaaagaagaattcgaagagtgtctggaaaagttcttctctacaggacccgccaggccaccaactaaggagaaagttaaaagaagggtcctgatcgaacctggaatgcctctgaatcacattgaatattgtaaccatgaaatcatggggaaaaatgtctattacaagcaccgctgggtggccgagcactacttcctcctcatgcagtatgacgaactgcaaaaaatttgttacaatcggtttgtgccctgtaagaacggcattaggaagtgcaacaggtcaaaaggcctagtggaaggcgtgtactgcaatctcacggaagcattcgaaattcccgcgtgcaagtacgagtccctgtaccggaaggggtacgttctgatcacctgttcttggcagaatgaaatgcaaaagcgcatcccccacacaatcaacgacctagtagaacctcccgaacatagatcatttctgtccgaggatggtgtcttcgtgatcagtccttag

SEQ ID NO: 10163 - DNA, 537 bp, synthetic construct
  misc_feature 1..537: note = source = /note="Description of Artificial Sequence: Synthetic coding sequence"
  source 1..537: mol_type = other DNA
atggagaccttccccctgctgctgctgagcctgggcctggtgctggctgaggccagtgagtccacaatgaagattataaaggaagaattcacagatgaagagatgcagtacgatatggcaaagtcgggccaggaaaagcagacaattgagatcctgatgaacccgatcctgttagttaaaaatacaagcttgtccatgagcaaagacgacatgtcaagcactctactcacttttaggtccttacattacaatgatccaaagggaaatagctctggcaatgataaagaatgctgtaatgatatgacagtgtggagaaaggtctccgaggcaaatggatcatgtaagtggtccaacaactttatccgctcttctacggaggttatgagaagggtccaccgtgcaccctcctgtaagtttgtccagaaccctggaatctcttgctgcgaaagcttagaattagagaacactgtgtgccaatttacaactggtaagcagttccccaggtgccagtatcacagcgtaacttcactagaatag

SEQ ID NO: 10164 - DNA, 474 bp, synthetic construct
  misc_feature 1..474: note = source = /note="Description of Artificial Sequence: Synthetic coding sequence"
  source 1..474: mol_type = other DNA
atgcagctgttcctgctgctgtgcctggtgctgctgagcccccagggtgcaagcttgcacagacaccatcctagagaaatgaagaaaagagtggaagatctgcatgtcggggccacagtggcgccgagttctagacgagatttcacttttgacttgtaccgagctctagcttctgccgccccaagccagagcatcttcttttcccccgttagtataagtatgagcctagccatgctgtctctcggcgcgggaagtagcactaagatgcagattttggagggcttaggtttaaatctgcagaaatcctctgaaaaggaactgcatcgggggttccagcagctcctgcaagaattgaaccagccccgggatgggttccagctgtctctgggaaacgctctctttaccgacctggtcgttgatctgcaggatacatttgtcagcgccatgaagacattatatctggccgacacctag

SEQ ID NO: 10165 - DNA, 1035 bp, synthetic construct
  misc_feature 1..1035: note = source = /note="Description of Artificial Sequence: Synthetic coding sequence"
  source 1..1035: mol_type = other DNA
atgcccccccggatgctggtggcccccctgcccctgcacttcctgctagccgccgtgagctcggaaaaccggagtggacgaaggcaatggcaacaggccgtggccgcaggatccgggccgggccgaaatagtagccgggctatccattggtccctaccaagggccctggtgcccgcaaccggtacaagggcttcggggtcccagaaacggcagagacccccaaaggggcaggaggcgctctggagcaggcctcacagccgacatagcgctgagcgcgccggaggttcccattctgaccctggacgccttagtgctccattaggacttgggctgccttccggccgaggtaggttaaccgctatgcccggacgtgcgcctttgcgtaccgtgccaggcgccctgggcgcttggctcctgggcggactgtgggcgtggactctctgtggcctttgcagcctgggagccgtgggtgccccacgcccatgccaagctccacagcaatgggaaggacgacaagtgatgtatcagcagtcttcgggtagaaatagtagagccctcctatcgtatgacggtctaaaccagagggtgcgcgtgctggacgagcgcaaggcactcattccctgtaaacggttgttcgagtacattttgctgtataaggacggggttatgtttcagatagaccaggccacaaagcaatgtagtaagatgactctgacccagccatgggaccctctcgacataccccagaactctacttttgaagatcagtattccatcgggggccctcaggagcagatcactgtgcaagaatggtccgacaggaaatccgcgcgatcctatgaaacttggataggaatctacaccgtgaaggattgctatcctgtgcaagagacttttaccatcaattattctgtcattctgtcaaccaggttctttgacatccaactggggatcaaggacccatcagtctttacaccaccaagcacttgtcagatggctcagctcgagaagatgtcagaggactgttcatggtag

SEQ ID NO: 10166 - DNA, 321 bp, synthetic construct
  misc_feature 1..321: note = source = /note="Description of Artificial Sequence: Synthetic coding sequence"
  source 1..321: mol_type = other DNA
ggccagcccaaggccgcccccagcgtgaccctgttcccccccagctcagaggagctgcaggccaataaggcaacattggtgtgcctggtctctgacttctatcctggtgctgtgacggttgcctggaaggccgacggtagccctgtcaaggttggcgttgaaactacaaaaccgagtaagcagtcgaacaacaagtatgctgccagctcctacctttctctaacacccgaacagtggaaatcccacaggtcgtactcctgtagggttactcatgaggggtccacagtggagaaaaccgtcgccccagctgagtgtagctag

SEQ ID NO: 10167 - DNA, 672 bp, synthetic construct
  misc_feature 1..672: note = source = /note="Description of Artificial Sequence: Synthetic coding sequence"
  source 1..672: mol_type = other DNA
atgcggctgcagcggccccggcaggcccccgccggcggccggcgggcccctagaggcgggcggggtagcccctacagacctgaccccgggaggggagccagacgcctccgtcggttccagaaaggtggggaaggagcaccacgggcggacccaccttgggcccccctgggtacgatggcgctacttgcattgcttctcgtggttgctttacccagagtgtggaccgatgcaaatctgaccgcacggcagcgcgacccagaagacagccagaggactgacgagggtgacaacagggtgtggtgccatgtgtgcgagagagaaaacaccttcgagtgccaaaacccgcggcggtgcaagtggaccgagccctactgtgtgattgccgctgtgaagatcttccccagattcttcatggtcgctaagcagtgctccgccgggtgtgcagccatggagcggccaaaaccagaagagaaacgctttctgctcgaagagccaatgcccttcttttaccttaagtgctgtaaaatcagatattgcaacctggaaggcccaccgattaatagctctgtcttcaaggagtacgccggctccatgggtgagtcctgtggcgggctgtggctagccatcctcctgctcctagcttctatcgctgcaggactctccctgtcttag

SEQ ID NO: 10168 - DNA, 408 bp, synthetic construct
  misc_feature 1..408: note = source = /note="Description of Artificial Sequence: Synthetic coding sequence"
  source 1..408: mol_type = other DNA
atgacccccacccccaccgccgcctggaccccccccccccccctgcggcctagcgccgccgcagctggggcacagtgccgcagttgcccctttagaggtggctgtgcgccatccactgcacggactcccccagcctgtatgcgaccagctggcccatgcgctccccccacatggcctgccccctccaccaccacctctacatgtaccagcaggcgagccgggtgcaccgcctcttcagcttcctatagcacccttgccgcggcttgcagcttgcgccgcagtggcgtgaggtggcctccctcgagcgcttacagcacctgggccttcgcatcatgctgtgcctcatctgcttcttgcagatgctgctgctgctgctgggccgcaggagcttggacgtccgcctggtag

SEQ ID NO: 10169 - DNA, 1542 bp, synthetic construct
  misc_feature 1..1542: note = source = /note="Description of Artificial Sequence: Synthetic coding sequence"
  source 1..1542: mol_type = other DNA
atggcccccgcccggaccatggcccgggcccggctggcccccgccggtattcctgcagtggccctctggctcttgtgcacgttgggactgcagggaactcaggctggcccgccccccgccccgccaggcctccccgctggcgccgactgtctgaacagctttacagcaggcgtacccggattcgtcctcgacacaaatgcctcagtcagcaatggagccacatttctggaaagtcccactgtgcggcgggggtgggattgtgtgagggcatgttgcaccacccagaactgtaacttggctttggtcgagttgcagcccgatcgcggggaggatgctattgccgcctgttttctgatcaactgcctgtatgagcagaattttgtttgtaaattcgctccaagggaggggttcataaattacttgaccagggaagtatacaggagttatcggcagcttcggacacagggatttggagggtccggcatacccaaggcctgggctggcatagacctcaaagttcagccccaggagcccctggttctcaaggatgtggaaaatacagattggcggcttctcagaggtgatactgatgtcagagttgaacgtaaggaccccaatcaagtagaactttgggggcttaaagaaggcacctatctgtttcagctgacagtaaccagctccgatcaccccgaagataccgccaatgttacagtaacagtgctgtccactaagcagacagaggactattgtttagcatcaaataaggtgggcaggtgtcgaggaagctttcctcgttggtactatgacccaacagagcaaatctgtaagagcttcgtatacgggggctgcctaggcaacaagaacaactaccttcgggaggaagaatgcatcttggcgtgtcggggggtgcagggaccatctatggagagacgtcaccccgtgtgtagcggcacgtgtcaaccaactcaatttcgatgtagcaatgggtgctgtatcgacagctttttggagtgtgatgatacaccgaactgtcccgacgcatctgatgaggcagcctgcgagaagtacacatctggctttgatgaactgcagagaattcatttcccaagcgacaagggacactgtgtggacctcccggatacaggactgtgcaaggaatctataccacggtggtactacaacccattcagtgagcattgtgcaagattcacctatggtggatgctacggcaataaaaataattttgaagaagaacagcagtgtttggagtcttgcagaggtatcagtaagaaagatgtgttcggtcttagacgggagatccccataccaagcactggatcagtagaaatggccgtggcagtgtttctcgtgatttgtatcgtggtggtcgtggcgattcttgggtactgctttttcaagaatcagcggaaagattttcacggccaccaccatcatcctcctcccaccccagcaagctcgaccgtgtccaccaccgaggatactgaacacctcgtgtacaaccatacgacccgccccctgtag

SEQ ID NO: 10170 - DNA, 1341 bp, synthetic construct
  misc_feature 1..1341: note = source = /note="Description of Artificial Sequence: Synthetic coding sequence"
  source 1..1341: mol_type = other DNA
atgctgcaccccgagaccagccccggccggggccacctgctggccgtgctgctggctctcctgggaacagcctgggcggaagtgtggcctccccagcttcaggaacaggctcctatggcgggcgcccttaacaggaaggagagttttctgctccttagccttcacaaccgcctgcggtcatgggtgcaacctccggctgcagacatgcgccggctggactggtccgactcgctggcccagctagctcaggcacgggccgctctctgcggtattcccaccccatcgctggcctctggcctttggcgaacgctccaggtggggtggaatatgcagctgctgcctgccggccttgccagctttgtggaggttgtgagcctctggtttgctgagggccagcgctattcccacgccgcaggggaatgtgctcgcaacgccacctgcacgcactacactcagctggtgtgggccacatcttcacaactgggctgtgggcgccacctgtgttccgccggccaagctgcgatagaggcctttgtgtgtgcctattcgccgaggggcaattgggaggtgaacgggaaaaccattgtgccttacaaaaaaggggcctggtgctccctttgcacagctagtgtaagcggttgtttcaaagcatgggaccacgcaggcggactttgtgaggtgccccgaaatccgtgcagaatgagttgccaaaatcacgggcgcctgaacattagtacatgtcactgtcattgcccacccggctatactggcagatactgtcaagttagatgctctcttcaatgtgtgcacggacggtttagggaggaggaatgctcgtgtgtttgcgacatcggttatggcggggcacagtgcgccacaaaggttcacttcccattccatacctgtgacctgagaatcgacggcgactgtttcatggtaagttcggaagccgacacatattacagggcacgcatgaagtgccagcggaagggcggtgtgcttgcacagataaaaagccagaaagtgcaggatatattggccttctatctgggccgtctcgaaactaccaacgaagtcatcgatagtgactttgaaacccgtaatttttggatcgggctgacttataagacagcaaaggactcattcagatgggctacaggcgagcatcaggcttttactagcttcgcgtttggccaaccagacaaccacggctttggaaactgcgtcgagctgcaagctagcgccgctttcaactggaacaaccagagatgcaaaacaaggaacaggtatatttgccagttcgcacaggagcacatctctcgctggggccccggcagctag

SEQ ID NO: 10171 - DNA, 936 bp, synthetic construct
  misc_feature 1..936: note = source = /note="Description of Artificial Sequence: Synthetic coding sequence"
  source 1..936: mol_type = other DNA
atgggcgtgatggccatgctgatgctgcccctgctgctgctgggcatttccggcctgctcttcatttatcaagaggttagccggctatggtctaagtctgccgtgcagaacaaggtagtggttattactgacgccatctctggtctaggaaaggaatgtgcccgggtatttcacactggaggtgctagattagttctctgcggaaagaactgggaaagattggagaacctgtacgacgctctaattagtgtagctgacccaagtaagaccttcacgcccaagctggtgcttttggatctgtccgatatcagttgcgtcccagatgtcgctaaggaggtgttggactgttatggttgcgtcgacattctgattaacaatgcatctgtgaaggtcaagggccccgcccataagatctcacttgaactcgacaagaaaatcatggacgccaattactttgggcccattacgctgacgaaggctctactgcccaacatgatctcacgcagaacggggcagatcgtccttgtgaataatatacaggggaagttcggcattccattcaggacaacctatgcagctagtaaacacgccgccttgggcttttttgactgtctgcgtgcagaagtggaggaatatgatgtggtgatctcaaccgtcagtcctacgttcatccggtcttatcacgtgtacccagaacaggggaactgggaagcctcaatctggaagttctttttcagaaaacttacctacggtgtccacccagtggaggtcgcggaagaagtcatgcgcacagtgcgcaggaagaaacaagaggtgttcatggccaatccaataccaaaggccgccgtgtacgtacggaccttcttcccagagttctttttcgctgtggtggcatgtggggtaaaggagaaacttaatgtgccagaggaagggtag

SEQ ID NO: 10172 - DNA, 594 bp, synthetic construct
  misc_feature 1..594: note = source = /note="Description of Artificial Sequence: Synthetic coding sequence"
  source 1..594: mol_type = other DNA
atggccaagaacggcctggtgatctgcatcctggtgatcaccctgctgctggaccaaaccacaagccacaccagtcgcttaaaggcaaggaaacactccaagaggcgggtcagagataaggatggagaccttaaaacgcagattgaaaaactttggaccgaagtgaatgcattaaaagaaatccaggctctccagactgtgtgcctacgcggtacaaaggtccataagaaatgttacttagcatctgaaggcttgaagcacttccacgaagccaacgaggactgtatatccaagggagggatccttgtcattcccaggaactccgacgaaatcaatgctctccaggattatggtaagaggtccctgcctggcgtaaatgacttctggcttggcatcaatgatatggtcaccgaaggcaagttcgtcgacgtgaacgggatcgcaatttccttcctcaactgggaccgggcccagcctaacggcggcaagcgggaaaattgcgtgcttttcagccagagcgcacaaggtaagtggtcagatgaggcttgtcggagctccaaaaggtacatctgcgaattcactattcctcaatag

SEQ ID NO: 10173 - DNA, 705 bp, synthetic construct
  misc_feature 1..705: note = source = /note="Description of Artificial Sequence: Synthetic coding sequence"
  source 1..705: mol_type = other DNA
atgaaggtgctgctgctgaccggcctgggcgccctgttcttcgcctactactgggacgacaacttcgaccccggcgggttggactatctggtactgaaccacataggcggtgcaccagccggtacgcgggcccgaagcccccaggccaccagatggctaatgcaagtgaacttcgtcagctacgtacagctgacttcacgggctcttccctctctcacagattctaagggatcactggtggtggtgtccagcttactgggtcgggtgcccactagtttctcaacgccatacagcgccgctaaattcgcactggatgggttttttggcagcttgagacgcgaacttgatgtccaggacgtaaatgtggccataacaatgtgtgtgctgggcctacgcgatcgagcatcagcggccgaggccgtgcggagctccacatcccggccccgccagcctgagcataggggagttcctttgcagagtcaaacagcgatgtttctgcccccgacagtgccaggagctcggacactgaccgaaacacctctacgagggtggcctcagcctaagatgaaatcttcacgacagaaaagcaaaacagagaaaaatgacggtcatctagagcctgtcacggcttgggaagtgcaagtcccaagagtccggaggctctgcagaggactcgcccgacctcatttatttggccacgactag

SEQ ID NO: 10174 - DNA, 228 bp, synthetic construct
  misc_feature 1..228: note = source = /note="Description of Artificial Sequence: Synthetic coding sequence"
  source 1..228: mol_type = other DNA
atgaaggtgctgctgctgaccggcctgggcgccctgttcttcgcctactattgggatgataactttgaccctgcatctcttcagggagctcgggtgctcctgaccggagctaacgcaggagtcggggaggagctggcttaccattatgctagactgggcagtcatttagttttaaccgctcacactgaggcactcctccaaaaggccggctggaccacgtcttgttag

SEQ ID NO: 10175 - DNA, 225 bp, synthetic construct
  misc_feature 1..225: note = source = /note="Description of Artificial Sequence: Synthetic coding sequence"
  source 1..225: mol_type = other DNA
atgcagcccagcgagatggtgatgaaccccaagcaggtgttcctgtctgttctcattttcggtgtagccgggctactactgttcatgtatctgcaggtatggatcgaggagcaacacacgggcagagtggagaaaagaagagagcaaaaagtgacatcaggctggggacctgtgaagtaccttagaccagtgccacgaatcaagccacaggtcagccatgcttag

SEQ ID NO: 10176 - DNA, 861 bp, synthetic construct
  misc_feature 1..861: note = source = /note="Description of Artificial Sequence: Synthetic coding sequence"
  source 1..861: mol_type = other DNA
atgaaggtgctgctgctgaccggcctgggcgccctgttcttcgcctattactgggatgacaactttgatccagctagtctgcagggggctcgcgtgctgctcacaggggcaaacgccggagtgggcgaggagttggcataccactatgccagactgggatcccatttagtgctgaccgcgcatacagaggcacttttacagaaggttgtggggaattgccgaaagcttggcgcgcctaaggttttctacatcgctgccgatatggccagccctgaagccccggagtccgtcgtccagtttgccctggacaagctgggcggcctggattatctggtccttaaccatatcggcggtgccccagcaggtacgagggcacgatctcctcaagctactcggtggctgatgcaggtgaatttcgtttcctatgtccagctcacttctagggctctgccctctcttactgattccaagggtagtctggttgtcgtgagtagtctcctgggccgcgtcccaactagcttttccacaccctattcagcggcaaaatttgcgctggacgggttttttgggagccttcgcagggagctggatgtacaagatgtcaatgtggccatcaccatgtgtgtgctgggtctgcgggacagagctagtgcagccgaggctgtgcgcggtgtgacacgcgtcaaagccgcgcccggtcccaaagctgccctcgcagtgatacggggcggggcaacccgggcggcaggagtgttctatccatggcgatttcgcctgctgtgcctgttgagacggtggctgccccgccctcgggcgtggttcatccgccaagagttaaacgtcaccgccgccgcagcctag

SEQ ID NO: 10177 - DNA, 459 bp, synthetic construct
  misc_feature 1..459: note = source = /note="Description of Artificial Sequence: Synthetic coding sequence"
  source 1..459: mol_type = other DNA
atgcaggtgaacttcgtgagctacgtgcagctgaccagccgggccctcccatcattaactgactctaaagggtccctggtggtagtctcaagccttctgggccgagtgcctacatctttttccaccccttattccgcagcaaagtttgcactggatgggttcttcgggagtctccggcgggaactggacgtgcaagatgttaatgtggccatcacaatgtgcgttctggggcttagggaccgcgcatccgcagccgaggccgttaggggcgtcacacgggttaaagccgcaccaggacccaaggccgctttggctgtgattagaggcggagcgacgcgtgctgcaggcgtgttctacccatggcgttttcgcctcctttgtctcctcagacggtggcttccccgtccccgtgcctggtttatacgacaagagcttaacgtgaccgccgcggccgcttag

SEQ ID NO: 10178 - DNA, 2856 bp, synthetic construct
  misc_feature 1..2856: note = source = /note="Description of Artificial Sequence: Synthetic coding sequence"
  source 1..2856: mol_type = other DNA
atgcgggtgctggcctgcctgctggccgccctggtgggcatccaggcagtagagcgcctcagattggcagatggcccgcatgggtgtgccggacgcttggaggtgtggcatggcggacgctggggaacagtatgtgacgatggttgggatctccgcgacgctgccgttgcgtgcagacagctgggatgtggaggtgcactcgccgcccccggcggcgcgttttttggcgagggagccggtcctgtatggctgagcgagctggcatgtcgcggcaatgaaggccaactgggcctctgtcaccataggggttggaaagcacacatttgcagccacgaagaagacgcaggtgtagtgtgcgccggtcaaagggtggccaatagccgcgatgacagcacgagcccgctggatggcgccccttggccaggcctgttactcgaattgagtccttctacggaggagccactagttacacacgcccccagaccggccggaaatccacaaaacgcctcccggaagaagagccctcgccccaaacaggcgaaatcaaccagggccccgttgcttaccaccggtgccccccggcaggagagacttagactggtgtctggcccccaccgttgcgccggaagactcgaagtgtggcacggcggaagatggggtaccgtttgcgatgatggctgggatctcagagacgccgctgtcgcttgcagggaactcggctgcggcggcgccttggccgcaccgggcggggcgagattcggtcccggtgctggtcctgtgtggatggatgatgtcgggtgtggcgggggtgagcaggcactgcgagactgtcctcggtcaccttgggggagaagtaactgcgaccattctgaagatgcaggactggtgtgcacagggccagcgccacgactcaggcttgccgatgggccccatggctgtgctgggagacttgaggtgtggcacggggggcggtgggggtccgtgtgcgacgatgcatgggatttgcgcgatgccgcagttgcctgccgggaactgggatgtggcggggctctcgccgcaccgggcggcgccttctttggagagggctccggtcctatcatcttagatgaccttcgctgccggggaaatgagacagcattgcgtttctgcccagctcgcccttgggggcagcatgattgccaccacagagaggacgcgggggccgtctgcgatggaatgcctctggggtacgtacccccgactgcacctaccgacagcaacaactcgaccccaagggaagccgcgtctagaccgcctagtacaatgacatcgcaggcacctggaaccgccggcgtcagccctccgcccgctagtcctactgttttatgggaacccggacccgaggctggaagtcctcagctcaggcttgtcgccggacccagcaagtgttcaggccgcctagaggtttggcacgatcagcgttggggaacggtatgcgacgatagttgggacatgcgcgacagtgctgtcgtgtgcagagagttaggatgcgggggccctcagcagcccgatcctgctgccggcaggttcggttggggcgccggacctatttggctggacgacgtgggatgtgtagggacggaggccagtttatcggattgccccgctgctccatggggcaaacacaattgcgcccacaacgaggatgtgggggtcacctgcacagggccacctggtctggacagtatcagcgatcctttctcctggtcttggatccccggactgggcagagatagggacgcttggctgccaggggaactagcaaccaagccttcagccagtgtgaccgcctctgttttggaaaaaaccactacgaaagctcctggcaagatgccaaaatcgacaaagaagtgggtgactaaaaatgccaagcgacccactacacagccaccagtaatgcccacaacaaagcacagtagagcacagtccccaccagacctgacttcccaaaccacggccgccttaaccacggaagcctcgcggaggccaaccagcgagtttacaagaaggccaaccacggaagcaccgcaacgatggacatctcataccaccgcaacactcactcctcaagccccccgcgagcgaaccaccaaaactatggctatgctcactacgcagggaccgcaggagatgaccagcgaaagcaccatcaagtccatacctcaggcgtccctggagccgtcagcggaaatccccgagggatccccggagtccccaaaagatcccgcccccagcccatccgtgagtacgactggagaatctggacttttcagggtgaggctggctgacggccccaacagatgtgcgggcaggctggaggtttggcacgccggaaggtggggaactgtatgtgatgataactgggatttacgcgacgccactgtagcctgttgggagctgggttgcggaaaggtgcggcctcgggtgggcaagacacactacggacctggtaccggcccaatttggctcgatgacatggggtgcaaagggtcagaagcctccctatcagactgtccctctggggcgtggggaaaacacaactgtgaccatgaagaggatgttggcctgacatgtaccggctataccgactatgatgattacccaccttggacctgggatccaacctcacgtgaggatctggccaagggcacaaccaccgccggggtcccgggccacacccttccctggagaaccacacgtcgacccgggtcaagtagtcctgcaatccggagattgccagacactgaacccgaggctggcgcccccaggggggacgcaccaagaagcagaacggcgagggtagccgccccaccatag

SEQ ID NO: 10179 - DNA, 8430 bp, synthetic construct
  misc_feature 1..8430: note = source = /note="Description of Artificial Sequence: Synthetic coding sequence"
  source 1..8430: mol_type = other DNA
atgaccctggagggcctgtacctggcccggggccccctggcccggttgctcttagcttggagtgctctcttgtgtatggctggtggtcagggaagatgggacggggcactggaagcagccggcccaggtagagtgcggaggcggggaagcccgggaattcttcagggcccaaacgtatgcggctctcgcttccatgcctattgctgtccaggctggcggacatttcctgggagaagtcagtgtgtggtccccatatgtcgccgcgcatgcggagaaggcttttgtagccagcccaacctgtgtacttgtgcagacggcactctcgcgccttcttgcggagttagccgcggtagcggatgttctgtgtcctgcatgaacgggggaacctgtcgcggagcatcatgcctgtgccagaaaggctacaccggcactgtttgcggccagcctatctgcgacaggggctgccataacggcggacgatgcatcggtccaaatcgatgcgcttgcgtctacggtttcatggggccgcagtgtgagcgggactacagaacaggcccttgtttcgggcaggtggggcccgaagggtgtcaacaccaattgactggcctcgtgtgtaccaaagcactctgctgtgcaacagttggcagggcctgggggctgccatgcgaactgtgtcctgctcagcctcacccttgccgccggggatttatccctaacatccataccggcgcatgccaggatgtcgacgaatgccaggctgtgccgggcctatgccaaggtggatcttgcgtcaacatggttgggagcttccattgtagatgcccagtcggccatcgccttagcgatagttctgcagcctgtgaggattacagagctggtgcttgtttttcggtactcttcggagggcgttgcgcaggcgatctagccgggcactacacgcgacgtcagtgttgttgtgacagaggccggtgttgggcagcgggaccagttcccgaattatgccctcctagaggtagtaacgaattccaacaattgtgtgctcagcgcttgcctctgctgccgggccatccgggattgttccctggacttttggggttcggcagcaacggtatgggtccacccctgggccctgcccggctaaatcctcacggatccgacgctcggggaatcccaagtctgggcccaggtaactccaatattggcaccgccacactcaaccagaccatcgacatttgtcggcacttcacaaatctgtgtcttaatggtcgctgtctgccaacgccaagcagctaccgctgcgaatgcaacgtgggatacacccaggacgtcaggggcgagtgtatcgacgtagacgaatgtacctcatctccgtgccaccacggggattgcgtgaatattccaggcacctaccactgcaggtgctacccaggattccaggcaacccccactcggcaggcatgtgtggacgtcgatgagtgcatcgtctccggaggtctttgccacctcggacgttgcgttaataccgagggctccttccagtgcgtctgcaatgccggctttgaactgagtcccgatggaaaaaactgcgtcgatcacaacgaatgcgctacgtccactatgtgcgtgaacggcgtgtgcttaaacgaggatggatcatttagttgtctgtgcaagcccgggtttctcctggccccaggcgggcactactgcatggacatcgacgagtgtcagactccaggcatttgcgtcaatgggcactgcacaaatactgagggaagcttcaggtgccaatgtctggggggactggcagtgggcaccgatgggagagtatgtgtagacacacatgtccgtagcacttgctacggggccatcgagaaaggcagttgtgcacgtccctttcctggaacagttaccaagagcgagtgttgctgtgccaacccagaccacggattcggggaaccatgccagctgtgccccgcaaaggatagcgccgagtttcaagccctctgttcttctggtttaggaattaccacagacggtagagatatcaatgagtgtgccctggaccccgaagtttgtgcgaacggcgtatgcgagaatctccgcggatcatatcggtgcgtctgcaacctggggtatgaagccggggcttcagggaaagattgcaccgatgtagatgagtgcgcccttaactcattgctgtgcgacaacgggtggtgtcaaaattcccccgggagctatagctgtagctgccctccggggtttcatttctggcaagacactgaaatatgtaaggacgttgatgaatgtttgagcagcccctgtgtgtcaggggtgtgtcggaacttggcaggatcttacacctgtaagtgtgggcccggcagcaggctggatccttccggcacgttctgtcttgacagcaccaaaggaacctgttggctgaagatccaagaaagccgctgtgaggtcaatctgcagggcgcctccctgagatccgagtgctgcgcgaccctgggagccgcctggggctctccttgtgagcggtgcgaaatagatccggcctgcgcccggggcttcgcacggatgacaggcgtgacctgtgatgacgttaacgaatgtgaaagttttccaggggtatgtccgaacggaaggtgcgttaacaccgccggctcgtttcgctgtgagtgcccagagggtttgatgttggacgctagcgggagattgtgcgtcgatgtcaggcttgaaccctgcttcctgcgatgggatgaggacgaatgcggcgtaacattgcccgggaaataccgaatggacgtgtgctgttgcagtatcggagccgtttggggggtggagtgtgaggcatgtcctgacccggagtccctggaattcgcttctttgtgtccgcggggactgggatttgccagccgtgattttctgtcaggtcgccctttctacaaagatgtgaacgagtgtaaagtctttcccggcttatgcacccatggcacctgccgcaataccgtgggatcttttcactgcgcttgtgctggcgggttcgccctagacgcccaggagcgtaactgtactgatatcgacgagtgtcgtatctcacccgatctgtgcggccaggggacctgtgtgaacacccccgggtccttcgagtgcgagtgttttccaggctacgaatcaggatttatgctcatgaagaattgtatggatgtggatgagtgcgcaagggaccccttgttgtgccgtggcgggacttgcactaataccgacgggtcctacaagtgccagtgccctcccgggcatgagttgaccgcaaaaggcactgcttgcgaggacatcgatgagtgctctctcagtgatggcctttgcccacacggacagtgtgtgaatgttattggcgcttttcaatgttcctgtcatgctggattccagtccaccccggaccgccaaggctgcgtggacatcaatgaatgtagggtccagaacggaggttgtgacgttcattgcattaacacggagggtagctatcgctgcagctgcggacaaggctactcactgatgcctgacggtcgcgcctgtgctgacgtagatgaatgtgaagagaaccctcgtgtgtgcgaccaaggacattgcaccaatatgcctggtgggcaccgctgcctatgctacgacggcttcatggccacacccgacatgagaacatgtgttgatgtcgacgaatgcgaccttaatcctcatatctgtctgcacggggactgtgagaacactaagggctctttcgtgtgccattgccagctaggatatatggtaagaaagggggcgacagggtgctccgatgtcgatgaatgtgaggttggaggccacaattgcgacagtcatgcatcctgtctaaatattccgggcagcttttcttgcaggtgcctgccaggatgggtgggagatggctttgagtgccatgacctggacgaatgtgtgtcacaggagcacagatgctccccgcgtggcgactgccttaatgtgccggggtcctatcgttgtacatgccggcaaggtttcgcaggagacggattcttttgcgaagaccgggacgaatgtgcagagaatgtggacctttgcgataacgggcagtgcctcaatgcccctggcgggtacaggtgtgagtgcgagatgggctttgatccgaccgaagatcacagagcttgtcaagatgtggatgaatgtgcccagggcaatctttgcgcctttggcagctgtgagaatctgcccggaatgtttaggtgtatctgtaatggggggtacgaactcgataggggtggtggtaactgtaccgatatcaatgaatgcgcggatcctgtgaattgtatcaatggggtgtgtattaatacgcccgggtcttatctttgctcctgtccccaggatttcgagctgaacccatccggggtagggtgcgtcgatacaagggccgggaattgcttcctggagacccatgaccggggtgattcaggaatctcatgttcggcagaaatcggcgtgggagtcactcgcgcttcctgctgctgctcactggggcgggcttggggaaacccctgtgaattgtgtccaatggccaatactactgaatatcgaaccttgtgccccggaggggagggtttccagcccaacagaattactgtgatactggaggacatagacgaatgccaggagctgcccgggctttgccaggggggagactgcgtaaacaccttcgggagtttccaatgtgaatgtccacctggctatcacctgagtgagcacacgcgcatctgcgaggacattgacgaatgctccacacactcgggtatttgtgggcctgggacttgttataacacattgggaaactatacctgcgtgtgcccagctgagtaccttcaagttaacggcggtaataactgtatggacatgcggaagtcagtctgttttcgccattacaatggaacatgccagaatgagctggcattcaatgttacccgcaaaatgtgttgttgttcctacaacatcggtcaagcttggaaccgcccatgtgaggcttgccctactcctatttctcctgactaccagatcttgtgtgggaaccaagcgcccggatttctcaccgatattcacaccgggaaacctcttgacatagatgagtgcggggagatcccagccatctgcgccaacggcatctgtataaaccagattggctccttcaggtgcgagtgtcccgctggatttaactacaatagcatactcctggcatgtgaggatgttgatgaatgcggtagccgcgaatcaccgtgtcagcaaaatgcggactgcattaacatccccggttcttataggtgtaagtgcactagaggctataagctctcaccgggaggggcatgcgtagggagaaacgagtgccgagagatccccaacgtctgtagccatggagattgtatggacaccgaagggtcgtacatgtgtctgtgtcaccgcggatttcaggcctcagccgaccagactctgtgtatggacatcgatgagtgtgatagacagccatgcgggaacggcacatgtaaaaacattatcggatcatacaactgcttatgctttcccggatttgtggtgactcacaacggggactgcgtcgatttcgacgaatgcaccactctcgtcggccaggtctgtaggttcggtcattgtctcaatacagcggggtcatttcattgtttatgtcaggacgggtttgagcttacagccgatggtaagaattgcgtggacaccaacgaatgtctctcgttggcagggacttgtcttcccggcacttgtcagaacctggagggaagcttccgatgtatctgccccccaggtttccaggtgcagtccgaccactgcatagacattgatgagtgtagcgaggagccaaacctctgcctgttcggtacatgcactaattcacccgggtcctttcaatgcttatgccctcctggattcgttctgtccgacaacggccaccgctgttttgacaccaggcagtccttctgcttcacacggtttgaggcggggaagtgctcagtcccaaaggccttcaacacgacaaaaacccgttgctgctgcagcaagcgtcccggcgagggctggggagacccatgtgagttgtgccctcaggaaggatccgctgctttccaggaactgtgtccctttggacacggcgccgtgccgggtcccgacgacagccgggaggatgttaacgagtgtgcagaaaaccccggcgtctgcactaacggtgtttgtgtcaacactgacggctcgtttaggtgtgagtgcccctttggctacagtctggactttacaggaatcaactgtgttgacaccgacgaatgctctgtcggtcacccttgtggccagggcacctgcaccaatgtcattggcggatttgaatgtgcctgtgcagacggctttgaacctgggttgatgatgacatgcgaggacattgatgaatgttcattgaacccgctgctgtgcgcttttaggtgtcataatactgagggatcctatttgtgcacctgcccagctggatacactctcagagaggacggtgctatgtgcagggacgtagacgagtgtgccgatgggcaacaggactgccacgctcgggggatggagtgcaaaaatctcattggcacctttgcctgtgtgtgtcctccgggaatgaggccattgcctggctctggagagggctgcaccgacgacaacgagtgtcatgcacagcccgacctctgtgtgaacgggcggtgtgttaataccgctgggagcttccgttgcgactgcgatgaaggattccagccttcccctacacttactgaatgtcacgatatcaggcagggcccatgctttgcggaagttttgcagactatgtgcaggagcttgagcagctcctccgaggccgtgaccagagcagagtgctgttgcgggggggggcgtggctggggccctagatgcgagctttgccccctcccgggtacctctgcctaccgcaaactctgtccgcacggttccggctatactgccgaagggcgggatgtggatgaatgcaggatgctggcccatctttgcgcccacggtgagtgcattaactccctggggagcttccggtgccactgtcaagcgggctacactccagacgcgaccgctaccacctgtctggatatggacgagtgcagccaagtccccaagccttgcaccttcctctgtaaaaatacaaagggctcattcctgtgcagttgtcctaggggctatctgctggaggaggatggccggacgtgcaaggacctggatgagtgcacctccagacagcacaactgccagtttctctgcgtaaatactgtcggcgccttcacgtgccgctgcccacccgggtttactcaacatcaccaggcttgtttcgataacgacgagtgtagtgcgcagccaggcccctgtggtgcccatggtcactgtcataacactcctggcagctttagatgtgagtgtcaccaaggattcacccttgtttctagtgggcacggatgcgaagacgtgaatgagtgtgacggaccccataggtgtcagcatggatgtcagaaccaactgggcggctatagatgttcctgcccccaaggcttcacccagcatagccagtgggcccagtgcgtcgatgagaacgagtgcgccctgtctccaccaacttgcgggagcgcgtcgtgcagaaacacacttgggggctttcgttgcgtgtgcccttctggttttgacttcgatcaggcactcggtggatgtcaggaagtggatgagtgcgccgggcgccgcggtccctgtagttattcatgcgctaataccccagggggctttctttgtgggtgtccgcagggctactttagagcaggccagggccactgtgtctctggcctgggcttctctcccggaccacaggacacacctgataaagaggaactgctttcatcagaggcatgctatgaatgcaaaattaacggactctccccaagagaccggcctcgccggtccgcccaccgagaccaccaggtgaatttagccaccctggacagcgaagctttgttgaccttggggctcaacctgtcccatctggggcgcgctgagagaatcctggaacttaggcccgcgttggagggcctggagggaaggatccgctatgtcattgtgagaggcaacgaacagggcttttttcgcatgcaccatctgagaggggtgtcttccctgcaattagggaggcgccgcccagggcccggcacataccgcctagaagtcgtgtcacacatggccgggccttggggggtgcagccagagggacaacccgggccatggggtcaggctcttcgattgaaggtccagcttcagctgctgtag

SEQ ID NO: 10180 - DNA, 291 bp, synthetic construct
  misc_feature 1..291: note = source = /note="Description of Artificial Sequence: Synthetic coding sequence"
  source 1..291: mol_type = other DNA
atgcgggtgaccagcgccacctgcgccctgctgctggccctgatctgcagcgtgcaattgggcgacgcttgtctcgacatcgacaaattgttggccaacgtagtctttgacgtgagtcaagacctgctgaaggaggagctcgctagatataatccctcccccctgactgaggagagtttcctgaatgtgcagcagtgcttcgctaatgtgagcgttactgagcgtttcgctcacagcgttgtcatcaaaaagattttacaatctaatgattgtattgaagccgccttctag

SEQ ID NO: 10181 - DNA, 1890 bp, synthetic construct
  misc_feature 1..1890: note = source = /note="Description of Artificial Sequence: Synthetic coding sequence"
  source 1..1890: mol_type = other DNA
atgcagcaggacggcctgggcgtgggcacccggaacggcagcggcaagggtcgcagcgtgcatccttcttggccttggtgcgccccaagacctctgcggtacttcggacgggacgctagagcccgaagagcccaaaccgcggccatggcattgctagccggcggtttgtcaagaggtctaggctcccaccctgcggcagctggtagagatgctgtcgtgttcgtgtggctcctcctaagtacctggtgcacagcgccggcccgcgccatccaggttacagtttcaaatccttatcatgtggtgattctcttccagccagttaccttgccctgcacatatcaaatgacctccaccccaacgcagcccattgtgatctggaaatataagtctttttgccgggacagaattgccgatgctttttccccagcgtctgtggacaatcagctgaatgctcagctggcggcaggaaacccagggtacaatccttatgtcgaatgtcaggatagtgttagaacagtacgcgtggtcgcaaccaaacaggggaatgctgttacccttggcgattactaccaaggcagaagaatcacaatcaccggaaatgccgatctcactttcgaccagactgcatggggggactctggcgtctactactgctccgtggtgagcgcccaagacctccagggtaacaacgaggcatacgcagaactgattgtgttagattggctgttcgtggttgtggtttgccttgctgcctttctgatttttcttttgttaggaatatgttggtgccagtgctgcccacacacctgctgttgttacgtccggtgtccctgctgtccagacaagtgctgttgtccagaagcgctgtatgctgccggaaaggcagccaccagtggtgtgccttccatctatgctccaagcacatacgcgcacctgtcaccagccaagacgccgccccctcccgcaatgataccaatgggcccagcttacaacggctacccaggcggctacccgggagacgtggataggagttcaagcgcgggaggccagggctcatacgttcccctattacgcgacaccgattcatctgttgcatctgttcgctcaggatatagaatccaagcatcccagcaagacgacagtatgcgcgtgctgtactatatggaaaaggagttagcaaacttcgatccttctagacccggccccccttctggccgtgtggaaagggccatgtccgaagtgacttcactgcacgaggacgattggagatcgcgcccaagtcgcgggcccgccctcactccaattagagatgaggaatggggaggtcacagcccccgctctccacggggctgggatcaggaaccggccagagagcaggctgggggcggctggcgcgctcgtcgcccacgggctagaagtgttgacgccttagatgacttgacccccccatccactgccgaaagtggctctcgtagccctacaagtaatggcggaaggtctagggcgtatatgccccccagaagcagatctagagacgatctatatgaccaggatgacagcagggattttccgcggagcagggatccgcactacgacgactttaggagtagagagagaccgcccgctgatccacgaagtcaccaccatcgtacacgcgacccaagagacaatggttcccggtccggagatctgccgtatgacggaagattgctggaggaggccgtaagaaagaagggctctgaggaaaggcggaggccccataaagaggaggaggaagaggcgtattatcccccagcccctccaccttacagtgaaactgatagtcaggcaagcagagaacgacgtttgaaaaaaaatctcgcactcagtcgggagtcgttggtcgtttag

SEQ ID NO: 10182 - DNA, 591 bp, synthetic construct
  misc_feature 1..591: note = source = /note="Description of Artificial Sequence: Synthetic coding sequence"
  source 1..591: mol_type = other DNA
atgtccagacggtctatgctcctggcttgggccctcccatcccttctgagactaggggctgctcaggaaacagaggatcctgcctgctgtagccccatagtgcctcgcaacgagtggaaggcccttgcctccgagtgtgcccagcacctgagccttcctctcagatatgtcgtagttagccatacagccggatcctcttgcaacaccccggcatcgtgccagcaacaagctcgtaatgtacagcactatcatatgaagaccttggggtggtgtgacgtcgggtacaacttcctgattggagaagatgggctggtttatgaggggaggggctggaacttcacaggcgcacatagtggccacttgtggaaccccatgagcatcggcatcagcttcatggggaactacatggacagggtccctacgcctcaagccattcgggctgcccagggcctgctcgcatgcggggtggcgcagggggctctccgcagcaactatgtgctcaagggccaccgcgacgtgcagcggacactttcaccaggaaatcagttataccatttgattcagaattggcctcactataggtctccttag

SEQ ID NO: 10183 - DNA, 1056 bp, synthetic construct
  misc_feature 1..1056: note = source = /note="Description of Artificial Sequence: Synthetic coding sequence"
  source 1..1056: mol_type = other DNA
atggaggctttcgctcttgggcctgccagacgcggacgaaggcgcacgagagccgctgggtctctgctcagcagggccgcaatactgctgtttatctcggccttcttggtgcgcgtgccctcatcagttgggcatttggtccgcctccctcgcgcatttcgcctcactaaggattctgttaagattgtcggctctacctcgttccccgtgaaagcttatgtgatgctgcaccaaaaatctccccatgtactgtgtgtgacgcagcagctgcgtaacgccgagctgattgacccctctttccaatggtacggcccaaagggcaaggttgtgtctgtcgaaaacaggactgctcagatcacgagtactgggtcacttgtcttccagaatttcgaggagtcaatgagcggtatttacacatgtttcctagaatacaagccaactgtcgaagaaatcgttaagagactgcagctaaagtacgccatttacgcttaccgggaaccacattattactaccaattcacagctcgatatcacgcagctccctgtaacagcatatacaacatcagcttcgaaaagaaattactacagatactcagcaagctgcttctcgatctgagctgcgagatatccctcctcaaatctgaatgtcaccgggtgaagatgcagagagccggactacagaatgaacttttttttgctttcagtgtgtcttccctggatacagaaaagggccctaagcgttgcacagatcataattgcgagccctataaacgcctgtttaaggctaagaatctgatcgagagattcttcaaccagcaagtggagattcttggtcgccgtgctgagcaacttccacagatatattatattgaaggtactctgcagatggtttggattaatcgatgctttccgggttacggtatgaacgtgcagcagcaccccaagtgtcccgagtgctgtgtcatttgttctcccggatcttataaccccagagatgggatccactgtctacagtgcaactcctctctcgtgtatggagcaaaaacgtgcctgtag

SEQ ID NO: 10184 - DNA, 420 bp, synthetic construct
  misc_feature 1..420: note = source = /note="Description of Artificial Sequence: Synthetic coding sequence"
  source 1..420: mol_type = other DNA
atggaaacgaacgtgtttcacctcatgctttgcgtcacatcagccagaacacacaaaagcacttcactgtgtttcggacacttcaattcctacccatccctgccgttaatccacgacctgctgctggagatcagtttccaactcagcgccccacatgaggacgcgaggttgaccccggaagagctggagcgcgcttctctcctgcaaatcctgccagaaatgctgggagccgaaaggggggatattttacgcaaagcagactcgtccacaaatatcttcaatccaagaggcaacttgcggaaattccaggacttctctggccaggatcccaatattttactgagccacctcctggctcgaatctggaagccctacaagaagcgagagaccccagactgtttttggaagtactgcgtgtag

SEQ ID NO: 10185 - DNA, 606 bp, synthetic construct
  misc_feature 1..606: note = source = /note="Description of Artificial Sequence: Synthetic coding sequence"
  source 1..606: mol_type = other DNA
atggggtctggacgacgggctctgtccgcagtcccggcagtgctgctagtactcactctacctggcctgcctgtgtgggcacagaatgacactgagccaatagtgctggaggggaagtgtttggtggtctgcgacagtaatcctgctaccgactccaaagggtctagctcttcccccctcggcattagtgtgcgggctgcgaacagtaaagtcgctttcagtgcagtccgctctacaaatcacgagccaagcgagatgagcaataaaactaggattatctatttcgatcaaatcctcgtgaatgtcggtaacttttttactcttgaatccgtcttcgtcgcccctaggaagggaatctacagttttagctttcacgttattaaggtttaccagagccaaacaattcaagtcaacttaatgctgaatggtaagcccgtcataagcgccttcgctggggataaggatgtgactcgggaggccgcaacgaatggagtcctgctctacctggacaaagaagataaggtctacctgaagcttgaaaaggggaacctggtcgggggttggcagtactcaactttttcgggttttctagtttttcccctgtag

SEQ ID NO: 10186 - DNA, 264 bp, synthetic construct
  misc_feature 1..264: note = source = /note="Description of Artificial Sequence: Synthetic coding sequence"
  source 1..264: mol_type = other DNA
atgaaggtgttgcgagcttggctgctgtgcttgctcatgctgggcctcgctctgagaggagccgcttcgcgaacgcaccgccacagcatggaaattcgtaccccagacatcaatccagcatggtatgcttctcgtggaattcgccctgtcggtaggttcgggcgaagacgagcaacactgggcgatgtacccaaaccagggttaaggcccagactcacgtgtttccccctcgagggaggcgcaatgagcagccaagacgggtag

SEQ ID NO: 10187 - DNA, 1098 bp, synthetic construct
  misc_feature 1..1098: note = source = /note="Description of Artificial Sequence: Synthetic coding sequence"
  source 1..1098: mol_type = other DNA
atgcctggcggtaaaaaggtggctggcggagggtcatccggggctacaccaaccagtgcggctgctacagccccttctggagtcagaagacttgaaacttctgagggcacttccgcccagcgcgacgaggaaccagaggaggaaggagaggaggacctgcgagatggaggcgtgcccttctttgtcaaccgcggaggcctccctgtggacgaggcaacttgggaacgtatgtggaaacacgtcgcaaagatccaccccgacggcgagaaagtcgctcagcgcatacgaggggctacagatctgccaaagatacccattccttccgtgccgacctttcagccctcaacccctgtccccgagagactggaagccgtgcagcgctacatcagggagcttcaatacaaccataccggcacccagtttttcgagattaagaaaagtcgccctctcacaggtctcatggatcttgcgaaggagatgaccaaggaggcgctgcccattaagtgtctggaggccgtcatccttgggatatacctcaccaacagtatgcctacccttgaacgttttcccatctcttttaaaacttacttttcgggtaattacttcaggcatattgttctgggagttaacttcgcaggccgatatggggcactgggcatgtccaggagagaagatctaatgtataaacccccagcctttcggacgctgagcgagctggtgctggattttgaagcagcttatggcagatgctggcacgtactgaaaaaggtcaaactagggcagtctgtgagccacgatccccattcagtggaacagattgagtggaagcacagcgtcttggacgtggagcggctgggtcgagatgactttagaaaggaactcgaaagacatgcacgggatatgaggttgaaaatcggtaagggaaccggccctccatctccaactaaggatcggaagaaggacgtgtcgtcaccacagagggcacagagctctccccatagaaggaactccagatctgaacgaagacccagcggggataagaaaacgtcagaacctaaagccatgcctgacctcaatggctaccagatccgagtttag

SEQ ID NO: 10188 - DNA, 1377 bp, synthetic construct
  misc_feature 1..1377: note = source = /note="Description of Artificial Sequence: Synthetic coding sequence"
  source 1..1377: mol_type = other DNA
atggcttgggcaagtaggttgggcctgctactggcgctccttcttcctgtggttggggctagcacccccggtacggtggtacggcttaacaaagcagccctttcatacgtgagcgaaatcggtaaagcacctctgcagagagctcttcaagtaaccgttccacactttctggactggtccggagaagcattacagccaaccaggataagaatactgaacgtacacgtgccccgattgcaccttaagttcattgccggatttggagtgcggctactcgccgctgctaatttcaccttcaaagtatttcgcgcacctgagcccttagaactgactcttcctgtggaactgctcgctgatacaagagtaacccagtctagtattcgaaccccagtggttagcattagtgcttgcagcctgttcagcggccacgcgaacgaatttgacgggtccaactccacttcccacgctctgctggtactcgtccaaaagcacatcaaagcagtccttagcaacaaactatgtctttcaatcagtaacctcgttcagggggttaacgtgcatctgggtactctaattgggctgaatcctgtgggtcccgagagtcagatcaggtatagtatggtaagcgtcccaaccgtgaccagcgattatattagtctcgaggtcaatgcagtcctttttttgctggggaagcctatcatactacctacggacgccactccgtttgtccttcccagacatgtgggaacagaaggaagcatggctaccgtggggctctctcagcaactgtttgattcggccctgctactcctgcagaaggccggagccctaaacctggacattacgggccagctgcgctccgacgacaatctcctgaacaccagtgccctgggcagactcatccctgaagtggctaggcagttcccagagcctatgccagtggtgctcaaggtccgactaggcgctacacccgtggccatgttgcacaccaacaacgcaacactgagattgcagcccttcgttgaagtgttggctaccgcatccaacagtgccttccagtccctgttctcccttgatgtggtggtaaatctgaggttgcaactgtcagtgtccaaagtgaaactgcaaggtacgactagcgtgttaggcgacgtgcagctaaccgtcgccagtagtaacgtggggttcatcgatactgatcaagttcgtacccttatgggaacagtgtttgaaaaacccctattggaccatctgaatgccctgctcgcaatgggcatcgccctgccaggggtcgtcaaccttcactatgttgccccagagatttttgtgtacgaggggtatgttgttattagcagtggcctgttctatcagtcatag

SEQ ID NO: 10189 - DNA, 1815 bp, synthetic construct
  misc_feature 1..1815: note = source = /note="Description of Artificial Sequence: Synthetic coding sequence"
  source 1..1815: mol_type = other DNA
atgatgcgtgcggtatgggaggctttggccgcactcgcggctgtggcttgtctggtgggcgctgtgcggggaggcccaggcctgagcatgtttgccggacaggcggctcagccggatccatgctcggatgagaatggccatccccgacgttgtattccggatttcgttaacgcggcattcggcaaggatgttcgcgtgagttccacatgcgggcgaccacctgctcgctattgcgtggtttccgaacgtggggaggagagactcaggtcctgccacttatgtaatgcatcggatcctaagaaggcccatccgcctgcctttcttacagacctgaacaatccacacaacttgacctgctggcagtccgaaaattacctacaattcccacacaacgtgaccttgacgttatccctgggaaagaaatttgaggtgacttacgtgtccctccagttttgttcccctcgtccagaatccatggcgatctataaatcaatggactatgggagaacttgggtgccgtttcagttttactccacacagtgtaggaaaatgtacaatagaccccatcgcgcaccaataacaaaacaaaatgagcaagaggctgtgtgcactgactctcacaccgacatgcgcccactgagtggcggtttaattgccttctctaccctggacgggcgtccttccgcccacgacttcgataactcacccgtcctgcaagactgggtgactgccactgacatcagggtggccttcagccggctccacactttcggcgatgaaaatgaagacgattcagagctggctcgggattcctacttctatgccgtgtccgatctgcaggtcggaggaagatgcaaatgtaacggtcatgccgctaggtgcgtgcgcgaccgagacgatagcctggtatgcgattgccggcacaataccgccggaccggagtgcgacaggtgcaaaccgtttcactacgaccggccatggcagcgcgctactgcaagagaggccaacgagtgcgtggcctgcaactgcaatctgcatgctaggcggtgtcgattcaacatggagctgtacaagctctccggacgcaagtcagggggtgtctgcctcaattgccggcataacacagctgggcgtcattgccattattgtaaggagggatattatcgcgacatgggcaagcctatcacacatcgcaaagcttgtaaggcatgcgactgccaccccgtgggggcagcgggaaagacctgtaatcagacgaccggccagtgcccatgcaaggacggagtgactggaattacttgtaaccgttgtgctaaaggctatcagcagagccgaagcccaatcgctccttgcatcaaaataccggtcgctccgccaacaacagccgcaagctcagttgaggagcccgaagattgcgactcctattgcaaagcaagtaaaggtaagctaaagatcaatatgaaaaaatattgcaaaaaggactacgctgtgcagattcatattttaaaggccgacaaggcaggtgattggtggaagtttacagtcaatataatctctgtgtacaagcaaggaacctcgcgtattaggagaggcgatcaaagcttatggatccggtccagggatatcgcgtgcaagtgtccaaagattaagcccctaaagaaatacttgctcttaggtaatgccgaagacagccccgatcaaagtgggattgtcgccgataaaagctccttggtgattcagtggagagacacctgggccaggcgactgcggaagttccagcagagagaaaaaaaaggcaagtgcaaaaaggcctag

SEQ ID NO: 10190 - DNA, 675 bp, synthetic construct
  misc_feature 1..675: note = source = /note="Description of Artificial Sequence: Synthetic coding sequence"
  source 1..675: mol_type = other DNA
atgcctggaagagctccgctgagaacagtgcctggggctctcggagcatggttgctggggggactctgggcctggaccctctgcggtctgtgctcactgggggcagtcggggcaccacgcccatgccaggcccctcagcagtgggagggacggcaggttatgtaccaacaatcctccgggcgtaattctcgggcactactatcgtatgacggattgaaccagagagtccgagtgctggacgaaagaaaagccctcatcccttgtaaaaggctttttgagtacatcctgttatataaagatggtgtgatgttccagatcgaccaggccacgaaacaatgcagcaagatgacactgacccaaccatgggatccgctggacatacctcaaaattccacttttgaggatcagtattctatcgggggtccgcaggaacaaatcactgtgcaggaatggtccgatcggaagagtgcccgaagttacgagacttggatcgggatctataccgtcaaggattgctatcctgtgcaggaaacgttcaccatcaattacagtgtcatcctaagtacccggttcttcgatattcagctgggcattaaagacccaagcgtcttcacacccccttctacttgccagatggcccagctagaaaagatgtccgaagactgcagctggtag

SEQ ID NO: 10191 - DNA, 5105 bp, synthetic construct
  misc_feature 1..5105: note = source = /note="Description of Artificial Sequence: Synthetic coding sequence"
  source 1..5105: mol_type = other DNA
atgggattccttccaaaactattgctattggccagtttttttcctgcgggacaggctagctggggagtgagctccccccaggatgttcaaggcgtaaagggaagttgcctgctcatcccctgtattttctcttttccagctgatgttgaggtgcctgatgggattacagccatttggtactatgactacagcggtcagaggcaagtggtgtcacacagcgccgatcctaaactggttgaggctaggttcagggggcgaaccgaattcatgggcaatcccgaacaccgcgtctgtaacttacttctgaaagacttgcagcctgaggacagcgggtcatacaatttcaggtttgagatttctgaggtaaatagatggagtgatgtcaaaggcactctggttaccgtaacggaggagccgagagtccccacaatcgctagccccgtcgaactgcttgagggaactgaggtggactttaattgcagcaccccctacgtgtgtctgcaggaacaggtgagactccaatggcaaggccaagacccggcaaggtcagtgacattcaactcccagaaattcgaacccaccggcgtcggacacctggagaccctgcatatggcaatgtcatggcaggaccacggtcgtatcctacggtgccagctgagtgtggctaatcaccgggctcaatctgagatacatttacaggtgaagtacgcccctaagggcgtgaagattctgctatcaccctcagggcgaaacatacttccaggcgagttggtgactctcacctgccaggtcaactcgagctacccggctgtaagctctatcaagtggctgaaggatggggttcggttacagacaaaaacaggggtgctgcatttaccccaggctgcttggagcgatgcaggggtctacacttgccaggctgagaacggtgttgggtctctggtgagccctcccatttcgctgcatattttcatggcagaggtgcaggtatctccagccggtcccattctcgaaaaccagactgttacactcgtgtgcaacacaccaaacgaagccccatctgatttgaggtacagctggtacaaaaatcacgtgctgcttgaagatgcacactctcatacacttcgccttcatcttgcaactagggccgataccgggttctacttttgcgaagtccaaaacgtgcacggctccgaacggagcggtcccgtcagtgtggtggtgaatcacccccctttgacccccgtgctgaccgcttttctcgaaacccaggccggtctggtggggatattgcattgttcggtcgtatccgaacctctggcgactctcgtactgagccacggtgggcacatacttgcttccacatcaggcgattccgatcattctcctagatttagcggcacatccgggccaaactctcttaggctggagatcagagacctggaggagacggactcaggcgagtataaatgttctgcaacgaattccctgggcaacgccacgtcaactttggacttccacgcaaatgcagcacgacttttgattagtcccgcagcggaagttgtcgagggacaggcagtcaccctcagctgccgatccggcttgtcgccgacacctgacgcccgtttttcatggtacttaaacggcgctttgctacacgaaggacctgggtcttccctcctgcttcccgcagcatcttcaacggatgctggctcctatcattgccgagccagggacggacattcagccagtggacctagtagccctgcagttctgaccgtgctttatccccctcgccaaccgacattcaccacccgtctcgatctggatgccgctggtgccggagcaggccgaagaggattactattgtgccgggtggacagtgatccacctgctaggctgcagttgttgcacaaggatagagtggtggctacatcacttccctcaggaggaggatgttctacctgcggcggttgcagccccaggatgaaagtgactaaagctcccaatctcctcagggtggaaattcataacccactgctggaggaagaaggcctgtatttatgtgaggccagcaacgccttaggaaatgcgtccacctccgcgacgtttaacggccaggccactgtgcttgccattgcccctagccacacacttcaggaaggaacggaggctaatctgacttgcaatgttagtagagaagccgcagggagcccagcgaatttctcatggtttagaaacggtgtgctttgggctcagggaccattggaaaccgtaactttgctgcccgtcgctaggacagatgctgctctctacgcctgtcggatcctgacagaggccggagctcagttgtccacgccggtgctactgtccgttttgtatcccccagatcgccctaaattgagcgccctcctggacatgggtcaggggcacatggcactatttatttgtacagtggacagccggccactcgccctcctggctttgttccatggcgagcatcttctagccacatcacttggtcctcaggtacccagtcacggcagatttcaggctaaagctgaggccaattccttgaagctggaggtgagagaattaggcctgggcgactcggggtcttaccgatgcgaggctactaatgtgctaggctcttccaatacttctctgttcttccaggtacgcggtgcttgggtccaagtgtcacccagtccagagctgcaagagggccaagccgttgtgttatcttgtcaggttcacactggtgtgccagaggggacatcctaccgatggtatagagatggccagccccttcaggagtcaacctcggcaacgctgcgctttgcagctattaccctcacccaggcaggtgcttaccactgccaggcccaggccccagggtcagctacaacgtccttggctgcgcctatttccttacatgtctcatacgctcccaggcacgtgactctgacaacactgatggatacaggccctgggagactgggactccttctgtgccgagtagactcagaccctcccgctcagctgaggttgctgcacggcgacaggctagtggcatctacactgcagggcgtgggaggtccagaaggctcttctcccagactgcacgtagccgtagcccctaatactttaaggctggagattcacggagctatgctggaagacgagggcgtctacatctgcgaggcttctaacacactgggccaagcttccgcaagtgccgacttcgacgcccaggccgtcaacgtccaggtgtggcctggagcaaccgtcagggagggccagttggtaaatctcacttgcctggtgtggacaacccaccctgcccagttgacttacacttggtaccaagacggtcaacaacggttggacgcgcactctatccctctgccaaacgtgaccgtgagggatgcaacttcctatagatgcggtgtcgggcctcctggacgcgcaccacggctctcccggcctatcaccctggacgttctatacgctccaagaaacctacgcctgacctatttgttggaatcgcatgggggacagctggcactggttctgtgtaccgtcgattcccgaccacctgctcagcttgctctctcccacgcaggccgattgctggccagctccactgccgcttctgtgcctaacactctcaggctagagcttcggggacctcagcccagagatgagggtttttacagctgttccgccaggagcccccttggccaggccaatacctcccttgagctgcggctggaaggagtccgtgtgatcctggcccctgaggcagccgtgcccgaaggggctcccatcaccgtaacatgtgcagatccagctgcccatgctcccactctgtatacatggtatcacaacggacgctggctgcaagaaggccctgccgcttccctctccttcctggtagctacccgcgctcacgccggtgcctattcctgtcaggcacaagacgcacagggaacaagaagctcgaggccagcggctctacaggtgctctacgctcctcaggacgcggtgctgtcaagctttagagacagcagggcccgaagcatggccgtgatacagtgtaccgtagacagcgagccacctgcagagctggccttatcccacgatggaaaggtccttgctaccagttccggcgtgcacagcttagcgagtggcaccggccacgtccaagtcgcaagaaatgcactgagactgcaggtgcaagacgtgcctgccggtgacgacacttacgtttgtacagctcagaatctattggggagcatatctacaattgggaggttgcaagtggaaggcgcacgggtagtcgccgagccagggctggatgtgcctgagggcgcagccctcaacctctcctgtcggttactgggcggtcctggcccagtcgggaacagcactttcgcgtggttctggaacgatcgtcggctgcacgccgaacccgtgccaaccctcgcatttacacatgttgctcgggcacaggccggaatgtatcactgtctcgcagagctaccaactggggctgccgcttccgcgccagtcatgttgcgggtgctgtatcctcctaagacacctaccatgatggtgttcgtggagcccgaggggggacttagggggattctcgactgtagggtggacagcgaaccgttggccagtttgacattgcaccttggctctcgactagtcgcgtcctcccagccgcagggtgcacctgctgaaccacatatccacgtgttagcgagccccaatgcactgcgggtggacattgaagccttgagacctagcgaccagggcgaatatatctgctcagcatcgaacgtattagggtcagcctctacgtccacatacttcggcgtcagggcactccaccggttacaccagttccaacagctgctgtgggtacttgggctactggtcgggctactcctcttgctgctcggtcttggcgcttgctacacctggagctctctgatattgatgcagccccacgtccgacctcagcccgtccctcatccgtgggccgaccaatggtgttgcctgcctagcggaggggagtccggacaaaatctata

SEQ ID NO: 10192 - DNA, 708 bp, synthetic construct
  misc_feature 1..708: note = source = /note="Description of Artificial Sequence: Synthetic coding sequence"
  source 1..708: mol_type = other DNA
atgacagtcctcgccccagcgtggtctcccaccacctatctgctgctgctgcttttattaagctccgggttgagtggtacacaggactgttcttttcaacacagtcctatatcctccgactttgccgtcaaaattagggaattgagcgattacctgctccaggactatccggtgacggtggcctctaacctgcaggacgaggagctttgcggaggcctctggcggcttgtattagcacagcggtggatggaacgccttaagaccgttgccggaagtaaaatgcagggtctgctggagcgggtgaacaccgagatccacttcgtgaccaagtgtgccttccaaccccctccatcctgtctacgttttgtccaaaccaacatatcccgactgttgcaggaaacatccgaacagctggtcgccctgaagccttggattactcgccagaacttctccaggtgtcttgagctccagtgccagccagactcatctaccctgccaccaccttggtcacctcgccctctggaggccactgcacctaccgccccacaaccacctctactcctgctactgttgctccccgtcggattactcctactcgctgccgcttggtgtctgcactggcagcggactcgcaggagaactccaaggccgggtgaacaggtccctcctgtgccctccccccaagaccttttgcttgtggagcattag

SEQ ID NO: 10193 - DNA, 3297 bp, synthetic construct
  misc_feature 1..3297: note = source = /note="Description of Artificial Sequence: Synthetic coding sequence"
  source 1..3297: mol_type = other DNA
atgaccttacaagaactcgttcacaaagccgcatcttgctacatggacagagtggcagtgtgcttcgacgagtgcaataatcaactgcccgtatattacacctacaagacagtggtgaacgcagcttccgagctttccaactttctgcttctccactgtgacttccagggaatcagagaaattggcctttattgtcagccaggtatcgatcttccctcgtggatactcggcattctgcaggttccggctgcatatgttcccattgaacctgatagtccaccatcgctgagcacccatttcatgaaaaagtgtaatctcaaatatatcctcgtggagaaaaagcagatcaacaagttcaaatcttttcatgagacccttctgaactacgacacattcactgttgaacacaacgatttggtgctatttagattacactggaagaacactgaggtgaatctgatgctaaacgacggcaaggagaagtacgaaaaggaaaagatcaaatccatatcaagcgagcatgttaacgaagagaaagcagaggagcacatggacctgagacttaagcactgtcttgcctacgtcctgcataccagcggtacaactggtatacccaagatcgtgcgcgttccgcataagtgtatagtgcctaacattcagcactttcgggttttgttcgacatcacccaggaagatgtactgtttcttgcttcaccgctcacattcgatccgtccgtggtggagatctttttggcactgtcatctggtgcaagtctcctgatcgtgcctacctctgttaaattactgcctagtaaactcgctagtgtgctcttttcacaccaccgtgtgactgtcttgcaagccactcccacccttctcagacggttcggaagtcaattgatcaaatctactgtactctccgcaaccacctcacttcgtgtcctggctctcggaggtgaggcctttccttcgctgactgtgctaaggagctggaggggcgagggaaataagacacagatcttcaacgtgtatggcatcacagaggtttcatcatgggctaccatctacagaattccagaaaaaactttaaattctactctgaagtgcgagctccccgtgcaactggggtttccactgttagggacagtcgtcgaagtaagggacacgaacgggttcactattcaggaaggaagtggacaggtcttcttaggcggtcgaaatcgagtatgctttcttgacgacgaagtgaccgtacccctgggcaccatgagagcaacgggggacttcgttaccgtcaaagatggtgaaatcttttttttagggaggaaagactcacagattaagcgtcatgggaaacggctgaacattgaactggtgcagcaggttgcggaggaattgcagcaagtggaatcttgtgctgtcacctggtataaccaggaaaaattgattctgttcatggtcagcaaggatgcctcagtgaaagagtatatttttaaggaactccagaagtatctcccgtctcatgcagtgccagacgagctggtgctgattgactccttaccattcacctcccatgggaagattgacgtgtctgagctgaataaaatctaccttaactacattaacctcaagagcgagaacaaactgtctgggaaggaagatttatgggaaaaactgcagtatctctggaagagtactcttaacttaccagaggatctcctgcgcgtgccggatgaaagccttttcctgaactctgggggagactcacttaaatccattcgcctcctgtcagaaatcgaaaaattggtaggcaccagcgtacccggactattggaaattatactctcttctagtattctggagatatacaaccacatcctgcagaccgtagtgcccgacgaggacgtgacttttcggaagtcttgtgccaccaagagaaagttgtctgatattaaccaggaagaggcctctgggacgagcctacatcagaaagctattatgacatttacctgccacaacgagattaacgccttcgtggtgctctctagggggtcccagattttgtcactcaattccacgcgcttcttgactaaattgggacattgttcttcagcctgtccctccgatagcgtaagtcagaccaacatccagaatttgaaaggcctaaactctcctgtgcttattgggaaaagtaaggatcctagctgtgttgctaaggtgtcagaggagggtaagcccgctatcggtacacagaagatggagctgcatgtgcggtggaggagtgacactgggaagtgtgttgacgccagccctttggttgttatccctaccttcgacaaaagcagcacaaccgtctatattggtagtcactcccatcgtatgaaggctgtggatttttacagcggtaaggtaaaatgggaacagattctgggggatcggatcgagtctagcgcatgtgttagcaagtgcggcaattttatcgtggtagggtgctataacggattagtttacgtgcttaaatcaaattcaggggagaaatactggatgttcaccacagaagacgccgtcaagtcatctgcgacaatggaccccaccaccggacttatctacatcggtagtcatgatcagcacgcatacgctctcgatatctatcgtaaaaagtgcgtgtggaaatcgaagtgcggcggtactgtgttttcctctccctgtctgaacctgatccctcatcatctgtattttgccactctggggggactcctgcttgccgtgaacccagcaactggcaacgtgatctggaagcattcttgcgggaagcccctgtttagcagccctcagtgttgcagtcagtatatctgtataggctgcgtggacggtaacctactgtgtttcacacacttcggagaacaggtttggcagttctccacatcagggccaattttcagttccccctgtacttctccttcggaacagaagatttttttcggaagtcatgactgtttcatttattgttgtaacatgaaaggccaccttcagtggaagttcgaaaccacttccagagtctacgccaccccttttgcgttccataattataatggatctaatgagatgctgcttgcggcagcttccaccgatgggaaagtgtggatactcgagtctcagtccggtcaacttcaatctgtgtatgaactccctggagaggtgtttagttcccctgtagtacttgagagtatgcttatcatagggtgtagggacaactacgtgtactgtctggacctcctcggtggcaatcagaagtag

SEQ ID NO: 10194 - DNA, 774 bp, synthetic construct
  misc_feature 1..774: note = source = /note="Description of Artificial Sequence: Synthetic coding sequence"
  source 1..774: mol_type = other DNA
atggcgtctaaaatcggttcccgaaggtggatgctgcaactgattatgcagctgggatcagtgctcttgaccagatgtcctttttggggctgtttttcccagcttatgctctatgccgaaagagctgaagccagaagaaaacctgatatacctgtgccatatctgtattttgatatgggcgctgccgtgctgtgtgcctcatttatgtccttcggggtgaaaaggcgttggttcgccctaggggcagcactgcaattggctatttccacgtatgccgcttacattgggggatatgtgcactacggggattggctgaaagtgcggatgtacagtcgcacagtggctatcatagggggattcctggtcctcgcttccggcgctggcgagctgtacagacgtaagccacggtctcggagcctccaaagtactggccaggtatttctgggcatctacctgatctgcgttgcatactcactccaacattcgaaggaagatcggctcgcatacttgaatcatctgccaggcggagagctgatgattcagttattctttgtgctctacggaatcttggccctggcattcttatctgggtactacgtgactctcgcagctcagatcctcgcagtgttgcttcccccagtgatgctcctcattgacggtaatgtcgcttactggcataatacccgcagggtagaattttggaatcagatgaagttgctgggcgagtcagtcgggatcttcggcaccgctgtgattctggcaacagatggatag

SEQ ID NO: 10195 - DNA, 2118 bp, synthetic construct
  misc_feature 1..2118: note = source = /note="Description of Artificial Sequence: Synthetic coding sequence"
  source 1..2118: mol_type = other DNA
atggagaagccacgctccatcgaggagacaccgtctagtgaaccgatggaagaggaggaagatgatgacttagagctgtttgggggatacgactcattccggagctacaattcgtcggttgggagcgagagtagtagctacctggaagagtccagtgaagccgagaatgaagatagagaggctggcgaattgccgacatccccactgcacttactgtctcccggaaccccccgttccctcgatggtagcgggtccgagccagccgtgtgtgagatgtgtgggattgtaggcaccagagaagcgttcttttccaagaccaagcgcttttgttccgtgagctgctcacggtcttacagttcaaattcgaagaaagcctccattctcgcaagactccagggaaagccacccaccaagaaagctaaggtgctgcacaaggctgcttggagtgcaaagattggcgcatttctacactctcagggcaccgggcaactcgcagatggcacgcccacaggccaggatgctctcgttctgggcttcgactggggcaagttcctaaaggatcatagttataaagcagccccagtttcatgtttcaagcatgtgcccctttatgatcagtgggaagacgtgatgaaaggcatgaaggttgaagtgctcaatagtgatgctgttctacccagtcgtgtgtactggattgcttcagtaattcagacagccggttacagggtgctgctgcggtatgagggatttgaaaacgacgcttcccacgatttttggtgtaatctagggacggttgacgtccatcccatcggctggtgcgccatcaactcaaaaatcctcgtgcctccacggaccattcacgccaagtttaccgactggaaaggctacctgatgaagagactggtggggtctagaactctgcccgttgactttcacatcaagatggttgagtctatgaagtacccctttaggcaaggcatgcgcctggaagtggtggataaatcacaggtgtcacgcacgagaatggccgtcgtcgacacggtgatagggggtcggctgcgtctgctctatgaggacggggattccgatgacgacttctggtgccacatgtggtccccattaatccaccctgttggatggtcaagacgggtcggccacggaattaaaatgagcgagcggcgttcggatatggctcatcaccccacttttagaaagatatactgtgatgccgtaccttacctcttcaagaaggtccgagccgtgtatactgagggcggatggtttgaagagggcatgaagttggaggccatcgacccattgaatctgggcaacatctgcgttgctactgtctgtaaggttctcctggatggatacctgatgatatgtgtggacgggggacccagcacagatggcctcgattggttctgttatcatgcctcaagtcatgccatctttcccgcaaccttttgtcaaaagaatgacatagagctgacccctccaaaaggctacgaggctcagacttttaattgggagaattacctggaaaaaaccaaatctaaagccgcaccttcccggctgtttaacatggattgtcctaatcacggattcaaagtcggcatgaagctggaagctgtggatctgatggagcctagactgatctgcgttgccaccgtgaagagggtcgtgcaccgtctcctgtcaatccactttgatggatgggatagcgaatacgaccaatgggttgactgcgagtcccctgacatctaccctgtgggctggtgcgaactgaccggctaccagctgcagcctcctgtcgctgcagaacctgccacgcccctgaaggccaaggaggccaccaagaagaaaaagaaacagttcggcaaaaagagaaagaggatcccacccaccaagactcggccactcaggcaagggagtaagaagccccttttagaggatgacccccaaggtgccagaaaaatcagcagtgaacctgtgcctggcgaaataatcgccgtgcgggtgaaggaagagcacctggacgtggcctcaccggataaagctagctctccagaactgcccgtcagcgtagagaacattaaacaggaaacagatgattag

SEQ ID NO: 10196 - DNA, 2103 bp, synthetic construct
  misc_feature 1..2103: note = source = /note="Description of Artificial Sequence: Synthetic coding sequence"
  source 1..2103: mol_type = other DNA
atgtcccgccgtacacggtgcgaggatctcgacgagctacactatcaggacaccgactctgacgtgcctgaacagagggacagcaagtgtaaagtcaaatggacccatgaagaagatgagcaactgagagcgctggtccgacagttcggccagcaagactggaagtttttggcttctcattttcccaacagaaccgaccaacagtgtcagtatcggtggctgagagtgctgaacccagacctggtgaaaggaccctggacaaaagaggaagatcagaaagtgattgagttggtgaagaagtacggcaccaaacagtggactttgattgctaagcacctgaagggacgacttgggaaacaatgcagggagagatggcataaccacctaaatccagaagtgaagaaatcatgctggacagaagaagaagacaggataatctgcgaggcacataaggtactgggtaatcgctgggctgaaatcgcaaagatgctgcccggacgaaccgacaatgccgtgaagaatcattggaacagcactatcaaaaggaaggtggatacgggcggattccttagcgagtccaaagactgcaagccccctgtctatttgctgctcgaactagaagacaaggacggactgcagtccgcacaacccacagagggccagggatctttactcaccaactggcctagcgtgcctccaacaattaaggaagaagagaactccgaagaggagttggcggcagccactacctctaaagaacaggagcctatcggtaccgatcttgatgctgtgagaacccctgagccccttgaggagttcccgaaacgggaagatcaagagggtagtcctcctgaaacatccttgccgtacaagtgggtagtggaggcagctaatcttctgattccagctgtagggtctagcctgtccgaagcgctggacttgattgagagcgatcctgatgcatggtgcgacttgagcaagtttgacctacccgaggagccttcagctgaagactctattaacaattctctggtacagctgcaggctagccaccagcaacaggtgttacccccacgccagccatctgctctggtaccatctgttaccgaataccggctggatgggcacaccatttccgatctcagtcggagtagtagaggagagctgatacccatcagccccagcaccgaagtgggcggatctggcatcggcaccccgcctagtgtcctaaagcgacagcgcaagcggagggtggccctgtctcccgttacggagaattctacaagtctcagcttcctcgacagttgcaactctttgacacccaagtccacaccagtgaaaacactgccattctcccctagccaatttctgaatttctggaataagcaggacactttggagctagagtcccccagccttacctccacacctgtctgttcacagaaagtggtggtcaccacacctctccatagagacaaaacaccactgcatcagaagcacgccgctttcgtgacacctgatcagaagtacagcatggacaacacaccccatactccaaccccatttaagaacgccttagaaaaatacgggcctttgaagcctttgccacagaccccccatctggaggaagacttaaaagaagtgcttcgtagtgaggctggtatcgaacttattattgaagacgacatacgccctgagaaacaaaagagaaagcctggcctcaggcgctcaccaattaagaaggttagaaagagcctggccctggacatcgtcgacgaggatgtcaagctgatgatgtcaacactgcctaaatctctgtctctgccaacaacagctcctagcaattccagctcgctcacactatcaggcatcaaggaggataattcacttctgaaccaaggtttcctgcaggctaagcccgagaaagcagcggtcgcccaaaagcctcgctcacacttcacaacccctgcccctatgagcagtgcgtggaagacagttgcctgcgggggtacacgcgaccaacttttcatgcaggagaaggcacggcagctcctaggcaggcttaagccatcccacactagtcgtactcttatcctgtcatag

SEQ ID NO: 10197 - DNA, 528 bp, synthetic construct
  misc_feature 1..528: note = source = /note="Description of Artificial Sequence: Synthetic coding sequence"
  source 1..528: mol_type = other DNA
atgttaagaacagaggtgccgcgtctccccaggagtaccacagccatcgtttggtcgtgtcacctcatggcgacagcgtcggcaatggctgggccaagctccgagacaacctcagaagagcagctgataacgcaagaacccaaagaggctaattcaaccacatcacagaagcaaagtaagcagcgtaagagaggccgacatgggccacggcgatgtcactcaaactgccgcggtgattcgtttgctacatatttcagacgagttctgaagcaggtccaccaaggcctcagtctctccagagaagccgtgtctgtgatggactctctggttcacgacattctggatcgcatcgccaccgaagcgggacgattagctagatccaccaagaggcagacaattaccgcgtgggagacccgtatggctgtgcggctgttgctgcccggacagatgggcaagcttgccgagtccgaggggaccaaggccgtcctcagaacaagcctatatgctattcaacagcagcggaaatag

SEQ ID NO: 10198 - DNA, 624 bp, synthetic construct
  misc_feature 1..624: note = source = /note="Description of Artificial Sequence: Synthetic coding sequence"
  source 1..624: mol_type = other DNA
atggctccgtttgaacctctcgcatcaggtattctactgctactgtggctcatagcaccgtcacgcgcatgcacgtgtgtgccaccccacccacagacagcattctgcaacagcgacttggtgatcagggcaaaattcgttggcacacctgaagttaatcagaccacgctgtaccagcgatacgagattaagatgaccaaaatgtacaaaggatttcaggccctcggcgatgccgcagacatcagattcgtctacacacccgcaatggagtctgtgtgcggttactttcacagatctcataatcgaagcgaagagtttttgattgccggtaagctgcaggacggcctcctgcacataaccacatgtagctttgtggccccatggaacagcctgagcctggcacagaggcgaggctttacaaaaacttatacagtggggtgcgaggagtgcaccgtctttccatgcctgtctataccctgcaagctacaatcaggcacacactgcttatggacggatcagttgttgcagggttctgagaaggggtttcagtctcgccaccttgcttgtctacccagagagccaggtctgtgtacatggcagtctcttcggagccaaatcgcctag

SEQ ID NO: 10199 - DNA, 1686 bp, synthetic construct
  misc_feature 1..1686: note = source = /note="Description of Artificial Sequence: Synthetic coding sequence"
  source 1..1686: mol_type = other DNA
atggcagatcacaaccccgactccgacagcactccgaggacgcttctgcgcagggtccttgacaccgcagacccacgtactccaagacgccctagatctgcaagggcaggggctcggcgtgcactgttggagacagcctcccctcgtaagctgtcaggtcagacacgcactatcgcacgtggcagatctcatggagctagatcagtgggacgctcagctcacatacaggcctctgggcacctggaggaacagactcccaggaccctgttgaagaacatactgctcacagcgcctgagagctcaattcttatgccggagagtgtagtaaagcctgtaccagctccgcaggcggtgcaaccgagccgacaagaatcaagctgtggctcgcttgagttgcaactgccagaactggagcctccaaccactttagcccctggactacttgcacctggtaggagaaagcagcgacttcgcctgtctgtcttccagcagggcgtggatcagggcctgagcctctcccaggaaccccagggtaacgcagacgcctctagcttgactcggagtctgaatttgacattcgccacaccgctgcagccccagtctgttcagagacctgggctggctagaagaccacccgctcggagagcggtagacgtgggtgcttttctgcgcgacctgcgcgatacgagcctggccccacccaatatcgttctggaagatacacagcccttttctcagcctatggtgggaagtcctaacgtctatcattccctcccttgcacccctcataccggcgctgaggatgccgagcaagcagccggtagaaagacgcaatcgtccggccctggccttcagaaaaacagtcccggtaagcccgctcagttccttgccggagaggctgaagaggttaacgcctttgccttaggctttctgagcacttcctccggtgtctccggcgaggatgaagtggaaccactccacgacggggtcgaggaagcggagaaaaagatggaagaagagggagtgtcagtgtctgagatggaagctacaggggctcagggacctagccgcgttgaagaagctgagggacacaccgaggttaccgaggccgaaggaagtcagggaacagcggaagcagatggacccggtgctagtagcggggacgaggacgcctccgggagggccgctagtccggagagcgccagctctacccctgaaagtctgcaggctaggcgacaccaccagttcctggaaccggctccggcaccaggagccgctgtgctctcatctgagccagctgagcccctcctcgtgagacatcctcctcggccaagaacgaccggccctcgcccaaggcaagatccacataaggctggcctctcccactacgtgaagctctttagtttctacgccaagatgcccatggagcggaaggcactggaaatggttgagaagtgcctggacaagtactttcagcatctctgtgatgaccttgaggtcttcgcagcgcatgcaggaaggaaaacagtgaagcccgaagaccttgaactgctgatgaggaggcagggcttggtgactgaccaggtttcgctccacgtgttagtggagaggcacctccctttggaataccgtcagctcttgattccgtgtgcctattccggcaattctgtcttccctgcacaatag

SEQ ID NO: 10200 - DNA, 1134 bp, synthetic construct
  misc_feature 1..1134: note = source = /note="Description of Artificial Sequence: Synthetic coding sequence"
  source 1..1134: mol_type = other DNA
atgacagacgatgagtcagagtcagttttatcagattcacatgagggctcagagctggagctaccggtaatccagctttgtggactggtcgaggagctgtcatacgtcaactctgcactcaagaccgaaactgaaatgtttgaaaaatactacgccaagcttgagccacgggatcaacggcctcccaggctgtccgaaataaaaatctcagcggctgactatgcacagtttagggggaggcggagaagcaaatctcgcacgggtatggatcggggagtcggtctcactgccgaccagaagctggagctcgtgcagaaggaggtcgcagatatgaaggatgacttgcgccacacaagagcaaatgccgagagggatctgcagcaccacgaggccatcattgaggaggcggagatccggtggagtgaagtttcaagagaggtccacgaatttgaaaaggatattctgaaagcgattagcaagaagaagggcagcattttagccacgcagaaggtcatgaagtacattgaggacatgaatcgcaggcgggataacatgaaggagaagctccgtctcaaaaacgtgtcccttaaagttcagaggaagaagatgcttttgcagttgcgacaaaaggaggaggtgagcgaagccctgcatgacgtggacttccagcagcttaagatcgagaacgcacagtttctcgagacgattgaggcacgcaaccaggagctgacgcagctgaagttgagctccgggaacactctgcaggtgctaaatgcctataaaagtaaactgcacaaagccatggaaatctacctgaatctggacaaggagatcctcctccggaaagagttgctagagaagatcgagaaagaaaccctccaggtggaggaggaccgcgcaaaggctgaagcggtaaacaagcggttacgcaaacagcttgccgaatttcgcgctccccaggtgatgacctacgtacgggaaaagattttgaatgctgacctggagaagagcatcaggatgtgggagaggaaagtggagatcgccgaaatgtctcttaaaggccaccgaaaagcctggaatagaatgaaaatcactaacgaacagctgcaggctgactaccttgctggaaaatag

SEQ ID NO: 10201 - DNA, 1548 bp, synthetic construct
  misc_feature 1..1548: note = source = /note="Description of Artificial Sequence: Synthetic coding sequence"
  source 1..1548: mol_type = other DNA
atggaggcacgggaacccggtaggccaacgcctacctaccacttagttcctaacacctcgcaatcgcaggtagaggaggatgtgtcatcccctccacagcggagcagcgaaaccatgcagcttaagaaggagataagccttctaaacggcgtttctcttgtggtggggaatatgattggcagcggtattttcgtctctcccaaaggagtcctggtgcatactgcgtcctacgggatgtcattaatagtctgggcgattggtggactatttagcgtagttggcgcactgtgctacgctgagcttggaactaccattaccaaaagcggtgccagctatgcttacatcctagaggcttttgggggttttatcgctttcattcgactctgggtctctctccttgtggttgagcccacgggtcaggcaatcatcgctattacctttgcaaattacataatccaaccctcctttccatcctgtgatcctccttacctggcatgccgcctgttggctgccgcttgtatctgtctgctgacatttgtgaattgcgcctatgtcaagtggggcaccagagtgcaggacactttcacgtatgccaaggttgtcgcccttattgccatcatagttatgggcctggtgaagctgtgccaggggcactcggagcacttccaagatgccttcgaagggtcctcttgggacatgggcaacttgtcccttgcactctattctgcgctcttcagctatagtggctgggatactctgaattttgtcacagaagagatcaagaatcccgaacgaaacctaccactggctataggaatctctatgccgatcgtgaccctgatttacatcctgaccaatgtcgcttattacacggtactgaatattagcgacgtacttagctctgacgctgtggccgtaacattcgcagaccaaacattcggtatgtttagttggaccattcccatagcagtcgccctgtcttgtttcggtggtctgaacgccagtattttcgcatccagcagactgttcttcgtcggcagccgtgaggggcacctgccagatctgctctctatgattcacatcgaaagattcactccaatccccgcacttctcttcaactgcactatggccctgatttatctcattgtcgaggacgtgtttcagcttattaactatttttcgttctcatactggttttttgttggactttctgtggttggacagctctatctcaggtggaaggaaccgaaacgacctcgacccctgaagttaagtgtgtttttcccgatcgtcttctgcatttgttccgtgttcctggtgatcgtgcccctttttactgatacaattaacagcctgatcgggataggcatcgccttgagtggagtacctttttactttatgggggtgtacctgcctgagtcccggaggcccttgttcatccgaaatgttctggccgcaataacccggggaacacaacagctttgcttttgtgtcctgacagagttagacgttgcggaggaaaagaaggatgagcgcaaaactgactag

SEQ ID NO: 10202 - DNA, 1623 bp, synthetic construct
  misc_feature 1..1623: note = source = /note="Description of Artificial Sequence: Synthetic coding sequence"
  source 1..1623: mol_type = other DNA
atgaacggggaggccatctgctctgccctccccactataccatatcataaactcgcagatttgcgctatttgtccaggggtgcctcgggaactgtatcttctgcccgtcatgcagactggcgtgtccaggttgcagtaaagcatctgcacattcacacacctctgctcgattctgagcgcaaggatgtgctgcgggaggccgagattctgcacaaagcaaggttctcatatatcctgcccatcttgggtatatgtaatgaacctgagttcttaggcatcgttactgaatacatgcctaacggctcgctgaacgagctccttcaccgaaaaaccgaatatcctgacgtggcttggccactgaggttccgcatcctccacgaaattgccttaggcgtgaactacctgcataatatgaccccccctcttttgcaccacgacctgaagacacagaatatactgctggataatgagtttcacgtgaagatcgctgatttcggattatcgaagtggaggatgatgtctcttagccagtctagatcatcgaagagcgccccagagggtggtacgatcatctacatgcctccagagaactatgagcccggacaaaagagcagagcctccatcaagcatgacatttatagctacgccgtaataacctgggaggtgctgtccaggaagcaaccgtttgaggacgttactaatcctctgcagattatgtatagtgtatctcaaggacaccggcctgtaatcaacgaggagtcactgccttacgacatccctcaccgggctaggatgatcagccttatagagagcggttgggcacagaatccggatgaacgtcccagcttcctgaaatgcctcattgaactggaacctgttctgagaactttcgaggagattacctttctcgaagctgtaattcagttaaagaagactaagctgcagtccgtttcttcagcgatccacctgtgcgacaagaaaaagatggagctgtcacttaatatacccgtgaaccacgggccacaggaggagtcatgcggatcttcccagctgcatgaaaactcggggagccccgagaccagtcgctccctccctgcccctcaggacaatgactttctgtcaaggaaagcacaggattgttattttatgaaactgcatcactgcccaggtaaccactcatgggatagcacaatttcaggttcccagcgcgcagccttctgcgatcataaaactacaccctgttcctccgcaatcatcaacccactgagcactgccggtaacagcgaacgcttgcagcccggtatcgcccagcagtggatacagagcaaaagggaggacattgtaaatcagatgactgaggcttgcctcaatcaaagcctagacgctctgctgtctcgggatctcataatgaaggaggactacgagctcgtgtccaccaagccaaccaggacaagtaaggtgcggcaattattagatacaaccgacatacaaggcgaggagtttgcaaaggtcatagtccagaagctaaaagacaacaaacaaatgggtctgcagccatacccggaaattctggtcgtgtctcgaagtcctagcctcaacctgttacagaacaaatctatgtag

SEQ ID NO: 10203 - DNA, 2079 bp, synthetic construct
  misc_feature 1..2079: note = source = /note="Description of Artificial Sequence: Synthetic coding sequence"
  source 1..2079: mol_type = other DNA
atgcgggcttgcgccggaagcacgagggaagccggtagcggagctcaggatttgtcaacgttactgtgcctcgaagaatcaatggaagagcaagacgaaaaacctccagagccgccaaaggcatgtgctcaggatagctttctccctcaagagatcatcatcaaagtggagggcgaagataccggctctctcaccatcccgagccaggagggcgtcaatttcaagatcgtgacggtcgattttacacgagaggagcagggcacgtggaatcctgcccaaaggactctcgatagagacgtgatcctcgagaaccatcgagatctcgtgagttgggacttggctaccgccgtggggaagaaagattccacttctaaacagcgcatctttgacgaggagccggcaaatggcgtcaagatcgagcgcttcactcgcgatgatccgtggctttcaagctgcgaagaggtggatgactgtaaggaccagctggagaaacagcaggaaaaacaagaaatcctgttgcaggaggtggcatttacgcagagaaaggctgtcatccatgagcgcgtctgtaaaagcgatgaaaccggggagaaatctgggctcaacagctcactctttagctcacccgttattccgatacgtaaccatttccataaacatgttagccacgccaagaagtggcatctcaacgccgctgttaacagccaccagaaaattaacgagaacgagacgctctacgagaataacgagtgcgggaagccaccgcagagtatccatctcatccagttcacccgaacccaaaccaaggacaagtgttacggcttcagtgacagaatccagagcttctgccatggtacccccctgcatatacacgaaaaaatccacggtggtggcaagacctttgatttcaaagagtgtggccaggtgctgaacccaaagataagccacaatgaacagcagagaatccccttcgaggagtcacagtataaatgttcagaaacttctcatagttcctcactgacacagaatatgcgcaataattccgaagaaaagcccttcgaatgcaatcagtgtggcaagtcttttagctggtccagccatctcgtggctcaccaacgaacgcatactggcgagaaaccatatgagtgctccgaatgcggtaagtctttcagccggagctcgcacctggtatctcaccagagaacccatacgggagaaaaaccgtaccgctgcaatcaatgtggcaaatctttctcccagagttatgtcttagtggtccaccagcgcacacacacaggtgaaaaaccttacgaatgcaaccagtgcggtaagagctttcggcaatcctacaaactcatagcccaccaaaggactcacacaggggaaaaaccttacgagtgcaatcaatgcgggaagagtttcatacagagctataaacttattgcacaccagagaattcacacaggagagaagccctatgaatgtaaccaatgtggcaaatccttctctcaaagctacaagctagtggcccaccagcgaacccacaccggcgaaaagccatttgaatgcaatcagtgtggcaaatctttctcctggagctcacagttagtggctcatcagcgcacccatacaggagagaaaccatacgagtgttctgaatgcgggaagtcattcaacagaagctcccacctcgtaatgcaccagcggatacacacgggcgagaagccgtacgagtgtaaccagtgtgggaagagcttctcgcagtcatatgtgcttgtggtgcaccagagaacacacactggggagaaaccctatgaatgttctcagtgcggtaaatccttcaggcaatcaagctgcttgacgcagcaccagagaacccacaccggtgagaagcctttcgaatgcaaccaatgcggtaagactttttctctctccgcacgtctcattgtgcaccaaaggacccacaccggggagaagcccttcacatgcatacaatgcgggaaagcctttatcaatagctacaagcttataaggcaccaggctacacatactgaggaaaagctttatgaatgcaactag

SEQ ID NO: 10204 - DNA, 942 bp, synthetic construct
  misc_feature 1..942: note = source = /note="Description of Artificial Sequence: Synthetic coding sequence"
  source 1..942: mol_type = other DNA
atggacaataaaaaaaggctagcctacgccatcatccaattcttgcacgatcagctcaggcatggaggtctctcctccgatgcccaagagagcctcgaagtggccatccagtgtctcgagactgccttcggagtcacggttgaagatagcgaccttgcattgcctcagacactgccagaaattttcgaagcagctgccacaggcaaggaaatgccacaagacttgaggagtcctgcacggacacccccatcggaggaagacagcgcagaagccgaaaggttgaaaaccgagggcaacgagcagatgaaagtggaaaattttgaagctgctgtgcacttttatggcaaggcaatcgaattaaaccctgcaaatgcggtgtacttttgcaaccgggctgcagcatactcaaaactgggcaattatgctggcgctgtacaggattgcgagcgcgctatttgtatcgatccagcctattcaaaggcctatggccgaatgggcttagctctctccagtctgaacaagcacgtggaagcggtggcctactacaagaaggcccttgagttggatccagataacgagacatataagagcaacctgaaaatcgccgaactcaaattaagggaggcgccaagtccaaccggcggagtgggctctttcgacattgcaggcttattgaataaccctggattcatgtccatggcctccaatttaatgaataatcctcagattcagcagcttatgtccggtatgatatctggcggaaacaatccactaggcaccccaggcacctctcccagtcagaatgatctggcaagcctgatacaagccggacagcagttcgcccagcagatgcaacagcagaacccagagttgatcgaacagctgcgcagccaaattcgcagcagaacaccatccgcctccaatgatgaccaacaagagtag

SEQ ID NO: 10205 - DNA, 1584 bp, synthetic construct
  misc_feature 1..1584: note = source = /note="Description of Artificial Sequence: Synthetic coding sequence"
  source 1..1584: mol_type = other DNA
atgtaccagcctgaagacgataataactccgacgtgacaagcgacgatgatatgaccaggaaccgtcgtgaaagttctccccctcatagcgtccattcctttagcggggaccgtgactgggaccggagaggtaggtcaagggatatggagcctagagaccgctggagccatacccggaatccacgttcacgcatgccaccaagggacctctctttacctgttgttgccaagaccagcttcgagatggatagagaagacgatagagattccagagcttatgagtcacgctcccaggatgccgagagctaccagaatgtggttgaccttgcggaagatagaaagccccataacacaatacaggacaacatggagaattaccgcaaactgctatctttgggctttctcgcacaggatagcgttcccgctgagaagaggaataccgagatgttagacaacctacccagcgcaggatcccagtttcctgactttaaacatttaggcacgttcctcgtcttcgaagagctggtcacctttgaagacgtactggtggactttagtcccgaggagctttctagcttaagtgctgcacagcggaacctgtacagagaggttatgctggaaaactaccgcaacctagtgtctctggggcatcagttctctaaacctgatattatctcaagactcgaagaggaggagtcttacgctatggagactgattcacgtcataccgtgatctgccagggcgagtctcacgatgatcctctggagccccaccaggggaaccaggagaaattgcttaccccgattaccatgaacgatcctaaaactctgacccctgagagatcatacggttccgatgagttcgaacgtagctccaacctcagtaaacagtccaaggaccccctggggaaggatcctcaagagggcacggctccgggtatctgcacctccccgcagagtgccagccaggagaataaacataatcggtgcgaattttgtaagcggacattctctacgcaggtggccttgagacggcacgagcgtatccacaccggtaaaaaaccctatgagtgtaagcagtgcgccgaagccttttacttaatgccccacctcaatcgacatcagaagactcactccggcaggaagaccagcggatgcaacgaaggcaggaaaccttctgtccagtgtgcaaacctctgtgaacgggtgaggattcattcacaggaggactactttgagtgcttccaatgtggcaaggccttcctccagaacgtgcatctgcttcaacacctgaaagcccacgaagccgctcgggtgctcccccctggtctctctcactctaagacctaccttatccggtatcagcggaaacacgactacgttggtgaaagggcctgccagtgttgcgactgtggccgagtttttagtagaaattcctacttgattcagcactaccgtacccacactcaagagagaccttatcagtgccagctgtgcggaaagtgctttgggagacccagctacctgacacagcactaccagctgcattcacaggagaagacagttgaatgcgatcactgttag

SEQ ID NO: 10206 - DNA, 444 bp, synthetic construct
  misc_feature 1..444: note = source = /note="Description of Artificial Sequence: Synthetic coding sequence"
  source 1..444: mol_type = other DNA
atggccctgaagcgtatccagaaggagcttaccgaccttcaacgagatccccctgcacagtgcagcgcaggacctgttggggacgacttgttccactggcaagctacaattatgggacccaatgactccccctaccaggggggagtgtttttcttgactattcactttcccacagactatccttttaagcctcccaaggttgcgtttaccaccaaaatttaccacccaaatattaactccaacggctctatctgcctcgatatcttgagatctcagtggtcacctgcattgaccgtgtcaaaagtgctgttgtctatctgtagtctcttatgtgaccccaatcccgacgatccactcgtgcccgagattgctcacacctataaggctgaccgggagaaatacaatcggctggctcgcgaatggacgcaaaagtatgctatgtag

SEQ ID NO: 10207 - DNA, 3072 bp, synthetic construct
  misc_feature 1..3072: note = source = /note="Description of Artificial Sequence: Synthetic coding sequence"
  source 1..3072: mol_type = other DNA
atgttccacctgcgcacttgtgccgcaaagctgcgcccattgacagcctcccagaccgttaagacgttctcccaaaaccggccagcggctgccaggacatttcaacagatccgttgttacagtgctcctgtagccgctgaaccgttcctatccggaacttcatccaattacgtggaggaaatgtactgtgcctggcttgagaacccaaagtccgtgcacaagagctgggatattttctttcgcaataccaacgccggagcgccacccggaactgcttaccagagcccgctgccactgagtcgaggatctcttgccgcagtagcccacgcccagagcttagttgaggcccaacctaacgtggacaagcttgtagaagatcacctcgccgtacagtcattgatccgagcctaccagattcgaggccatcacgtggcccagcttgatccactcggcatactggacgccgacctcgattcttccgttcccgcagatatcatctcgtcaactgataaactggggttctatggactggacgaaagtgatctcgataaagtttttcatctgccgaccacaacattcataggaggccaagaatcagcccttcctctcagagagattataaggagactggagatggcctattgccaacacattggggtagagttcatgtttattaacgaccttgaacaatgccaatggattcgtcagaagttcgagacacccggaatcatgcagttcacaaacgaggagaagcgtacgttattagctagactcgtgcgcagtacccgatttgaggagtttttgcagcgcaaatggtcttctgaaaagagattcggactggaggggtgcgaggtcctgatccctgcactcaaaacaataatagacaaatcatcagaaaatggcgtcgactacgtcattatgggtatgccgcatcgcggaagactaaacgtgctcgcaaacgtgatcaggaaggagctggagcagatattttgtcagttcgattcaaaattggaggccgcagatgagggatctggcgatgtaaagtaccacttagggatgtaccaccggaggattaacagagtcaccgataggaatattacactcagtttagtcgccaacccttctcacctcgaggcggcagatcctgtagtcatggggaagacaaaagcggaacagttttactgcggagacaccgagggaaagaaggtgatgtccatcttgctgcatggcgacgcagccttcgctggccaggggattgtctacgagactttccacctgtcagacttgccctcatatacaacacacggcacagtgcacgtggttgtgaacaatcaaattggatttacaacagaccctcgaatggcacggtcatcaccttacccgaccgacgtagcaagagttgtcaacgctcctatattccatgttaatagcgacgacccggaggccgtcatgtatgtctgcaaagtggcagccgagtggcgctctacctttcacaaagacgtcgtggtagacctggtctgttatcgacgcaatgggcacaatgagatggatgagccaatgttcacccagcccttgatgtataaacagattcgcaagcagaaacccgtcttgcaaaagtacgcagaactgctggtcagtcagggggtcgttaatcagcctgagtatgaagaagaaatttccaaatatgataagatatgcgaagaagcatttgctagaagcaaagatgaaaaaatcctgcacatcaaacactggctagactctccttggcccggtttctttacactggacgggcaaccccgatccatgagctgcccctccacagggctgaccgaggatatcctgacccatatcggtaatgtcgcatcaagcgtgccggtggagaatttcaccatccacggcggactgtcacgaatactgaaaactagaggagagatggtcaaaaaccggactgtcgattgggctttagccgagtatatggccttcggttctctgctgaaagaggggatccatatcaggttgagcggccaagatgtcgagcggggtacattttcccacaggcaccacgtgttgcacgatcaaaacgtggataaacgcacgtgcattcccatgaaccacctctggcctaaccaggccccttatactgtttgcaattccagcctgtctgagtatggtgtgctagggttcgagcttggatttgccatggcctcccctaatgctctagtcctctgggaggcgcagtttggagattttcacaatactgcccagtgtatcattgaccagttcatctgcccaggccaggctaagtgggtcaggcagaacggcattgtgctccttctaccccacggcatggaaggaatgggacccgaacacagtagcgccaggccagaacggtttcttcaaatgtgcaatgatgatcccgacgtcctgcccgacctcaaggaggcaaacttcgatataaatcaactgtatgattgtaactgggtggtagttaattgtagcaccccaggtaacttttttcatgtgctgcggagacagatcttgctgccatttcgcaaacccttaattattttcactccaaaaagcctgctcaggcacccagaggctagatcctcattcgatgaaatgcttcccggaactcattttcagcgcgtgatcccagaggatgggccagcagcccagaatcctgaaaatgtgaaacggcttctcttttgcactggaaaagtgtattatgacctaactagggagagaaaggccagagacatggtggggcaagtcgcaatcacgaggattgagcagttgagccccttcccattcgaccttctgcttaaagaggtgcagaagtaccccaatgcagaattggcctggtgccaggaagagcataagaaccaagggtactatgactatgtgaagcccagactgcgaactacaatctcacgggctaaacctgtgtggtatgcaggtagggaccccgctgccgcacctgctacaggcaataaaaagactcacctcacagaattacagcgactgctagatacagctttcgaccttgatgtgtttaagaacttctcttag

SEQ ID NO: 10208 - DNA, 2667 bp, synthetic construct
  misc_feature 1..2667: note = source = /note="Description of Artificial Sequence: Synthetic coding sequence"
  source 1..2667: mol_type = other DNA
atggagggagatgattgcgagttccgctacggggacggtaccaacgaagcccaggacaacgactttcccacagtggagaggagccggctccaggaaatgctgtcgctgctaggcctggaaacataccaggttcagaaactgtccctgcaggatagtcttcagattagctttgattctatgaagaattgggcgccacaggttccaaaagatcttccatggaatttcctacgcaagctgcaagctctgaacgccgacgcccgtaacaccactatggtcctggacgtgctgcccgatgccagaccagttgagaaggagtctcagatggaagaggaaataatctattgggatcccgcagatgaccttgcagcagacatttatagttttagcgaactcccaacccccgatacccctgtcaaccctctggacctgctctgtgcactgttgctttcgtctgatagtttccttcaacaggagattgcgctgaagatggccctttgtcagttcgccctgcctctggtgctgcctgatagcgaaaatcactaccatacttttttactttgggcaatgagagggattgtccgcacatggtggtcccagcccccacgcggtatgggatcctttcgggaggactctgtagttctgagtcgagccccagcctttgcctttgtgcggatggacgtaagctccaactcgaagtctcagttattgaacgccgtactcagccccggtcaccggcagtgggactgcttttggcatcgcgatctgaatttaggtactaatgctcgagagatctccgacgggttggtggaaatttcatggtttttcccctcaggtagggaagacctggatatcttcccagagcctgttgcgtttttaaacctacgcggtgatatcggctcgcactggctccagtttaaactcctcaccgagattagctccgctgtctttatcctgacagacaacatctctaagaaagaatacaagcttttatacagcatgaaagaaagcactacaaagtactacttcattctcagtccataccgcggaaagcgtaacaccaacttgaggtttctgaacaagctcattcccgttctgaagattgaccacagccacgtactggttaaggtctcctcaacagactccgattccttcgttaagaggataagggcaattgtgggaaacgtgctgagggcaccctgtagacgagtcagtgtggaagatatggcccatgctgctaggaagctggggctgaaagttgacgaagattgcgaggaatgtcaaaaagcaaaagatagaatggagcgcatcactcgcaaaatcaaggacagtgacgcctacagaagggatgagctacgcctgcaaggggatccttggagaaaggccgctcaagtggaaaaagaattttgtcagctgcagtgggcagtcgatcctcctgagaagcacagggctgagttgagacgccgactgctggagctgagaatgcagcaaaacgggcacgatccatcaagcggggtacaggagtttatcagcggaatttcatcaccctcactgtcagaaaaacaatactttctgcgatggatggagtggggacttgctagggttgcacagcctcggctacgccagcccccagaaaccctcctcacactgagacccaaacatggtggcacaaccgacgtcggtgagcccttatggcctgaacctctgggggtggagcatttcctccgggagatgggtcaattttatgaggctgaaagttgcctcgtggaggccggacggctccctgccggacagcgtcgattcgcacacttcccgggtctggcgagtgagttattgctaacaggattaccacttgagctgattgatggctcaactctgtcaatgcctgttcgctgggtcacgggcctcctcaaggagctccatgtgcggctggagcgacgctcacggttggtggtgctgtccaccgttggggtgcccggaaccggtaaatctaccttgctgaatacaatgttcggcctccggttcgcgactggcaaatcatgcgggccacggggagcttttatgcagctgatcaccgtcgcagagggattttctcaggatctgggctgcgatcatatcctggtgatagacagcggcggactaattggcggagccctcacttcagcaggggatagattcgaactagaggcctcattggcaacacttctgatgggtctctccaacgtcaccgtcatctcccttgccgagacgaaagatattcccgctgccatcctgcacgcgtttctgcgcctggagaagaccggccacatgccaaattatcagttcgtgtatcagaatctgcacgacgtttcagttcccggtccacgaccacgggataagcgccaattactcgatccacccggtgatctgagcagagcggcagcccaaatggagaaacaaggcgacggcttcagagctctggctggactggccttctgcgatccagagaaacagcatatttggcacatcccaggtctctggcacggcgcacctcccatggccgcagtaagcttggcctactctgaggctatattcgaacttaagcggtgcctgttggaaaacatccgtaatggactgtctaatcagaacaaaaatatacaacagctgatagagctggttagaagactgtag

SEQ ID NO: 10209 - DNA, 3744 bp, synthetic construct
  misc_feature 1..3744: note = source = /note="Description of Artificial Sequence: Synthetic coding sequence"
  source 1..3744: mol_type = other DNA
atgatgcgcgagtgggtgctgttgatgagcgtcttgctatgcggactggctggcccaacccaccttttccagccgagtttagtgttggatatggccaaagtgctgctcgataattactgctttcccgagaacttactaggaatgcaagaagcgattcaacaggctatcaagtcccacgagatcttatccatctccgatccacagacgcttgcatcagtgctcacggcaggagtgcaatcttctttgaacgacccgcgtctcgtgatatcttatgaaccgtcaactcccgagccaccaccccaggtgccagcacttacaagcttatctgaggaagagctcttggcctggctgcagcgcggtctccggcacgaggtcctggaagggaatgtagggtacctgcgtgtggactctgtcccaggacaggaggtattaagcatgatgggtgagttcctggtggcccacgtctgggggaatctcatgggtaccagcgcattagtccttgacctgcgccattgtaccggtggacaggtgtccggaatcccctatatcatcagctacctgcatccgggaaacaccatactccatgtcgacacaatatacaacagaccatccaatacaactactgaaatatggactcttccacaggtcctgggcgagagatacggcgctgataaagacgttgtggtgctgaccagtagtcagacacgcggagtggccgaggacatcgcccatatcttgaagcagatgagaagagccatcgtggtgggcgagcggacagggggaggtgcgttagacctacgcaagttacgcattggcgagtcagatttcttcttcactgtccctgtgtcccgttctctgggcccattagggggagggagccagacttgggagggaagcggcgttctgccctgcgtgggcacaccagctgaacaggccctggagaaagcgctcgctattctgaccctaagatccgccttgcccggtgtggtgcactgcctgcaggaggttctgaaggactattacaccctcgttgatagagtccccacattactacagcacctggcgagtatggacttcagcactgtggtcagcgaggaggacctggtgactaaactaaatgccggattacaggctgcctccgaagatcctcggctgctggtacgcgctattggcccaaccgagacaccctcgtggccagctccggatgccgcagcggaagattcaccgggtgtcgcccctgagctgcccgaggatgaggcgatcaggcaagccctggtggattcagtgtttcaggtgagtgttttacccggtaatgtgggctacctccgttttgactcattcgcagatgcttctgtactcggcgtattggccccttacgtcttacgacaagtgtgggaacctctccaggacactgagcaccttatcatggatctaagacataatccaggcggtccaagttctgccgtgccgcttctactgtcctatttccagggtcctgaagcagggcctgtacatctgtttaccacatatgacagaagaacaaacatcactcaggagcatttcagccatatggaactaccagggcctcgctatagcactcagcgtggcgtgtacctcctaacctctcatcgtaccgccactgctgctgaagagtttgcatttcttatgcagagtctcggatgggctacgctcgtgggcgagataactgctgggaatctgctacatacgaggactgtgcccctgctcgatactcctgagggttcgttggccttgaccgttccagtcctgactttcatcgacaatcacggcgaggcctggctggggggtggagtagttccagacgctattgttctcgctgaagaggccttggataaagcacaagaggtgctggaatttcaccagagccttggcgctcttgtggaaggcacaggccatcttctggaggctcattatgctcggcctgaggtggtgggacagacttccgcgctactgcgggctaagctcgcccagggagcctataggactgccgtcgatctggaaagcctggcctcgcaactgactgccgacttgcaagaggtaagtggagatcatcgattactcgtgttccactctccaggtgaactagtggtggaggaagctccacccccacctccagccgtgcctagccctgaagaactcacttacctgatcgaggccctgtttaaaacggaggtgctgcctggccagttgggttatctgaggtttgacgcaatggctgagctggaaaccgtgaaggctgtgggccctcagctggttcggttggtctggcagcagctggtggatactgctgccttggtgatagaccttaggtacaatcccggatcctatagcacagcgattccattactttgctcctacttttttgaagcagagccacgccagcacctgtattccgtctttgatcgagcaactagcaaagtcaccgaggtatggactctacctcaggtggcgggacaacggtatggctcccataaagacctgtacatattgatgagccacacttccggtagtgccgctgaggcgtttgctcacaccatgcaggacctgcagagagccactgtgattggcgaaccgacagctggaggtgccctcagcgtcggcatttatcaggttggatcatcccccctctatgcttccatgcccactcagatggctatgtccgccaccactggaaaagcatgggatctggccggtgtggaacccgacatcaccgtgcccatgagcgaggccttgagcatagcccaggacattgtggcattgcgcgctaaagtacccacagtgctacagacggcgggaaagttagtagccgacaactatgcgagtgctgaactaggtgcgaagatggccaccaagctgtctggactccagtcccgttactcaagagtaacttcagaggttgccctcgccgaaatcctgggagctgacttgcaaatgcttagcggtgacccacaccttaaggctgctcacattcctgaaaatgcgaaggatcgtattcccggaatcgtgcccatgcaaattccaagtcccgaggttttcgaggaactgataaaatttagcttccacactaacgtcctcgaggacaatatcggctatttacgattcgacatgtttggagatggggaactcctaacacaagtaagtaggttgcttgtggagcatatatggaaaaaaattatgcacacggatgcaatgatcatagatatgaggttcaatattgggggtcctacctcatctattcctattctgtgcagctacttctttgatgaagggcctccagtgctgcttgacaaaatctactccaggccagatgatagtgtgtctgaactatggactcatgcccaggtggtgggagagagatatggcagtaaaaaatcaatggtgatcctcacctcatctgtaacagccggaaccgccgaggagtttacatacattatgaagcgcctcggcagagccctagtcatcggagaggtaacctctggcggatgtcaacctccacagacatatcatgtagacgacacaaacctgtaccttacgattcctaccgccagaagcgtcggggcttcagacggatcttcatgggaaggggtgggcgtaacgccgcatgtggtcgtgcctgcagaagaggctttagccagagctaaggagatgttgcagcataatcagctgcgagtcaaaagatctcccggactccaggaccacttatag

SEQ ID NO: 10210 - DNA, 885 bp, synthetic construct
  misc_feature 1..885: note = source = /note="Description of Artificial Sequence: Synthetic coding sequence"
  source 1..885: mol_type = other DNA
atgaattccgaactggactactatgaaaaattcgaggaggttcatggtatcctcatgtacaaggatttcgtcaagtattgggataacgtagaagctttccaggcaagacccgacgacttggtgattgccacctatcccaagagcggtactacctgggtgagtgagattgtttacatgatttacaaggagggagatgtcgaaaaatgcaaagaggatgtgatttttaatcgcattcctttcctggagtgccgcaaggagaatctcatgaacggcgtcaagcaactggatgaaatgaattctcctcgaattgtgaagactcatctgcccccagaactgttgccagcttctttttgggagaaggattgtaaaatcatctatttatgtaggaacgccaaggatgtggcagtctccttttattatttctttctgatggtggccggtcatcctaaccccggatccttccctgagttcgtggagaaatttatgcagggacaggtgccatacgggtcttggtacaaacacgtgaaaagctggtgggagaaagggaagtctccccgagtccttttccttttctatgaagatctgaaggaggacattcgcaaagaagtgattaagttgatccactttctcgaacgaaagcctagtgaagaactcgtcgacaggatcattcatcatacgtcgtttcaagagatgaaaaataaccccagtacaaattacaccacgctcccagatgagataatgaatcagaagttgagtccattcatgcggaagggaataactggagattggaagaatcactttacagtagcccttaacgagaagtttgataagcactacgagcagcagatgaaggaatccacacttaagtttcgcacggaaatatag

SEQ ID NO: 10211 - DNA, 1446 bp, synthetic construct
  misc_feature 1..1446: note = source = /note="Description of Artificial Sequence: Synthetic coding sequence"
  source 1..1446: mol_type = other DNA
atggcgtataacgataccgatcgcaaccaaacagaaaaactgctgaagcgcgtgcgtgaattagagcaagaagtccagcgacttaaaaaggagcaggcaaagaataaagaggattcaaacatcagggagaactcagcaggcgctgggaaaaccaaaagagcctttgacttctcggctcacggcagaagacacgttgcgctgcggattgcatatatgggctggggatatcagggattcgcctctcaggagaacaccaacaacaccattgaagagaagctgttcgaggctttaaccaagacacggctggtagagagccggcagacctccaactaccataggtgtgggaggacggataagggcgtgtctgcctttggccaggtcataagtctcgatctgcgaagtcagttcccccgtgggagggattccgaggattttaatgtgaaagaggaggctaacgctgcagctgaggagataagatacacacacattcttaatcgcgtcttaccccctgatattcggatcttggcctgggctccagtggagcctagctttagcgccagattttcttgcctggagagaacctaccgctatttctttccgagggctgatctggatatagtcacaatggattatgccgctcagaaatacgtgggtactcacgatttcaggaatctgtgcaaaatggatgtcgctaacggagtgattaacttccaacggaccatcctgagtgcacaggttcagcttgtgggacagagtcctggagaaggcaggtggcaggagcctttccagttgtgccagttcgaggtgaccggccaggcgtttctgtatcatcaggtaagatgtatgatggccattctgtttctcatcggccagggcatggagaaacccgagattatcgacgagcttttgaacattgaaaagaatccccagaagccgcaatacagcatggccgtggagttccccctggttctgtatgactgcaagtttgagaatgtgaaatggatatacgaccaggaagcccaggaattcaatataacgcatctccagcagttatgggctaaccacgccgtgaagactcacatgttgtacagcatgctgcagggacttgatacagtgccagtgccctgtgggatcggacccaaaatggatggaatgaccgaatggggtaatgtcaagccatctgtcattaagcaaacctccgcctttgttgagggcgttaaaatgaggacgtataagcctttgatggatcgacccaaatgccaggggctcgagtcccgcatccagcattttgttcgccgtggcaggatagaacatccccatcttttccatgaagaagagacaaaagcaaagcgggattgtaatgatacgctggaggaagaaaatactaatctggaaactcccacaaaaagagtctgcgtggatacggaaattaagtccattatttag

SEQ ID NO: 10212 - DNA, 618 bp, synthetic construct
  misc_feature 1..618: note = source = /note="Description of Artificial Sequence: Synthetic coding sequence"
  source 1..618: mol_type = other DNA
atgtcgaacttcctacatctaaagtataatgagaaatccgtatccgtcaccaaagccctgaccgttcggttcctcactaaacgttttatcggggagtacgcctccaatttcgagtctatatacaagaagcatctgtgcctagaacgcaagcaactgaacttggaaatctatgatccatgctcacaaacgcagaaggctaaattttcgctgacgtctgagctgcactgggccgatggatttgtaatcgtgtatgatatcagtgataggtcttcattcgccttcgccaaggcactgatttaccgaattcgggaacctcaaacaagtcactgtaagagggccgtggaatccgctgttttcctcgtgggaaataagagagacctttgccacgttagggaggtaggttgggaggaaggtcaaaagctggcactggaaaatagatgtcaattctgtgagctatctgcagcagagcagagcctggaggtggagatgatgttcattcgcatcataaaggacatcttaataaacttcaagttaaaagaaaagcgcagaccatctggcagcaagtctatggcaaaattaattaacaatgtctttggaaagcgccgtaagagtgtgtag

SEQ ID NO: 10213 - DNA, 1008 bp, synthetic construct
  misc_feature 1..1008: note = source = /note="Description of Artificial Sequence: Synthetic coding sequence"
  source 1..1008: mol_type = other DNA
atgggcaaggtgaaagtgggcgtgaacggatttggaaggatcggcaggctggtgacaagagccgcttttaattcaggtaaggtggatattgtggccattaacgatcctttcatagatctgaattatatggtttatatgttccagtacgactccacacatggaaagtttcatggcacagtgaaggccgaaaacggcaagctggtgattaatggtaatcctatcactattttccaggaaagagatccaagcaaaatcaagtggggggacgccggtgctgagtacgtcgtcgagtctacaggtgtgtttactacaatggagaaggctggggctcatctacagggtggcgcaaagagggtcattatcagtgctccctcagcggacgcccctatgttcgtaatgggtgtgaatcacgagaagtatgacaactctctgaagataatttcaaatgcgagctgcacgactaactgcctcgctcctcttgctaaggttatccacgataattttggcattgtcgagggacttatgaccaccgtacatgcaataaccgctactcaaaaaacagtcgatggaccaagcggaaagctgtggcgcgatggccgtggtgctttgcagaatatcatcccagcctcaaccggtgccgcaaaggccgtaggcaaggtgatccctgagttgaatggcaagctcaccggcatggccttccgggttcctactgccaatgttagcgtggttgaccttacgtgtcggctggagaagcccgctaagtatgatgacattaaaaaggtggtaaagcaggctagcgagggccctctcaaaggtatcttaggttacactgagcatcaggtcgtgtcctctgacttcaattcagacacacactctagtacctttgatgctggtgcgggtatcgcgctcaatgatcacttcgttaagctcataagttggtacgacaacgagtttggttatagcaaccgcgtggtagaccttatggcacacatggcttcaaaggagtag

SEQ ID NO: 10214 - DNA, 597 bp, synthetic construct
  misc_feature 1..597: note = source = /note="Description of Artificial Sequence: Synthetic coding sequence"
  source 1..597: mol_type = other DNA
atggactccctcctcatgaatcgcagaaagttcctctaccagttcaagaacgtacgctgggccaagggcaggagggagacctacctctgctatgtggtgaagcgacgagatagtgcaacctcattttcactggactttggctacctccgcaacaaaaacggctgccatgttgaactcctctttctgcggtacatcagtgactgggatctggaccctgggcgttgctacagggttacctggttcaccagctggtctccatgttatgattgtgccaggcatgttgccgattttttaagaggaaatccaaatctcagcttaaggatcttcactgcccgactgtatttctgtgaggacaggaaggctgaaccggagggcctgaggaggctacaccgtgctggcgtccagatcgccattatgacctttaaagattacttctactgttggaatacattcgtcgagaaccatgagagaactttcaaagcatgggagggcctgcacgagaactccgtcagattaagcagacagctgcgcagaattcttcttcccttgtacgaagtagacgacttgcgggacgccttccgcaccctaggattgtag

SEQ ID NO: 10215 - DNA, 5472 bp, synthetic construct
  misc_feature 1..5472: note = source = /note="Description of Artificial Sequence: Synthetic coding sequence"
  source 1..5472: mol_type = other DNA
atggccttatccagtgcatggaggtccgttctgcctctgtggttgctctggtccgctgcttgctctcgggctgcatctggcgacgataatgcatttccttttgacatagaggggagcagtgcagtcggtcgacaggatccaccggaaacgagcgaacccagagtggctctaggaagactccctcccgcagctgagaaatgtaacgctggcttctttcatacactctcaggcgaatgcgtcccctgcgattgtaacggaaattccaacgaatgtctggatgggagtggatactgcgtgcattgtcagaggaataccaccggcgagcactgcgagaagtgtctggacggatacatcggtgatagcatccggggtgccccacagttctgtcagccctgtccctgcccactgccgcacttggcaaacttcgccgaatcctgttacagaaaaaatggagccgtccggtgtatctgcaacgagaattacgccggaccaaattgcgagcggtgtgctcctggttactacgggaacccattactgataggatctacttgcaaaaagtgcgactgctccggaaactcagatcccaacctgatcttcgaggactgtgacgaagtgaccggccagtgtaggaattgcctccgcaacacaacgggttttaaatgcgaacgctgcgccccaggatactacggcgatgccagaatcgcaaagaattgcgccgtgtgtaactgcggagggggaccctgcgactccgtgacgggggagtgccttgaggaaggctttgagcctcctaccgggatggactgccccactatcagctgtgataagtgcgtctgggacttaactgatgccctgcggctagccgctttaagcatagaagaggggaagagtggagttctgtccgtttcatccggagcagcagctcatcgccacgttaatgagataaatgccacaatttaccttctgaaaaccaagctgtctgaacgcgaaaaccagtacgccttacgaaagatccagatcaataatgctgaaaacactatgaagtcgcttttatccgacgtggaggagctggtagaaaaagagaaccaggcgtctagaaagggtcagttggtgcagaaagagagcatggacacgatcaaccacgccagtcaacttgtggaacaggcacacgacatgagggacaagatacaggagattaacaataagatgttatactatggagaagaacatgagctttctccaaaagaaatatcagagaagctggtgcttgcccagaaaatgctggaagaaatccggtcacgccagcctttttttacgcagagagaacttgtggacgaggaggcggacgaggcttacgaactcctctcccaggcagagtcttggcagcgcctgcacaacgagacacggaccctcttccctgtagttctagaacagctggacgactacaacgccaagcttagcgatctacaggaggcgttggaccaggcactgaactacgtaagggacgctgaagacatgaatagagcaacagccgctcgtcagcgcgatcatgaaaaacagcaggaacgcgtgcgggaacagatggaagtagttaacatgtcactcagcacttcagctgattctttgacaacacccaggttgacactgtccgaattggatgacataataaagaacgcaagtggcatatatgccgaaattgacggcgctaagtctgagctgcaggtaaaactcagcaacctgagcaacctgtctcacgaccttgtccaggaggcaattgaccacgcccaagacctgcagcaagaagccaacgagttgagccgcaaactgcacagctcagacatgaacggccttgtccagaaagccctggacgcaagcaatgtttatgagaatatcgtgaattacgtgtctgaggccaacgagaccgctgaatttgccttgaacaccacagacaggatatatgatgccgtttctgggattgatactcagatcatctatcataaggacgaatcagagaatctcctgaaccaggccagagaactgcaagccaaggcagagtcgtcgtctgatgaggctgttgccgatacctcacggagagtggggggtgcattagcaaggaagtccgccctaaagacgagactttctgacgccgtgaaacaactgcaggccgctgaaagaggagacgcacagcagaggcttggtcagagtcgcctcataacagaagaggcaaatcgaaccacaatggaagtacagcaggctactgctcccatggctaataacctgacaaattggagtcaaaatctacagcatttcgactcatccgcctataatacggccgtgaattccgcgagagacgctgttagaaatttaacagaggtggtccctcagctgctcgatcagctgagaaccgtggagcagaaacgccctgctagcaatgtgtccgcctcgatacagagaatccgcgagctgatcgcacagacccggagcgtcgcatccaagatccaggtctccatgatgtttgacggtcaaagcgccgtcgaggttcactctcggacctcgatggacgaccttaaagctttcacctctctgtctctgtacatgaagcctccggtaaaacggcctgagctgacagaaacagcggaccaattcatcctgtacctgggtagcaaaaacgcaaagaaagagtacatgggcctcgcgattaaaaacgacaatctggtgtacgtctataacctaggaacgaaagatgtagagatcccgctggatagcaaacccgtctcctcatggcctgcctatttctccattgtgaaaatcgagagggtgggcaagcacggcaaagtatttcttaccgtgccctctctctcttccaccgccgaagagaaattcatcaagaagggagagttttcgggcgatgactccctcctagacctggatcccgaagatactgtcttttacgtcgggggtgttccctcaaatttcaaattacctacgtcgttaaacttacctggcttcgtgggctgcctggaactagcaacactgaataacgatgtgatcagcctgtacaactttaagcatatatataatatggaccccagtactagcgtgccttgtgcgcgagataagctggctttcacccagagtagggccgcaagttactttttcgacggcagcggctacgccgtggtgcgcgacataacgaggagaggcaagttcggacaggtgactcgctttgatattgaagtgagaactcctgcagacaacggcctcatactactgatggttaacgggtctatgtttttccgccttgagatgagaaacggatatttgcatgtgttctacgacttcggatttagtgggggtcccgtccacctggaagatactctgaagaaagctcaaattaacgatgcgaagtatcacgagatcagcattatctaccacaatgacaaaaagatgattctggtggtcgaccgaagacatgtcaaaagcatggataatgaaaagatgaaaattccatttacagatatctatattggtggtgcccctcccgaaatcttgcagtcccgggctttacgggcacacttaccgctcgacattaattttcgaggttgtatgaagggtttccagttccagaaaaaagatttcaacctgctggaacagaccgagactctaggagttggatacggttgccccgaagactctctcatttcccggcgagcctatttcaacggccaatccttcattgctagcatacagaagataagcttcttcgacggctttgagggaggcttcaattttcggacactgcagccgaatggtttgctcttttactatgcttcagggtctgacgttttcagtatctccttagacaacggaacggtgattatggatgtcaagggcattaaggtgcagagtgtcgacaaacagtacaacgacggtctgtctcacttcgtgatcagcagcgttagtccaacgaggtacgagctaatcgtggataagtcccgagtcggatccaaaaacccaacaaagggcaaaatcgaacagacccaggcttcagagaagaaattttactttgggggatctcctatctccgcacagtacgcaaatttcacaggttgcatctcgaatgcttactttaccagagtagatcgtgacgtggaggtggaggacttccagagatatacggagaaagtccataccagtctgtacgaatgtccaattgagtcttctcccctttttttgctgcacaaaaaggggaagaacctcagtaaacctaaggcttcccagaacaagaagggcggaaagagcaaggacgccccatcttgggaccccgtcgccttgaagctgcctgaaaggaacacgccgcgaaattctcattgtcacctgagtaattctcctagagcgatagagcacgcttaccagtacggaggcacagctaactcccgacaggaatttgaacacctgaagggcgactttggggctaaatcccaattttccataagattgcggaccaggagctcacacgggatgatcttctacgtctccgaccaggaggagaatgattttatgaccttgtttttagcacatgggcgactcgtgtatatgttcaacgtaggtcacaaaaagctgaaaatcaggagtcaggaaaaatataacgatggcctttggcatgacgtaatttttataagggaaaggagcagcggaaggctcgtgatcgacggcctgcgggtgcttgaggaatccctgcctccaacagaagcaacatggaagataaaggggcctatatatcttgggggtgtggccccaggtaaggccgtgaagaatgtacagatcaattccatctacagttttagcggctgtctgtctaatcttcagctcaacggggcatctataacatccgcttcacagactttcagcgtgaccccatgttttgagggcccaatggagacaggtacgtatttttccaccgagggcggttacgttgtgttggacgagtcctttaatataggactaaaattcgagattgcttttgaagtccggcctagaagcagcagtggaacccttgtccacggccactccgtgaacggcgagtacctgaatgttcatatgaaaaatggccaagtcatagttaaagtcaacaatggaatccgggacttctctacttcagttactccaaaacaatcactgtgcgacggaaggtggcacaggattaccgtgattagggattcaaacgtagtgcaactggatgtggattcagaggtcaaccatgtggtcgggccacttaatcccaagccaattgaccatagagagcccgtgttcgtaggtggcgtgcccgaatccctcctgactccgagactggcaccatcaaagcctttcacgggatgtattcgacactttgtcatagatgggcaccctgtgtctttctccaaagcagccttggtctcaggagctgtgtctattaatagttgccccgcagcctac

SEQ ID NO: 10216 - DNA, 1434 bp, synthetic construct
  misc_feature 1..1434: note = source = /note="Description of Artificial Sequence: Synthetic coding sequence"
  source 1..1434: mol_type = other DNA
atgacttccaagtttctgctcgtctcctttatcctagcagcgctgagtctctctacaactttttccttacagcctgaccaacagaaagtgttactcgtgtcttttgacggttttaggtgggactacctctataaagtacccacaccccactttcactatattatgaagtatggggtgcacgtaaagcaagtaaccaacgtgttcattactaaaacttaccccaatcactacaccctagtcactggtcttttcgccgaaaatcatggtattgtggcgaatgatatgttcgacccaatccgaaataaatccttctctttagatcacatgaatatttatgattctaagttctgggaggaagcaacccccatctggataactaatcagcgtgccggacatactagtggggcagccatgtggccaggaacagacgtgaaaattcataaacgatttcccacccattacatgccttacaatgagagcgtcagtttcgaagaccgcgtggccaagatcattgagtggtttacttccaaggagcctattaatttaggcttgctttattgggaggaccccgatgacatgggacaccacctcggtcctgactcaccactcatgggaccagtgattagcgacatcgacaagaaactgggttacttaattcagatgctcaagaaggcaaagctttggaacacccttaacctaataattacatccgaccatggtatgacccaatgtagcgaagaacgactgatcgaacttgatcagtacctggacaaggaccactacacacttattgaccagtccccagtggccgcaattctgcctaaagaagggaagttcgacgaagtatacgaggccttaacccatgcccacccaaatttaaccgtgtacaaaaaggaagacgtacccgagcgctggcactacaagtacaatagcagaatccagcccatcattgccgttgcagatgaaggatggcatatcctgcaaaataaatcggacgattttctgttgggaaatcacgggtatgacaacgccctggccgacatgcaccccattttcctcgcacatggtccagcgtttcgaaaaaactttagtaaggaagcaatgaactccacagatctgtacccactgctgtgtcacttgctcaatatcacagccatgccacacaatgggagcttttggaacgtccaggacctgctcaacagcgccatgcctagggtggtgccctatacccagtcaacaatcctgctgcccggaagcgttaagccagccgaatacgaccaggaaggctcttacccttacttcatcggcgtgtcccttggttctattattgtcatcgtgttctttgtgattttcattaagcacctgatccactctcagatccccgcactacaggacatgcatgctgaaattgctcagccattacttcaagcctag

SEQ ID NO: 10217 - DNA, 1254 bp, synthetic construct
  misc_feature 1..1254: note = source = /note="Description of Artificial Sequence: Synthetic coding sequence"
  source 1..1254: mol_type = other DNA
atgcgattcgcctggacagtgctgttattgggaccgctgcagctgtgcgcgctggttcactgcgctccccctgcggcaggccagcagcagccgcctagagaacctccggctgcccctggggcttggaggcagcagatccagtgggagaataatggccaagtgttctctctgttgagtctagggtctcaataccagcctcagcggaggcgggatcccggtgcagcggtgcctggagccgcaaatgctagtgctcaacagcctaggacgccaatcctgttaattcgagacaaccgtacagcagccgctcgtactcgcactgcaggaagtagtggagttactgctgggaggccccgacctacagccagacactggtttcaagccggttacagcacctcccgcgcaagagaggctggtgcatcccgtgctgaaaaccagacagctccgggagaggtacccgctctgtccaacctcagacccccttcccgggtcgatggaatggttggcgacgacccctataatccctacaaatattctgacgacaacccatactacaactattacgacacctacgagagaccgaggccaggtgggcgataccgacccggttacggtaccggctactttcagtacggcctgccggatctggtggccgatccatactatatccaggcaagtacatacgtccagaaaatgagcatgtacaacctacgctgcgctgccgaggaaaactgcctggcgagcaccgcataccgagctgacgtgcgcgactacgaccatcgcgtgcttctacggtttccccaaagggttaagaaccaaggtacctccgatttcttaccatcacggccaagatatagctgggagtggcacagttgccatcagcattatcattcaatggacgagttttcgcactacgaccttcttgatgccaacactcagcgcagagtggctgagggccataaggcctccttttgtttggaagacacctcttgtgattatgggtaccatcgacggtttgcctgtaccgcccatacacagggcctcagtcccggttgttatgatacgtatggggcagatattgactgccagtggattgacatcacggacgttaagccaggcaactatattctgaaagtcagcgtgaatccttcatatctggtccccgagtcggattatactaacaacgtggttcggtgcgatatccgctacacgggccaccatgcatacgcctcgggctgcacaattagcccatactag

SEQ ID NO: 10218 - DNA, 879 bp, synthetic construct
  misc_feature 1..879: note = source = /note="Description of Artificial Sequence: Synthetic coding sequence"
  source 1..879: mol_type = other DNA
atgggtgagaaatctgaaaactgcggcgtgcccgaggacctcctgaacggcctcaaggtgaccgatactcaagaggcagaatgcgcgggacctcccgtccctgaccctaagaaccagcactcacagtccaaactccttcgcgacgacgaggcgcatttacaggaggatcagggggaggaggagtgtttccatgactgcagtgcttccttcgaggaggaaccaggggctgacaaagtggagaacaagagcaatgaagatgttaattcaagcgaactcgatgaggaatacttaatcgagctagagaaaaacatgtccgatgaagagaaacagaaaaggcgagaagaaagcacaagactcaaggaggagggcaatgaacagtttaagaagggggactacatcgaggcagagtctagctatagcagggcccttgagatgtgcccctcttgttttcagaaggagcgctcaatcttgttctctaatcgggcagctgccaggatgaagcaagataagaaggaaatggccattaacgattgtagcaaagcgatccagcttaacccctcttacatccgggcaatcctgagacgggctgagctgtacgaaaagaccgacaaattagacgaggcgctagaggactacaagagtattctcgagaaagacccaagcattcaccaggctcgcgaggcgtgcatgcgactgcctaagcaaattgaggaaagaaacgagagactgaaggaggagatgctggggaagttgaaggatttagggaaccttgtgctgagaccttttggtctcagtactgagaatttccagattaagcaggactcgagcaccggttcatacagtatcaatttcgttcagaaccccaataacaaccgatag

SEQ ID NO: 10219 - DNA, 2316 bp, synthetic construct
  misc_feature 1..2316: note = source = /note="Description of Artificial Sequence: Synthetic coding sequence"
  source 1..2316: mol_type = other DNA
atgtcaggcttctttacaagcttagaccctcgcagggtccagtggggggctgcttggtatgcaatgcacagccggattctgcggactaagccagttgagagcatgctcgagggaactggcacaacgacagcacatggtacaaagttagcccaggttctgactacagttgacctgattagtctgggagtcggatcttgtgtgggcaccggcatgtatgttgtgtcaggtctggtggcgaaggaaatggctggtcctggtgtgattgtctcctttattatcgcggctgtggcctccatcctgtctggcgtgtgctatgccgaattcggtgtccgcgtccccaagaccaccgggtctgcctatacctacagctacgtcacagtgggcgagttcgtcgcttttttcattgggtggaaccttatcctggaatacctgataggtacagcagctggcgcatctgccctcagcagtatgtttgactcactggcaaaccatactatctctagatggatggccgacagcgtagggactttgaatggcctgggtaaaggagaggaatcctaccccgacctccttgcactcctaatcgctgtcatcgtgacgatcatcgtggcattaggggttaagaactccatcggttttaacaatgtgttaaatgtcctgaatctggcagtgtgggtgtttataatgattgcagggctgttctttataaatggtaagtactgggcagaggggcagtttcttccgcatggttggtcaggggtgctccagggagcagcaacttgcttctacgcgttcatcgggttcgatattattgccacgaccggggaggaggccaaaaacccaaacacctccatcccctacgcaatcaccgcaagtctggtgatttgcctaactgcctacgtttcagtgtccgttatacttactctcatggttccctattacaccattgacactgaatcccctctgatggagatgtttgttgctcacggtttctatgcggctaaattcgtggtcgctatcgggagcgtagctggccttacggtcagcctgttgggtagcttgttcccaatgccgagggtgatatacgctatggctggagatggcctgctcttcagatttctagctcacgtgtcttcctacactgaaacacccgtcgtggcttgcatcgtttccggcttcctggctgctctgctggccttgcttgtgtctttgcgcgatctgattgagatgatgtccatcggaactctccttgcatacaccctggtgtccgtgtgcgtgctcctattgaggtaccagcctgagtccgacatagacggctttgtgaagtttttatcggaggagcacaccaagaaaaaggagggtatactggctgattgcgagaaggaagcatgttctcctgtgtctgaaggcgatgaattctctgggcctgctactaacacctgcggggcaaagaatctgccaagcctgggggacaacgaaatgctcatcggcaaatctgataagagtacctataatgtgaaccacccgaactatggtaccgttgatatgactactggaatcgaagccgacgaatctgaaaatatatacctgataaaactgaagaaactgatcggccctcactattataccatgagaattcggctgggcctgccaggcaaaatggatcgcccaaccgcagccacagggcacaccgtgaccatctgcgtgttgctgctgttcatcttaatgttcatcttctgttccttcataatattcggatccgactacatcagcgagcagtcctggtgggccattctgttggtcgtgctgatggtgctgcttattagcactctagtgttcgtgatactgcagcagcctgagaatcctaagaaacttccatacatggcaccgtgtttgccctttgtccctgcctttgctatgctagtgaatatatatctcatgcttaaactctcaactataacatggatcagatttgctgtctggtgctttgtcggcctcctgatctactttgggtacgggatctggaactcgactctggaaatcagcgcacgcgaggaagccctgcatcagtctacctaccagcgctatgacgtcgatgatccatttagcgtggaggagggtttttcgtacgccaccgaaggtgaatcccaggaagattggggcggacctaccgaagataaaggattctactaccaacagatgtctgacgcaaaagccaacggacggacttcttctaaggcaaaaagtaagagcaaacataagcaaaacagcgaggcgctcattgccaatgatgagctggactattcgcccgagtag

SEQ ID NO: 10220 - DNA, 513 bp, synthetic construct
  misc_feature 1..513: note = source = /note="Description of Artificial Sequence: Synthetic coding sequence"
  source 1..513: mol_type = other DNA
atgggcaacgaggcttcctatcctttggaaatgtgctctcactttgatgctgacgaaatcaaacggctgggcaaaaggttcaagaagctagatctggataattcaggatccctctcggtagaagagttcatgagtcttccggaactacagcagaaccctcttgttcaacgggtgattgacattttcgacaccgatggtaacggtgaagtagatttcaaggaattcatcgagggcgtgtctcagttcagtgtaaaaggggacaaagagcagaagcttcgatttgcattcaggatttacgatatggacaaggacggctatatctccaacggggagctgttccaggtgctgaaaatgatggtgggaaataacctgaaggatacacagctacagcagatagtcgacaaaaccattatcaacgccgacaaggacggcgacggaagaatatcttttgaagaattttgcgccgtggtgggcggtttagacattcataagaagatggtcgtcgatgtctag

SEQ ID NO: 10221 - DNA, 1218 bp, synthetic construct
  misc_feature 1..1218: note = source = /note="Description of Artificial Sequence: Synthetic coding sequence"
  source 1..1218: mol_type = other DNA
atgagtagctccgtgaaaacgcccgctttggaagagttggtgcctgggagcgaggagaagcccaaaggacgtagcccactgtcttggggatcactgttcggccacaggagtgaaaaaatcgtatttgccaaatccgatggcggtacagatgaaaacgtgctcacagtcaccattacagaaacgaccgtgatcgaatcggatcttggggtttggagctcccgtgccttgctgtatttgactctatggttctttttctctttctgcaccctgttcctgaataaatatattctgtccctcctcggtggcgagcctagcatgctgggggctgtacaaatgctcagcaccacagttatcggctgtgtcaagaccctagttccatgctgtctttaccaacataaagccagactttcttatccccctaacttcctcatgaccatgttattcgttgggcttatgcgcttcgccaccgtggtgcttggcctcgtctcgctgaaaaatgtggcagtaagctttgccgagacggttaagtcttcagcacccatttttacagtgatcatgtcacggatgattctcggggaatacaccggacttctggttaacctttctctgatccctgtgatggggggactggcgctctgtaccgctactgaaatatccttcaacgtgctggggttcagcgccgctctgtccaccaatattatggactgccttcagaacgtgttctcaaagaagcttctgagcggtgacaagtacaggttttccgcccctgaactgcagttttatacgagcgcggcagcagtggccatgttggttcctgccagggtttttttcactgacgtgccagtgattggccgaagcggaaaatcattctcatacaatcaggatgtggtcctgcttctgctgactgacggcgtcctctttcacctccagagcgtgacagcatacgcactgatgggtaagatttcaccggtgacctttagcgtggcctcgacggtcaaacatgctctcagtatttggctgtcggtgatcgtgttcggaaacaaaatcacatcactgtcagcagtgggaactgccctggtaactgtcggggtgctgttgtataacaaagctcggcaacaccaacaggaagctctccagagcctggctgctgccactggccgtgctcctgacgatactgtggaaccattgctcccccaggatcctcggcagcatccttag

SEQ ID NO: 10222 - DNA, 1131 bp, synthetic construct
  misc_feature 1..1131: note = source = /note="Description of Artificial Sequence: Synthetic coding sequence"
  source 1..1131: mol_type = other DNA
atgctgaagaaaatatccgtgggcgtcgcaggcgacctgaacacagtgacaatgaagcttgggtgcgtgcttatggcctgggccctctacctttccctcggcgtcctgtgggtggctcagatgcttctcgcagcgagttttgagacactccaatgcgagggccctgtgtgtaccgaggagtcaagctgccacacagaggacgatctgactgacgccagagaggccggttttcaggtcaaagcctacactttctctgagccctttcacttaattgttagctacgactggcttatccttcagggtccagccaaacccgtcttcgagggagaccttctggtgctgagatgccaggcgtggcaggattggcctctgacccaagttacattctacagagacggttctgccctaggtcctcctggccctaatagggagttctctatcaccgttgtacagaaggccgactctggacattaccactgttcaggaattttccagtctccagggccaggcatccctgagactgcatccgttgtagccattacagtccaagaactttttcccgcacctattctaagggcagtccccagcgctgaacctcaggccggatcaccgatgacgttgagctgtcagaccaaacttcctctacagcggagtgctgctcgactactgtttagcttctacaaggatggccgaattgttcagagcagggggttaagctccgagttccaaattccaacggcatcagaggatcactcaggatcctattggtgcgaagccgcaaccgaggataaccaggtttggaagcaaagcccacagttggaaattcgggtgcagggtgctagcagtagtgccgcaccccctacacttaatccagccccacagaaaagtgcagcgcctggaactgcccctgaggaggccccaggcccactgcctcccccaccaacacccagttccgaggaccccggattttctagcccccttgggatgccggatcctcacctataccaccaaatggggctcttactcaaacacatgcaagacgtgcgggtgctgctggggcacctgctgatggaacttcgggagctgtctggacacaggaagcccggtaccacaaaagcaactgctgagtag

SEQ ID NO: 10223 - DNA, 1572 bp, synthetic construct
  misc_feature 1..1572: note = source = /note="Description of Artificial Sequence: Synthetic coding sequence"
  source 1..1572: mol_type = other DNA
atggctcgtaaagcactgaagttggcgtcttggacctctatggctctggcagcgtccggcatatacttctattctaataagtacctcgatcccaatgacttcggcgctgttcgggtggggcgagcggtcgccacgacagctgtcatcagctacgattacctaacttctctcaagagcgtgccctatggctcagaggaatatctacagctgcgcagtaaagttcacctgaggagtgcaagaaggctgtgtgagctgtgttgtgcgaacaggggcacgttcatcaaagtggggcagcatctgggcgcactcgactacctcctccccgaggagtacacctccacactcaaggtactgcactcccaagcccctcagtcctctatgcaagaaattaggcaggtgattagagaagatctcggaaaggagattcatgatctctttcagtcttttgatgatacaccactgggaaccgcttctttagcccaggtgcacaaggcggttctccatgacgggaggactgtggccgtaaaggtgcagcaccctaaggtccgggcacagagctctaaagacatcctcttgatggaggttctggtcctggcagtgaagcaattatttcccgaattcgaatttatgtggctcgtagacgaggctaagaagaatctcccactagagcttgatttcctgaacgaaggccgaaacgcagagaaagtgagtcagatgctgagacacttcgactttctgaaggtccctaggatacattgggacctgtctacggagagggtgctactgatggagttcgtggacgggggacaggtgaatgaccgagactacatggagagaaataagatcgatgtgaacgaaatatcccgccatttagggaaaatgtacagtgagatgatatttgtcaacggattcgtccactgtgaccctcatcctgggaacgtgctggtgcggaagcaccccggaacaggcaaggctgaaattgtactgctagaccacggcctgtatcagatgctaaccgaggagttcagattaaactactgccacctctggcagagcttgatttggacagatatgaagcgtgtgaaggagtattctcaaagactcggggcaggagacctctaccccctcttcgcctgcatgctgacagccagatcctgggatagcgtgaaccgaggcatcagccaggctcccgtgaccgctacggaggacttggagatccgaaacaatgctgccaactatctgccgcaaatcagccacctgctgaatcatgttccacgccaaatgctcctgatccttaagaccaacgatctcttgcgagggatcgaggcagccttggggacccgcgctagcgccagtagctttctcaatatgtcacgctgctgtatccgcgcactggctgagcacaaaaagaagaatacatgcagtttctttaggagaacccagattagcttctccgaagcattcaatctctggcagatcaatctgcacgaactaatcctaagggttaagggacttaaactggctgaccgtgtcctcgcactgatttgctggctgttccccgctccattatag

SEQ ID NO: 10224 - DNA, 1197 bp, synthetic construct
  misc_feature 1..1197: note = source = /note="Description of Artificial Sequence: Synthetic coding sequence"
  source 1..1197: mol_type = other DNA
atgtggcttctcctgacaatggcctctctcattagcgtgctagggacaacacatggcctgttcggtaaactgcatcccggatcccctgaagtgaccatgaatatcagccaaatgataacctattgggggtaccctaacgaggagtacgaggtggttaccgaggatgggtacatccttgaagtgaacaggatcccctacggcaaaaagaacagcgggaacacaggccaaaggcccgtggtcttcctgcaacacgggttgttagcgagcgctacaaactggataagcaacctgcctaacaatagtctcgcattcattctggccgacgcaggatatgacgtgtggcttggaaatagtaggggcaatacgtgggccagaaggaacctgtactactctccagactccgtcgagttctgggcattcagttttgatgagatggctaagtacgatctgccagccaccatcgacttcatcgtgaaaaagactggacagaagcagctgcactatgtgggtcattcccagggaactaccatcggattcatcgctttctctacgaacccgagcttggctaaacgcatcaagaccttctatgccttggcacccgtggccacagtgaagtacaccaaatcgctcatcaacaaattgaggttcgtgccgcaaagcctgtttaagtttatctttggcgataagatattttatcctcataatttcttcgaccaattcctggccactgaagtgtgctcgcgcgagatgcttaacctcctttgcagcaatgcactgttcattatctgcggctttgattctaagaactttaacacaagccggctggatgtttacctgtcacacaatcctgccggtacaagtgtccagaatatgtttcactggactcaggccgttaagtccggcaaattccaggcttacgattggggatctcccgtgcagaatcggatgcactacgatcaaagtcaacccccttattataatgtcaccgccatgaacgttcccattgcagtgtggaatggcggaaaagatctgctggccgacccgcaggatgtaggtctgctgctgcccaagctccccaacttgatttatcacaaggaaatcccattctataatcacctggacttcatctgggccatggacgccccacaggaggtctataacgatattgttagtatgatttctgaggacaagaaatag

SEQ ID NO: 10225 - DNA, 555 bp, synthetic construct
  misc_feature 1..555: note = source = /note="Description of Artificial Sequence: Synthetic coding sequence"
  source 1..555: mol_type = other DNA
atgaggggacaggggaggaaggaatccctttccgattcgcgggacctagatggctcctatgatcagcttactgattcagttgacgatgagtttgagcttagcacagtgtgtcaccggcctgaaggtctggagcagttacaagagcagaccaagttcacccgaaaagaactgcaggtactctatcgaggatttaaaaatgagtgtccctccggcatcgtgaacgaagagaactttaagcagatctatagccagttctttccacagggggatagttccacctatgccacattcctcttcaatgcatttgacaccaatcacgacggctccgtgagctttgaggaaatgctggacatcatgaaaagtatctacgatatgatgggtaagtatacctacccggcactgcgcgaggaggctcccagagagcatgtagaatcttttttccagaagatggatagaaacaaggatggtgtggtgacgatagaggagttcatcgagtcctgtcagaaggtccagctccctgcgttgtacatcactttaacctggactcaggcttag

SEQ ID NO: 10226 - DNA, 3900 bp, synthetic construct
  misc_feature 1..3900: note = source = /note="Description of Artificial Sequence: Synthetic coding sequence"
  source 1..3900: mol_type = other DNA
atgtccttacaagaaatgtttcgtttcccaatgggcctgctcctggggtccgttctgctggtggcaagcgcgccagccacgctggagcccccaggctgttccaacaaggagcagcaggtaaccgtatctcatacttacaaaatcgatgttccaaaatccgccctcgtgcaagttgatgcagatcctcagcctttgtctgacgacggcgcttccctccttgcactcggcgaggcgcgagaggagcagaacatcattttccgacataatatacgcttgcagacaccacagaaagattgcgagctagcaggctccgtgcaggatctattagctagagtgaaaaagttggaggaagaaatggtggagatgaaagaacaatgttctgctcagcgctgctgccagggggtgactgatctctcgaggcactgtagtggccacggcaccttttctctggagacttgcagctgtcactgcgaagaaggcagagagggccctgcgtgtgaaagacttgcatgtccaggtgcttgctctggacacggaaggtgtgtcgatgggaggtgcctgtgtcatgagccctatgtgggagctgattgtgggtatcctgcatgcccagagaattgctcaggacatggtgagtgtgttaggggagtgtgtcagtgtcatgaagatttcatgagcgaagactgtagtgagaagaggtgtccaggcgactgttcagggcacgggttttgcgacacaggcgaatgctactgtgaagagggcttcactggcttggactgtgcacaggtggtcacaccacaagggctgcagcttcttaaaaacactgaggattccctcctggtgagctgggaaccaagctcacaagtggaccactatctcctcagctattatcccctgggcaaggagctcagcggcaagcagattcaggtgcctaaagagcaacacagctacgagatcctaggtctgcttccaggcaccaaatatatagtgaccttacggaacgtgaagaacgaggtctcaagcagcccccaacatcttttagctaccacagatcttgcggtgctggggactgcttgggtgacagacgaaactgagaactctctggacgttgagtgggagaacccgtccacagaggtggattactacaaactgagatatgggcctatgaccgggcaagaggtagctgaagtaaccgtcccgaagtcctctgatccaaagtccagatatgatatcaccggcctgcatccaggaaccgagtataaaattacggtggtgcctatgaggggggagttggaaggaaaacccatcctgctcaacgggagaactgaaatcgacagtcccaccaatgtggtgaccgatcgcgtgactgaggataccgcaacagtaagttgggacccggttcaggctgtgatagacaaatacgtagttcggtatacgtccgccgacggggataccaaagagatggccgtgcacaaggatgaatccagcaccgtgctgaccggtttgaagcctggggaggcttacaaagtgtacgtctgggcagaaagaggaaatcagggctctaagaaagcagataccaacgctctcaccgagatcgattccccggcaaacttggtgactgaccgtgtgacagaaaataccgccacgataagctgggacccggtacaggcaaccattgacaaatacgtggtccgctacacttcggctgatgaccaggagacaagggaggtgcttgtgggaaaggagcaaagctctacagtgcttacaggcctgagaccaggcgttgagtacacagtgcatgtgtgggcacaaaagggcgacagagaatcaaagaaggccgatacgaacgctcccacggatatcgattccccaaaaaatctagttacagatcgcgtcacggaaaacatggcaactgtgagctgggatccagtccaggctgcgatcgacaaatacgtggtgcggtacaccagcgcaggcggagagactagagaggtgcccgtggggaaagaacaatccagtaccgtcctcacgggacttaggccaggcatggagtacatggtccacgtttgggcccaaaaaggagaccaggagagtaagaaagctgacacaaaagcacagaccgatattgatagccctcagaatcttgtgactgatagggtaacggaaaatatggccacagtgtcctgggatcctgtgcgcgcaacgatcgatagatatgtcgtccgatatacctcggcgaaagacggcgagacacgtgaggttcccgttggaaaggagcagtcatccaccgttctgaccgggctccggccaggggtagaatacacggtccatgtgtgggcgcagaaaggagctcaggaaagcaagaaagcggatacaaaggcccagaccgatattgactctccccagaaccttgtgacagactgggtcacagagaacactgccacagtgtcttgggatcctgtgcaggctaccattgatcgttacgtggtgcactatacatcggctaacggcgagactcgagaggtgcctgtgggaaaggaacaatcttcgaccgttcttaccggactgcgccctgggatggagtataccgtgcatgtatgggcccagaaaggaaaccaggagagcaagaaagccgataccaaagcacagaccgaaatcgatgggcctaagaacctcgttactgactgggtaacagaaaatatggccaccgtgtcttgggatccagtccaagcgactatcgataagtatatggtccgctatactagcgcggatggagaaacacgggaagtgccggtcggcaaggagcacagtagtactgtgctgactggcctgcgtcccggaatggagtatatggtgcacgtttgggctcagaagggtgcccaggaaagtaagaaggccgacacaaaagcccagaccgaattggatcccccacgaaatctcaggccatcagcggttactcagagcggtggaattttgacctggaccccaccaagtgcccagatccacggatacatccttacgtaccagttcccggacggcacagtcaaagagatgcagcttgggcgtgaagaccagcgattcgccctacagggtctagagcaaggcgcaacctacccagttagtttagtcgctttcaaaggtggcaggaggagtagaaatgtctcaaccactctgtctactgtgggcgctcgattccctcacccttccgactgtagccaagttcagcaaaatagcaatgccgcttctggactgtacaccatatacctgcacggcgatgcgtccaggccattacaagtttactgtgacatggaaactgacggagggggttggatcgtctttcagcggaggaacaccggccagctcgacttctttaaaagatggagaagttatgtggagggattcggtgacccaatgaaggagttctggctggggctggataagcttcataaccttaccactggaacacctgcacgatacgaagtaagagttgacctgcagactgcaaatgaatccgcttatgcaatctacgacttcttccaggtggcctccagcaaagagagatataagctcactgtcggcaaatacagaggaacggctggagacgcactgacctaccataatggctggaagttcaccacatttgaccgtgataatgatattgctctcagtaactgtgccctcacccatcacggtggttggtggtacaaaaactgtcacttggctaatccaaacggcaggtacggggaaactaagcactcagagggggtgaactgggagccctggaagggacacgaattcagtatcccttatgtagagctcaaaattagaccccatgggtatagccgggaacctgtcctgggccgaaagaagagaactctgagggggcgattgagaaccttctag

SEQ ID NO: 10227 - DNA, 1662 bp, synthetic construct
  misc_feature 1..1662: note = source = /note="Description of Artificial Sequence: Synthetic coding sequence"
  source 1..1662: mol_type = other DNA
atgacgcggggtgggcctggaggacggcctgggcttcctcaacctccacctctgctcctattactcctgttacttcccctgctgcttgtcaccgccgagccccctaagccagccggtgtctactacgctacggcgtactggatgccggctgagaagacagtgcaagtcaagaacgtaatggataaaaacggggatgcctatggcttctataacaatagcgttaaaacgacgggctggggaatcttggaaatccgggctggttatggaagtcagacattgagcaacgagatcatcatgtttgttgcagggtttctggagggctatttaacagcccctcacatgaacgaccactacacaaacttgtatccccagctcatcacaaaaccctccatcatggacaaggttcaagattttatggagaaacaagacaaatggacaaggaagaatataaaggagtataagacagatagcttttggagacatactggttacgtgatggcccagatagatggactctatgtcggagcgaagaaaagggccatccttgagggtactaaaccaatgaccttattccagattcagtttcttaacagcgtgggagatcttctggatctcatccccagcctgagtcccaccaaaaatgggagcctgaaggtgtttaagcgttgggacatgggtcattgcagcgctctgatcaaggtactccccggattcgaaaacatcttgtttgcgcacagtagctggtatacctatgcagccatgctccgcatttacaagcactgggattttaatgtcattgataaagacacttcctccagccgtctgtccttctccagctaccctggtttcctggagagcctggacgacttttacatcctgtctagcggactgatcctgctgcagactactaattccgtgttcaacaagacactgctcaaacaggtcatccctgagacgctgcttagttggcagcgagttcgagtcgcaaatatgatggccgactccggaaaacggtgggccgatatcttcagcaagtataactcaggaacctacaataatcagtacatggtactggacctgaagaaggtcaaacttaatcactcactggacaaaggcactttgtacattgtcgaacagatcccaacttatgtggaatattcggaacagaccgatgtgctcaggaagggatattggcctagctacaatgtgcccttccacgaaaagatttacaactggtctggctatcccctcctggtgcaaaagctgggccttgactactcgtatgatctagcacccagagccaagatatttaggagggatcagggcaaagtgacagatacggctagcatgaaatacattatgcggtataacaattacaagaaggacccttacagccggggagatccttgtaacaccatctgctgccgggaggatctgaatagtccgaatccctctcccggaggctgctacgacacaaaggtcgccgatatttatctggccagccagtacacaagctacgcaataagcgggcctactgtgcaggggggattgcccgtattccggtgggacaggtttaataagactctgcaccaggggatgcccgaggtatacaacttcgacttcattacaatgaaaccaattctgaaacttgatatcaaatag

SEQ ID NO: 10228 - DNA, 2271 bp, synthetic construct
  misc_feature 1..2271: note = source = /note="Description of Artificial Sequence: Synthetic coding sequence"
  source 1..2271: mol_type = other DNA
atgtcacgccctggcacggctactccagctctggccctcgtgctgttggcggttacactggcgggagtaggcgcacagggagctgctctagaggatcccgattattacgggcaggaaatctggtcgagggagccgtattacgccagacccgagccagagctggagaccttctccccccctctccccgctggcccaggcgaagagtgggagagacggccacaggagccccgtcctcctaaacgagcaaccaaacctaaaaaagcccctaaacgggagaaatcagcccctgagcctcctcctcctggtaaacacagtaacaaaaaggtgatgcgtacaaaatcaagcgagaaagccgcaaatgacgaccacagcgtgcgcgttgctcgtgaggacgttcgagaatcttgtcctcctctgggtctagagactctgaaaattacagattttcagctccacgcgagcaccgtgaagcgttatggtctgggcgcacatcgtggaaggctgaacatacaagccggaataaatgaaaacgatttttacgatggagcatggtgtgccggaaggaatgatctccaacaatggatcgaggtggacgcaaggcgattaaccagatttacaggtgtaattacacaaggaagaaactcactgtggctgtccgactgggtaaccagctacaaggtgatggtatctaacgactcacacacttgggtcacagtaaagaatggaagtggcgatatgatttttgaggggaacagcgaaaaagagatccccgtcttgaatgagcttcccgtgcctatggtggcgcgatatatccgcataaatcctcaaagttggtttgacaacggttctatttgcatgcgaatggagatcctagggtgcccactcccagatcctaacaattattatcaccgacggaatgagatgacgaccacagatgatctggacttcaagcaccacaactataaagagatgcgccagttgatgaaagtcgtaaatgaaatgtgtccaaacatcacgcgcatctataatatcggcaaatcccaccagggcctaaagctgtacgctgtagaaatctccgaccatccgggtgagcacgaggtgggcgaacccgagtttcattacatagccggagctcacggcaatgaggttttgggacgggaattactgctgctgctggtacagtttgtgtgtcaggagtacctcgccagaaacgcaagaatcgttcacctggtggaagaaactcggatccatgtgctcccttcactgaatcctgacggatatgaaaaagcctacgaaggaggatctgaactggggggttggtcgttggggaggtggactcacgatggcatagatataaataacaatttccccgatctgaatacccttctgtgggaagctgaggaccgacagaacgtgccacggaaagtccccaatcattatatcgccatacccgagtggtttttgagtgagaacgcaaccgtagcagccgagactagagccgtaattgcttggatggaaaagatcccgtttgttctagggggaaacctgcaggggggagagcttgtagtcgcctacccgtacgaccttgtacggtcgccctggaagacccaggaacatacgcccaccccagacgaccatgtgttccggtggttagcatattcttacgcctctacccaccgtctgatgacggacgcgaggagacgggtttgccataccgaagacttccagaaagaagagggaacagtgaacggagcctcttggcacactgtggcaggatccctgaacgacttttcataccttcacactaattgcttcgagctgtcaatctacgttggctgcgataagtacccacacgagtctcagcttcctgaggagtgggagaacaacagagaatcactgatagttttcatggagcaagtgcatagaggtataaaaggtctcgtccgggattcccatggcaagggcatcccaaatgcgattataagcgttgaaggtattaaccatgatattaggactgccaacgatggtgactattggcgattgttgaatcctggcgagtacgttgttaccgctaaggctgaagggttcactgctagcaccaaaaactgcatggtcgggtacgacatgggggctacaaggtgcgacttcaccctgtctaagacaaacatggctcgcatccgggagataatggaaaagttcggcaaacagcctgtcagtttgcctgccagacgcctgaagctgcggggtcagaagaggcgtcagagagggtag

SEQ ID NO: 10229 - DNA, 702 bp, synthetic construct
  misc_feature 1..702: note = source = /note="Description of Artificial Sequence: Synthetic coding sequence"
  source 1..702: mol_type = other DNA
atggctaccccaccctttaggcttatcaggaaaatgttctcattcaaggtctctagatggatgggactggcatgtttccggtccctcgccgcttcatcaccttctattcgacagaagaaactgatgcacaaactacaggaagaaaaagctttccgtgaagagatgaagattttccgggagaagatcgaggattttagggaagagatgtggacgttccgtgggaaaatacatgcattcagaggacagatccttggcttttgggaagaagagcgccctttctgggaagaggaaaaaactttttggaaggaggagaagtccttttgggagatggaaaagtcttttagggaggaggaaaaaactttttggaaaaaatacaggacattctggaaagaggataaagccttctggaaagaagacaatgctctgtgggagagggacaggaacctcctccaggaggacaaggcactatgggaggaggaaaaggcactgtgggttgaggaacgcgcactcctggaaggagagaaggccctgtgggaggacaagacatctctgtgggaagaggaaaatgctttgtgggaggaggagcgcgctttctggatggaaaacaacggccacattgccggtgagcagatgctagaagatggccctcacaacgcaaataggggccagagactgctcgctttttcccggggtcgagcttag

SEQ ID NO: 10230 - DNA, 696 bp, synthetic construct
  misc_feature 1..696: note = source = /note="Description of Artificial Sequence: Synthetic coding sequence"
  source 1..696: mol_type = other DNA
atgatgctgtcatgcctattcttgcttaaagcgctgcttgcactcggctctctcgagagttggattacggctggcgagcacgcaaaagagggggagtgtcctcctcataagaacccatgcaaagagttatgccagggggacgagctgtgccccgctgagcagaaatgctgcactacaggttgtggcagaatttgtagagatattcctaaaggaagaaagcgagactgcccgagagtcattcgcaaacagagctgtcttaagcggtgcattaccgatgagacttgcccgggagtgaagaagtgctgcacgttagggtgtaataaatcttgcgtggtgcccatctcgaaacagaagctagcagagttcggtggagagtgccctgccgacccccttccttgcgaagagctgtgtgatggcgatgccagctgtcctcaaggacacaagtgctgcagtaccggatgtggtcgaacctgcctcggcgatatcgagggcggtcgcggaggggactgtcctaaagttttggttggactgtgcattgttggctgcgtgatggatgagaactgtcaagccggagagaaatgctgcaagagtggctgcggacggttttgcgtgcccccagtgctgccccctaagttaacgatgaatccgaattggactgttcgctctgactctgaactagagatccctgtcccatag

SEQ ID NO: 10231 - DNA, 1050 bp, synthetic construct
  misc_feature 1..1050: note = source = /note="Description of Artificial Sequence: Synthetic coding sequence"
  source 1..1050: mol_type = other DNA
atgggacccatctccgcacccagttgtcgatggaggattccgtggcaagggctgctgcttacggcatcattgttcacgttttggaatccacctacaactgcacagctcaccatagaagctgtcccatctaacgcagctgaaggcaaggaagtgttgttgctggtccacaacctgccacaagacccaagaggctacaactggtataagggtgagacggttgatgccaatagacgaatcattgggtatgtgatttccaaccagcagatcactcccggacccgcatactccaaccgggaaaccatttacccgaatgcctccttgctgatgaggaatgtcactaggaatgatactgggagctacaccctccaagtaatcaagctgaatttgatgtctgaggaggtcacgggtcaattcagtgtgcaccctgagacccctaaaccaagcatttcatccaataattcaaaccccgtggaagacaaggatgctgtggcgtttacctgtgaacccgagacccagaataccacatacctctggtgggtgaacggccaatctcttcctgtatcacccagattgcagttatccaacggtaaccgcactctgaccctgctgtctgttactagaaacgacgtgggcccatacgaatgcgaaatccagaatccagcatctgcaaacttctctgatcccgtgaccctgaacgtgctctatgggccagatgcacctaccatcagcccctcagacacatactaccatgcaggagtgaaccttaatcttagctgccatgcagcttctaaccctccctctcagtacagttggtccgtgaacgggacttttcaacaatacacccagaagttgtttattcctaatataactaccaagaacagcggctcatatgcttgtcacactacgaactcagccaccgggcgaaataggacaactgttagaatgattacagttagtgacgcactagtgcagggctctagccctgggctatccgccagggcgactgtgagcattatgatcggggtcctcgctcgtgtagctcttatttag

SEQ ID NO: 10232 - DNA, 510 bp, synthetic construct
  misc_feature 1..510: note = source = /note="Description of Artificial Sequence: Synthetic coding sequence"
  source 1..510: mol_type = other DNA
atgaccgcaggcaggcgcatggagatgttgtgcgctggtagggttcctgcactgctcctttgtctgggttttcatttgctgcaggccgtcctttctacaaccgtgatcccaagctgcatccctggcgaatccagcgataactgcaccgctcttgtgcagactgaagacaaccccagggttgctcaagtgagtataacgaaatgctcttccgatatgaatggatactgcctgcatgggcagtgtatatacctggtcgatatgtcacagaactactgtcggtgtgaggtgggctacaccggggttagatgtgagcattttttcctgactgtgcatcagccgctgtcaaaagagtacgttgccctgactgttatcctgatcattcttttcctgattaccgtagtgggctccacatactatttttgcagatggtatcgcaatcgcaagtcaaaggagcctaagaaggagtacgagcgcgtcacgagcggggatcccgagctcccgcaggtatag

SEQ ID NO: 10233 - DNA, 273 bp, synthetic construct
  misc_feature 1..273: note = source = /note="Description of Artificial Sequence: Synthetic coding sequence"
  source 1..273: mol_type = other DNA
atgaagctgtccgtatgtttgcttctggtaacgctcgcactttgttgctatcaggctaatgccgaattctgcccagctctggtttccgaactcctcgatttctttttcattagcgagccgctgtttaagctgtctctggctaagttcgacgctccgcctgaagcggtggctgccaagctgggcgtgaagcgctgtactgaccagatgagcctgcagaaaagatcactgattgcggaggtgctggtcaagatcctgaagaagtgttctgtgtag

SEQ ID NO: 10234 - DNA, 429 bp, synthetic construct
  misc_feature 1..429: note = source = /note="Description of Artificial Sequence: Synthetic coding sequence"
  source 1..429: mol_type = other DNA
atgccaagatgcagatggttgagtttaatcctccttacaatccctctggccttggtcgccagaaaggatcccaagaagaatgagaccggcgtgttgagaaagctcaaacctgtgaacgcctctaacgctaacgtgaagcagtgcctgtggttcgctatgcaggaatacaataaagaatctgaagacaagtatgtatttcttgtagtgaagaccctccaggcccaactgcaggtgacaaacctgctggaatacctgatagacgtcgaaatagccagaagcgattgcagaaaacccctgtcaactaacgagatatgtgccatccaggagaatagcaagctgaaacgaaaattgagctgttccttcttagtgggtgcactcccctggaatggcgagtttactgtcatggagaaaaagtgcgaagacgcttag

SEQ ID NO: 10235 - DNA, 438 bp, synthetic construct
  misc_feature 1..438: note = source = /note="Description of Artificial Sequence: Synthetic coding sequence"
  source 1..438: mol_type = other DNA
atgggtatcggatgctggcgtaacccactgctactgctgatcgcactagtcctcagcgccaagcttggccattttcagagatgggaaggattccagcaaaaactaatgtccaagaagaacatgaattctaccctgaattttttcatccaatcttataataacgcatccaacgacacgtatctctaccgcgtccagcggctgattaggtcacagatgcagctgacaacaggcgtcgaatatatcgtgaccgtgaagattggctggactaaatgcaaacgcaatgacacttctaactctagctgcccactgcagtctaaaaaattgcggaagtctctgatctgtgagtcactgatctacaccatgccttggatcaactattttcaactgtggaataactcctgcctggaggccgaacatgttgggagaaacctgaggtag

SEQ ID NO: 10236 - DNA, 552 bp, synthetic construct
  misc_feature 1..552: note = source = /note="Description of Artificial Sequence: Synthetic coding sequence"
  source 1..552: mol_type = other DNA
atgaaattactgttcccaatctttgcatccctgatgctgcagtatcaggtgaacaccgaattcatcggactgcgccgatgccttatgggattgggcaggtgccgcgatcattgtaatgtcgatgagaaggagatccaaaaatgcaagatgaagaaatgttgcgtaggtcccaaggtcgttaagctaatcaaaaactatttacagtacggtacaccaaacgtcctgaatgaggatgtccaggagatgctgaaaccagcgaagaattctagtgccgtgatacagaggaagcacatcctctcagtactccctcaaatcaagtccacatcgtttttcgccaacacaaattttgtcatcataccaaacgctacaccaatgaattccgccactatttccactatgacccctgggcagattacctataccgccacttccactaagtcaaatactaaagagtcaagagactccgccactgcctcaccaccccctgcaccaccaccaccaaatattctgcccacacccagtctcgaactcgaagaggccgaggagcaatag

SEQ ID NO: 10237 - DNA, 609 bp, synthetic construct
  misc_feature 1..609: note = source = /note="Description of Artificial Sequence: Synthetic coding sequence"
  source 1..609: mol_type = other DNA
atgagagggcacccctccctcctgctactttacatggccttgacaacatgtctcgacacaagtccaagcgaggaaacagatcaggaggtgttcttaggacccccagaagcacagagcttcctctcatcacacaccagaattccacgcgctaaccactgggatctcgagctgcttacaccaggaaatcttgagcgcgagtgtctggaggaacgttgctcctgggaagaggcgcgagaatactttgaagataatacattaacagagcgcttctgggagtcatacatatataacgggaaaggcggtaggggaagagttgatgtagccagtttagccgttggcctgaccgggggaatactgttaatcgtgctggccggtctcggcgcattttggtacctcagatggaggcagcacagagggcagcagccgtgcccccaggaggctgggctaataagtcctttgagccctctgaacccccttggcccaccaacacctctcccgccaccacccccacccccacccggactcccaacctacgaacaggccctggcagcctctggggtgcacgacgcccctcctcctccttacacatctctgcggagaccgcactag

SEQ ID NO: 10238 - DNA, 558 bp, synthetic construct
  misc_feature 1..558: note = source = /note="Description of Artificial Sequence: Synthetic coding sequence"
  source 1..558: mol_type = other DNA
atgagactcctgatcctgacgtgtctggtcgccgtggccttagcgaggccaaagctcccgttgaggtaccccgagcggctacagaatccaagcgaaagtagcgagccaattccccttgaatctagagaggaatatatgaatggcatgaaccgacagcggaatattttgagggagaaacaaaccgacgaaatcaaggatacgcgcaacgagtcaacccagaattgcgtagtagctgaacccgagaaaatggagtcttcgatctcgtcatccagcgaggagatgtccttgagcaaatgcgccgaacagttttgtcgcctcaatgaatacaatcagctgcaactccaagccgcacatgctcaggagcaaatacgcagaatgaatgaaaactcgcacgtccaggtccctttccaacaactcaaccagctcgccgcttacccatacgctgtttggtactatcctcagattatgcaatacgttcccttccctccattttccgatatttctaatcccactgcccacgagaattatgagaagaacaatgtgatgttacagtggtag

SEQ ID NO: 10239 - DNA, 1410 bp, synthetic construct
  misc_feature 1..1410: note = source = /note="Description of Artificial Sequence: Synthetic coding sequence"
  source 1..1410: mol_type = other DNA
atgattacagaaggcgctcaggctccacgactcctattacctcctttgctgttgctgttaaccttacccgcaaccggctcagacccggtcctgtgcttcacacagtacgaagaatcttccggaaagtgtaagggcttattgggcggaggagtgagtgttgaagactgttgtctaaatactgctttcgcataccagaagcgatctggcggactgtgccagccatgtcggagcccacggtggagcttatggtcaacttgggccccatgctccgttacgtgttctgagggtagccagctgcgatataggaggtgtgtgggctggaatggccaatgttcagggaaagtcgccccagggaccctcgaatggcagctccaggcttgtgaggatcaacaatgttgccctgagatggggggttggagcggttggggcccatgggagccctgcagcgtcacttgttccaagggcacgaggactagaagacgtgcatgcaatcacccagctcccaagtgtggagggcactgtccagggcaagcccaagagtcagaagcatgcgatacccaacaggtctgccccacacatggagcatgggctacctggggtccttggactccatgtagtgcttcttgccacggaggcccacatgaacctaaagagaccagatcccggaagtgctcagctccagaaccatcccagaagccacccggtaaaccatgtcccggacttgcgtacgagcagagacggtgtacgggactgcccccttgtccagtggcaggagggtggggaccatggggtcctgtaagtccatgcccagtgacgtgtggccttggtcaaacaatggagcagcggacatgcaaccacccagtgccccagcatgggggtccgttttgcgccggagacgcaaccagaactcatatttgcaatacagccgtgccctgcccggtagacggggagtgggatagctggggcgagtggagcccttgtatacgcagaaacatgaagagtatctcttgccaagagatccctgggcaacaatcccggggaagaacatgccgcggacggaagtttgatggacataggtgtgcaggccaacagcaggacattcgccattgttatagcatccagcattgtccactcaagggctcttggagtgagtggtcaacatggggactgtgcatgcccccatgcggccctaacccaacacgcgctaggcaaaggttgtgtacccccctgctccccaaataccccccaaccgtgtcaatggtggagggccaaggagagaaaaacgtaactttctggggcagacccttgcccagatgtgaggagctgcagggccaaaagcttgttgtcgaggagaagcgtccctgtctccacgtaccagcatgtaaggatccagaggaggaagagctgtag

SEQ ID NO: 10240 - DNA, 453 bp, synthetic construct
  misc_feature 1..453: note = source = /note="Description of Artificial Sequence: Synthetic coding sequence"
  source 1..453: mol_type = other DNA
atgcttatcgccacctcattcttcctgtttttctcctctgtggtcgccgctccaacacactcatccttttggcaatttcagcgaagagtgaaacacataacaggacgctcagccttcttcagttattatgggtacggctgctactgtggccttggcgacaaaggaatccctgtagacgataccgatagcccatcatccccgagcccatacgaaaaattgaaagagttcagctgccagccagtgcttaactcataccagttccatattgtgaatggcgcagtcgtgtgcggatgtaccctgggccctggcgctagttgtcattgcaggctcaaggcctgcgagtgcgataagcagagtgtgcattgctttaaggagtcattgccaacatacgagaaaaacttcaaacagttcagttctcagccacgctgcgggagacacaaaccatggtgctag

SEQ ID NO: 10241 - DNA, 1347 bp, synthetic construct
  misc_feature 1..1347: note = source = /note="Description of Artificial Sequence: Synthetic coding sequence"
  source 1..1347: mol_type = other DNA
atgagagagtgcatctcagtgcacgttggacaggctggggtgcagatgggcaatgcctgttgggagctgtactgccttgagcatggtattcagcctgatggccaaatgccaagtgacaagaccatcgggggaggagacgactctttcactacatttttctgcgaaactggggcaggtaagcacgtgccaagggccgtgttcgttgatctagagcctacagtgatagacgaaattcgaaacggaccatataggcagttgttccatcccgagcagctcattacgggaaaggaagatgcagcaaataattacgccaggggccactacaccattggaaaagagatcatagatcctgtactcgacagaatacgcaagctgtcagaccaatgcacaggtttacagggcttcttggtgttccactccttcgggggaggtacagggagtggatttacgagcttgctgatggaacgtctgtctgtcgactacgggaaaaaaagcaagctagaattctcaatttatcccgctccccaagtctctacggcagtggttgaaccttataattccatcctcacaacccacacaactctggaacactctgactgtgcttttatggtggacaacgaggcaatctatgacatctgtagaaggaacctggatatcgagaggccaacatataccaatctgaacagacttatctctcagatcgtaagcagtataaccgcctcgttgcgcttcgatggtgcattaaatgtggaccttacagaatttcagacaaacctggttccataccctaggatccactttcctttggctacctacgcacccgttatctcagccgagaaggcataccacgaacagctgagcgtggccgagatcactaacgcttgcttcgaacctgccaaccagatggttaaatgtgaccctcgccacgggaagtatatggcctgttgtctgctctatagaggagacgtcgtgcctaaagatgtgaacgcggctatagccgcaatcaaaacaaagcggtctatacaatttgttgattggtgtcccactggctttaaagtcggaatcaactaccagccgccaacggtcgtccccggtggcgatctggccaaggtccaacgggctgtctgtatgctcagcaacactactgccatcgcggaagcctgggcccgtttagaccacaagtttgacctgatgtatgctaaacgcgcttttgttcactggtacgtgggcgagggcatggaagaaggagagtttagtgaagctagagaggatatggcagctttggaaaaggattacgaggaggtcggaatcgacagttacgaagatgaagacgaaggcgaagagtag

SEQ ID NO: 10242 - DNA, 942 bp, synthetic construct
  misc_feature 1..942: note = source = /note="Description of Artificial Sequence: Synthetic coding sequence"
  source 1..942: mol_type = other DNA
atgcgggtggttactattgtgattctgttgtgcttctgtaaagcggctgagctgaggaaggctagccccggtagcgtgcgctctagagtgaaccatggacgggcaggaggcggtcgccgtggttccaatccagtgaagagatacgcccctgggctgccctgtgatgtttacacatatctgcacgagaagtatctggactgccaggaaagaaaactggtgtacgtactaccgggatggccccaggatctcttacatatgctgctggctcgtaacaagatcaggaccctcaagaacaatatgttttccaagtttaagaagttgaagtctttagatttgcagcagaatgaaattagtaaaatcgagagtgaggcattctttggattaaataaactcaccacactcctgttacagcataaccagatcaaggtcttgacggaagaggttttcatctacacgccactgttatcttacctccgcctatatgacaatccttggcattgcacatgcgagatcgagacgctcatctccatgttgcagatccctaggaatagaaatttgggaaattatgctaaatgtgagtcccctcaggaacagaagaataagaagctccggcagattaagtcggagcagctgtgtaacgaagaagagaaggaacaactcgaccccaagccgcaggtttctggtaggccccctgtgattaagcctgaagtggacagcaccttttgccataattatgtttttccaattcagaccctcgattgcaaacggaaggagctgaagaaagtacccaacaatatcccgcctgacatcgtaaaactcgatctcagttacaataagattaaccaactcaggccgaaagagttcgaagacgtccatgagctaaagaaactgaatctgtcctctaacggaatcgaattcatcgatccaggctcactaagatag

SEQ ID NO: 10243 - DNA, 972 bp, synthetic construct
  misc_feature 1..972: note = source = /note="Description of Artificial Sequence: Synthetic coding sequence"
  source 1..972: mol_type = other DNA
atgcaagcagcttggctcttaggagctctagtggtgcctcaacttttgggcttcggccatggcgcacgaggtgccgaacgggagtgggaagggggatggggtggagctcaggaagaggagcgggaaagggaggccctgatgctcaagcacctgcaggaggcactcggactgccggctggccgaggtgatgaaaatccagccggtacagtggagggcaaggaagactgggagatggaggaggatcagggtgaagaagaggaggaagaggccacccccaccccgagcagtggaccatcaccttcacctactccagaggatattgtcacctacatcctgggcaggctcgcgggtctggacgctgggctgcaccagctgcacgtccgactccatgccctggacaccagagtagtggagctaacccagggactgaggcaactgagaaatgctgccggagacaccagggatgccgtccaggccttgcaggaggcccaaggtcgagcagagcgagaacatggtagactggaaggttgtttgaaaggcttacgtttggggcataaatgcttcctgctctctcgcgacttcgaagctcaggctgcagcacaggccaggtgtactgccagaggtgggagcctggcacagcccgcagatcggcagcaaatggaggctctgactcgatatctgagggctgctctcgctccgtataattggccagtgtggcttggtgtacacgatcgacgtgctgaaggcctttatctctttgagaacggccaacgggtatccttcttcgcatggcaccgaagcccacggccagaactcggggctcagccttctgcaagcccccaccccctgtcaccagatcagcccaacggcggaacacttgagaactgcgtggcccaggcaagtgacgacgggagctggtgggatcacgactgccaaagaagactctactatgtatgtgagttcccattctag

SEQ ID NO: 10244 - DNA, 1086 bp, synthetic construct
  misc_feature 1..1086: note = source = /note="Description of Artificial Sequence: Synthetic coding sequence"
  source 1..1086: mol_type = other DNA
atgaacggcctgtcactctccgagctgtgctgcctgttctgttgtcctccctgccccggacgaattgccgctaaactggcattcctcccacctgaagccacttactctctggtgcctgagcccgaaccaggacccggaggcgctggtgccgcaccccttggtaccctacgagccagcagtggagcgcctggacgctggaagctacatctgacagagagagccgacttccagtacagccagcgggaactcgacactatcgaggtattccctacgaagtctgctcggggaaaccgcgtgtcttgtatgtatgttcgctgtgtacctggcgcacggcagggccatcaggctcagggcggacatccccagctcgcttgggttggtcggctgggggacagcaacaaccccgcacccggagggtgtctgctcggaaagtcctgggggacgggtgccgctttggcatgcggatatatacaccttcttgcacgctataccgtgttattcagccacggcaacgctgtagatctgggccagatgagctcattttacatcggcctaggcagccgcctgcactgcaatattttttcttacgactactccggctatggcgctagcagcggccgtcctagtgagaggaacttatacgccgatatcgatgctgcatggcaggcactgcggacccggtatggcattagtcccgatagtattattctctatgggcagtctatcgggaccgtccctaccgtcgaccttgcatccagatacgagtgtgctgcggtagtgctacacagtccacttacaagcggcatgcgtgtcgcatttcccgacacaaaaaaaacatattgttttgacgcgttccccaacatagagaaggtcagtaagatcactagtccggttctgatcattcacggcacggaggatgaagtaattgacttttcacacggcctcgctttatatgagagatgccctaaggctgtcgaaccgttgtgggtcgaaggggctggtcacaatgatatagagttgtactcccagtatctggagcgcctgcgaaggtttatctctcaggaattgcccagtcaaagggcgtag

SEQ ID NO: 10245 - DNA, 1404 bp, synthetic construct
  misc_feature 1..1404: note = source = /note="Description of Artificial Sequence: Synthetic coding sequence"
  source 1..1404: mol_type = other DNA
atgaggacagccccatcattgaggcggtgtgtctgtctcctgctagcagcaatactggacctggcgagaggctacctcactgttaacatcgagcctctcccacccgtagtagccggtgatgctgttaccctgaagtgcaacttcaaaaccgacggtcgaatgcgggaaatcgtctggtaccgggtcactgatggtggaactatcaagcagaaaatcttcacctttgacgccatgttcagcacaaattattcacacatggaaaactaccgtaagcgagaagacctggtgtaccagagtaccgtgagattgccagaggttaggataagtgacaatggaccttatgaatgtcacgtcggaatctacgatcgcgctacacgggaaaaggtggtccttgccagcgggaacatctttctgaatgtgatggcccctcctacctccatcgaggtcgtcgccgctgacactcccgctcctttttcccgctatcaagcccagaactttactcttgtgtgtatcgtcagcggtgggaagcccgcacctatggtttacttcaagcgcgacggtgagcccattgacgccgtccctttgagtgagccacctgccgcatcatctggcccacttcaggacagtaggccttttagatccctgctgcatcgggacttagatgataccaagatgcagaagtcattgtcgctgttggacgccgagaatagaggaggccgtccctatacagagcggccttcccggggattaacgcccgatcctaatatcttgctccaacctacaaccgaaaatatacctgagaccgttgtaagtcgtgagttccccaggtgggtgcattccgccgagcccacttactttctacggcactcccggactccttcatcagacggtacagtagaggtcagggctctgctcacgtggactttaaatccacaaattgacaacgaggccctgttttcatgcgaggtcaagcacccagctctgagtatgcctatgcaggcagaggtgactctggtcgccccaaaagggccaaagattgtcatgacaccgtctagagccagagttggagatacagtgcggatcctggtgcacggatttcagaacgaggtgttccccgagcccatgtttacctggacacgggtgggctctagactgctcgacggctccgccgaattcgatgggaaggagcttgtgctggagcgagtacctgccgaattgaacgggtcaatgtacaggtgcacagcacaaaatcctcttggctcgacagacacccatacacggttgatagtctttgaaaatcctaacattcccagggggaccgaagacagcaatggctcaattggaccaacaggtgctaggctcactctcgtgctcgccttgactgtgattcttgaactcacatag

SEQ ID NO: 10246 - DNA, 783 bp, synthetic construct
  misc_feature 1..783: note = source = /note="Description of Artificial Sequence: Synthetic coding sequence"
  source 1..783: mol_type = other DNA
atggcccgaccaggcatggagcgttggcgcgatcggctggccctggttacaggtgcctctggagggattggggcagcagtcgccagggcactggtacagcagggcctcaaggtggtgggttgtgcacgcaccgttgggaacatagaggagctggccgcagaatgtaagtccgccggataccctgggacactgataccctaccgctgcgatctgagcaacgaagaagacatcttgtccatgttctcggcaattagatcccagcattccggcgtggatatttgcatcaataatgctggtctcgccagaccagacaccctgctctccgggagcacttctggctggaaagacatgttcaatgtaaatgtgctagcgctttcaatctgtactagagaggcatatcagagcatgaaagaacggaacgtggatgatggccacattattaacatcaactccatgtccggccaccgtgtgttgcccctatccgttacgcacttttattccgctactaagtacgcggttacagccctaactgagggtctgaggcaggaactgcgggaggcgcagacccacatcagggctacatgtatatcacctggagtcgttgagactcagtttgcctttaagcttcacgacaaggaccctgaaaaggccgcagcaacatacgagcagatgaaatgcctgaaaccggaagacgtcgccgaggcggtgatctacgtgctgagtacccctgcccacatccagataggagatatccagatgcggcctaccgaacaggttacctag

SEQ ID NO: 10247 - DNA, 1218 bp, synthetic construct
  misc_feature 1..1218: note = source = /note="Description of Artificial Sequence: Synthetic coding sequence"
  source 1..1218: mol_type = other DNA
atgagcagccctgcgctaaccgccggtgcctcgggcaaagtcatggacttcaataacggaacatacctcgtcagcttcaccctattttgggagggacaagtctccctgagtctattgttaattcacccatctgagggagcctcagctctgtggcgagccaggaaccaaggctatgataaaatcattttcaaggggaagttcgtcaatggcacctctcacgtgtttaccgagtgtgggttaactttgaatagcaacgcagaactctgcgaatacttggatgacagagatcaggaagctttttactgcatgaaaccacagcatatgccctgcgaagcactgacgtatatgaccactcggaaccgcgaggtgagctacctaacggacaaggagaacagtctgttccataggtctaaagtgggagtcgaaatgatgaaagacagaaagcatattgatgtgacgaattgcaataagcgcgagaagatagaagagacctgccaagtggggatgaaaccacctgtcccaggaggctacacccttcaggggaagtggataacaaccttctgtaatcaagtccagcttgacactatcaagataaacgggtgccttaaggggaagctgatatatctgctgggggactccaccctcagacagtggatatattactttcccaaagtggtgaaaacactgaagttctttgacctgcacgagactgggatttttaagaagcacctgctgctggatgccgaacgtcatacgcagattcagtggaagaagcactcctaccctttcgtgacctttcagctgtacagcctgattgaccatgactacatccccagggaaattgataggctttccggtgacaaaaacacagccattgttattacctttggccagcattttaggccatttccaatcgatatctttattagacgcgcaataggggttcagaaagcaattgaaaggctgtttctgcgcagcccagccacgaaagtgattatcaaaactgaaaacattcgtgagatgcacatagagactgagcgctttggcgatttccacgggtacatacattacctcataatgaaagatatcttcaaagacctcaacgttggcattattgacgcttgggacatgacaattgcctacgggactgatactatccacccacctgatcacgtcataggcaatcagatcaacatgtttctcaactatatatgttag

SEQ ID NO: 10248 - DNA, 597 bp, synthetic construct
  misc_feature 1..597: note = source = /note="Description of Artificial Sequence: Synthetic coding sequence"
  source 1..597: mol_type = other DNA
atgcctgtgcccgcactgtgtctgctgtgggcactggctatggtcaccagaccggcatctgccgctccgatgggaggccctgaattggctcaacatgaggagttaacactcttgttccacggaactttacagctgggccaggctttgaatggtgtctaccgcaccactgagggacgactgacgaaggctcggaattccctcggcctgtacggccgaactatcgagctgctgggccaggaggtgtctaggggccgagatgccgctcaggagctcagggctagccttcttgaaacacagatggaagaagatatactgcaactacaggccgaggccactgccgaggtgctgggtgaggtggctcaggcacaaaaggtcctccgcgattcggtacagcgccttgaggtccagcttcgatcagcctggctgggccctgcgtacagggaatttgaggtgttaaaggcccacgccgacaaacaatctcacattctttgggccctgaccggccatgtccagaggcagcgccgagagatggtcgcacaacaacatcgcctcagacagattcaggaacgtctccataccgcggcattgccggcttag

SEQ ID NO: 10249 - DNA, 1455 bp, synthetic construct
  misc_feature 1..1455: note = source = /note="Description of Artificial Sequence: Synthetic coding sequence"
  source 1..1455: mol_type = other DNA
atggcaggcccttggacctttacactgctgtgtggactgctcgccgctacgctgattcaggcgacactgtcccctacagcggtgctcatcttgggtccgaaggttataaaggagaagctcacgcaggaactaaaagaccataacgctacgagtattcttcagcagctgccccttctgagtgccatgcgagagaaacccgctgggggtataccagtcttgggatccctggtgaatactgttcttaagcatattatttggcttaaagttatcactgccaatattttgcagcttcaggtcaagccctccgcaaatgaccaggagctactggttaaaattccgctcgacatggttgccggatttaacacaccactagtgaaaactatcgtcgaatttcacatgactaccgaagcccaggcaacaatccgaatggacacctcagcatccgggccaacccgtctggtcctgtcagattgtgcaacctcccacgggtccctgagaatacagttgctgcataagttgagctttctggtcaacgctctcgctaagcaggtgatgaacctgttggtgccatccctgccaaatctagtgaagaaccaactttgtcctgtgatagaagcttccttcaacggtatgtacgccgatctgctccagttagtgaaggttcccattagcctaagcatcgaccgactcgagttcgatctgctttaccccgcaatcaagggcgatacaatacagctctatctgggcgctaagttgctggattctcagggtaaagtgactaaatggttcaataatagcgcggctagcctcaccatgcctacactcgacaacattcccttctcattgatcgttagccaagacgtcgttaaggcagctgttgccgctgtgctgtccccggaagagtttatggtgctgctggattctgtcctacccgagtccgcacataggttgaagagctccatcggtctgataaacgagaaagctgccgataagcttggctccactcagatcgtgaaaattctgacgcaggatacccccgagtttttcatcgatcagggacacgccaaagtagcacaactgatcgtcttggaggtgtttccatcctcagaggcgctgcgcccactgttcactcttggaatcgaggcctctagcgaggcacagttttacacaaagggagatcagctgattttaaacctcaacaacatctccagtgatcgcatccagctgatgaacagcggcatcgggtggttccagccagacgttctgaagaatataattaccgagattattcacagcatactgctccctaaccaaaatggtaagctcaggtctggggtgcccgtgtctctcgtgaaagctctgggcttcgaggcagcagagagctctctcaccaaagacgccctagtgctcacacctgcttctctgtggaaaccatcaagccccgtctcgcagtag

SEQ ID NO: 10250 - DNA, 750 bp, synthetic construct
  misc_feature 1..750: note = source = /note="Description of Artificial Sequence: Synthetic coding sequence"
  source 1..750: mol_type = other DNA
atgcttcagctgtggaagctagtcttgctgtgcggcgtactcacgggaacctccgagtcgctcctagacaatcttggtaatgatctatctaatgtggtggataagctagagcctgtgctccatgaggggttagaaacagtcgacaataccctgaaaggtatactggagaagttaaaggttgacctgggggtcttgcaaaaaagctcagcctggcaattggccaaacaaaaggcacaggaggctgagaaactcctcaataatgtgatctcaaagctgttgcctacgaataccgacatctttggtctaaagatcagtaatagtctcattctggacgtgaaggcagagcctatcgacgacggcaagggcctgaatctgtcatttcctgtcacggccaatgtcacagtggccggacccattattggacagatcattaacttgaaggcctcactggatctgctcacagccgtaactatcgagacagatccccagacccaccagcctgtagctgtgctgggtgagtgcgcgtcggatcccactagtataagtctgtcgctgttggataaacatagccaaatcattaacaaatttgtaaactctgtcattaacacactcaaaagcactgtcagttccctgctgcagaaagaaatatgcccgctgattcgtattttcatacactcattagacgttaacgtaatccaacaggtcgtggacaacccgcagcataaaactcaacttcagacgttgatttag

SEQ ID NO: 10251 - DNA, 1959 bp, synthetic construct
  misc_feature 1..1959: note = source = /note="Description of Artificial Sequence: Synthetic coding sequence"
  source 1..1959: mol_type = other DNA
atgcaaggccctctactcctgcctgggctgtgtttccttctttccctgttcggagccgtcacacagaaaaccaagacctcctgtgccaaatgtcctcccaatgcgtcatgcgtgaataacacacattgcacctgcaatcatggctacaccagtggatctggtcagaaactctttactttccctctggaaacatgtaacgatatcaatgagtgtacccctccatattcggtgtattgcgggtttaacgctgtgtgctacaacgtcgaagggagcttctactgccagtgcgtgccgggatatcgactgcattccggtaacgagcaattttccaatagcaacgagaacacgtgccaagacactactagtagtaaaacgaccgagggacggaaagagttgcagaagattgtcgacaaatttgaaagtctcttgaccaaccaaaccctttggcgaaccgagggtcggcaggagatttccagtaccgctacgaccatcctgcgagatgtcgaaagcaaagtcctggagaccgctctcaaagatcccgagcaaaaagtccttaagatccagaatgattcggttgcgattgagacacaggccattaccgataattgcagcgaggaacggaagacgttcaacctcaatgtgcagatgaactcaatggatatcagatgctcagatatcatccagggtgacacacagggaccctctgcgattgcgttcatcagctatagctcactgggcaatatcatcaacgccaccttttttgaagagatggacaagaaggatcaggtctacttgaacagtcaagtggtttctgcagcaattgggccaaaaaggaatgtgagtctgagtaagtctgtcactctcacattccaacacgtcaaaatgacaccgagtactaaaaaagtcttctgtgtgtattggaaatcgacaggacaggggtcgcaatggagccgcgatggctgcttcctgatccatgtgaacaagagtcataccatgtgcaattgctcccatctaagctcctttgctgtgctgatggctctcacatcccaagaggaagacccagtgctaaccgtcattacgtatgtgggtctgagcgtcagcctgctttgcctgctgcttgcggcactgacattcttgctgtgcaaggctattaggaacacgagcacaagcctccacctgcagctgtctctctgtctgttcttggcgcatctgctgtttctggtggggatagaccgaaccgaacctaaagtgctgtgctccataatagctggggctctccactatctgtatctcgctgcattcacatggatgcttctggagggcgttcatctgtttctcacagcacgtaatttaaccgttgttaactattctagtatcaaccgcctaatgaagtggatcatgtttcccgtgggctacggagtgccagccgtgacagtggcaatcagtgccgctagctggccccacttgtacggtacggctgataggtgttggctacatttggatcagggatttatgtggagcttccttggccctgtatgcgcaattttctcagcgaacctcgtgttgtttatcttagtattttggatactgaagagaaaactatcctctctgaattccgaagtgagcaccatccagaatactaggatgctggcattcaaagccacagcccagctgttcatccttggctgcacatggtgtcttggacttctccaggtcggcccagccgctcaggtgatggcttaccttttcactatcatcaactctctgcagggtttctttatatttctagtctactgtctgctgtctcagcaagtccaaaagcagtatcagaaatggtttagggaaattgtgaagtcaaagtccgaaagcgagacgtacaccctcagctccaagatgggacctgattctaaaccatccgaaggcgacgtctttccaggacaggtcaagaggaagtattag

SEQ ID NO: 10252 - DNA, 1263 bp, synthetic construct
  misc_feature 1..1263: note = source = /note="Description of Artificial Sequence: Synthetic coding sequence"
  source 1..1263: mol_type = other DNA
atgtctcctcctcccctgctgcagccgttactgctcctgttgcctctgctgaacgtcgagcccagtggagccaccctgattcgtattcctctgcatcgagtgcagcctggcagacggattttgaacctgttaagaggctggagagagcctgctgagcttcccaaactgggggctcccagcccaggcgacaagcctatctttgtccccctcagtaactatagggatgtgcagtattttggtgaaattggactcggcacgcctccccaaaattttaccgtggcgtttgacaccggctccagcaatctgtgggtgccttcacggaggtgccactttttctccgtcccatgttggctccaccataggttcgacccaaaggcgagctcttctttccaggccaacgggaccaaattcgcaatccagtacgggaccggccgagtcgatggcatcctgtctgaggataaactgacaattggtggcatcaagggtgcttccgtgatctttggagaagccctttgggagccctcgttggtcttcgcctttgcccatttcgatgggatcctgggactgggtttccccattttatccgtcgagggtgtgaggcctccaatggacgtgctcgtcgaacaaggactgctcgacaagccagtattctccttctatcttaaccgcgacccagaagaacccgacggaggagaactcgtgctgggtggaagcgatcctgctcattacataccgcctctgacctttgttcctgtgaccgtgccggcttactggcagattcatatggaaagggtgaaagtagggcctggtttaaccctgtgcgcgaaagggtgtgccgctatcttggacactggtacaagcctgatcacaggtcctactgaggagatcagggcactacacgccgctatcggcggtatcccactgctggccggagagtatatcattttatgttccgaaattccaaaactgcccgctgtatcgtttcttttgggcggtgtgtggttcaaccttaccgcccacgactacgtcattcagaccacacgcaacggtgtgcggctttgcctctcagggtttcaggcccttgatgtgcctccaccggctgggcctttttggattctgggcgacgtcttcctcggaacatatgtggccgtctttgacagaggggatatgaaatcctctgctagggtcgggcttgcgcgtgccagaaccaggggcgctgacctggggtggggcgagacggcccaggctcaatttcctggctag

SEQ ID NO: 10253 - DNA, 1293 bp, synthetic construct
  misc_feature 1..1293: note = source = /note="Description of Artificial Sequence: Synthetic coding sequence"
  source 1..1293: mol_type = other DNA
atggcctggacttttgaatgcagccgaacaacctctcccgagccgctatccacttccccgtgcagaactacaagcagcagaaactcacctactatgtcttgccccgcatccgttgcgtgtgagccatcaaccagtactactactagttcccctcctaagctaagtgtggcgcctcaatttttaccccgatccctccgtgtggcagacttggccgctaatcaggtaatggaaattttccccctgaccttcggcgagaagccggcattgcgctccgtctatcttcataataaccagctgtcaaatgctgggttgccacctgacgcatttagaggatccgaggccattgccacactttcgttgtccaataaccagctctcctatctccctccaagcctgcccccaagcctggaacgcttgcaccttcaaaacaacctgatttccaaggtccctaggggggcacttagccggcagacacaacttcgagaactttatcttcaacacaatcaattgacagacagcgggctcgacgccaccacattctctaaactccacagcttggaatacttggacttgagtcacaatcagctcaccaccgtgcccgctggtttgccaagaacgttagccatactgcatctgggccgaaaccgcattagacaggtcgaggcggcaagacttcatggggcaaggggcctgaggtatctgttgcttcagcacaaccaactcggcagcagcgggctacccgcaggggcacttaggcccctacgcggtctccacactctccacctttacgggaatggactggaccgggtgcccccagccctgccgagacgcctgagggcactggtgcttccacacaatcatgtagcagctctgggcgctagagacctcgtggcaacacccggactgaccgaactgaatcttgcttacaaccggttggcttccgcacgggtgcaccaccgggcttttaggcggctgcgcgcacttagatcactggaccttgccggtaaccaactaaccaggttacctatgggcctccccactggcttgcggacactgcagctgcagagaaaccagctccggatgctggaaccagagcctctggcaggcctggaccagctgcgagaactctccctggcacataacaggcttagagttggagacattggccctggcacatggcacgaattacaggctctccaagtgaggcatcgtctggtttcccacaccgtccctagggctccaccatcaccatgcctgccgtgccatgtcccaaacatcctggtgagttggtag

SEQ ID NO: 10254 - DNA, 3162 bp, synthetic construct
  misc_feature 1..3162: note = source = /note="Description of Artificial Sequence: Synthetic coding sequence"
  source 1..3162: mol_type = other DNA
atgtggcagcccagacgaccatggccaagggtaccttggaggtgggccctcgccttgctggccttggtgggagccggactgtgccacgccggtccccagccgggatatcctgctcggccttccgctcgaaacaagaattggtgtgcgtatattgtgaacaagaatgtatcatgcagcgtactggagggctccgagtctttcattcaagcccaatataactgtgcatggaaccagatgccctgcccgagtgctctcgtgtatcgggttaatttccgccctcggtatgtcacacggtataagacagtgactcagctggagtggcgatgttgcccaggcttccggggtggcgactgccaagagggccctaaggatccggtcaagactctccggccaacacccgctaggccccgtaacagtttgaagaaagctactgataatgagccctctcagttctcagaaccacgcaagaccctgagccccaccgggacggctcagccctcctggggcgtggatccaaaggaagggcctcaggaacttcaggagaagaaaatacaagtcctggaggaaaaagtcttacggctgactaggacagtgctagacctgcagtccagcctggccggtgtgtcagaaaatttgaagcacgcaacccaggacgatgcgagcaggacacgggcaccgggactatcatcccagcatcctaagccggatacaactgttagtggagacaccgagaccggccaatcacctggcgtctttaacacaaaagaaagcggaatgaaggacattaaatcagagctggcagaagtgaaggataccctgaagaacaagtctgataagctggaggagctggatggtaaagttaagggatacgagggacagttaaggcagcttcaggaagccgctcaagggccaacagtgaccatgacaacgaacgagttatatcaagcgtacgtcgacagcaaaattgatgccctgcgggaagagctgatggaaggaatggatagaaagctcgctgacctgaaaaatagttgcgagtataagctgaccgggctgcaacaacagtgcgacgattatggatctagctacctgggagtgattgaactcattggcgagaaagagacctccctccgcaaggaaatcaacaatttgagggctcgtctgcaggagccctccgcacaggctaattgttgcgacagcgaaaaaaacggagatatcggacagcagatcaagaccctcgaccagaagattgaaagagtggcagaggctacgcgcatgctgaatgggaggctggacaatgaattcgatcgactgatcgtgcccgagccggacgtggacttcgacgctaagtggaatgagttggatgctaggataaacgttacggagaagaacgcagaggagcactgtttctatatcgaagaaaccttgcggggagcgatcaacggggaggtaggcgacctgaagcagctggtcgatcaaaagatccagagtctggaggacaggctcggatctgtcctgctccaaatgaccaacaacactggggctgagctgagtccgcctggagcggctgcactccctggagtgagtggttcaggagatgagcgcgtaatgatggagctgaatcacctgaaagacaaagtgcaagtagtggaggacatctgtctgttaaacattcagggtaagccacacgggatggaaggcgcacttcccaatcgggaggaccgagcagtcagagactccctacacctcctgaagtccttgaacgataccatgcacaggaaatttcaggaaaccgaacaaacaatacagaagctgcaacaagatttctccttcctttacagccaacttaaccacaccgaaaacgatgttacgcacctgcagaaggagatgagcaactgccgggctggagagaacgctggcatggggcgtttcaccaaagtcggagaacaagagcgcacagttgataccctgccctctccacagcatccggtggctcactgctgcagccagttggaagaacgttggcagaggctgcagagtcaggtgatttccgaactggatgcgtgtaaagagtgcacacagggggtgcagagggaggtcagtatggtagaggggcgagtcagccatatggagaagacttgtagcaagctggacagcatttctggcaacctgcaacgaatcaaggaggggctgaacaagcacgtcagctccctgtggaactgcgtgaggcagatgaacggaactttgagaagccactcacgcgacatatccggcctaaaaaattccgttcagcagttttattcccacgtgttccagatctctaccgacctgcaggatctggtaaaatttcagccatctgctaaagccccaagtcctcctccaccagccgaggccccaaaggaacccctccagcccgaaccggcaccacccaggcccagcggcccagccaccgccgaagaccctggtagacggccagtgctgcctcagcgaccgcctgaagagagacctccgcagccccctggctctactggcgtcatcgcagagacgggccaggcaggcccaccagccggtgccggagtcagcggcagaggacttccaaggggcgttgacggtcagactggctcgggcacagtcccaggtgctgagggatttgccggagctcctggatatcctaagtcccctcctgtggctagtccgggagcccctgtgcccagtctcgtgtcattcagtgccggtctgacccagaaaccttttccaagcgacggcggagtcgtgttgttcaataaggtcctcgttaatgatggagacgtgtataacccgtccacgggcgtcttcacggccccttatgacggcagatacctgattactgctactctcacacctgagcgggatgcttacgtcgaagccgtgttgtccgtaagtaacgcatcagtagctcagctccatactgccggatatcggagagagtttcttgaatatcacagaccacctggcgctctccatacttgtggaggaccaggtgcttttcacttgatcgttcacttaaaagcgggagacgctgtaaacgtggttgtgaccggaggtaagctggcgcacaccgatttcgatgagatgtatagcacttttagtggcgtgttcctctatccattcctgtcccatctctag

SEQ ID NO: 10255 - DNA, 1548 bp, synthetic construct
  misc_feature 1..1548: note = source = /note="Description of Artificial Sequence: Synthetic coding sequence"
  source 1..1548: mol_type = other DNA
atggcgcagctcttcttacccctgcttgccgctctggtgctggcacaggctccagccgcactcgccgacgtcctggaaggggatagtagcgaagatcgcgcttttagagtaagaatcgctggcgatgcgcctttacagggggtgctcggaggcgcactcaccatcccatgtcatgtgcactatctcaggccacctccctccaggagagccgtgttggggtccccaagggtgaaatggacctttctctcacgcggacgggaggccgaagtgctggtagcccgaggggtacgagtaaaggttaacgaggcctatcgcttccgggtcgccctacccgcttaccccgcttccctgactgacgtgagtctcgcactgtctgagctacgccctaatgattccggtatttacaggtgcgaggtccaacacggaatagacgatagttccgatgcagtagaagattcccagctgtaccctatacagacaccacgcgaagcctgctatggggatatggacgggtttcccggtgtaaggaactacggcgtcgtggatccagacgatctctacgatgtgtactgttacgctgaggacttaaacggggaactctttttgggcgaccccccagaaaaactgacactcgaggaagcacgcgcatactgccaggagcgtggtgcagaaatcgccaccacaggccaactctacgccgcttgggatggcggactcgatcattgttcacctgggtggctggctgacggaagcgtgagatacccaatcgttactcctagccaaaggtgtggtggtggactcccgggagttaaaacactgttcctttttccaaatcagacaggttttccaaataaacacagtcgctttaacgtctactgttttagggggagtacctgccttcttcccagcttacgtcccccaacccagccgcctacacaggatggcctcgaggccattgtaactgtgaccgagactctggaggaactacaactcccacaggaggccacagagtccgagtctcgcggtgccatttactccatcccaatcatggaggacggcggaggcggatcttctacgcctgaggacccagctgaagccccaagaacactgctagaatttgagacccagtctatggtcccccctacagggttttctgaagaagaggggaaggctttggaagaggaagagaagtacgaggatgaggaggagaaggaagaagaggaagaggaagaagaggtggaagatgaggcactgtgggcttggccgtctgaactgtcttcgcccggacctgaagccagcttacccactgaacccgcagcccaagaggagtcactgagccaggcccctgctagggccgtgcttcaacctggtgcaagtccactgcctgatggtgaaagtgaggcctccagacctccccgtgtccatggaccccctactgaaacgctccccaccccgagggagcgaaatttagcgtctccaagccccagtaccttggtcgaagcacgggaagtgggtgaagctaccggtggtccagagcttagtggttag

SEQ ID NO: 10256 - DNA, 1023 bp, synthetic construct
  misc_feature 1..1023: note = source = /note="Description of Artificial Sequence: Synthetic coding sequence"
  source 1..1023: mol_type = other DNA
atgcctggctggctaacgcttccaacactctgccggttcctgctctgggctttcactatttttcacaaggcacagggcgaccccgcttctcacccaggccctcattacctacttcctccgatccacgaggtgattcactctcatcggggagctaccgcaacgttgccttgcgtgttaggcaccactccgcctagctataaagttcgatggagcaaagtggagccaggggagcttagagaaactctgattcttatcacaaacggcctgcatgcaagaggttatgggcctttggggggtagggccaggatgcggagagggcatagacttgacgctagccttgttattgcaggcgtgaggctggaagatgagggaagatatcgctgtgaacttataaacggtatcgaggatgaatctgtggctctcacgctttcacttgaaggcgtggtctttccctaccagccctctaggggcaggtatcagttcaactactacgaggcaaaacaggcctgcgaggaacaggacggaagacttgcaacttatagtcaactgtaccaggcctggaccgaaggactcgactggtgtaacgctgggtggctactggagggatctgtcaggtatcctgttctcactgcgagggccccttgtggtggtcgaggcaggcctggaataaggtcttacgggcctcgagatcggatgagagaccgatatgacgcgttttgcttcactagtgcccttgctggccaggtgttttttgttccgggacgcctcacgttgtcggaggcccatgccgcttgtaggcgacgaggggctgtggtggcgaaggtgggtcacctctacgccgcatggaagttctcaggtctggaccaatgcgacgggggttggctggccgacggttcggtgagatttcctattaccaccccacgacctcgatgcggcggactcccagaccctggggtaaggtctttcgggttccccaggccacaacaggcagcttacgggacctactgttacgctgaaaactag

SEQ ID NO: 10257 - DNA, 690 bp, synthetic construct
  misc_feature 1..690: note = source = /note="Description of Artificial Sequence: Synthetic coding sequence"
  source 1..690: mol_type = other DNA
atggatctcctccaatttctggcatttctgtttgtgctcctgctttccggaatgggagcaaccggaactctgagaacatcgcttgacccatctttggagatctacaagaagatgttcgaagtcaagcggcgagaacaacttctggccttaaaaaatctggctcagcttaacgatatccaccagcaatacaaaatcctggatgttatgttaaaaggcctgttcaaggtcttagaagacagccgaactgttctaaccgcagcagacgtgctgccagacggcccattcccacaggatgagaagttgaaagatgccttctcccacgtggttgagaacaccgctttcttcggagatgttgtgctaagattcccacgaatcgtgcactactatttcgaccataactccaactggaacctcctgatccgctgggggatttctttttgtaaccagacaggtgtttttaatcaggggcctcattcaccaatcctttcacttatggcacaggaactcggtatttccgaaaaggacagtaacttccagaacccttttaagatcgatcgcaccgaatttatcccctcaaccgaccccttccaaaaagctttacgggaggaagaaaagagacgcaagaaagaggaaaagcggaaggaaattcgtaaggggccacggatcagccgctcccagtcagaactgtag

SEQ ID NO: 10258 - DNA, 465 bp, synthetic construct
  misc_feature 1..465: note = source = /note="Description of Artificial Sequence: Synthetic coding sequence"
  source 1..465: mol_type = other DNA
atgtctgtcggaacaagtctggagcaggctcagatgtcaaccctcacatgcccactattcattcctacagttggccgaaagacggcactgcacagtggggaagactttcaaacgctactcttcgagcgggtgttcgtcaacttggatggatgctttgatatggccaccggccagtttgctgcccctttgcggggtatttatttcttcagtctgaacgttcacagttggaattacaaagaaacctacgtgcatatcatgcacaaccaaaaggaggcagtgattctgtacgcacagccatccgaacgcagcatcatgcagtctcaatccgtgatgttggatctcgcctacggtgacagagtgtgggtgaggttattcaagcgacagagggagaacgccatatactccaatgactttgacacctatatcacattttccggccatttgattaaagcggaagacgactag

SEQ ID NO: 10259 - DNA, 900 bp, synthetic construct
  misc_feature 1..900: note = source = /note="Description of Artificial Sequence: Synthetic coding sequence"
  source 1..900: mol_type = other DNA
atgcggtccgtgggcgagggggcacgggaatggattagggagtgccagcatcaattcagacatcacagatggaattgcacaaccctggaccgcgatcacaccgtcttcggtagagtgatgttgcgaagttcacgggaggccgcattcgtttacgcaatatcctcggcaggcgttgtgcacgcaattacacgcgcatgtagccaaggcgaactgtcagtgtgttcctgtgatccatacaccaggggacgtcatcatgatcaacggggagatttcgattggggcggatgctctgataacatccactatggggtcaggtttgcgaaggccttcgtcgacgctaaggagaagcgcctgaaggacgctagggcattgatgaacctgcataacaatagatgcggccgtacagcggtaagacggttcctcaaactggagtgtaaatgccacggcgtgtccgggtcatgtaccctgcgtacatgttggcgggctttgtcagattttcggaggacaggtgattacctccgaaggagatacgatggtgcggtgcaagtgatggcaactcaggacggagcaaactttacagcagccagacagggctataggcgggcaactcgtacagatttagtgtacttcgataactcccctgattactgtgtgctggataaagctgcgggatcgctggggacagctggcagggtgtgcagcaagaccagcaagggcacagatggatgcgagatcatgtgctgcggaagaggttatgacaccacgagggttacacgggttacccaatgcgaatgcaagttccactggtgttgtgccgttaggtgtaaggaatgcagaaacactgtggacgtgcacacctgcaaggcgccaaagaaagcggagtggctcgaccagacatag

SEQ ID NO: 10260 - DNA, 1710 bp, synthetic construct
  misc_feature 1..1710: note = source = /note="Description of Artificial Sequence: Synthetic coding sequence"
  source 1..1710: mol_type = other DNA
atgctgctgctttttagtgttattttgatatcctgggtcagtacagtcggtggggaagggaccctttgcgatttccctaagatccatcacggcttcctgtatgacgaggaggattacaaccccttcagccaggttccaaccggcgaggtcttctattactcttgcgaatataactttgtctctccaagcaagtctttctggacgagaattacctgcacagaagaaggctggtctcctactccaaaatgcctgcggatgtgttcttttccatttgttaaaaacgggcattcagaaagctccggcctgatccacctggaaggtgacactgtgcagatcatctgcaacacgggatactcacttcaaaacaacgagaagaacatttcgtgtgtagaaagagggtggtctacaccccctatctgctcctttaccaaaggcgagtgccacgtgcccattctggaagccaacgtggacgcgcagcccaagaaagagagttacaaggtgggcgatgtcctgaaatttagttgcagaaagaacctcattagagttggatcagacagcgttcagtgctatcaatttggctggagtcctaatttcccaacatgcaagggacaggttagatcatgcgggcctccccctcagcttagcaacggggaagtgaaggagatccggaaggaagaatacggacacaatgaagtcgtggaatacgactgcaacccaaatttcatcatcaatggtcccaaaaaaatccagtgtgtggatggcgagtggacgacattaccaacctgtgtcgaacaagttaagacctgcgggtatatcccggaactggaatacgggtacgtacagccatcggttcctccgtatcagcatggcgtgtcagtggaggttaactgtcggaatgagtatgccatgattggaaacaacatgatcacctgtattaatggcatctggacggagctccccatgtgcgtggctacgcaccaactcaagcggtgcaagattgccggagtgaatatcaaaacactgttaaaactttccggaaaggagtttaaccataatagcagaattcgatacagatgtagcgatatattccggtatcgtcacagcgtgtgcataaatggcaagtggaatcctgaagtggattgcacggagaagagggagcagttttgcccccctccaccacaaatcccaaacgcccaaaatatgacaacaactgttaactaccaggacggagaaaaggttgccgttctgtgcaaggagaactaccttctgcctgaagcgaaggagattgtctgtaaggacggcaggtggcaatcactgcctaggtgtgtcgaatcaacagcctattgtgggccaccaccctcaatcaataacggagacaccacttcttttcctctgtccgtctatcctcccggatctacagtgacctaccggtgtcaatctttttacaagcttcaaggttcagtgacagttacatgcaggaataaacagtggagtgagccaccacgctgcctagatccctgtgttgtgtctgaggaaaacatgaataaaaataatatacaactgaagtggcggaatgatggcaaactctacgccaaaacgggggacgctgtggagttccagtgcaaatttccacacaaggcaatgatctcaagccccccattccgagccatttgccaagaaggtaaattcgagtaccctatctgtgaatag

SEQ ID NO: 10261 - DNA, 351 bp, synthetic construct
  misc_feature 1..351: note = source = /note="Description of Artificial Sequence: Synthetic coding sequence"
  source 1..351: mol_type = other DNA
atgaaaggtctccggtctctcgccgctacaaccctggcattattcctggtattcgtctttcttgggaattctagttgcgcccctcagcgcctgctggaacgcagaaactggacgcctcaggcgatgctttatctcaaaggggctcaggggcgtcgctttatttctgaccaatctcggaggaaggacctgagcgaccgacccttaccagagagacgctcacccaacccccagctgttgaccatcccagaggcggcaacgattcttcttgcctccctgcagaaaagcccagaggatgaagaaaagaacttcgatcagacaaggtttctagaagactccctgttaaattggtag

SEQ ID NO: 10262 - DNA, 192 bp, synthetic construct
  misc_feature 1..192: note = source = /note="Description of Artificial Sequence: Synthetic coding sequence"
  source 1..192: mol_type = other DNA
atgaagcacgtcctcaatctatatctgctaggagtggtccttacccttcttagcatctttgtgcgggtcatggagtctctagaggggcttcttgaaagtccatcacctgggaccagctggacaaccaggtcgcagttagccaacactgagcctacaaagggccttcccgatcacccttctagaagtatgtag

SEQ ID NO: 10263 - DNA, 567 bp, synthetic construct
  misc_feature 1..567: note = source = /note="Description of Artificial Sequence: Synthetic coding sequence"
  source 1..567: mol_type = other DNA
atggtacctggcgctgccggatggtgttgtctcgtgctgtggttgccagcctgtgtagcagcccatggctttcggatccatgattacctgtattttcaagtcctatccccaggcgacatacggtacatcttcacagcaacgcctgccaaggatttcggcggtatttttcatacccggtacgagcaaatccatctggttcctgctgagcctcccgaagcctgcggagagctgagcaacggattcttcatccaggaccagattgcactggtagagcggggtggctgtagctttctatcaaaaaccagggttgtccaggagcacggaggcagagcagtgatcatttctgacaacgctgtagacaatgattccttctatgtggaaatgattcaggacagcacacagcgaacggctgatattccagccttgtttctcctcgggagagacggatatatgattcggagatcccttgagcaacatggcttgccatgggcaattatctcaattccagtcaatgtgaccagtatacccacttttgaacttcttcagcccccttggacattctggtag

SEQ ID NO: 10264 - DNA, 2559 bp, synthetic construct
  misc_feature 1..2559: note = source = /note="Description of Artificial Sequence: Synthetic coding sequence"
  source 1..2559: mol_type = other DNA
atgaagcccatgttgaaggatttctcaaatctgctgctggtggtgctatgcgactacgtcttgggcgaggccgagtacttgcttcttagggaacccggtcatgtcgcccttagtaatgacacagtttatgtggatttccagtacttcgatggagcgaatggaacgttgagaaacgtctctgtcctactgcttgaagctaataccaatcaaacagtgacgacaaagtacttgcttactaaccagtcacagggcacactcaagttcgagtgcttctacttcaaggaggcaggcgattactggtttacgatgacaccagaagcgactgataattctacaccgttcccttggtgggaaaagtcagcctttttaaaggttgaatggcccgtcttccacgtcgacctgaatagaagcgctaaagcagctgaaggtaccttccaagtgggactgttcactagccaacctctgtgcccattcccggtggacaaaccaaacattgtggtggatgtgatctttaccaactcattaccagaagccagacgaaacagtaggcagccactggagatacgtacctctaaaaggaccgagcttgcacaaggacagtgggtagaattcgggtgtgccccactcgggcctgaagcgtatgtgacagtggtcttgaaattactggggagggatagtgtcattacctccacaggacctattgacttggcccagaagtttggttacaaattggtgatggtgcccgaactgacctgcgagtctggagtagaggtgacagtgttaccacctccgtgcactttcgtgcaaggggtcgtgaccgtgttcaaggaggccccacgctacccaggaaagcgcacaattcatctggctgaaaattctctccccctgggggaacgcagaacgatttttaactgcacactatttgacatgggcaaaaacaaatactgctttgacttcggcattagtagccggtctcatttcagtgcgaaggaggaatgtatgttgatccaacgcaacacagaaacttggggtctctggcagccttggtctcaatgcagtgctacttgtggggatggcgtgcgcgagagaaggcgagtgtgcttaaccagctttccctcttcacccgtctgcccaggcatgtccctggaagcatccctttgcagtctcgaggagtgcgccgctttccagccatcatccccgtccccactgcagccgcaggggccagtgaaaagcaacaacatcgtgacagttactggaatcagcctgtgtctgtttataatcattgccacggttttaattacattgtggcggcgtttcggtcggccagcaaaatgtagtacccccgcaaggcataactcgatccacagtccgtcattccggaaaaatagtgacgaggagaacatttgtgaactgtctgagcaacggggaagtttctcggatggtggcgacgggcctactggcagccccggagacaccggcatacccctcacttacaggcgaagcggaccagtgccacccgaggatgacgctagcggttctgagtccttccaatcgaatgcccagaaaatcatccctcccctttttagttacaggctagcccagcagcagctgaaagagatgaagaagaagggcctcacagagaccactaaggtttaccacgttagccagagcccactgaccgatacagcaattgacgcagctcccagcgcccctctcgacctcgaaagccctgaggaggcggctgccaataagtttcggataaagtcaccctttccagagcagcctgcggtgagtgccggtgaaagacccccttcgcggcttgacttaaatgtgactcaggcatcatgcgcgatctcccccagccaaacgttaattaggaagagtcaagcccgacatgtcgggtcccgcggagggccttccgaacgctcccacgctaggaatgctcacttcaggcgaactgcttctttccatgaagccaggcaggctcgccctttccgcgagagatccatgtccactctgactcctcggcaggcacctgcatattcttcaaggactcggacctgtgagcaggccgaggatcgctttagaccccaatcccgaggtgcccatttgtttcccgagaagctcgagcatttccaggaagcatcaggaacacgcggaccactgaaccccctgccaaagtcttacacactggggcagccactcaggaagccggatctgggggaccaccaagccggtttggtggccggaatcgagcggactgagccacacagggcgcgtcgtggcccttctccctcccacaaatctgtaagcagaaagcagtccagcccaatttcaccaaaggataattaccaaagagtgtcctccctttccccttcccaatgtagaaaagacaagtgccagtcatttcccacccatcccgagttcgcattttatgataatacaagttttggcttaaccgaggccgagcaacggatgctagacttgcccggttatttcgggtccaacgaggaggacgaaacgacctctaccctgtctgtagagaagttggtcatttag

SEQ ID NO: 10265 - DNA, 369 bp, synthetic construct
  misc_feature 1..369: note = source = /note="Description of Artificial Sequence: Synthetic coding sequence"
  source 1..369: mol_type = other DNA
atgggattccacttctgcatctggattatctttctgcttccacccccatgtaaaaagtgtctgtccccccctactatgaaccttcgacctccaaaatcgtgtgggaacgtcttttactgggtcctggtcctgaattcgggcctgttgtataagttctgtcagacaattaagtgccgcgctaactggcgtccagccagggcccctagagggtggaatgaggctaccgagagacaccaggagcgccgaacccaaatggagaccgaaatgggtggtatatcaactacctactggcaccgactgtgcacttgcaccgaccggcgagccgagaagttggtaatggacggcaacaattgctggtttcataagtag

SEQ ID NO: 10266 - DNA, 978 bp, synthetic construct
  misc_feature 1..978: note = source = /note="Description of Artificial Sequence: Synthetic coding sequence"
  source 1..978: mol_type = other DNA
atgcagggtagagtggcgggtagctgcgcccctctcggcctgctgttggtgtgtcttcatctgcctggattattcgctcgctccattggggtcgttgaagaaaaggttagccagaatctggggacaaacctgccacaactggggcagcctagctcgaccggtcccagtaattctgaacatccacagcctgccctggatcccagaagcaatgatctggctagagtgcctctgaaactgtcggtcccagcatctgacggctttccccctgcaggaggatccgcagttcagaggtggcccccatcctggggcttgcctgccatggactcctggccacccgaggacccctggcaaatgatggctgcagcggcagaggacagactcggcgaggccttacctgaggaactttcatatctttcaagcgccgctgccctggctcctggatccgggccactgcctggggagtcttcgccagacgcaactggtttatcaccgaaggcttctctgcttcaccaggattctgaaagccggagattgccacgctcaaactccctgggggcagggggaaagattctctcccagcgtcctccctggagccttattcacagggtgcttccggaccacccttgggggaccctaaatcccagcgtgagttggggcggtggaggccctgggaccgggtggggcacaagacccatgccacatccggaaggcatctggggcatcaacaaccagcctccaggcacctcgtggggcaacatcaacaggtatcccggaggaagttggggcaacatcaacaggtatccagggggaagctggggaaatattaatcgctatccaggtggatcatggggaaatatccacttgtaccccggaattaacaaccccttccctccgggagtactgcggccacccggatcttcgtggaatattccggctggcttcccaaaccccccatctcccagactgcaatggggctag

SEQ ID NO: 10267 - DNA, 2631 bp, synthetic construct
  misc_feature 1..2631: note = source = /note="Description of Artificial Sequence: Synthetic coding sequence"
  source 1..2631: mol_type = other DNA
atgggaccagaagccctgtctagcctcttgcttctgctcttggttgcatcaggcgacgccgatatgaaggggcatttcgatccagctaaatgcaggtatgctttggggatgcaggatcgcactatacctgattccgacatctctgccagtagtagctggagcgatagtaccgccgctcgccattcacgactagagtctagcgacggcgatggagcttggtgtcctgccggatccgtgtttccaaaggaggaagagtatctccaggtcgatctccagcggttacatcttgtggctctggtgggcacacagggtaggcacgcgggaggcctgggaaaggagttcagccgaagttaccggctgcgatacagtagagatgggaggcgctggatggggtggaaggaccgctggggccaggaagtaatcagcggaaacgaagatcctgagggcgtcgtcctgaaagaccttggtccccctatggttgcccgtctcgtccgcttttaccccagggcagatagggtcatgtccgtatgcctgcgcgtcgagctgtatggatgcctctggagggatggtttgctgtcttataccgcgccagttgggcagaccatgtacctgtccgaagctgtttacttaaatgacagcacttatgatggacacaccgtgggcggtcttcagtatggcggtctgggccagctagccgacggtgtagtgggccttgatgacttccggaaaagtcaggagctaagggtttggcccggttacgattatgttggatggtccaatcactccttcagcagtgggtatgttgagatggagttcgaattcgaccgcctgagggcctttcaggccatgcaggttcactgcaataatatgcataccctcggtgcgaggcttccaggcggtgttgagtgccggttcagaaggggtcctgccatggcttgggaaggcgaaccaatgaggcataatttgggcggtaatctcggggaccccagagcccgtgccgtgagtgttcctctgggagggagagtggccagatttctgcagtgtcgctttttattcgcgggtccatggcttctcttctctgaaatttcgttcatttctgatgttgtgaataactcttcccccgcattaggaggcacatttccgcctgccccatggtggcccccaggaccccctcccacgaacttttcctcactggaattagagcccagagggcagcagccagtggccaaggcggagggctcacccaccgcaattcttattggatgtctagttgcaatcatcctcctccttcttctcattatcgcactaatgctgtggcgcttacattggaggcgcctcctttcgaaagctgaaagaagggttttagaagaagaactgacagtccacttgtccgtccccggagacactattctgattaacaaccgcccaggcccacgagaacccccaccttaccaggagccaagaccaaggggtaatcctccccattccgctccctgcgttcctaacggcagtgcctacagcggagattacatggaacccgaaaagccaggagcacccctgctgcctccccctcctcaaaacagcgtaccccattacgctgaagccgatattgttacacttcagggcgtcacggggggaaatacatacgccgtccccgctcttccacctggagcggtcggtgatggaccgccacgcgtggacttccccagatccagactcaggttcaaggaaaaattgggagaagggcagtttggagaggtgcacctctgcgaggtcgattctcctcaggatttggtgtctctggatttccccttgaatgtgcggaaaggccaccccttgctggtggcagtgaagattttgcgtcctgacgctacaaagaatgctagaaacgacttcctcaaagaagttaagattatgtcccgacttaaggatccgaatatcataaggctgctcggcgtgtgcgtgcaagacgatccgctgtgtatgattaccgattacatggaaaatggagacttgaaccaattcctctcagctcatcagctggaagacaaggccgcagagggcgcaccgggtgacgggcaggccgctcagggcccaactatttcttatccgatgcttctgcatgttgcagcccagatcgcttcaggcatgaggtaccttgcaactttgaactttgttcaccgagatctggccaccaggaactgtttggtaggtgaaaacttcaccatcaagattgccgattttggaatgtcaaggaatttatatgccggagactattaccgggttcaaggcagggccgtgcttccaatccgatggatggcatgggagtgtattctcatgggaaagttcactactgcctctgacgtgtgggcctttggtgttacgctgtgggaggttctgatgctgtgcagagcacagcctttcggacagctgactgatgagcaagtgattgagaatgccggagagttctttagggatcagggaagacaggtgtatctgagtaggcccccagcatgtccacaagggttgtacgagctgatgctccggtgctggagtcgagagagtgagcagaggcccccattcagccagctgcataggttcctggccgaagacgccctgaacacagtttag

SEQ ID NO: 10268 - DNA, 672 bp, synthetic construct
  misc_feature 1..672: note = source = /note="Description of Artificial Sequence: Synthetic coding sequence"
  source 1..672: mol_type = other DNA
atgaaattcgtcccctgtctgttactggtgacccttagttgtctggggaccttaggccaagcccctcgtcagaagcagggaagtacaggcgaggagttccatttccaaacaggcggacgcgattcgtgtaccatgagaccatcctcgttagggcagggcgctggggaggtgtggttgagagtcgactgccggaataccgaccaaacttactggtgcgaataccgcggacagccgtccatgtgccaggccttcgctgcagatccaaagccctattggaatcaggctctccaagagctgagacgactgcaccacgcctgccagggcgcaccagtgctccgtccgtcggtgtgcagggaagccggaccacaggcacatatgcagcaggtgacaagctccctcaaaggttctcccgagccaaatcagcaacctgaggccggtaccccatctctgaggcctaaagctaccgtcaagttgaccgaggcaacccagttaggtaaggactccatggaagagctcggtaaagctaagcccacaaccaggccaactgctaagcctacccaacctgggccacgcccaggaggcaacgaggaggccaaaaagaaggcatgggaacactgctggaagcccttccaggcattatgcgcgtttctgatctcgttcttcagaggttag

SEQ ID NO: 10269 - DNA, 585 bp, synthetic construct
  misc_feature 1..585: note = source = /note="Description of Artificial Sequence: Synthetic coding sequence"
  source 1..585: mol_type = other DNA
atgaccatgaggcataattggacacccgaccttagtcctctctgggtgttattgctttgcgcacacgtggtgacgcttctcgtccgggctaccccagtgtcccagacaaccaccgcagctacagcaagtgtgcgatctacaaaggatccttgtccgtcacagccccctgtattcccggctgccaaacagtgccctgccttagaggtcacttggcctgaggtagaagtacccctcaacgggaccttgtcactgtcatgtgtggcctgctctcgcttccccaatttttctatcctttactggttaggtaatggctcattcatcgagcatctccctggaaggctctgggagggatcgacttcccgcgaacggggtagcacaggcacgcagctgtgtaaggctctggtcctggagcagctgacaccagccctgcattccactaatttctcctgcgtactggtcgacccagagcaagttgtgcagcgccacgtcgtcctggctcagctatgggccggtttgcgagccactctgcctcctactcaggaagcactgcctagctcacattcatctcctcagcagcaaggttag

SEQ ID NO: 10270 - DNA, 777 bp, synthetic construct
  misc_feature 1..777: note = source = /note="Description of Artificial Sequence: Synthetic coding sequence"
  source 1..777: mol_type = other DNA
atgattgccatctccgccgtctcatcagccctcctcttctcactgctgtgtgaggcatctaccgttgttctcctaaacagtacagattctagccccccaacaaacaacttcaccgacatagaagcagctcttaaggctcagctggattccgctgatattccaaaggcgcgtaggaagagatacatcagccagaacgacatgattgccattttggattaccacaatcaggttaggggaaaagtgttcccacctgcggctaacatggaatatatggtgtgggacgagaacctcgctaagtccgctgaggcctgggctgcgacgtgcatctgggaccatggcccttcatacctgctccggttcttgggccagaatttaagcgtgcgcacgggtcgttaccgtagtatcctgcaactcgtcaaaccctggtacgatgaggtgaaggactacgccttcccctatccccaggactgtaacccgaggtgtcccatgcgatgtttcgggccaatgtgcacacattatacccagatggtgtgggcgactagcaataggattggttgcgccattcatacttgccagaacatgaatgtctggggtagtgtgtggcgaagagctgtctatctcgtgtgtaattacgccccaaagggcaactggattggtgaagccccatacaaagtcggtgtgccttgcagttcctgcccgcctagttacgggggtagctgtacagataatttatgttttccaggggtcacctcgaattacctgtactggttcaagtag

SEQ ID NO: 10271 - DNA, 906 bp, synthetic construct
  misc_feature 1..906: note = source = /note="Description of Artificial Sequence: Synthetic coding sequence"
  source 1..906: mol_type = other DNA
atgctccctcttacaatgactgtcctgattctcttacttctccccaccggacaagccgcacccaaagatggcgtgacccggcctgattctgaggtgcagcaccaacttctgcccaacccattccagcccggtcaggagcaacttggcctactccagtcatacctgaagggcttaggcagaacagaggtccagttagaacatctatcgagagaacaggtgctcctgtatctcttcgccctccacgactatgatcaatccggtcagttggacgggctggagctgctgtctatgcttacggccgctctggcacccggtgccgctaacagccctaccaccaatcctgttatcctgatcgtggacaaggtgcttgagactcaggacttaaatggcgacggccttatgacgcctgccgagcttattaactttcctggcgttgccctgcgccacgtggaacctggagaacccctagccccttctcctcaagaacctcaggccgtgggacgtcagtccctgctggcaaaaagccctctgagacaggaaactcaggaggcccctgggccacgggaggaagctaagggtcaggtggaggcccgtagagagagcctcgatccagtccaggagccgggtgggcaggcagaggccgatggggatgtcccaggtcccagaggtgaagctgagggccaggccgaggcaaaaggggatgccccaggtcctcggggagaggctgggggacaggcggaggctgagggcgatgctccaggtcctcgcggtgaagcgggaggacaagccgaggcacgcgaaaatggtgaagaggcgaaagagctgcccggtgaaacccttgagtcaaaaaacacccagaatgactttgaggtacatattgttcaggtggaaaacgatgagatctag

SEQ ID NO: 10272 - DNA, 969 bp, synthetic construct
  misc_feature 1..969: note = source = /note="Description of Artificial Sequence: Synthetic coding sequence"
  source 1..969: mol_type = other DNA
atgaaaaccctggcaggcctggtgctcggcctcgtgatctttgacgccgcagtaaccgcacctacattggaaagcattaactacgattccgagacatacgacgccaccctcgaagacctcgacaatctgtacaattacgagaacatcccagtcgacaaggtagagatcgagatcgctactgtgatgccatctggcaatagagagttgctcaccccaccaccccagcctgaaaaggctcaagaggaagaggaagaagaggagtcaacaccacgcctgatcgacgggagcagcccccaagaacccgaatttacaggcgtgcttggcccacacacgaatgaagatttcccaacctgcctgctctgcacatgtatttctaccaccgtttattgcgacgaccacgaattggatgctatccctccattgcccaagaataccgcatacttttactcccgcttcaaccgtattaaaaaaatcaataaaaatgatttcgcttcactatccgaccttaagcgtattgatctgacctctaatctgattagtgaaatcgatgaggatgccttcagaaagctgcctcaactgagggagctggtcctccgcgacaataaaatcaggcagctgcctgaattgccgacaactctgacatttattgatatcagcaacaaccggcttgggcgtaagggcatcaagcaggaagccttcaaggatatgtacgacctccaccacctgtaccttaccgacaacaatctggaccatattcctttacccctgccggagaacctacgggctctccatctgcaaaacaacaatatcttggagatgcacgaagataccttctgtaatgtgaaaaatctaacgtacatccggaaggctctcgaggatatccgactggatggcaacccaataaacttgtcaaagacaccccaggcgtacatgtgcctgcctcggctcccagtgggctccttggtgtag

SEQ ID NO: 10273 - DNA, 618 bp, synthetic construct
  misc_feature 1..618: note = source = /note="Description of Artificial Sequence: Synthetic coding sequence"
  source 1..618: mol_type = other DNA
atggtgaatctcgccgctatggtttggcgaaggttattgcgcaaacgatgggtgctggcattggtcttcggtctgagccttgtttattttctgtcctccaccttcaagcaagaagagcgcgcagtccgggaccgcaacttactgcaggtccacgaccataaccagcctatcccctggaaagtgcagtttaacctgggcaattcttcacggccttctaaccaatgccgaaacagtattcagggcaagcacctgatcactgatgaactggggtatgtctgcgagcgcaaagatctgctggtgaacgggtgttgcaatgtgaatgtgccctccactaagcagtattgctgtgatggctgctggcctaatggttgctgtagcgcctacgaatattgtgtgtcctgttgtctgcaaccaaataaacagctgctgctggaaaggttcctcaacagagccgcagtggctttccagaacctgttcatggccgtggaagatcattttgagctctgcctggccaagtgtagaaccagctctcagagcgtccagcacgaaaatacgtatagggatcctattgccaaatactgctatggagagtctcccccagaactctttccggcttag

SEQ ID NO: 10274 - DNA, 3057 bp, synthetic construct
  misc_feature 1..3057: note = source = /note="Description of Artificial Sequence: Synthetic coding sequence"
  source 1..3057: mol_type = other DNA
atggtgagccattttatggggtccctgagcgttctgtgctttttgttacttcttggatttcagtttgtgtgccctcaaccaagcacacagcatcgaaaggtgccccagcgcatggccgctgagggcgcaccagaggacgacggaggcggtggggctcccggtgtctggggagcgtggggtccgtggtctgcctgctctcgaagctgctcagggggagtcatggaacaaacccgaccatgtctccctcggtcctaccgccttcgcggaggtcagcggcctggcgctcccgctagggcgttcgccgaccacgtcgtcagcgcagtccggactagcgttccattgcataggagtcgggatgagaccccggcacttgctggcactgatgccagcagacaggggcctaccgtcctgcggggtagtcggcacccccagcctcaggggctggaagttaccggtgacaggcgttctcggacaagaggaacaattggaccagggaaatatggctacggaaaagccccttatatcttgcctttgcaaacagataccgctcacactccacaaagacttaggcggcagaagctcagctccaggcactccagatcccagggcgcttcatcagctagacatggctacagcagtccggctcatcaagtgccgcaacacggtcccctataccagagcgactctggaccacggagcgggcttcaggcggcagaggccccaatttaccagttacctctcactcacgaccaaggctatccagcggcaagcagtctgttccactcgccggagacctccaacaaccatggggtaggaacgcatggtgccactcagagcttctctcagccagcacggagtacagctattagttgtatcggggcataccgccagtacaagctatgtaatacaaatgtctgtcccgagtccagtcgctcaattcgggaggtccagtgtgcttcctacaataacaaaccattcatgggtaggttttatgagtgggaaccatttgccgaagtaaaagggaacaggaagtgcgaacttaactgccaggccatggggtaccgattctacgtcaggcaggcagagaaggttattgacggtacaccctgcgaccagaatggcactgctatctgcgttagcggtcagtgcaagagcattggatgcgacgattatctgggcagcgacaaggtggtggacaaatgtggggtgtgcgggggagacaatacagggtgccaggtggtttccggagtgtttaaacacgccctgaccagtctcggttaccaccgcgtcgtcgaaattccagagggagctacaaaaattaatattactgaaatgtataaatctaacaactaccttgcacttagatcacggtcaggccgttctataattaacgggaattgggcaatcgatcgacctggcaagtatgaagggggtggtacaatgttcacgtataagagacccaacgagatctcaagcacagcgggtgagagctttctggcggagggtcctactaatgaaattctggatgtctatatgattcatcagcaaccgaatcctggggtccactatgaatacgtgattatggggacaaatgccattagcccgcaagtccctccccatcgcagacctggcgagcccttcaacggtcagatggtgacagaaggccgttcccaggaagagggagagcagaagggaaggaatgaggaaaaggaagatctgagaggggaggcccctgaaatgttcactagtgagagcgcccagacatttcccgtacgccatccggatcggttcagtccccaccggccagataatctggtgcctccagcgccacagccaccaagaaggtcccgcgaccacaattggaaacagcttggtacgacagagtgctccaccacttgcggtaaaggctcacagtatccaattttccgctgtgtccatcgaagtactcacgaagaggctccagaaagttactgcgattcatctatgaagccaactccggaggaagagccctgcaatatcttcccatgtcccgcattctgggatattggtgaatggagcgaatgcagcaaaacgtgcggactgggtatgcagcacaggcaggtgttgtgtagacaagtgtacgccaaccgctccctcactgtgcaaccgtatagatgtcagcacctggaaaaaccagagacaaccagtacctgtcagctcaaaatttgcagcgagtggcagattcgtacagattggacttcctgcagcgtgccctgtggcgtcggacaacgaaccagggacgtgaagtgcgttagtaacatcggggatgtggtggacgatgaggaatgcaatatgaaactacgccctaatgatattgagaactgtgacatgggcccatgcgccaagagctggtttctgaccgagtggtcagaacgatgctctgccgaatgcggcgcaggagtgcgcacgaggtccgtagtttgcatgactaatcatgtctcttctcttccactggagggctgcggcaacaatcgtcccgcagaagccacaccatgcgacaacgggccttgtactgggaaggtcgaatggtttgccggatcatggtctcagtgctctatcgagtgtggctctgggacacagcagcgggaagtcatctgtgtgagaaaaaacgctgacacgtttgaggtgctggatccctcagagtgtagcttcctcgagaagccgccttcccagcagtcttgtcacctcaaaccatgtggggctaaatggttctcaactgagtggtccatgtgttctaaatcttgccaggggggattcagagtgcgagaggtgagatgcctgagtgatgatatgaccctcagcaacctgtgcgatccacaactgaagcccgaggagcgggagtcctgcaatccacaggattgtgtccctgaggtagatgaaaattgcaaggacaaatactataattgtaacgtggtcgtgcaggcccgtctttgtgtgtacaactactacaaaactgcatgttgcgcaagctgcaccagggttgctaacaggcaaacaggcttcttagggagccgctag

SEQ ID NO: 10275 - DNA, 1503 bp, synthetic construct
  misc_feature 1..1503: note = source = /note="Description of Artificial Sequence: Synthetic coding sequence"
  source 1..1503: mol_type = other DNA
atgaagtgtaccgctagagaatggctgcgggttacaacggtgctgtttatggccagggcaatcccagccatggtcgtccccaacgcaacactcctggagaaattgctggaaaaatatatggatgaagatggtgagtggtggattgcgaaacagcggggtaagcgagctattactgataatgatatgcagtcaatcttagacctccataacaagctccgatctcaagtgtatcccaccgcctccaacatggagtacatgacttgggatgtggagctagaacgctcagccgaatcttgggccgagagctgtctgtgggagcatggccctgcctcccttctgccttcaattggacagaatctgggggctcattggggtagatacaggccaccaacgttccatgtgcagtcctggtacgacgaagtgaaagattttagctatccctatgaacacgagtgtaacccgtactgtccatttcggtgcagcggcccagtgtgtacccattacacccaagtggtgtgggctacaagcaaccggatcggatgtgccataaacctttgtcacaacatgaacatttggggccagatttggccaaaggctgtttacctcgtgtgcaactactcccccaagggtaactggtggggacacgccccatataaacacggaaggccatgctccgcttgcccacccagctttggtggagggtgtagagagaatctttgctacaaggagggctctgaccgttattaccctccaagggaagaggagaccaatgagattgagcgccaacagtcccaggtccatgatacccacgtgaggaccagaagcgatgacagcagcagaaacgaggttattagtgcacaacagatgagccaaatcgtttcttgcgaggtccgactgcgtgaccagtgcaaagggacaacatgtaataggtacgagtgccctgcaggttgtttggacagtaaggccaaagtgatagggagcgtgcactacgagatgcagagtagcatctgtagagcagcaatccactacggaataatagacaacgatggcggatgggtcgacatcacccgccaaggcaggaaacattactttatcaagtccaaccgcaatgggatccagaccatcggaaaataccaaagcgccaatagcttcaccgtgtcaaaggttacagtgcaggcggtgacgtgtgagactaccgtggaacaactttgcccgtttcacaaacccgcttcccattgcccacgagtgtattgcccaaggaactgtatgcaagctaatccccactacgctcgtgtgattggtaccagagtctattcagacctatcctccatctgccgggcagctgtacacgcaggggtggtccgcaaccacggaggatacgtggacgttatgccagtcgacaagaggaaaacatacatagcgtccttccagaatggcatcttctctgagtctctacagaaccctccaggaggaaaggcgtttcgagtgtttgccgttgtgtag

SEQ ID NO: 10276 - DNA, 2070 bp, synthetic construct
  misc_feature 1..2070: note = source = /note="Description of Artificial Sequence: Synthetic coding sequence"
  source 1..2070: mol_type = other DNA
atgaagtttggggcagtaacacggatcggaggacctcccttggggaatcagagcccaagtagttgttctctcctgcacgaaaaggatcccccaaccaccagcggtccccagacagaccagccaaagaaacatctcacaaatttcaagtcagcaacgcgcagggttgctagaacgcagtggctgaccgcagaccgccagacgtgggcaagtatcagcagcgtcccatgggctcaaactatttccgaaaaaaagccagggggttccctgtgggaaacaaggtctagccccccaacgaccgcgggtacagaggaggccatgaatacaaccagtttgctggcccctgcagccgaaatcatggcgacaccgggaagcccatcccaggccagtccgactcttggtgcatttactcatggtacccagactccctcccccactaaggccacagctccgcgatacccccaaacgggcgatctctcggctgagtggccctttaccgccggtgaggaaccagtgctggtgccaagaccccatcaggttagcagagtccgcagctcatgctgcctcagtccaattttgtgcagtcctgctatgattgcatttctgctgacctccgtcctcatgattccacacgccggaggtcatcctttggatacaccacacctaccacaggagttacctcccggattacccaacaatattaacattacgtttttcagcggtatgttcaagaatgttgaatcagtagctgagatctttgattgcctgggtccccacttcacttggcttcaggccgttttcacaaactttccagtgctcatccagttcgtcaacgggatgaaatgtgttgctggcctgtgcccacgcgactttgaggactatggctgcacctgccggtttgaaatggagggcctgcccgtggacgaaagcgattcctgttgctttcagcacagaagatgctatgaggaggctgctgagatggattgcctgcaggatcctgccaagcttagcacagaggttaattgtgtatctaagaaaataatttgcgagtccaaggataattgtgaacatctgctgtgtacttgtgataaggccgctatcgaatgcctggccagaagttccctcaactcgagtttgaacttgctcgatacgtccttctgtctggcgcaaacacctgagacgaccattaaagaggacctgacgactctgctgcctcgagtggtacctgtcgaacctacagacacttctcttacagccctgtccggagaagtagcggctgaaactgaagcggaccggctgatcacacttagcaagaaaaaggccggtcatgaccaggaaggagtgggggcagccagagcgacatcaccccctgggagcgccgagatcgttgccacccgcgttaccgctaagatcgtgacattggtaccggcaggcatcaaatccctggggctcgccgtaagcagtgtggagaacgaccctgaggaaacaactgagaaggcatgcgaccgctttaccttcctacacctcggaagcggggataacatgcaggtgatgccacagctgggtgaaatgctcttttgtctaaccagtaggtgccccgaggaattcgaatcctacggctgctattgcgggcaggagggcagaggggagccccgagacgatttggatcggtgttgtctgagccatcattgctgtctggaacaggtgcgcagattgggttgccttctggaacgacttccttggtcccctgtggtatgtgtcgatcacacaccaaagtgtggtgggcagtctctatgtgagaaactgctctgtgcctgcgaccaaacagctgcagagtgtatgacgagcgcatcttttaaccagtccctgaagtccccgagtcgattgggatgccccggacaacccgctgcgtgcgaggacagcctccaccccgttcccgctgcacctacacttggcagttccagtgaggaagattcagaagaggacccgccacaggaagacctgggtagagcaaagcgcttcctccggaagagtctcggacccttgggcatcggcccactgcatggacgttag

SEQ ID NO: 10277 - DNA, 1359 bp, synthetic construct
  misc_feature 1..1359: note = source = /note="Description of Artificial Sequence: Synthetic coding sequence"
  source 1..1359: mol_type = other DNA
atggaactagctctgagacggtccccagtgcctcgatggctgctcctcctgcccctgctgctcggcctcaatgcgggagcggtgattgattggcccactgaggaggggaaagaggtgtgggattacgtcactgtaagaaaggatgcctacatgttttggtggctgtactacgcaaccaattcttgtaagaatttttctgaacttcctctggtgatgtggttgcaggggggacccggagggagtagcacaggttttgggaattttgaagaaataggtcctctcgactcagatttgaaacctcggaaaacaacttggttacaagctgccagcctactgttcgtcgataaccccgtcgggacaggttttagctacgttaacgggtctggagcctacgcaaaagacctggctatggttgctagcgacatgatggtgctcttgaaaaccttcttctcttgtcataaagaattccagaccgtcccattttacatcttcagcgaaagttacggagggaagatggctgccggaattgggcttgagctctacaaggccatccagcggggaacgatcaaatgtaacttcgccggagtcgcactgggtgactcgtggatttctccggtagattccgtgctgagttggggcccttacttatacagcatgtccctgctcgaggataaagggctggctgaagtgagcaaggttgccgagcaagtgctgaatgccgtcaataaaggtctgtatcgagaggccaccgaactatggggaaaagctgagatgatcatcgagcagaacacagacggtgtcaacttctataatattctgacgaagagcacacccacatctactatggaatcatccctcgagttcacccaatcccatcttgtgtgtctttgtcagaggcacgtcagacacttgcaacgggatgctttgagccagttaatgaatggcccaatccgaaaaaaactaaaaattattcctgaggatcagtcgtggggcggacaggccaccaacgtgttcgtgaacatggaagaagactttatgaagcctgtgattagtattgtggacgagttgctagaagctgggatcaacgtgacagtgtacaacggtcagcttgacctgatcgtggatacgatgggtcaggaggcctgggtgagaaagctgaaatggcccgagctgcccaagtttagccagttgaagtggaaggccttatactctgatccgaagtccctggaaactagtgcctttgtgaagtcatacaaaaatctggctttctattggatcctgaaggctggtcatatggtgccttccgatcagggcgacatggcccttaagatgatgaggctagtcacacagcaggagtag

SEQ ID NO: 10278 - DNA, 1395 bp, synthetic construct
  misc_feature 1..1395: note = source = /note="Description of Artificial Sequence: Synthetic coding sequence"
  source 1..1395: mol_type = other DNA
atggtgaggctggccgctgaactcttacttctgctgggacttctattacttaccctgcacatcaccgtactcagaggcagtggcgctgcggatggcccagacgctgcggctggaaatgcatcccaggcccagttgcagaacaacctgaatgtggggtccgataccacctctgaaacatcatttagcctctcaaaggaggcccctagggaacacttggatcatcaggctgcacaccagcccttccccaggccacgatttcggcaggagaccgggcatcccagtttacagcgggacttcccacgctctttcctgctggacctacctaatttccccgacttgtccaaggccgatatcaatgggcagaaccctaatatacaagtgactatagaagtagtcgatggccctgacagtgaggccgacaaggatcagcatcctgaaaataaaccatcttggagcgtgcctagccccgactggcgagcctggtggcagagatcactgtccctcgccagagctaattctggtgatcaagactataagtatgattcaactagcgacgacagtaattttctgaaccctccacggggttgggatcataccgctcccggacaccgtaccttcgagacgaaagatcaaccagaatatgacagtacggatggagagggcgattggagcctgtggtctgtgtgcagcgtgacatgtggtaatggcaaccagaagaggacacggtcatgcggatacgcgtgcaccgctacggaaagccgcacatgtgatcggccaaattgccctggcatcgaggacacattccgaacagccgctacagaggtatcattgctggccggatctgaagaattcaacgctacaaaattgtttgaagtggacactgattcatgcgaaagatggatgtcatgcaagtcagagttcctcaagaagtacatgcataaggttatgaacgacctcccttcatgcccctgttcctaccccaccgaagtagcctacagtaccgcagatatcttcgacagaatcaaacggaaagatttcagatggaaggacgcctcaggcccaaaggagaaactggagatctataaacctaccgccaggtactgtattaggagcatgctatcgctggagagtaccacgcttgccgctcaacattgctgttatggcgacaacatgcagttgataacccgcggtaagggggcaggtacccccaacttaatttcaaccgagttttccgcggagctgcattacaaagttgacgtgctgccttggattatttgtaaaggcgactggtctagatacaatgaggcacgcccaccaaataatggccagaagtgcaccgagtccccaagtgacgaggactatataaaacaattccaggaggctagagagtattag

SEQ ID NO: 10279 - DNA, 1536 bp, synthetic construct
  misc_feature 1..1536: note = source = /note="Description of Artificial Sequence: Synthetic coding sequence"
  source 1..1536: mol_type = other DNA
atgctggttgatggaccatctgagaggcctgcactgtgctttttattattggcggtggcaatgtctttttttggcagcgccttatccatcgacgagacccgggcacacctccttttgaaggaaaagatgatgagactcggcggacgtctggttttgaataccaaagaagagctggcaaatgaacgtttgatgacactgaaaattgcagaaatgaaggaggccatgagaacgctcatatttccaccttcaatgcacttcttccaggctaagcatctgatcgaacggagccaagtgttcaacatactgaggatgatgcccaagggagcagcactccaccttcacgatatcggaatcgtgaccatggactggctcgtgcgtaacgtgacctaccgaccccattgccatatctgctttacgcctcgagggattatgcagtttagattcgcccatcccaccccaagaccgagcgaaaagtgcagtaagtggatcctcctcgaggactataggaagcgagtgcagaatgtgacagaattcgacgatagcctcctgcgcaacttcactctggtgacacagcatcctgaagtcatctacactaaccagaatgttgtgtggtcaaagttcgagacaattttcttcactatcagtggcctcatccactatgccccagtgtttcgcgactatgtgttcagatccatgcaggaattctatgaggacaatgtgttgtacatggaaattagagctcgcctgctgcctgtctatgaattgtcaggagagcaccacgatgaggagtggtcagtcaagacgtatcaggaagtggcccagaagtttgtggaaacccacccagaatttattggaattaagattatttactcagatcatagatctaaggacgttgctgtaatagccgagtccattaggatggccatgggcctgaggattaagttccctaccgtagtggcgggtttcgacttggtcggtcacgaagacacaggccactctctgcatgactacaaggaagcccttatgatccccgctaaagacggcgtaaaacttccttatttctttcacgccggagaaacagactggcaggggacatcaatcgacaggaatatattagatgctctgatgctcaatactactcggattgggcatggcttcgctctctctaaacatcctgctgtgcggacttattcctggaaaaaggatattcccatagaggtttgcccgataagcaaccaggttctcaaacttgtgtcagatctgagaaaccatcctgtggcaactttgatggccaccggccatcccatggtgatcagtagtgacgaccccgctatgtttggcgctaaaggactatcttatgatttttacgaagtgtttatgggaataggtggaatgaaggcagatctgcggacactaaagcagctggcaatgaactcgattaagtactctactttacttgagtccgagaagaatacttttatggaaatctggaaaaaacgatgggataaatttatagcagatgtagctaccaagtag

SEQ ID NO: 10280 - DNA, 777 bp, synthetic construct
  misc_feature 1..777: note = source = /note="Description of Artificial Sequence: Synthetic coding sequence"
  source 1..777: mol_type = other DNA
atgaagcagattctgcatcccgctcttgagaccactgctatgacactgtttcccgtgctactcttcctggtcgcaggcctgctcccgagcttccccgcaaatgaagacaaggaccctgccttcactgcgctgctcactacccaaacacaggtgcagagggagattgttaataaacacaacgaactcagaagagctgtttctccacccgcacggaatatgctcaagatggaatggaacaaagaggcagcagcgaacgcccagaagtgggcgaaccaatgtaattatcgtcactcaaaccccaaagacaggatgaccagcctaaagtgtggggaaaatttgtacatgtcttccgcatcgtccagttggtcacaggctattcagtcgtggttcgacgagtataacgattttgattttggcgtagggcctaagacacctaacgctgtggtcgggcactacacgcaggttgtgtggtacagttcttatctggttggatgcggcaacgcctactgtccaaaccagaaagtgctgaaatactattatgtgtgccagtactgcccagcaggaaactgggcgaacaggctatatgttccatatgagcagggcgcaccttgtgcgtcctgcccagacaactgcgacgacggcctgtgtacgaacggctgcaagtacgaagacctctacagtaactgtaagtccctgaagttaacattgacttgtaaacatcagctggttagggactcctgcaaggcatcctgtaactgcagtaacagcatctactag

SEQ ID NO: 10281 - DNA, 714 bp, synthetic construct
  misc_feature 1..714: note = source = /note="Description of Artificial Sequence: Synthetic coding sequence"
  source 1..714: mol_type = other DNA
atggtgactcctcccccaccaccagtgttctctctgcttaagatcagccagcggattgtgtgcctcgtcttagataagtccggcagcatgggagggaaggacaggcttaacaggatgaatcaggctgccaaacatttcttactgcagactgtcgagaacggaagttgggtgggcatggtacatttcgactcaacagccacaattgtgaacaagctgatccagattaagtcatccgacgagcgcaatacactcatggcaggactgcccacatatccactggggggtacttccatatgcagcggaattaagtacgccttccaagtgatcggagagctccattcccagttagacgggtctgaagtccttctcctgaccgacggcgaggacaatacggcctcctcgtgcatagacgaggttaagcagtcaggcgcaatcgttcattttatcgcactgggcagggctgccgacgaagcagttatcgaaatgtccaaaatcactgggggaagtcatttctacgtgagcgacgaggcccagaacaatggccttattgatgctttcggggctctcacctctggaaacactgacttgagccagaagtcgctccaggtgcgtgtgctgattccatgggtgtttatgtttacctttgctactaggaaaaaccatcttgtcgtgattagcttcgaatttcatatattcctgaaggtgaatttctag

SEQ ID NO: 10282 - DNA, 459 bp, synthetic construct
  misc_feature 1..459: note = source = /note="Description of Artificial Sequence: Synthetic coding sequence"
  source 1..459: mol_type = other DNA
atggacaacgtgcagcctaaaataaagcaccgaccattttgtttctccgtgaagggccatgtcaaaatgctgaggctcgccctgaccgtcacaagcatgacgttctttatcattgcccaagctcccgagccctacattgtgatcaccggatttgaagtgaccgtgattttgtttttcatattactctacgtgctcaggctggatcgtttaatgaaatggttgttttggccccttcttgacatcattaactcacttgtaactacagtgtttatgttgattgtgtcagtgctagctcttattcccgagaccaccacattaaccgttggtggcggtgtgtttgctctcgtgacggccgtgtgctgcctggcagacggtgctctgatttatcgtaagctgctgttcaacccatctgggccttatcagaagaaacccgtccacgagaagaaagaggttctttag

SEQ ID NO: 10283 - DNA, 3744 bp, synthetic construct
  misc_feature 1..3744: note = source = /note="Description of Artificial Sequence: Synthetic coding sequence"
  source 1..3744: mol_type = other DNA
atgttggctagtagcagcagaattagagccgcttggacacgagcactgctcttgccattgctcttggctgggcctgtcggatgtctgtctcgccaggagctgttcccttttggcccaggacaaggagaccttgagctggaagatggagatgatttcgtgtctcccgctctcgaactatcaggagctctccgcttttacgacaggagtgacattgacgcggtctacgtgacaaccaacggtattatagccaccagtgagcctccggctaaggagtcgcatccagggctcttcccccctacgtttggcgctgtcgccccttttctggccgatctggataccacggacggcttgggtaaggtgtattatcgggaggaccttagtcctagtattacacagcgcgcagcagagtgcgttcatcgtggcttcccagagatctcctttcaaccttcgagtgccgttgtggtcacctgggaaagcgttgctccataccagggacccagccgggatcctgatcagaagggcaagcggaacacctttcaggcagtgctggcctcctctgactcaagctcatacgcaatctttttgtaccctgaggatgggttgcagttccacactaccttctctaaaaaagagaataatcaggttccagctgttgtcgcttttagtcagggcagtgtggggttcctgtggaaaagcaacggggcttacaacatattcgccaacgatagggagtccgttgaaaacctggcaaaatccagcaacagtgggcagcaaggcgtgtgggtgtttgaaatcggcagtcctgccaccaccaacggcgtggtccccgctgatgtgatattaggcactgaagacggcgctgagtacgacgatgaggatgaagattacgacttggcaacaacccgtttagggttagaagatgtaggtaccacgcccttttcttataaggccctgcggcgaggcggagccgacacttacagcgtaccctcagtgctctctccaaggcgcgcagccacagagcgcccactgggccctccaaccgagcgcactagatcttttcaactggccgtcgaaacttttcaccagcagcacccccaagtgatcgacgtcgatgaggtcgaggagacaggtgttgtattttcctacaatactgattcaagacagacttgcgcgaacaatagacaccagtgcagtgttcatgcggagtgccgcgattacgcaaccgggttctgctgttcctgcgtagcgggttacacaggcaatggaagacagtgtgtcgccgaaggttctccccagcgcgtgaatggcaaagtgaaagggcgaatcttcgtggggtcaagccaagtgccgatagtatttgaaaacacagaccttcatagctacgtcgttatgaatcacggcagatcttacacggcgatctcaaccatcccggaaactgtggggtactccctactgcccctggcgcctgtgggaggcatcatcgggtggatgtttgccgtggagcaagatggcttcaagaacgggtttagcattacagggggtgagttcacccggcaggccgaagtcacttttgtaggccaccctgggaatctcgtgattaaacagcggttctctggcattgatgagcatggccatctcaccatagacactgagttggaaggccgagtacctcagattcctttcggaagctctgtccacatcgagccatatacggaactgtatcattactctacgagcgtgataacctctagctctacaagagagtatactgtgacagagcctgagagggacggagctagtcctagccgaatttacacatatcagtggcgacaaaccattactttccaggagtgcgtgcacgacgacagtaggccagcactgcccagcacacagcagctctctgttgactctgtgtttgtcctttataaccaggaagagaaaatattgagatatgcgctatccaactccattggccctgtgcgcgagggaagccctgacgcccttcagaatccctgctacatcgggacacacgggtgtgacacaaatgctgcttgcagaccaggcccaaggacacaattcacttgcgaatgttctatcggcttcagaggagatggcagaacctgctacgacattgacgaatgctccgagcagccatccgtgtgtgggagccataccatctgcaataaccaccctgggacctttcgctgtgaatgcgtggagggctaccagtttagcgatgagggtacatgcgttgctgtggtggatcagcgtcccatcaactactgtgaaacaggactgcataattgcgatatcccacagcgagcacagtgcatctatacaggaggatcatcatatacttgcagttgccttccaggattcagcggcgacgggcaagcctgccaggatgtggacgaatgtcagcccagccggtgtcaccctgatgcgttctgttacaatacccctggaagtttcacctgccaatgcaaaccaggctaccagggcgacggcttcagatgtgtgccaggggaagtggaaaaaactcgctgccagcatgagagggagcacatcctgggggctgccggtgcgaccgacccccagagacccatccccccagggctattcgttcccgagtgcgatgctcatggtcactacgcccctacacagtgtcacggcagcacggggtactgttggtgcgtggaccgagatggaagggaagtggagggtacaaggacacgacccggtatgacccctccatgcctatcaaccgtggccccacctatccaccagggacctgccgtccccaccgccgtgatcccactcccccctggaactcacttactcttcgcccagacaggcaagatcgagcgactgcccctcgagggcaatacgatgcgtaagacagaagccaaggcctttcttcatgtgcctgctaaggtgatcattgggctggcttttgattgtgtggacaaaatggtgtattggactgatataactgagccaagtatcggacgtgcaagtcttcacggcggtgaaccaacgaccatcatccgccaggatcttggcagtcccgagggcattgcggtggaccatctgggcagaaacatcttctggaccgatagcaacctcgacagaatcgaggtggctaaacttgatgggactcaaagaagggtcctgtttgaaaccgatttagttaaccccaggggtatcgtcacagactcagttaggggcaatttgtactggactgattggaatcgcgacaatcccaagatcgagacaagctacatggacgggacaaacaggcgaattctggtccaagacgacttgggccttcccaacgggctgacctttgatgcctttagttcccaactctgctgggtggacgcgggaacaaatcgggcagagtgcctgaacccttctcagccgtcccggaggaaggctctagaaggactccagtacccgttcgccgtgacaagttacgggaagaatttgtatttcaccgattggaagatgaactccgttgttgcgcttgatctggctatatcaaaggagaccgacgcctttcagccccataaacaaacccggctgtacgggatcactactgctctgagtcagtgcccacaagggcacaactactgttctgtgaacaatggtggatgcacccacctctgcttggctaccccaggaagccgaacctgccgctgtccagacaacactctcggtgtagattgcatcgaacagaaatag

SEQ ID NO: 10284 - DNA, 525 bp, synthetic construct
  misc_feature 1..525: note = source = /note="Description of Artificial Sequence: Synthetic coding sequence"
  source 1..525: mol_type = other DNA
atgctgagaaccgaatcatgcagaccaagatcacctgcaggccaagtcgccgcagcctctcccctactgctgctcctgctacttttggcatggtgcgctggggcttgtcgcggagcacctatcctgccccagggcttacagccagaacagcagctacagctctggaatgagattgacgatacctgttcctcattcctcagcattgactcacagcctcaggcctccaacgcactggaagagctgtgtttcatgatcatgggaatgctccctaagccccaagagcaggatgaaaaggataatactaagagatttctcttccactattctaagacacagaagctgggtaagagcaacgtagtcagtagtgtggtgcacccattgctgcaacttgtccctcacctgcatgagaggcggatgaagcgcttccgcgttgatgaagagttccaatcccctttcgctagtcagagccgtggttactttttgttcaggcctcgcaacgggaggcgttcagccggatttatttag

SEQ ID NO: 10285 - DNA, 1218 bp, synthetic construct
  misc_feature 1..1218: note = source = /note="Description of Artificial Sequence: Synthetic coding sequence"
  source 1..1218: mol_type = other DNA
atggacactatatttctctggtccttgttattacttttcttcgggtcacaggcctctagatgttccgcccagaagaacacagagttcgcggtggatctctatcaagaggtaagtttgagtcacaaagataacatcatcttctccccactaggcatcacacttgtgctggagatggtgcagctcggggcaaaaggaaaagcacaacagcaaatccgacagactcttaaacagcaggagactagcgcaggtgaggagtttttcgtcctcaagtccttcttttccgctatatctgaaaaaaagcaagagtttaccttcaacctggctaatgcactctatctgcaagaaggattcactgtcaaagaacagtatttacacgggaacaaggagtttttccagtccgctattaagctggttgactttcaagatgcaaaggcctgcgccgagatgatctctacctgggtcgaaagaaagacagatggcaaaattaaggatatgttctcgggagaagagtttggtccacttacgagactagttctcgtcaacgccatttacttcaagggggactggaaacaaaagttccgaaaggaagacacgcaacttatcaattttactaagaaaaatgggagcaccgttaaaattccaatgatgaaagcccttttacgaaccaaatatgggtacttcagcgaaagcagcctcaactaccaggtactcgagctttcatataagggagacgagttctcacttataatcattcttccagccgaggggatggatattgaggaagtcgagaaactcatcaccgcgcagcaaatactcaaatggctttccgaaatgcaagaggaagaggtcgagatatcactccctaggtttaaagttgagcagaaagtggacttcaaagatgtgctgtattcactcaatatcacagagatcttttcagggggttgtgatctgagtggtattacagactcctctgaagtatatgtgtctcaggtgactcagaaggtcttctttgaaataaatgaagacggctccgaagccgctacatccacagggattcacatccctgtcatcatgagcttagcccagtctcagtttatcgctaaccatcccttcttgttcattatgaagcataatccaacagagagcatcctcttcatggggagggtgacaaaccccgatacacaggagatcaagggcagggatttagactccttgtag

SEQ ID NO: 10286 - DNA, 3687 bp, synthetic construct
  misc_feature 1..3687: note = source = /note="Description of Artificial Sequence: Synthetic coding sequence"
  source 1..3687: mol_type = other DNA
atgaagggagcaagattgttcgtcttgctgtcctcattgtggagcggtgggataggtttgaacaattcaaaacacagttggacaatccctgaggatgggaacagccagaagactatgccttcagcatccgtcccacccaacaagatccagtccctacagatcctgcccacaacccgtgtgatgtcggcagaaattgcgaccacaccagaggccaggactagtgaggactcactgctgaagtccacattgccgcctagcgagacaagtgccccagccgaaggcgtgcgtaaccagactctcacttctaccgagaaggccgagggcgtggtgaaattacagaacttaacacttccaacgaacgcatctattaagtttaatcctggcgcagagtcggtggttctttcaaattcaaccctgaagttcctgcagtcttttgctagaaaaagcaatgagcaggctacatcactgaacacagttggcggaacagggggaattggcggtgttggaggcaccgggggagtcggcaatcgtgctcccagagagacgtatctgtctcgaggcgattcatccagttcccaacgcacagattaccagaagagtaatttcgagacaacccgtggcaaaaactggtgcgcatacgtgcatacgaggctaagtcctacagtgatccttgacaatcaggtgacctacgtacccggtgggaagggcccttgtggatggaccggcggttcttgtccccaacgctcgcagaaaatcagcaatccagtttaccgcatgcagcacaaaattgtcacaagtctggattggaggtgctgcccaggatactccgggcctaagtgccagctgagggcccaggagcaacagtcattgatacacaccaatcaggctgaatcccataccgctgtaggccgtggcgtcgcagagcagcagcagcagcaaggatgcggcgatcctgaagtgatgcagaagatgactgaccaggttaactatcaggctatgaaattaaccctcctgcagaaaaaaatcgataacatctcacttacagtcaacgacgtgcgtaacacttacagtagtctggagggaaaggtcagcgaggataagtccagggagttccagagcttactgaagggcctgaaaagcaaaagcataaacgtgctcattcgggacatagtgagagagcagtttaagatcttccagaacgacatgcaggagaccgtggcacagttgttcaaaacagtgtcaagtttgtccgaggatttggaatctaccagacagattatccaaaaggtgaacgaatccgtggtatctatcgctgcgcagcagaagtttgtattggtgcaagaaaaccggcctactttgacagatatcgtggagctgcgcaaccacattgttaatgtgcgccaagagatgacattgacatgcgagaaacccatcaaggagctggaggtgaagcagacccacctcgaaggcgctcttgagcaggaacatagccggagtatcctgtattatgagtctcttaacaagactttatccaagctgaaggaggtccatgagcaattactgtcaaccgagcaagtgagcgaccagaagaacgcaccagcagctgagagtgtgagcaataacgtgaccgaatacatgtcaaccttgcacgaaaacattaaaaagcagagcctcatgatgctgcaaatgtttgaggatttgcacattcaagagtctaaaatcaataacttaacggtctccctcgaaatggaaaaagagtcacttcgtggcgaatgcgaagacatgctgtcaaaatgccgcaacgattttaagtttcagcttaaggatacggaagaaaatcttcacgtactcaatcagacactcgcggaggttctgttccccatggacaataagatggacaagatgagtgagcagttgaatgacctcacctacgacatggaaatcctccaacctttattggagcagggagcctccctgcgtcagacaatgacctatgaacagccaaaggaggccatcgtcatccgcaaaaaaatcgagaacctgacctccgccgtcaactcgctgaactttatcataaaagagctgactaaacgccacaacttgctccggaacgaagtgcagggcagagatgatgccctggaacgacggataaacgagtatgctctcgagatggaagacggactgaataagactatgaccattatcaacaacgccattgatttcatccaagataactatgcactcaaagaaacactgtccacaattaaggataactcagaaattcaccataagtgtaccagcgatatggagaccattctcactttcatccctcagttccatcgactaaacgatagcattcagacactagtcaacgacaaccaaagatataatttcgtactgcaggtagccaagaccctagctggaatacccagggacgagaaactgaatcaatccaactttcagaagatgtaccagatgtttaatgagactacttctcaggtgagaaaataccagcagaacatgtctcacctggaagagaagttgctgcttacgaccaagatatcaaaaaatttcgaaacaagactgcaggacatagagagtaaggtgacccaaacactgataccttattatatctctgtaaaaaaagggagtgtggtcaccaacgaacgtgaccaggccctgcagttgcaggttctaaacagtaggtttaaagccctggaggcaaagagtattcacttgtccattaattttttctctttaaataagaccctgcatgaggtgctcactatgtgtcacaacgccagcacaagcgtcagtgaactcaacgccacaatccccaagtggatcaaacactccctacctgatattcagcttctccagaaaggattaacagaatttgttgaaccaatcatccaaattaagacacaggctgctcttagtaacctgacgtgctgtatagacaggagtctgcccggttccctggccaatgtcgtgaaatctcagaagcaggtgaagagcctgcctaagaaaattaacgccttgaaaaagccgaccgtcaatctcaccacagtgctgattggacgcacacagcgaaacacagataacattatttatcctgaagagtacagcagttgttcaaggcatccgtgtcaaaacgggggaacctgtattaacggcaggacctcgttcacttgcgcctgtaggcatcccttcacaggagacaattgcactattaaactggtggaggaaaacgcgttagcaccagactttagcaaggggagctacaggtatgcacccatggttgcgttctttgcttctcacacttatgggatgacgatcccagggccaatcctgtttaacaatctggacgtgaactatggcgcttcctatacccctaggacaggcaagtttaggatcccctacctgggggtgtatgttttcaagtataccatagagtcatttagcgcacatatcagcggatttttggtggtcgatggcatcgataaactagcatttgagagcgagaacatcaacagtgaaattcactgtgacagggtgctgaccggcgatgccctgctggagcttaactacggacaggaggtgtggctccggctggccaagggaactatacccgcaaaattcccacccgtgactacattttctggttacctgctctaccggacctag

SEQ ID NO: 10287 - DNA, 1365 bp, synthetic construct
  misc_feature 1..1365: note = source = /note="Description of Artificial Sequence: Synthetic coding sequence"
  source 1..1365: mol_type = other DNA
atgtggcccctcactgtgccacctccgcttctacttttgctttgtagcgggctggcaggccagacgctgtttcagaaccctgaggaaggctggcaactgtatacttcggcccaggctccagacgggaaatgtatttgcactgcggtgatccccgctcagtctacttgtagcagggacgggcgatcgcgagagttgagacaacttatggaaaaggttcagaatgtatcccagtctatggaagtgctggagctgagaacatatcgggatttacagtatgtaagaggaatggagacccttatgaggtctctggatgcgaggttgagagctgctgacggcagcttgtcggcgaaatcatttcaggaactgaaagatcgcatgacggagttactccccctctcttcagttcttgagcagtacaaagcggacactcgcactattgtccgcctcagggaagaagtccgtaacctgtccggttcattggctgcgatccaagaggagatgggggcatacgggtacgaagacctccagcagcgcgtcatggccctggaagcacgtctgcacgcctgtgctcaaaagctggggtgcggcaagctcaccggagtcagtaaccctataacggtgagagccatggggagtcggttcggttcctggatgaccgataccatggccccttccgccgacagccgggtgtggtatatggacgggtactacaagggcaggcgcgtcttagagttcaggactctgggtgactttatcaaggggcaaaattttatccaacatttattgccacagccctgggcaggcacaggccatgtggtgtataatgggtccctcttttataataagtaccagtctaacgtggtcgtgaagtaccactttcggagtcgaagtgtccttgtacaaagatctctccctggcgctggatacaacaacacctttccctatagctgggggggtttttctgatatggatttcatggtagacgagtctgggctttgggctgtttacacaaccaatcaaaacgccggaaatatagtggtcagcagattagatccccacactttagaagtcatgagatcttgggataccggttatccgaagcgctctgccggtgaggcattcatgatctgtggggtgctctacgtgactaactcacacctggcaggggctaaggtttacttcgcttattttacaaacacctcctcatacgagtataccgacgtgccctttcataaccagtacagccacatctccatgctggattataatcctcgtgaaagggccctctacacatggaataacgggcatcaagtattatacaatgtcacactattccacgtgatctctaccagcggcgatccctag

SEQ ID NO: 10288 - DNA, 909 bp, synthetic construct
  misc_feature 1..909: note = source = /note="Description of Artificial Sequence: Synthetic coding sequence"
  source 1..909: mol_type = other DNA
atgtgcgccgagagactgggtcagttcatgacactggctctggtccttgccacttttgatccagcacgaggtactgacgcgacaaaccctccagaaggaccccaggaccgtagctcacagcagaaaggacgactgtctctgcaaaacactgcagagatccagcattgtcttgttaacgccggtgacgtgggatgtggagtgtttgaatgctttgagaataatagctgtgaaattcgcggactacacggtatttgcatgaccttcctgcacaatgccggaaaattcgatgctcagggcaagagtttcatcaaggatgctttgaagtgcaaggcccatgcactacgacaccgattcggctgcatctctcgaaaatgtcccgctataagagaaatggtatcacagctgcagcgggagtgttacctgaagcacgatttgtgtgccgctgcacaggaaaacacaagagtcatagtggaaatgatccactttaaagatctccttctccatgagccatacgtggatttggttaatctcctgctgacatgtggcgaggaggtgaaggaagccatcacccactccgtccaggtccaatgcgaacagaattggggaagtctgtgcagcattttgtcgttttgtacttcggctatccagaaacccccaacggcccctcctgagaggcagcctcaggtcgataggaccaaactctcaagagcccaccacggggaggcgggtcatcacctccccgagccaagctcacgtgagaccgggagaggtgctaaaggggagagggggagcaaatcccaccctaatgcgcacgcacgcggacgtgtgggaggcctaggagctcagggaccaagcgggtcgagcgaatgggaggatgagcagtctgaatactccgatatacgcagatag

SEQ ID NO: 10289 - DNA, 2529 bp, synthetic construct
  misc_feature 1..2529: note = source = /note="Description of Artificial Sequence: Synthetic coding sequence"
  source 1..2529: mol_type = other DNA
atgaaacccggtgggttttggctccacctgacactgttaggggcatctcttcctgccgcactcggttggatggatccgggaacatctaggggcccagatgtgggtgtgggagagagccaggctgaggaaccacggagtttcgaagtgaccagaagagaggggctgtcgtctcacaacgagctgttagcaagctgcgggaagaaattttgttctagaggaagtcggtgtgtcctgtcgcgtaaaaccggagaacctgagtgtcaatgcctcgaggcttgtcgcccaagctacgtccctgtgtgtgggtccgacggacgcttctacgagaaccactgcaaacttcaccgtgctgcgtgtttgcttggtaagagaataaccgtgatccattcaaaagactgctttctgaagggggatacttgtactatggccggatacgcccgtctgaagaatgtgctgctggccctccagaccagactgcagcccttgcaggaaggggattctagacaggatcctgcctcacaaaagcgcctcttggtggaatccctcttccgtgatctagacgccgatggaaacgggcaccttagctctagcgagctcgcgcagcacgtgctgaagaaacaggacctggacgaggacttactagggtgtagccctggggacctactccggttcgacgattataattctgattccagcctcaccctgagagagttctatatggcctttcaggtcgtgcagttaagcctggccccagaagatcgcgtctctgtcaccaccgtcaccgtcggactgagtacagtcctgacttgcgccgtccatggggatcttagacctcccatcatttggaagcgaaacggcctaaccctgaatttcctggacctggaagacattaatgattttggggaggacgattcactctatattacaaaggtcactacaatccacatgggcaactacacctgccacgcatctggccatgaacagctgttccagactcatgtgctccaggtgaatgtgcccccagtgatccgtgtgtaccccgaatctcaggcgcaggaacccggagtcgcagcgtccttacggtgccatgcagagggcattcctatgcctagaatcacatggctgaaaaacggtgtggatgtctctacccagatgagcaaacagctgtccctcctggcgaacggctccgagttgcacattagtagcgtacgttatgaagacactggagcgtatacatgtattgcaaaaaacgaggtcggggtcgacgaggacatctcatccctcttcatcgaagacagcgcgcgaaaaacactagccaatatcctctggcgagaagaaggtctaagcgtgggcaacatgttttacgtgttttccgacgatggcatcattgtgattcatcctgttgactgcgaaattcaaagacatctgaagcctaccgagaaaatcttcatgtcatatgaggaaatctgcccgcagagggagaagaatgctacccagccatgtcagtgggtctccgccgtcaacgttcgaaatcgctacatctacgtggcacagcccgcactctccagggttcttgttgtagatattcaggcgcagaaggtcctacagagcataggggttgaccctcttcccgctaagttgtcatacgataaatcacatgaccaagtgtgggtactaagctggggcgacgtccataagagtaggcccagcttgcaggtaatcaccgaagcttctacgggccaaagccaacacttgatcagaacacctttcgccggagtggacgattttttcatcccacctactaatctgatcataaatcacatccggttcggttttatttttaacaagagcgacccggcagtccataaggtggatctagaaaccatgatgccactcaagacaatcggcctgcatcaccacggatgcgtacctcaggcaatggctcatacccacttagggggttatttttttatccagtgtcggcaggactcacccgcttccgcagcaagacagctgcttgtggattctgtcaccgactctgttctgggacccaatggggacgtgaccggcacccctcatacttccccagacgggcgttttatagtgtcggctgctgctgattcgccgtggcttcatgttcaagagataacagtaagaggggaaattcagaccctctatgatctgcagattaatagcggcatatctgatcttgcttttcagagatctttcacagagtcaaaccagtacaatatatacgctgccctacacaccgagcctgatctactgttcttggaactgtccacgggaaaggtgggaatgctcaaaaatcttaaagagcctcccgcaggaccagcacagccctggggcggaactcatagaattatgcgcgatagtggcctgttcggacaatacttactgacccccgcacgtgagagcttgtttttaataaacggccgtcaaaatacgttaagatgcgaagtgtccgggattaaaggtggaacaacggttgtttgggtcggcgaggtgtag

SEQ ID NO: 10290 - DNA, 2256 bp, synthetic construct
  misc_feature 1..2256: note = source = /note="Description of Artificial Sequence: Synthetic coding sequence"
  source 1..2256: mol_type = other DNA
atggctttccgcactatctgtgtccttgtgggggttttcatatgttccatctgtgtgaaagggtcaagtcagccccaggctagggtatacctgacttttgatgagctcagggaaactaaaacttcagaatattttagcctatcacaccaccccctagattatcggatcctgctcatggatgaggatcaggatcgcatatacgttgggtccaaggaccacattttgtccctcaacatcaacaatatcagccaggaagctctctcggtgttttggcctgcctctaccattaaagtggaggaatgtaagatggccggtaaggatcccactcatggatgtggcaacttcgtccgcgttattcaaaccttcaacaggacacacctctacgtgtgtggctctggggcattcagccccgtgtgtacatacctaaaccgcggtaggcgaagtgaggatcaggtatttatgatcgactccaagtgtgagtctgggaagggtcggtgctcctttaaccccaatgttaataccgtgtcagttatgatcaacgaagagctgttctccgggatgtacattgactttatgggtacagatgccgctatttttcggagtctgactaaacgtaatgcagtgcggactgaccagcacaattccaaatggctatctgagccaatgttcgtcgatgcgcacgtgatccccgacggtactgacccaaatgatgctaaggtgtacttctttttcaaggaaaagttaaccgacaataaccggagcactaagcaaatccatagtatgatcgctaggatctgccccaacgacaccgggggtctccggagtttggtgaataaatggacgacctttctgaaagccaggctcgtctgttcagtcacagacgaagacggcccagagactcacttcgacgaactggaagatgtgtttctcctggaaacggacaaccctagaaccaccctcgtctacggtatatttacaacttccagctctgtgttcaagggcagcgcagtgtgtgtgtaccacctgtcagacatacagacagtgttcaatggaccgtttgctcacaaagagggtcctaatcaccagctgatttcctaccagggacgtatcccctatcctcgtcctgggacatgccctggtggggcttttactccgaatatgagaacaaccaaagagttccctgatgacgttgttacattcattaggaatcacccgctcatgtacaacagcatctaccctatccacaaacgccctctaattgtccggataggtaccgactataaatacactaagattgccgtggatagggtcaacgcagctgacggtagataccatgtcctgtttctgggtactgaccgtggcactgttcaaaaggtggtggtgctccctactaacaatagcgtaagcggggagctaattctcgaagagctggaagtgttcaagaatcatgctcccatcacaactatgaaaatcagctcaaagaaacagcagctttacgtctcttcaaacgaaggagtgtcacaggttagtctccatcggtgtcatatctacggcacagcctgcgctgactgttgtctggccagagacccatactgtgcatgggatggacactcatgctcgcggttttatcccacaggcaaacgcagatccaggcgccaggatgtccgacacgggaaccctctgacccaatgtcgcggattcaacctgaaagcttaccggaacgccgcagagattgtacagtatggagtgaaaaataatacgactttcctagaatgtgcgcctaagtccccccaggccagtatcaagtggctgttgcagaaagataaggacagacggaaggaggtgaagctgaacgaacggatcattgcaacatcacaggggcttttgataaggtcggtccagggatccgaccaaggactgtatcactgcatcgccacagagaactcattcaaacaaaccatagctaaaatcaatttcaaagtcttagactctgaaatggtggccgtagtaaccgataagtggtccccatggacctgggcgagcagcgtgcgggctctgcccttccaccccaaagatattatgggggcattttcccacagtgagatgcagatgatcaatcaatactgcaaggataccaggcaacagcaccagcagggtgacgagtcgcaaaaaatgaggggagattatggaaagcttaaagcactgatcaactcgcggaagtcccggaaccgacggaatcaacttcccgagtcatag

SEQ ID NO: 10291 - DNA, 2316 bp, synthetic construct
  misc_feature 1..2316: note = source = /note="Description of Artificial Sequence: Synthetic coding sequence"
  source 1..2316: mol_type = other DNA
atgggatggttaacacgcatagtctgcctcttctggggcgtcctgctcaccgctcgggcaaactatcagaatgggaagaacaacgttccacgccttaaattgagttataaagaaatgttggagtcaaataatgttatcacgtttaacggtctggctaattcctcaagctatcacacgttcttactggatgaggagcgctcgagattgtacgttggcgcaaaggaccatatcttctcatttgatttagtgaacatcaaagacttccaaaagattgtgtggcccgtatcgtacaccagacgggatgagtgtaaatgggccggtaaggacatcctaaaggaatgcgccaactttatcaaagtactgaaggcatacaaccagactcatttgtacgcctgcggaaccggggcattccatcccatttgcacatatatcgaaatcgggcaccacccggaagacaacatctttaaactcgagaattcccattttgagaacggaagaggtaagtccccgtacgaccctaagctattgacagcttctcttctgattgatggggaactgtattccgggacagccgctgatttcatgggacgagattttgcgatttttagaactttggggcatcaccatcccattagaacggagcagcacgactctaggtggcttaatgaccccaagtttatcagcgcacacttgatctcagagagtgacaaccccgaggacgataaggtgtacttcttctttagagaaaacgcgatcgacggagagcatagtggaaaggccacccacgcacggattggtcagatttgtaagaatgatttcggtgggcacagaagtctagtgaataagtggactacgtttttaaaagctcgattaatctgttcagttcccggacctaatgggatcgatacccatttcgatgaacttcaggatgtgtttctgatgaatttcaaagacccaaagaaccctgtggtctacggggtattcactacgtcctcaaatatctttaagggctccgcggtgtgcatgtactcaatgagtgacgtcaggcgcgtttttctgggtccatatgcacaccgcgacggtccaaattatcagtgggtgccctatcaaggtagggtcccttatccgaggcccggtacgtgtcccagtaagacattcggaggcttcgattccacgaaagatctcccagacgacgtcattacctttgctaggtcccaccccgctatgtataatccggtctttcccatgaacaaccgaccaatcgtaatcaagacagacgtgaattatcaatttactcaaatagtcgttgaccgggtggatgctgaagacggtcagtacgacgttatgtttattggcacagacgtcggaaccgtgctaaaagttgtgtctattcctaaagagacctggtacgacctcgaagaggtcctgttagaggaaatgactgttttccgcgagcctacagccatttccgccatggaactctcaacaaaacaacagcagctgtacatcgggtccactgctggcgttgcccagctccccctacacagatgcgatatctatggcaaagcttgcgccgagtgctgtctggccagagatccctattgcgcgtgggatggcagcgcttgcagtcgatacttccccacagcgaagcgtagaactcgacgacaagatattcggaacggtgatcctctgacccactgcagcgatctccaccatgacaaccaccatggccactcacccgaagagagaattatatacggcgtggagaactcttctacttttctggaatgctcaccgaagtcacaacgggcactggtgtactggcagttccagagaagaaacgaggagcgaaaagaggagattagagtggacgaccacatcatccgaaccgaccaaggactgcttctgcgctcactccagcagaaagattctggtaattacctctgccatgcagttgagcacggttttatacaaactctgctcaaagtgactctggaagtgattgacaccgagcacttagaggagttgcttcacaaagatgacgacggtgacggcagtaaaaccaaagagatgtcaaattctatgaccccctcccagaaggtgtggtacagggattttatgcaactcatcaaccacccaaacttgaataccatggacgagttttgtgagcaggtgtggaagagagacagaaagcagcggaggcagaggccaggccatacacccggtaatagtaacaaatggaaacacctgcaagaaaataagaaaggcaggaatagacgaactcacgagttcgagcgggcacccagatctgtttag

SEQ ID NO: 10292 - DNA, 4605 bp, synthetic construct
  misc_feature 1..4605: note = source = /note="Description of Artificial Sequence: Synthetic coding sequence"
  source 1..4605: mol_type = other DNA
atggccctgacacctggctggggctccagtgcaggtcccgtgaggcctgagctatggttactcctttgggcagccgcatggcgacttggtgccagcgcctgtcccgcactttgtacctgtaccggcactactgtcgactgtcatggcacaggccttcaagctatccctaagaatattcccaggaataccgaacgcttggagctcaatggtaataacattacaaggatccacaaaaatgacttcgctggcctgaaacagctgcgggtgctccagttgatggagaaccagatcggagccgtcgagaggggtgcttttgatgatatgaaagagcttgagcggctgcggcttaatagaaatcaactgcacatgcttcctgagttgctcttccagaataatcaggcactgtcacgactggatcttagtgagaacgccatacaggccattccccgaaaagcttttaggggcgcaaccgatttgaaaaatctgcagctggataaaaaccagatttcctgtatcgaggaaggtgcatttcgcgctctgagaggcctggaggtgctgactctgaacaacaataatatcaccaccatccctgttagttccttcaaccacatgccaaaattgcgtacattccgattgcattccaaccatcttttttgcgactgtcacctcgcctggctgtcccagtggctgagacaacggcctaccatcggtctctttacacagtgctctggtcctgcctctctgcgtggtctgaacgtcgctgaggtgcagaagagcgagttctcgtgctcaggtcagggggaagcagggagggtgcccacatgcaccctgtctagtggatcttgtcctgccatgtgtacgtgctcgaatggtattgttgactgtagaggcaaagggctgacagcaattcctgcaaacctcccagaaactatgactgaaatccgcctggagctaaatggaatcaagagcatacctccgggagcattctctccatataggaaactccgcagaatagacttgtcgaataatcagatagcagaaatcgcccctgacgcatttcagggcctgcggagtctgaacagcttagttctatacggtaacaaaataacagacctgcctcgcggagtttttgggggactgtacactctgcagctgctgctacttaacgcaaacaagattaactgtattcggccagatgcgttccaggatctgcagaacctctccctgctgtcgttatatgataacaagatccaatctctggctaaggggactttcactagtctgagagccattcagacactgcatttagcccagaatccttttatctgcgattgtaatttgaagtggttagcagactttttacgcaccaaccccattgaaacatcaggggcacgttgcgccagtcctcgacgtcttgccaacaagaggattggccagattaagtccaagaaatttcggtgctcagccaaagaacagtattttatccctgggacagaggattatcaactgaattccgaatgcaactctgacgttgtgtgtccccacaaatgccgctgcgaggctaacgtagtggagtgttcttccttaaagctgacaaagatcccagagcgcatacctcagtcgacagccgaactgcgactgaacaataatgagatttcgattctggaggcaactggaatgttcaaaaagctgacacacctgaaaaagattaatcttagtaataataaagtgtcagaaatcgaggacggtgctttcgaaggcgctgcctcggtcagtgagctccatttaaccgctaaccaactggagtccatcagatccggcatgttcagaggcctggatgggcttagaacactgatgctcaggaacaatagaatctcttgtatccacaacgactcgttcacggggttgcgcaatgtccgtcttctctccttatacgataatcaaataaccacggtgagccccggtgcatttgacacgctacagagtctgagcaccctgaatctgctagcaaatccctttaactgtaactgtcagttagcctggttgggcggttggttgagaaaacgcaaaatcgttaccggaaaccccagatgccagaacccggattttttgcgccagattccactgcaggatgtggcctttcctgacttcagatgcgaagaaggtcaggaagagggcggatgtctgccacggcctcaatgtccacaggagtgcgcctgtcttgatacagtcgtccgatgctctaacaaacacctccgcgcactcccaaagggtattccaaagaatgtgacagaactgtacctggacggaaaccagtttactttagttccaggacagctgtccacattcaagtatctgcagctagtggatctgtccaacaataagatctcctcactgagtaatagcagttttaccaatatgagtcaactgaccaccctgattctctcatataacgcgctacagtgtatacctcctttggccttccaaggactacgttcgctcaggctcttatccctgcacggcaatgatatctctactctgcaggaagggatctttgcagatgttactagcttgtcgcatctggccatcggagccaacccactgtactgtgattgtcacctgagatggctgtcttcatgggttaaaaccggttataaagaaccagggatcgcgagatgcgcaggaccccaggatatggagggtaagctgctactgactaccccagctaaaaagtttgaatgccagggccctcctactttggccgtgcaagccaagtgcgacctctgcctgtcctccccatgccagaaccagggcacctgccacaacgatcccctcgaggtgtatcgttgtgcctgccccagcgggtacaaaggcagagattgcgaagtatctttggattcctgcagttccggcccatgcgaaaacggtggcacctgtcatgcccaggagggggaggacgctccattcacgtgtagttgccccaccggatttgaaggcccaacatgcggtgtcaatacagacgactgcgtggatcatgcttgcgccaacgggggagtctgcgttgacggagtgggaaattacacatgtcagtgccccctgcagtacgagggcaaggcgtgcgaacagttagtggatctatgcagtcccgacctgaatccttgccagcatgaagcccaatgtgttggaaccccggacggccctcggtgtgagtgtatgcctggctatgccggagataactgttccgaaaaccaggatgactgccgggatcaccgctgtcagaacggagctcagtgtatggacgaagtgaacagctactcctgtctctgcgccgaagggtactctgggcaactgtgtgaaatacctcctcacttaccagctccgaagagcccctgcgagggcacagagtgccaaaacggcgctaactgtgtggatcaagggaaccggccagtctgccagtgtctaccaggcttcggtggtcccgagtgcgaaaagctgctatcagtaaactttgtcgaccgcgatacttatctgcagttcaccgatctgcagaattggccacgcgctaatatcaccctgcaggtgtctacggctgaagataacggaattctcctgtataacggcgataatgaccacatcgccgtcgagctgtaccagggacatgtgagggtgagctacgatccgggaagctatccaagtagtgctatatattctgccgaaaccatcaatgatggacagtttcacacagtcgaattggtggccttcgaccagatggttaacctcagcatcgacggcggtagtccaatgactatggacaattttggtaagcattacactttaaactcagaagccccactctatgtggggggtatgccagtggatgtcaacagcgctgcattccgattatggcaaatcctcaacggcacaggcttccatggctgcatccgcaatctctatattaacaacgagctgcaggatttcaccaaaacgcaaatgaagcctggtgtagtgcctggttgtgaaccctgtcgaaagctgtactgtctgcacggaatctgtcaacccaatgccacccccggacccatgtgccactgtgaggctggatgggtgggactacactgcgatcagccggcagacggcccttgtcacggccataagtgcgtgcacgggcagtgcgtgcccctcgacgcattgagttactcctgtcagtgtcaggatggctattcgggggcactgtgtaaccaggctggagctctggccgagccttgccgtggcctgcagtgcctgcacggacattgtcaagcttcggggaccaaaggggcacattgtgtatgcgacccaggattttctggcgagctgtgtgagcaagaaagcgagtgcagaggggaccccgtgcgtgattttcaccaggtgcaacgcggatatgccatttgccagacaacccgccctttatcctgggtggagtgcagagggagttgtcctggtcagggatgctgccagggacttaggctgaagcgtaggaaatttacattcgagtgttccgacggcacgagctttgccgaagaagtggaaaagcccactaaatgcggctgcgccttgtgcgcatag

SEQ ID NO: 10293 - DNA, 342 bp, synthetic construct
  misc_feature 1..342: note = source = /note="Description of Artificial Sequence: Synthetic coding sequence"
  source 1..342: mol_type = other DNA
atggacagccgacaagctgctgcgctgctggtgctccttttactgattgatgggggatgcgcagaaggcccaggaggacagcaagaggaccagctaagcgccgaagaagattcagagcctcttccaccacaagatgcccagacatctggttccctgctgcattatttacttcaggccatggagcgccctgggaggtctcaagctttcctgtttcaaccccagcggtttgggagaaatactcagggctcatggcgcaacgagtggttgagcccaagggctggggaaggtctgaattcccagttttggtccttggctgccccacaaaggtttggaaagaagtag

SEQ ID NO: 10294 - DNA, 2568 bp, synthetic construct
  misc_feature 1..2568: note = source = /note="Description of Artificial Sequence: Synthetic coding sequence"
  source 1..2568: mol_type = other DNA
atggctcgccaccttctgctcccactggtgatgctggtgataagcccgattcccggagctttccaggatagcgctttgagccctacacaagaagagcctgaggatcttgactgcgggaggcccgagcctagcgcaaggattgtgggtggcagcaatgcccagcccggaacatggccatggcaggtgtctctccaccacggtgggggtcatatctgcggcggttctctaatagcaccatcttgggtgctgtcagccgctcactgtttcatgaccaatggtactcttgaacccgctgccgaatggtcagtgctcctcggggtacacagtcaggacggtccccttgatggggcacacacgcgcgctgtggcagcgattgttgtaccagccaattacagtcaagtcgagctcggcgcagacctggctctcttgcggcttgcgtccccggcttcgctgggtcctgccgtttggccggtctgtctgcctagggctagccatcgctttgtacatggaacagcttgttgggccactggttggggagatgtgcaggaagccgacccactccctttgccgtgggtcttgcaggaggtggagttgagacttctgggggaggccacatgtcagtgcctgtactctcagcctggcccttttaatcttacacttcagattttgccaggcatgctgtgtgccggatacccagagggcagacgggacacatgccagggggacagcggaggccctctcgtctgtgaggagggagggcgttggtttcaggctggaattacaagcttcggtttcggttgcggcaggcgaaacagacccggagtgttcacagcagtggccacttacgaagcgtggatccgggaacaggtgatgggatcggagcctggacctgcatttccaacccaaccccaaaagacccagtctgatccacaggagcctcgggaggagaattgtactatcgcccttcccgagtgcggaaaagcacctaggcctggtgcgtggccatgggaagcccaggtgatggtgccgggtagtaggccatgtcacggcgcattggtgtcggaaagctgggtgctggctcctgcatcatgcttcctcgaccctaactcatccgattcacccccaagggatctagacgcctggagagtgttgctccctagccggccaagggctgagagagttgctagactggtacagcacgagaatgcctcttgggataacgcctccgacttagccctgctgcagctgcgcactccggtcaacctcagcgccgcttctagacccgtgtgcctccctcatccggagcactactttctgcccggaagcaggtgcagactcgctcggtgggggaggggcgagccggctttaggccctggggcactactcgaggctgaattactggggggttggtggtgccactgtctgtacgggcgacagggagcagccgtgccgttgcccggtgatcctcctcatgcattgtgtcccgcataccaggaaaaagaggaggttgggagctgttggaatgatagtagatggtctctactatgccaggaagaaggcacttggttcctggctgggattcgcgattttccctcgggctgtctgaggcccagggccttctttccccttcagacacacgggccttggattagtcatgtcacccggggagcatacctggaagatcagctggcatgggactggggtcctgatggcgaggagactgagacccagacttgcccacctcataccgagcatggagcatgtggcctgaggctcgaggctgccccagtgggtgttttgtggccttggttggccgaagttcacgtcgccggagaccgggtgtgcacagggattcttttggcacctggatgggttctagccgctactcactgtgttttgaggcccggttctactaccgtcccctacatcgaagtctacttggggagggccggagcatcctcgctgccacaaggacatcaggtgagtcgcctcgtaatcagcatccggttaccccagcacctgggactgagaccacctctcgcactcctagaactctcaagccgggtcgaacccagccccagtgcactgcccatctgtcttcacccagccggtattcctcctggtgctagctgctgggtcttaggctggaaagagccacaggatcgagtgcctgtcgccgcagctgtgagtatcctcactcagcggatctgtgactgtttgtaccagggaattttacctcccggtacattgtgtgtcctttatgccgagggccaggagaaccggtgcgaaatgaccagcgcccctcctcttctgtgccagatgacggaggggtcctggattctggttggcatggcggtacagggatccagggagctgtttgctgccatcgggcctgaagaggcgtggatctcacagactgttggggaagccaattttttacccccttcaggcagcccgcactggcccaccgggggatccaacctgtgtccccctgagctcgccaaagccagcggaagtccccacgccgtctattttttactgctgctgacacttctgatccagagttag

SEQ ID NO: 10295 - DNA, 912 bp, synthetic construct
  misc_feature 1..912: note = source = /note="Description of Artificial Sequence: Synthetic coding sequence"
  source 1..912: mol_type = other DNA
atgctgcaccccgaaactagtccagggagaggtcacctgctcgctgtgttacttgccctgctgggaaccacttgggctgaggtatggcccccacaactgcaagaacaggccccaatggctggagcgctgaacagaaaggaatctttcctcctcctgtctctgcataatcgattgcgctcttgggttcagccgcctgcggcagatatgcggagattggattggtccgattctctggcccaactcgcacaagccagggcagcactgtgcggcatccccacgccatctttggccagtggtctttggaggaccttgcaagtggggtggaatatgcagctgctgcctgctgggttagccagtttcgtggaggttgtttccctctggttcgctgagggtcaaagatatagccatgccgcaggcgagtgtgccaggaatgcgacatgtactcactacacccaacttgtatgggcaacttctagccaattgggttgtggcagacatttgtgtagtgccggacagaccgctatcgaggccttcgtctgtgcttacagcccaaggggaaattgggaggttaatggcaaaaccatcattccctataagaagggcgcttggtgttctctctgtactgcatctgttagtggctgcttcaaggcgtgggaccatgcaggtggtctctgtgaggtgcctaggaatccctgccggatgtcctgtcagaatcacggaaggctgaatatcagcacctgccattgccattgtcccccaggctacaccggaaggtattgccaggtgagatgcagtcttcagtgcgtgcacggacgctttcgggaagaggagtgctcctgcgtatgcgatatcgggtatggggagccgtccgttccacccagatgcattttcccatctacaccagtgacatag

SEQ ID NO: 10296 - DNA, 1158 bp, synthetic construct
  misc_feature 1..1158: note = source = /note="Description of Artificial Sequence: Synthetic coding sequence"
  source 1..1158: mol_type = other DNA
atgaaaatgctgcctggcgtgggcgtgttcggcacaggctcaagtgccagagtgcttgtgcctctgctgagggctgagggctttaccgttgaagctttgtgggggaagaccgaagaagaggcgaagcagctggccgaagagatgaacattgcattttacacgagtcggaccgacgacattttgttgcatcaagatgtagatctggtctgcatctccatccccccaccattgaccaggcaaatatctgtaaaagctcttgggataggtaagaacgtggtctgcgaaaaagccgctactagtgtcgacgcttttcgcatggttactgcaagcaggtactatccccagttaatgtcgttggtgggaaacgtactgaggttcctgccagccttcgtgcgcatgaagcagctgatctccgagcattatgttggggctgttatgatttgtgacgcacgcatatactcaggaagcctgttgtccccctcctacggctggatttgcgatgagttgatggggggtggcggactccataccatgggaacatacattgttgatctcttaacacacctcactgggaggcgggctgaaaaggtccacggactgttgaagacgttcgtgaggcagaacgccgcaatacgcggtatacgacatgtgaccagcgatgacttttgctttttccagatgttgatgggagggggtgtatgttccaccgtgactctgaactttaacatgcccggagcattcgttcatgaagtgatggtggtgggatccgctggcagactcgtggccagaggggctgatctgtacggtcagaagaattccgcgactcaggaggagcttcttctgagggacagcctggccgtgggcgctggattacccgagcagggaccgcaggatgtgcccctgttgtacctgaaaggcatggtttacatggtccaggccttacgacagtccttccaaggccagggcgatagacgcacctgggatcggacacctgtctccatggctgcttctttcgaagatggcctctacatgcaatccgtggtagatgccatcaaacgttcttcacgatctggagagtgggaggcagtggaagtcttaacagaggagcctgacactaaccagaatctgtgcgaggctctccagcgcaataatctttag

SEQ ID NO: 10297 - DNA, 1470 bp, synthetic construct
  misc_feature 1..1470: note = source = /note="Description of Artificial Sequence: Synthetic coding sequence"
  source 1..1470: mol_type = other DNA
atgcctgtgacttttgccctattacttctgctcggccaggcaaccgcagacccctgctacgacccacagggacggccacagttttgcctgcccccagtaacccagttggcggcagtggctgcatcttgtccccaggcttgcgcactttctcccggaaaccacttaggtgcccgagagacctgcaacggatctctgacactagccttggggggacctttcctcttgacgagcgtgtctctgaggttttgtactccaggccctcctgccttgatactgagtgcagcctgggcctctgggggaccttggcgtctcttatggcatagaccagcttggccgggtgcactcggcggaccagagcgtgtgacatttcatagtacaccaggccctaaggcgacagtggcggctagccaccttcgcgtcgagttcggaggtcaggcaggactggcggctgcaggcctacggggtagatgccagtgccatggacacgccgcacggtgtgcagcaagggcacggcctccgaggtgtcactgccgacaccacacaaccgggccaggatgcgagtcttgcaggcccagccaccgggactggccttggcgccctgccacacctaggcaccctcacccctgtctgccgtgctcgtgcaatcagcatgcacgaagatgccgctttaactcagaactgttcaggttgtccggcggtagatccggaggtgtctgcgagagatgtagacaccacaccgcgggtcggcactgtcattactgccagcccggattctggagagacccttcccagccgatcttctcccgccgagcttgcagggcttgtcagtgccaccctataggagccaccggcggaacgtgtaaccaaacttcaggacaatgcacgtgcaagctgggggtgactggccttacctgtaatagatgtggcccagggtaccagcagagccgcagtcctcggatgccgtgccagaggattccagaggcaactactactctggccaccacaccgggagcctactcctcggacccgcagtgtcagaactactgtaatatgtctgatacacgtgtgcatatgtccctcaggcgatactgtcagcaggatcacgtcctcagggcccaggtcctggcctcggaagccgcagggcctgcctggcagcgactggccgtgagagtcctggccgtgtacaaacagcgtgcacaaccagttcgcagaggcgaccaggacgcctgggttccacgcgctgatctcacttgcggttgtctaagactccagcccggtacagactatctgctgctgggaagcgcagtgggtgatcccgatcccacaagactgatattggacaggcacggcctcgctttgccatggcggcctcggtgggccagacctctgaaaaggcttcagcaggaagaaagagcaggtggatgcagaggcgtaagagccccaaccccaagtccccgtccagagcattag

SEQ ID NO: 10298 - DNA, 8429 bp, synthetic construct
  misc_feature 1..8429: note = source = /note="Description of Artificial Sequence: Synthetic coding sequence"
  source 1..8429: mol_type = other DNA
atgaccttggagggcctttatctggccagagggccactggcaagactgctgctggcttggtctgctctgttgtgtatggccggaggtcagggcagatgggatggtgccctggaagcggctgggcctggcagagtgcgtcgaaggggcagcccaggtattttacagggccctaacgtctgtgggtcaaggtttcatgcttattgctgcccaggctggcgtactttccctgggagaagtcagtgcgtcgtaccaatatgccgcagagcttgcggggaaggcttttgtagtcagccaaatttgtgcacctgcgcagatgggaccctcgccccaagttgtggcgtgagtagaggttccggatgctctgtctcatgcatgaacggaggcacttgccgtggcgctagctgtctgtgtcagaaaggctatactgggactgtgtgtggccaacccatttgcgacagagggtgtcacaatggaggaaggtgcattggtccaaatcgctgcgcatgcgtgtacggattcatgggcccacaatgcgagagagattataggacagggccttgttttggtcaagtgggccctgaaggctgtcagcaccagctcactgggttggtgtgtacgaaggctctgtgctgtgcaacggtaggtagagcgtggggcttgccttgtgagctgtgtccagcgcagcctcacccttgtcggagaggattcattccgaacattcatactggcgcatgccaagatgttgacgagtgtcaggccgtgccgggactttgccagggaggttcctgcgtcaacatggtcggcagctttcactgtcgttgcccagttggacatagactaagcgactcaagtgccgcttgcgaggactatcgggctggggcatgcttcagcgtgctgtttggaggcagatgtgccggagacctcgctggtcactacacgcgacgccaatgctgctgtgacagagggcgatgctgggctgctggccctgtgcctgaactgtgtcctcccagaggttcgaatgagtttcagcaattgtgtgcccaaaggctgcccctgctgcccggacacccgggactcttccccggactgctgggtttcggatccaatggcatgggacctccccttgggcctgccagacttaatccccatggctccgatgccaggggaattccttccctggggcctggcaatagtaatattgggactgctacattaaaccagaccatcgacatttgcagacatttcacgaacctgtgcctgaatggtagatgcttacctacgccaagttcctacaggtgcgaatgcaacgtgggctacacccaagacgtccgtggcgagtgtatcgacgttgacgaatgcacaagttccccgtgtcaccatggggattgtgtcaatatccccggaacgtaccattgccgctgttacccgggtttccaggctacgccgacgcgacaggcctgcgtcgatgtcgacgagtgtatcgtgtcaggtggactctgccatctgggtcgctgcgtaaacaccgagggcagcttccagtgcgtgtgtaatgcgggattcgagttgtctccagacggtaagaactgtgtggaccataacgaatgcgcaacatctaccatgtgtgtgaacggggtatgtcttaacgaagacggaagttttagttgcctgtgtaaacccggatttttattggcccctggaggccattattgtatggatattgatgaatgccagacacctggaatatgtgtcaatggccattgcactaacacagagggaagttttaggtgtcagtgtctcggtggcttggccgttggtaccgacgggcgagtgtgtgtagatacccacgtccgcagcacttgctacggcgctatcgagaagggttcctgtgctcgcccatttccaggaaccgtcaccaaaagcgaatgctgttgtgctaaccccgaccatggttttggcgaaccttgccagttgtgtcctgccaaggacagcgcagagttccaggctctgtgctccagtggactcggaataacaactgatggaagagacatcaacgagtgcgcgctggatccagaggtgtgcgcaaatggagtgtgcgagaacctgcgcggaagctatcgctgcgtctgcaatctgggctacgaagccggagcttctggcaaggactgcacggacgtcgatgagtgtgccctcaactctcttctatgtgataatggctggtgtcaaaatagccctggctcctacagctgtagttgtccacccggattccatttctggcaggacaccgaaatctgtaaagacgtcgatgagtgtttatcttcaccatgtgtatctggtgtgtgtcgcaatctggctgggagctatacctgtaagtgtggtccaggctctagacttgacccatcgggcacattctgtctggactccactaaagggacctgttggctgaaaatacaggagtctcggtgcgaagtcaatctccagggggcttccctgcgatcagagtgctgcgcgaccttgggcgctgcctggggctctccttgcgaacgctgtgagatcgatcccgcttgtgccaggggattcgcgaggatgacgggcgttacctgtgatgacgtcaacgaatgcgagagttttcccggagtgtgtcctaatggccgatgcgtcaatacagctggtagtttccggtgtgagtgccctgagggcctgatgctcgatgcgtctggcagattatgtgtggacgtgaggctggagccctgtttcctgagatgggatgaggacgaatgcggcgtgacgctgccagggaagtacaggatggatgtttgttgctgtagcattggagcagtttggggggttgagtgtgaggcttgcccggacccggaaagcctggagttcgcttctttgtgccctaggggattgggatttgcatctagagattttctgtcagggagaccattctacaaggacgttaatgaatgtaaagtgttccctggtctctgtacccatggaacatgccgcaacacagtcggatcctttcattgtgcctgcgccggagggttcgctttggacgcgcaagaacgaaactgtactgacatagacgaatgcagaatctcacctgacctctgtgggcaagggacatgcgtaaatacgcctggctcattcgaatgcgagtgcttccccggatacgagagtgggtttatgctcatgaagaactgcatggatgtggacgaatgtgctcgtgaccctctactctgcaggggcggtacctgcacaaatacagacgggagttataaatgtcagtgtcctccaggccacgagctgacggcgaagggtaccgcatgcgaggacattgatgaatgcagcctctccgacggattgtgtccacacgggcaatgtgtgaatgttatcggggcatttcagtgttcctgccacgcaggctttcaatccacccctgatcggcaaggttgcgtggacattaacgaatgtcgagtacagaacggcggatgtgacgtccactgtattaacacagagggatcataccggtgttcctgcggccagggttactctctgatgcctgacggacgcgcatgtgcagacgtggacgagtgcgaagaaaacccccgagtctgtgatcagggtcactgcacaaatatgcctgggggacaccggtgtctgtgttacgatggcttcatggcaacacccgatatgcggacttgtgtggatgttgatgaatgtgacctcaatccacacatttgccttcacggggactgcgagaacactaagggatcttttgtatgccactgtcaacttgggtatatggtaagaaagggcgcaacaggttgcagtgatgttgacgaatgcgaggtcgggggacataattgtgacagccacgctagctgtctgaacatccccggaagtttctcatgccgatgtctaccgggatgggtcggagatggatttgagtgccacgatttagacgaatgtgtgagtcaggaacataggtgtagtccaaggggagattgcttaaatgtgccagggtcctaccgatgtacatgtcgtcagggttttgcaggtgatgggttcttctgtgaagaccgagatgagtgtgccgaaaacgtcgacttgtgtgacaacggccagtgtctaaacgccccagggggttaccgctgtgaatgcgagatgggattcgatcctacagaggaccacagggcctgtcaggacgtcgacgaatgcgctcaggggaatctgtgcgcgttcggctcttgtgaaaatttaccaggcatgttcagatgcatctgtaacggaggctatgagctcgaccggggagggggtaactgtaccgatattaacgaatgcgctgacccagtcaattgcattaatggcgtgtgcattaacacacccggatcttatctgtgcagttgtccccaggactttgagttaaacccctcgggcgtcggatgcgtcgacacccgggcagggaactgttttttagagacccatgaccgaggtgactccggaatatcctgttcggctgagataggtgtgggcgtgactagagcatcctgctgctgctccctgggtcgagcctggggaaacccttgtgagctgtgtcctatggctaatacaaccgagtacaggactctgtgtcctgggggagagggatttcagccgaatcgcatcaccgttattctggaggatatcgacgagtgtcaggaactgcctggactctgtcagggcggagattgcgtgaacaccttcgggtcattccagtgtgagtgccctcccggttatcatctttctgagcacactagaatatgtgaggacatcgatgagtgctctacacattccgggatttgcggcccaggcacgtgctataatactcttggtaactacacttgtgtctgccccgctgaatacctccaggtgaatgggggaaacaactgtatggacatgaggaagtctgtatgttttagacactacaatgggacgtgtcagaatgaacttgcttttaacgtgaccaggaagatgtgttgctgcagttacaatattgggcaggcatggaaccggccatgcgaagcctgtcctactcctatatcgcctgactatcagatcctctgtggtaaccaagcacctggattcctgactgatattcacaccgggaagcccttggatatcgacgagtgtggtgagattcctgccatatgtgctaacggcatttgtatcaaccagatcggtagtttccggtgcgagtgtcctgcgggtttcaattataactctatcctgctcgcctgcgaggatgtggatgaatgcggaagcagagaatccccttgccagcaaaacgccgactgcattaacatacccggaagttataggtgtaagtgcactaggggctataagctctcacctggaggagcatgtgtcggacgcaatgaatgtagagagattccaaacgtttgctcccatggcgactgcatggatactgaaggctcctacatgtgcctttgccaccgcggtttccaggcaagtgcagatcagactctgtgcatggacatcgacgaatgtgaccggcagccttgcgggaatggcacctgtaagaatatcattgggtcctacaattgtctctgtttccccggatttgttgtaacacacaacggcgattgcgtggactttgacgaatgtacaaccctcgttgggcaggtgtgtagattcggccattgcctgaacaccgccggttcctttcattgtctatgccaggacggttttgaactgactgccgacggtaagaactgtgtcgacacaaacgagtgcttgtcgctagccggtacttgccttcccggaacatgccagaatctagagggctctttccgctgcatctgccctcctggatttcaggtccagagtgaccactgcatcgatattgacgaatgcagcgaagagccaaacctgtgccttttcgggacatgcaccaacagccctgggtcctttcagtgcctctgcccacccggttttgtgctgtctgataacggccaccgttgttttgacacacgccaaagtttctgcttcaccagatttgaggccggtaaatgcagtgttccgaaagcctttaatacaacaaaaacacggtgttgctgtagtaagcgaccgggagagggttggggtgatccttgtgagttatgcccacaggaggggagtgcagcatttcaggagctttgtcctttcggccacggtgccgtaccaggacccgacgattcgcgcgaagatgtcaatgagtgcgcagagaaccccggagtgtgtacaaatggcgtatgtgtcaacacggacgggtcatttagatgtgagtgtcccttcgggtattccctcgatttcactgggatcaactgtgtagatacggatgaatgcagcgtcggtcacccctgtggccagggaacttgcactaatgtgataggcggattcgaatgcgcctgtgcagatgggttcgagcctggattaatgatgacctgcgaagatatcgatgagtgttccttgaacccgttactgtgcgcttttaggtgccataacaccgaagggtcttacttatgtacctgcccagctggttacactctgcgcgaagacggagctatgtgtagggacgtggatgagtgcgcagacgggcagcaggactgtcatgcacgcggaatggagtgtaaaaatctgatcggcacttttgcttgcgtctgccctccaggcatgaggccacttcccggaagtggggagggctgcactgatgacaacgaatgccacgcacagccagatctgtgtgtaaacgggaggtgtgtgaacaccgcaggatcgttccgttgcgattgtgacgaaggttttcagcccagtcctactttgaccgaatgccacgatattcgtcagggaccctgctttgctgaggtgctccagaccatgtgccgatccctgagctccagcagcgaggccgtgacccgggctgagtgctgttgtggcggtggcagagggtggggtccgaggtgcgaactctgcccactcccaggtacgagcgcctacaggaaattatgcccccacgggtcagggtacaccgcagagggccgtgatgtggacgagtgtagaatgctggcgcatctgtgcgcccacggggaatgcatcaactcattggggtccttccggtgtcactgtcaagccggatatacgccagatgcaaccgctaccacctgcctggacatggacgaatgttcccaggtcccgaaaccttgtacctttctgtgcaagaacacaaaggggtccttcttatgcagctgcccgaggggctatttactggaagaagatggtcgcacctgcaaggacctggacgaatgcaccagccggcaacataactgccaattcctctgtgtgaatactgtgggagcctttacctgcaggtgtccacctggattcacccagcatcaccaggcctgcttcgataacgacgagtgctctgcacagccaggcccttgtggcgcacatggacactgtcataacacccccggtagtttccgctgcgagtgtcaccagggcttcacgttagtttcaagcggacatggctgcgaggacgttaacgagtgtgacgggcctcatcggtgccagcatggttgccagaaccagctggggggatatagatgctcatgccctcaggggttcactcagcactcacagtgggcccagtgtgttgatgaaaatgagtgcgctctcagtccccctacctgcggcagcgcttcatgtcggaacaccctggggggatttagatgtgtatgtccgtctgggtttgatttcgaccaagccctcggcggatgccaagaggtggatgagtgtgcaggccgtcggggaccctgttcctactcctgcgcgaacactcccggaggattcctgtgtggctgtccacagggatatttccgtgctggccaaggccactgtgtgagcggattgggcttcagccccggtccacaggacaccccagataaagaagagctcctcagttccgaagcttgctacgagtgtaaaatcaacggactaagtcccagggatagaccccgtagatccgctcatcgagatcaccaggtaaatctggccacacttgactcagaggctctcctgacattgggattgaacctgagccaccttggcagagctgagcggatattggaactgcgcccagccttggaagggctcgagggtcggatcaggtacgttattgtgaggggtaatgagcagggtttcttcagaatgcatcacctgcgcggtgtcagctccttgcagctgggtaggcgacgacctggaccaggcacctatcggcttgaggtcgtatcacatatggcgggtccttggggtgtccagccagagggacagccaggaccctggggtcaggcacttcgcttgaaagtgcagctacagctcctcta

SEQ ID NO: 10299 - DNA, 303 bp, synthetic construct
  misc_feature 1..303: note = source = /note="Description of Artificial Sequence: Synthetic coding sequence"
  source 1..303: mol_type = other DNA
atggagaccaggcaggtctcacggtctccgagggtccgactgttactgctgctactacttttactggtggtcccatggggcgtgagaaccgcgtctggggtagccctcccgccagttggcgttctgtcactccgtccaccagggagagcctgggcagaccctgctaccccaaggcctcgccgatcattggctctggcggatgatgcagcttttcgcgagcgagccaggctattggccgctctggaaaggcggcattggctgaacagctatatgcacaaactcctggttctagatgcgccttag

SEQ ID NO: 10300 - DNA, 1404 bp, synthetic construct
  misc_feature 1..1404: note = source = /note="Description of Artificial Sequence: Synthetic coding sequence"
  source 1..1404: mol_type = other DNA
atgtggaggtgcccccttgggctgcttctccttctgccccttgccggtcatctggcgttgggagcccagcaaggccgaggcaggcgggagctcgcaccagggctgcacctccgcggaataagggatgccggtggtcgatattgtcaagagcaggacctttgctgtcgcggacgcgctgatgattgtgctctcccctacttgggcgcaatatgctattgcgatctattctgtaataggactgtttccgactgttgcccagacttctgggacttctgtctgggggtacctccaccattcccccctattcagggatgcatgcatgggggtaggatctaccctgtgctggggacgtactgggataattgtaacaggtgcacatgccaggaaaacaggcaatggcagtgcgatcaggagccctgtctggtagaccctgatatgatcaaagccattaaccaaggcaattacgggtggcaggcaggcaatcacagcgccttttggggaatgacgctggacgagggcattcggtaccgactggggaccatccgcccatcatcaagcgtgatgaacatgcacgaaatctacactgtgctcaaccccggagaggtgttacccacagcctttgaagcttctgaaaagtggccgaacctgatacacgaaccactggatcagggcaactgtgccggtagctgggcgttttccacagcagccgtcgccagtgaccgagtgtcaatccactcattgggccacatgactcccgtcttaagcccacaaaatctactcagttgtgacactcatcagcaacaaggctgccgtgggggtaggttagacggcgcatggtggtttctgagacgccgtggagtcgtcagcgaccattgctacccattttccggcagggagagggacgaggccggtccggctcctccatgtatgatgcatagccgagcaatgggcagaggcaagagacaggccaccgctcattgtccaaactcctacgtcaacaacaacgatatctatcaggttactcccgtgtatcgcctgggctctaatgacaaggagatcatgaaagagctgatggagaacggaccggtccaggccttaatggaagtccacgaggatttctttctctacaagggcggaatctactctcacaccccagtaagcttggggaggcctgagcgataccgcaggcacggcacgcattctgtcaaaattactggctggggagaggaaactcttcctgatggaaggacccttaagtattggacggctgcaaactcttggggccctgcctggggcgagcgaggccactttcggattgtgcggggtgtgaacgaatgtgacatcgaatcatttgtcctgggagtgtggggacgcgtaggcatggaggacatgggtcaccactag

SEQ ID NO: 10301 - DNA, 2205 bp, synthetic construct
  misc_feature 1..2205: note = source = /note="Description of Artificial Sequence: Synthetic coding sequence"
  source 1..2205: mol_type = other DNA
atgttctacgtctgttcttcttgcgtgttcttatgtggttcgaatttcccaaactttcctttccaggtcgcctccgcaaagagcgctcctgagattccaactattgaccaagcatactcaaagctgtctaattcgatcacggtggagtgggcgacggtgcccggagccacgtcgtacctccttacagccgaggatggtgataccgtcatcgagacaacagtggccaacagccctgggacggtaactggcctgaaggccgcaacttggtatgaaattaccatccggagcatctcagccgcaggaagatcccaggccagtccaccaaagcaggccaaaacagtgctggctgccccaatcctcgaggtttccagccccagctctgatagtattctggtgcaatgggaagccgtgtatatggcaatagccttcagcgtgtccataatgagagccaatggcctgggttccatttggaaagaaaatactacgaacacttctctcacttttaccagtctcgaggcaggcacgctgtacacaataaaggcctatgcttggaacgcaaatcgaattcccggagacgacagtacctgcaaccagagaacatccccacgggctcccgctaatatacaagtgtcgttcgattctggggctctcaaggcctccttttcctgggccagggcggaaggcgcattcaattacaccgtcatggcactctcagactcaagtgaattgacatgcagtaccacattttcatcctgcaccatcagctccctccagtgtggtaccgaatacctgatttctgtgctcgccagcaacgacgccggatcatctaaatcttcgagcgctatgaccttgaagaccgtggcctgcgcccctggccgagtgactattcaagaagatcctcctggacacctctcggtggcatggtcctctgtggacctgggggattattatgtggtgtttgtcaagtccgacgacggcctcgaggtgcattgcaacacttctctcacccaatgcaactttctgtcagagtgtggatttacctactttataagcgtgtttgtgtacaacaaagcaggccagagtccccttggtgatatcttcaattacactaccgctccgtgttgccccagcgacattaaccccgtcctggtgtcttctgacagggtcgagatcgtttggagccccgtgcgaggagccgaactctacgagacgaaagctgttgacggatataacatggttgaatgcaatgatacaacaccagcatgtaccctgtctgcactcgaatgcgatacaaagtacaacattaccgtgtattcctttaacgaagtgagaggctccaacatgtcctgcacaccccagttcattacgaccgccccatgtagtcccgagattaagaatgtgagtagggacgccttcagcatgatcaatgtgcactggcgcagtaccaacgacgacgcgacatacacagtcactgcccagggggagaaaggtctgtatcaatgctcttcaacaggcgaatcctgtacaatgaggggcctcccatgtggatctgtgttctccgtgacggcggtggccgagacccaggctggcagatctttgcctagttattccgtgcctctcgagacggtgccctgctgtcccacaggcctaaccgtgacccaaattacccagagcgtcataaacgtgagttggactattggtcgagttgcacagacgcacgtggctgtgctggaaagtcacacaggccagtcaaagtgtcacactcaccagaaccactgtcttcttgggtgcatcacttgcggcatcaattacactgtaacactgaaagctattagcgctacaggacttacagctgactgcagctaccagagctatttcagcggggcatgctgtcccctgggagtgaagctctataggttgggcccaaatggcattcggatctactggcaggccagccgaggatccgccaactacagcactgacctttatgggtccaagggcattttcacgtgcacgccctccgctggcctctctttttgtgatgtcacagagatcccatgcggggatgtctatactgtaatggtctcccctgtagccaagacagggctgaaacttaccttttgccctaaaaagatctactcagtaacatgctcgggcagcacactggggatggtcatttataggggcaagcgtaatgaggaatag

SEQ ID NO: 10302 - DNA, 1098 bp, synthetic construct
  misc_feature 1..1098: note = source = /note="Description of Artificial Sequence: Synthetic coding sequence"
  source 1..1098: mol_type = other DNA
atgctggatgggagccccttagcaagatggttggctgctgcgtttggcctcaccctgctgctggcagcccttagaccttcagccgcatattttggactcaccgggagtgaacctctgacaatcttgcctctaacacttgagcccgaagctgctgcccaagcacactacaaggcttgtgacaggctgaagcttgaaaggaagcagagacgcatgtgtcggagagacccaggggtggccgaaacccttgtggaggcagtctcaatgagtgcccttgaatgccagttccagttccgtttcgagaggtggaattgcacattggaaggcaggtatagagcatcacttctgaagaggggctttaaagagacagcattcctatacgcaattagcagtgcaggcttgacccatgcactggctaaagcatgctcagctgggagaatggagcgatgcacctgtgacgaggcccctgacctggagaatcgagaagcctggcaatggggagggtgcggcgacaacctcaaatactccagtaagtttgttaaagaatttctcgggaggagatcaagcaaggacctgcgagcgcgtgtcgattttcacaacaacctggtcggcgtgaaagtcatcaaagccggagttgagactacttgcaaatgccacggcgtgtcaggttcatgtaccgtgcgcacctgctggcgccagcttgcccctttccacgaggtggggaaacatctcaaacacaagtatgagactgctttaaaagttgggagtaccaccaacgaggctgcaggcgaagcaggtgccattagcccgcctcgcggaagggcctcgggcgctggcggatcagaccccctgcccaggaccccagagctagtccacctagatgactccccatccttctgcctcgcagggaggttttcaccgggaactgctgggaggagatgtcaccgcgaaaagaattgcgaaagcatttgttgcggcaggggccacaatactcagtcacgggtcgtgactcggccttgtcagtgccaggtgcgttggtgttgttatgtggagtgccggcagtgcacccaaagagaagaggtgtacacttgcaagggctag

SEQ ID NO: 10303 - DNA, 795 bp, synthetic construct
  misc_feature 1..795: note = source = /note="Description of Artificial Sequence: Synthetic coding sequence"
  source 1..795: mol_type = other DNA
atgaggctgaggcctcttccgctggtggttgttcccggactcctgcagctgctattttgcgacagtaaggaagtggtgcacgcaaccgaaggcctcgactgggaagacaaggatgccccagggacattggtcggaaatgtggtccatagtcgaataattagtcccctgcgcctgtttgttaaacagagtccagtgcccaaacccggacccatggcctatgcggacagtatggaaaacttctgggattggcttgccaacataaccgagatccaagagcccttggctcgaactaaaaggaggcctattgtcaaaacagggaaatttaagaagatgtttggatggggtgatttccactcaaatataaaaactgtgaagctgaacttgctgatcacggggaaaatcgtggaccatgggaacggaacattcagcgtctactttaggcacaacagcactggactcgggaacgtctcagtgtcgcttgtgcctcctagtaaggtggtggaattcgaagtgagtccccaatcaactcttgagacaaaggaaagcaaatcatttaattgtcgtattgaatacgaaaagaccgatagagcaaagaaaacggccctctgcaatttcgatcccagcaagatctgctaccaggaacagacccagtcgcacgtctcctggctatgtagtaagcctttcaaggttatttgtatttacatagctttctatagtgttgactataagctcgttcagaaggtgtgccccgattataattatcactcagaaaccccctatctaagcagcggttag

SEQ ID NO: 10304 - DNA, 1125 bp, synthetic construct
  misc_feature 1..1125: note = source = /note="Description of Artificial Sequence: Synthetic coding sequence"
  source 1..1125: mol_type = other DNA
atgaaacccttgctggaaacattatacctgctcggcatgcttgtgcctggcggattaggctatgatcggtcattggcacagcaccgtcaggagatcgttgataaaagcgtatcgccttggagcctggaaacctactcttataacatctaccaccctatgggggaaatatatgagtggatgcgtgaaatcagtgaaaagtacaaggaagtggtcacccagcacttcctgggcgtgacttacgagacacaccctatgtattacctaaaaataagccaacctagcggcaatccaaaaaaaatcatttggatggattgtgggatccacgcaagagaatggatcgcacccgcattctgccagtggtttgtcaaggagatcctgcaaaaccacaaggataattcctccatacgcaagctcctgaggaatctcgatttttacgttcttcccgttctcaacattgacgggtacatctacacgtggaccaccgaccgactgtggagaaaatctcgtagtccacacaacaacggcacatgtttcgggaccgacctgaaccggaattttaatgctagctggtgttccataggggcttctcgcaactgtcaagaccagaccttctgcggcacgggtccagtttcagagcctgaaacaaaggccgtggcctcatttatagaatccaagaaagatgatatcctgtgcttccttaccatgcacagttacggacagctgatactcaccccctatggctacactaaaaacaaatctagcaatcaccccgagatgatccaagtcggacagaaggcggcaaacgctcttaaggcaaaatacggtaccaattatagagtcggaagctcagctgacatcctgtacgcttccagcgggagttctcgagactgggctcgggacatcgggatccccttttcttatacctttgaacttcgggatagcggcacctacggctttgtactcccagaggcccaaatacagcctacgtgtgaggagaccatggaggcagtgcttagcgtgctggacgacgtgtacgccaagcactggcattcagattctgctggcagggtcacaagcgcgacgatgttgcttggtctcctggtttcctgtatgtccctgctgtag

SEQ ID NO: 10305 - DNA, 1728 bp, synthetic construct
  misc_feature 1..1728: note = source = /note="Description of Artificial Sequence: Synthetic coding sequence"
  source 1..1728: mol_type = other DNA
atggccagctggttgcgcaggaagttgagggggaaacgaaggcccgtcatcgccttttgcctgctgatgatcttgtctgctatggctgtgacccggttccctcctcagaggccatccgctggccctgaccccggaccaatggagccccagggtgtcactggagcccctgctacccatatacggcaggctctgagttcgtctcgcagacagcgggcacgcaacatgggcttttggcggtcacgtgctctcccacggaattctatcctggtttgtgccgaggaacagggtcacagggccagggttgacagatctcgggaaagccctggcggagaccttcgacacccaggacgggtacgaagggacatcaccctaagtgggcaccctcgcctgagcacacagcatgtcgttcttctgcgcgaagacgaggtgggtgacccagggacaaaagacttggggcatccacaacatggttctcctatccaggaaactcaatctgaggtggtgactctggtgagccccctcccgggatcagacatggctgccctgcccgcatggcgagccacaagcgggctgacgttatggcctcatactgccgagggcagggacctcttgggcgctgagaatcgagcactaacaggaggacaacaggcggaagacccaaccctggcctcgggtgcacatcaatggccaggctcagtcgaaaagctgcaagggtctgtatggtgtgatgccgagacactcttgtcatcttccagaactggtgggcaggcaccaccatggctgaccgatcatgacgtgcaaatgctccgtctgttagcacagggagaggtggtcgataaggccagagtgccggctcacggacaggttctccaggtcggtttttcgaccgaagccgctctgcaggacctgtcttctcctaggctcagccagctttgctcacaaggcctgtgcgggctgatcaaaaggcctggcgatctacctgaggttctcagctttcatgttgaccgagttttagggctgagaaggagcttgccggcagtggcaaggcgctttcatagccctcttctcccctatcgctacaccgatgggggtgccaggcccgttatctggtgggcccctgacgtgcagcacctgtcggatcctgacgaagatcagaatagcctggccctaggctggctgcagtaccaagccttactggcccactcctgcaactggcccggacaagcaccctgtcccggtatccaccatacagagtgggccagattggccctgttcgacttcctgctccaagtgcatgacaggctggataggtactgttgtggcttcgaaccagagccttccgacccctgtgtagaggaaagactcagagaaaaatgtcagaatccggcagaactacgcctggtacatattcttgtgagaagctctgacccgagtcatctagtctatatcgataacgccggaaacctccaacaccccgaggacaagctgaatttccgcttgctcgagggcatagatggtttcccggagtctgctgtgaaagtcttggcaagtggctgtctccaaaatatgttgctgaaaagccttcagatggatccagtgttctgggagtcccaaggtggcgctcagggtctgaagcaggtgctgcagaccttggaacagagggggcaggtgctcttaggacacattcaaaagcacaatctgaccctctttcgagacgaggacccttag

SEQ ID NO: 10306 - DNA, 1680 bp, synthetic construct
  misc_feature 1..1680: note = source = /note="Description of Artificial Sequence: Synthetic coding sequence"
  source 1..1680: mol_type = other DNA
atgtggaccaacttcttcaaactgaggttgttctgctgcctcctagctgttttgatggtggtggttctagtcataaatgtaacccaggtcgagtacctcgaccacgaaacagtgagcgcaactttcatcgactctagcggccagttcgtgtcatcccaggtgaccggcataagcagaaacccgtactgtgggtacgaccagcagacattgtcctcacaggaaagaatggaagaggactcacttctcgcagccctgcatagacaggtccccgacgtgggacccgtgccttttgtgaagtctaccgatccatccagctcatacttcgtgattctcaactctgccgctttcttcaaagtggggtctcagctggaagtgctggtgcacgtccaagacttccagcgaaaacccaagaagtatggaggagactacctccaggcgagaatccactcactgaaactgcaggctggtgccgtgggaagggttgttgactaccagaacggcttctacaaggttttcttcaccctactgtggcccggaaaggtcaaggtatctgtaagtctggttcacccgagcgagggcatcagggtgctccagcgtctgcaagaggacaagccagaccgagtgtactttaagtcactttttagatccgggagaatttccgaaacgacggaatgcaacgtgtgtttgcccggaaacttgccactttgtaactttaccgacctttataccggagaaccttggttttgtttcaagccaaagaaactgccctgttctagccgtatcactcactttaaaggcggatacctgaaggggctgctaactgcagccgagtctgcgttctttcagagtggggtcaatatcaaaatgcctgtcaacagttcaggccctgattgggttaccgtgattccgaggagaattaaagagacgaatagcctggagctctcccagggttccgggaccttccccagtgggtattattacaaggaccagtggcgcccaaggaaattcaaaatgaggcagttcaacgatccagataatattacagagtgtttgcagcgtaaagttgtgcatttgttcggcgattccactattagacaatggtttgaatacctgaccacctttgtgccagatctggttgagttcaatttaggctccccaaaaaacgtggggccattcctggcggtcgatcagaagcacaatattctcctgaaatacaggtgccatggaccacccatccggtttaccactgtttttagcaatgagctacattacgtagcgaatgaactcaacggtattgtgggcggtaagaacaccgtggttgctatcgccgtatggtcccacttcagcacgtttccgttggaggtgtatatccggaggctgcgtaatatacgccgtgctgtggtgagactcctggataggagtcccaagacagttgtcgtgattcggactgccaacgcccaggagctcggccctgaagtgtctctcttcaactcagattggtacaactttcagctggacaccattcttcgtaggatgttttccggcgtgggcgtgtatctggtcgacgcttgggagatgacacttgctcattatctgccgcataagcttcacccagatgaggtaatagtcaagaaccaactggatatgtttctttcctttgtatgtccactggaaacctag

SEQ ID NO: 10307 - DNA, 3624 bp, synthetic construct
  misc_feature 1..3624: note = source = /note="Description of Artificial Sequence: Synthetic coding sequence"
  source 1..3624: mol_type = other DNA
atgcgcttgacccatatctgttgctgctgtttgctttaccagctgggctttttgagcaacggcatagtctctgagctgcagttcgcccctgaccgtgaagagtgggaggttgtgttcccagcactgtggaggagagagcccgtggaccccgcaggcggatccggaggcagcgcagatccaggctgggtgaggggggttggaggtgggggaagtgccagagcccaggccgcaggaagcagtcgtgaggtccgaagtgtggccccagtaccattggaagaaccagtcgagggtcggagcgagtctcgccttagaccaccacctccctctgaaggagaggaagacgaggaacttgaatcccaggagcttcccaggggatctagcggcgcagcagcgttgtcacctggcgcaccagcgagttggcagcctccccctccacctcagccccctccttcacctccccctgcacaacatgctgaacccgatggcgatgaagtgctgctgcgaattcctgcattcagtagggacctttacctacttctgagacgggatggaagatttctggcaccccgttttgccgtggagcagaggcctaatcccggacctggtcctacaggggctgctagtgccccacaaccacctgccccacccgatgcaggctgtttttacaccggcgctgtgctgagacaccctggaagcttagcttctttcagcacttgtggtggcggactgatgggattcatacagcttaatgaagactttattttcatcgagcctctcaatgacacgatggctattactgggcacccccatagagtctaccgtcagaaaaggagtatggaggagaaagttacagagaaaagcgcactgcattcacattactgtggcataatcagtgacaaaggcagacctagatctcgcaagatagctgagtccggaaggggcaagcgctacagttataagctgccccaggagtacaacattgagacggtcgtggtggctgatcccgctatggtctcatatcacggagcagacgccgcacggagattcattctaacgatcctcaacatggtgttcaaccttttccagcacaagtccctgtctgtccaggtcaatctgagagtgataaagctgattttgctgcacgagaccccccctgagttatatattggacaccatggcgaaaagatgctagaaagtttctgtaagtggcaacacgaagagtttggaaagaagaatgacatccaccttgaaatgtcaacaaattggggcgaagacatgacaagtgttgatgccgcaattctgatcacccgcaaggatttttgcgtgcacaaggatgagccctgcgatactgtgggtatcgcttatctctcaggaatgtgttccgaaaaaaggaagtgtattattgcggaggacaacggacttaacctggctttcaccattgctcacgaaatgggccacaatatggggataaaccatgacaatgaccatccgagctgtgccgatgggttacatatcatgtctggggaatggattaaagggcagaacctgggggatgtgtcgtggtctcgatgctctaaggaagatctggagcggttcctcagatctaaggctagcaactgtctgttgcagacaaacccccaatcagttaactccgttatggtgccttcaaagcttccagggatgacatacaccgcagacgagcagtgtcaaattttattcggaccactcgcaagcttttgccaagaaatgcagcacgtgatctgcacaggactttggtgcaaagtggaaggagagaaggagtgccggacaaaattggatccacccatggacgggacggattgcgacctgggcaaatggtgtaaagccggtgagtgcaccagccgcacctcggcacctgaacatctggcgggtgaatggagcctgtggagtccgtgctcacgtacctgctctgctgggatcagttccagggaacgaaaatgcccaggcctggacagtgaggcacgagattgcaatggaccgcgaaaacagtacagaatctgtgaaaaccccccttgtcctgccggactccccggttttcgcgactggcagtgtcaggcgtacagtgttcgtactagttcccctaaacatatccttcagtggcaggcagtgctcgacgaggaaaagccctgtgcactgttctgctcccccgtgggcaaggaacagcccattcttctgtccgagaaagtaatggacggtaccagctgcggatatcaaggcctggatatatgtgctaacggtcgctgccagaaagttggatgtgacgggctactgggctcccttgcacgggaagaccactgtggcgtctgtaacgggaatggaaaaagctgtaaaattattaagggtgatttcaaccacacacgaggcgcaggctacgtcgaagttcttgtgatccccgcaggcgcacgaaggatcaaagtggtggaagaaaagccggcacactcttacctggccttgcgagacgccggaaagcagagcattaacagtgactggaagattgaacactcaggcgcatttaatctggcgggtaccaccgtgcattatgtccgcagaggtctctgggagaagataagcgctaaaggcccaactaccgcacctctgcatctcctggtactgctcttccaggatcagaattacggtctccactacgagtacaccattccttctgatcctctgcctgaaaaccagtcatccaaggcacccgagccactgtttatgtggacccacacctcatgggaggactgcgatgctacctgcgggggaggcgagcgcaagactacagtgagttgtacaaaaatcatgtccaaaaatatcagcattgtggataacgagaagtgtaagtacctcacaaaaccagagcctcagatcaggaagtgcaacgagcaaccatgccaaacacgctggatgatgacagaatggaccccgtgtagcaggacctgcggtaaggggatgcagagtagacaagtcgcctgcactcaacagttgtccaacggcacactgatcagggcaagagaacgggactgcatcggacccaagccagcttctgcccagaggtgtgaagggcaggattgcatgactgtgtgggaggccggagtctggagtgaatgctcagtcaaatgcggcaagggcatccgacacagaaccgtgcggtgtactaatcccaggaagaagtgtgttctgtccacgcggcctagggaggcagaagactgcgaggattattcaaaatgctatgtgtggcggatgggtgattggtctaaatgcagtatcacctgcggaaagggcatgcaaagcagagtaattcaatgtatgcataaaattaccggtcgtcacggcaatgagtgcttttccagcgagaagcccgctgcgtaccgcccttgccacttgcagccttgtaacgagaaaatcaacgtgaacacaattacttctcccagactagcagcgcttaccttcaagtgcctgggtgatcagtggcctgtctattgtcgagtcattcgagaaaaaaatctgtgccaggatatgaggtggtaccagagatgttgcgaaacctgccgtgacttctacgcccagaaactccagcagaaatcctag

SEQ ID NO: 10308 - DNA, 258 bp, synthetic construct
  misc_feature 1..258: note = source = /note="Description of Artificial Sequence: Synthetic coding sequence"
  source 1..258: mol_type = other DNA
atgaaaatcaccggcggtctgctgctgctgtgcacagtcgtatacttttgtagctcctccgaggctgcttccttatctccaaagaaggtggattgctccatctacaagaaatatcccgtggttgcgattccttgtcctatcacatacttgcctgtgtgcggcagcgactacattacgtatggtaacgaatgtcatctttgtactgaatctctcaaaagtaatgggcgagtgcagttcctgcatgacggctcttgttag

SEQ ID NO: 10309 - DNA, 2982 bp, synthetic construct
  misc_feature 1..2982: note = source = /note="Description of Artificial Sequence: Synthetic coding sequence"
  source 1..2982: mol_type = other DNA
atgggatcaggcagagtccctgggctgtgtctgttagtgctactggtccacgccagggcagctcagtattctaaagctgctcaggacgttgacgaatgtgtggaaggaactgataactgccacatcgacgccatctgccagaacaccccgagatcttacaaatgtatttgcaagagtggttacaccggcgatggaaagcactgcaaggatgtggatgaatgtgagagggaggacaatgctggctgcgtgcacgattgcgtcaacatccccggaaactacaggtgcacctgttacgatggttttcatcttgctcacgacggacacaactgtttggacgtggacgagtgcgccgaaggtaatggcggttgccagcagtcttgcgtgaatatgatgggaagttatgaatgccattgccgtgaaggattttttctgtccgacaatcagcacacttgtatccaaaggcctgaggagggcatgaactgtatgaacaaaaaccatggttgtgcacatatttgtcgggagactcctaagggtggcatagcttgcgagtgccgccctggatttgaactgaccaagaatcagagagactgcaagcttacttgtaactacggcaatgggggatgccagcacacctgtgatgatactgaacaaggccctcgttgtggatgtcatattaaattcgtgcttcacactgatgggaagacttgcatcgaaacctgcgccgttaacaatggaggatgcgattcgaaatgccatgacgccgctaccggcgttcactgcacatgtcccgtcgggttcatgctccaacctgatcgtaagacctgcaaagacattgatgagtgccgcctcaacaacggaggttgcgatcacatatgccggaatactgtgggatcattcgagtgttcctgtaagaaggggtacaagctgttgataaatgaacggaattgccaggatatcgacgagtgctcctttgacaggacatgtgaccatatttgcgtgaatacacccggatcatttcagtgtctctgtcacaggggttatttgctgtatgggatcacgcactgtggagacgtcgatgaatgtagcataaataggggcggatgtcgatttgggtgcatcaacacccctggcagctaccaatgtacctgtcccgctggccaggggagactgcattggaatggtaaggactgtaccgagccgctgaaatgtcaaggcagtccaggtgccagtaaagccatgctgagctgcaatcggtccgggaaaaaggacacatgtgccttgacctgtccgtcgcgcgctcgattcctgcccgaatccgaaaatggttttaccgtgtcttgcggtactccgagcccaagggctgcacccgcacgagccggtcacaatggcaatagtaccaatagcaaccattgccacgaggctgcagtgctgagtataaaacagcgagcaagcttcaagattaaagatgctaaatgtcggctgcaccttagaaataaaggcaagaccgaggaggccggacgcataacaggtcccggaggcgctccttgctctgaatgccaagtgactttcatccacctcaagtgcgattcatctagaaaaggaaaaggtcggagggctcgaacccctccaggaaaggaagtcacgcgtctgaccttggagcttgaggcagaggtgagagccgaggaaacgacagcaagctgcggccttccatgtctgagacagagaatggaacggagactcaagggtagcctcaagatgttgcgaaagtctattaaccaagaccgcttcctgctacggctggctggtctggattatgaactcgcgcacaaacctggcctggttgcaggggagagggccgaacccatggagagctgccgcccaggccagcaccgggctggcacgaagtgcgtgtcttgcccacagggcacctattaccacggccagacagaacagtgtgtgccttgcccggctggcaccttccaggagagggagggccagctgtcatgtgatctgtgcccaggcagcgacgcacacgggcctctaggcgctactaatgttaccacatgtgctggtcagtgtccaccagggcaacattctgtggatggcttcaaaccctgtcagccatgccctaggggtacttaccaacccgaagccggtcgcacgctatgcttcccttgcggcggagggttgactactaaacatgagggagccatttcttttcaggactgcgacactaaggtacaatgctcacccggacattattataatacttcaatccaccgctgtattaggtgcgctatgggaagctatcaaccagatttcagacagaacttttgttcacggtgtcctggcaacaccagtaccgacttcgacggaagcacgagcgtcgcacagtgcaaaaacagacaatgcggcggagagctcggagagttcaccggttatattgaaagccccaactatccaggcaactaccctgctggagtagaatgtatttggaacatcaatccgcctcccaaaagaaagatcctgatcgtcgttccagagatcttcctgcccagcgaagacgagtgcggagatgtgctcgtaatgcggaagaacagctccccttccagcatcacaacatacgagacctgtcagacctatgagcgccctatcgcctttactgctagatcacgcaagctgtggatcaattttaaaaccagcgaagctaattccgccagggggtttcagataccatacgttacgtatgatgaggactacgagcaattggtcgaagacattgtccgagatggtcggctctacgccagcgaaaatcaccaggagattttgaaggacaaaaagctgattaaggccttctttgaagtgctggcccatccacagaactactttaaatacactgagaaacacaaggagatgctcccgaagtcattcattaaacttttaaggtccaaagtatccagtttcctgcgaccgtacaaatag

SEQ ID NO: 10310 - DNA, 4773 bp, synthetic construct
  misc_feature 1..4773: note = source = /note="Description of Artificial Sequence: Synthetic coding sequence"
  source 1..4773: mol_type = other DNA
atgccaggcggagcatgcgtgctagtcatcgccttgatgtttttagcttggggggaggctcaggaatgctcgccaggaggccaccagtttttaagaagcccctaccgtagcgttcgcttcgacagctggcatctacagcaatccgccgtgcaggatttaatctgcgaccactctctgtctcccggttggtatcgcttcttgattttggaccgccctgccgaaatgcctactaaatgcgtggagatgaatcattgcggtacacaggccccaatatggctgagtctccgggatagcgagacacttcctagtccgggtgaaataaagcagttgacagcatgcgccacatggcaatttttgttctccaccacgaaagactgctgcttatttcagattcccgtgagcgtgcgaaactgtggtaacttctcagtatacctgcttcagcccacgcaggggtgcatgggctactgcgccgaggctatctcagacgccaggctgcatccttgcggcagcgatgaaactgagactgggggagactgtgtacggcagcttgccgctagcctccctccgccacccgcagggaggcccgaggtactggttgaactcattgaaagtcgccttttttgtcgctgtagttttgacgtgcctgcaacgaaaaattcggtgggttttcatattgcatggtcccggctcagctctcaagaagtaaaggaggaattgacacaagagaccacagtccaagccttctctttgctcgaacttgacggcataaacttacgactgggagacagaatcttctgctctgcctccgtattcttcctcgaaaacccccatgtgcagtccgttgccatcgaaagccaggagttttttgcgggttttaagctgcagccggagctcagcacaatttctgaagacggaaaggaatactacctgcgaatagagtcgactgtaccaatcatatgttccgaattttcggagctcgatcaggagtgcaagatctcacttaaactcaagacaattgggcagggacgcgaacacctgggactcaacttagcactgtcttcatgtcacgtggatctgcttcagacatcctcttgtgccaacggcacatgttcccacaccttcgtgtattatacagccgtcaccgatttttctcgcgatggggaccgagtgagtaatatagtcgtgcagccaatcgtcaatgaggattttttgtggaataattatattccagatagtattcagattaaggtgaaagatgttccaaccgcatactgttacactttcaccgacccacacattattacctttgatgggagggtgtatgataattttaagacgggaaccttcgtgctctacaagagcatgtcacgcgattttgaggtacacgtcaggcagtgggactgtcgctctctgcactatccagtcagttgcaactgtggctttgtagcacaggaagggggagatatagttacctttgatatgtgcaacggacagctgcgcgaatctcagccctacctatttatcaagtcccaggacgtcactcggaatattaaaatctccgagtcttacctggggagaaaagtcaccatctggttcagttccggggctttcattagagctgatttgggtgagtggggaatgtctctaacaatacgggcacccagcgtagactatcgcaacaccctggggttgtgcggaacattcgatgaaaatcccgaaaatgactttcacgacaagaacggaatgcaaatcgaccaaaactttaataattacgtcgcattcatcaacgagtggcggatacttcccggaaaatccatgagcgatacccttcccgtatcaatgacttctccaggcaaaccatcctactgttcctgctcactcgatactgccgcttatccttcttccgaagacctcgatagcgtgtccaggagtgagatcgctcttgggtgtaaggatctcaaccatgtatcactgtcctcccttattcctgagctggacgtgacgagtgagtatatcaactctgataccctcgtgcgagagataaacaaacatacttctccagaagaatataatttgaaccttttcctccaggagaaaaagcacatcaatttgactaaattgggcctgaatgtgcagaaacatccaggaaatgagaaggaggattctctgcagtaccttgcaaataagaagtacacacaagggagggggtcacacagccaggagatgcgatataacagacaaaaccgctggaaacggcagaactttcatgagttccccccactgtttgctttccctagcctgtcacaaaccgacctggaagagctcacctacttcttccctgaagatcacgccgaagacgtccaacaggagttttttcccagttggcccaccccctccggcctcacagagtacagcaccctgacactttgtcaggagacccttgccaattcctccattggccgactatgcttggcgttcttgggaaagcgcttggactctgttatcgagatgtgcgtcaaggacgtcttactgaaagatgacttatcctgggccgaggcgggtgtggctctcctggaaaatgaatgcgagaagcgaattgtggaagagggcaagtataacaccgaagaatatggcacttcgatcgaggatatcttatctgtactgaagtgccctaacctttgcagcggaaacgggcagtgcatggagtggggctgcgcttgctctcctagcttttcaagctatgactgttccgattcatacgacaaagctccggaaataaccgagctgggcaatgccggtttttgtgatgttcagaagtacaactgcatgatggttcgggtgttcggcaaaggctttaaagaactgcccagtatcaaatgtgaggttaccaagctgcagtacaattcttctgagtggatgcccggagaaccgatctacacccagaccgtattccataactcccgggctgtggattgccagctccctactgatgtccagcagttcgataccatggatctggtgggaggcaagcccaccgggaagtggcagcttaaagtgtccaatgacggttacaagttctccaatcctaaaatcaccgtgatctatgacggggcatgtcaggtatgcggactatacaagaacgattcatgtactattaaggagaacgtttgtattattgacggtttgtgctacgtggagggagataaaaatcctacaagtccatgcctaatatgtcggcctaagattagcagattcacatggagctttttagaaaataatcagccaccagtcattcaagcgttacaggataagctacagactttttatggagagaactttgaatatcaattcgtggctttcgaccccgagggatccgatatccactttacgctcgacagcgggccagaaggagccagcgtatcctctgccggtcttttcatgtggaaaactgacctactaacaacgcagcagatcactgttagattgaatgacgactgcgacgcagagacccgtgtgacgatcgaggttacagtgaagtcatgcgattgtctgaacggtggctcgtgtgtctctgaccgaaatttttcgcctggctcaggggtgtacctgtgtgtttgcctgcctggctttcacggttccttgtgcgaagtggacatatccggttgccaaagcaatccttgtggcctgggctcttacatcagtggttttcattcctactcgtgcgattgtccccctgagttgaaggttgagacgcaatttgtaaaccagttcaccactcagacagtggttctcacgagatcagataaaagcgtaaacaaagaagaagacgataagaatgcccagggtcggaagaggcacgtgaaaccgacgagtgggaatgcgtttaccatctgtaaatacccgtgcgggaaatctcgcgagtgcgttgcgcctaatatctgtaaatgtaagcctggttatattgggagtaactgtcaaaccgcattatgcgaccctgattgtaagaaccatggcaagtgtattaaacctaatatctgccagtgtctccccggacatggcggtgctacttgtgacgaagagcattgcaatccgccttgtcagcatgggggaacatgcttggcaggtaacctatgcacatgtccttatggtttcgtcgggccacgctgcgaaacaatggtgtgtaaccgccactgtgagaatggaggccagtgtttgacccccgatatttgtcaatgcaagcctggatggtacggacctacttgttcgaccgccttatgcgaccctgtctgcctgaacggcggaagctgtaacaagccaaatacctgcctgtgccccaacggtttttttggggagcattgccagaatgctttctgtcaccccccttgcaaaaacgggggacactgcatgcgcaataacgtctgtgtttgcagggaaggctataccggtcggcgtttccagaaaagtatttgcgaccctacctgcatgaacgggggaaagtgcgtcggaccgtcgacatgtagctgccctagtggctggtctggtaagagatgcaacacccctatatgtcttcagaaatgcaagaacggcggagagtgtatagctccctccatctgtcattgcccctcgtcctgggagggcgtcaggtgtcagatcccaatctgtaatcctaagtgtctatacggcggaagatgtatctttcccaacgtatgctcttgcaggaccgaatattctggagtcaagtgcgaaaagaaaatccagatacgacggcattag

SEQ ID NO: 10311 - DNA, 624 bp, synthetic construct
  misc_feature 1..624: note = source = /note="Description of Artificial Sequence: Synthetic coding sequence"
  source 1..624: mol_type = other DNA
atgagcaccaagcccgacatgatacagaagtgcctgtggctagagatcctgatgggaatcttcatcgcaggcacccttagtttagattgcaacctgttaaatgttcatcttcggcgagtcacttggcagaacctgcgtcacctatcttctatgtccaatagttttcctgtcgaatgtctacgcgaaaacatcgcctttgagctgccccaagagtttctgcagtatactcagccaatgaaacgagacattaaaaaagccttctatgaaatgtctctgcaagcctttaatattttctcgcagcatacctttaagtattggaaagagcgacacctgaagcagattcagataggcctggaccaacaagccgagtacctcaaccaatgtctggaggaagacaaaaacgaaaacgaggatatgaaggaaatgaaggagaatgagatgaaaccatccgaggcgagggtacctcaactcagtagtctggagcttcggagatattttcatcgaatcgataattttcttaaggagaagaagtacagcgactgtgcgtgggagatcgtgcgtgtagaaatcagaaggtgcctgtattacttttacaagttcaccgctctattccgcagaaagtag

SEQ ID NO: 10312 - DNA, 939 bp, synthetic construct
  misc_feature 1..939: note = source = /note="Description of Artificial Sequence: Synthetic coding sequence"
  source 1..939: mol_type = other DNA
atggaaagcgcattaccggcagcaggtttcttgtattgggtcggagcaggcacggtggcctacctggctttgaggatttcttacagcttattcacagccctgagagtctggggcgtggggaacgaggccggagtgggtcctggtttgggcgagtgggccgtcgttactgggtccacagacggcattggcaaaagttatgctgaggaattggctaaacacgggatgaaggtggtgctcattagtagatccaaggataagctggatcaggtgagttctgaaatcaaggaaaaatttaaggtggagactaggacgattgccgtcgacttcgccagtgaagacatctacgataagattaagaccggcctggccggactggaaatcggcattcttgtaaacaatgttggcatgtcctatgagtaccctgagtacttcctggatgtgcccgacttagataatgtcatcaaaaagatgatcaacatcaatatcctgtcagtatgcaaaatgactcagcttgtcctaccaggcatggtggaacggagtaagggcgctatcctgaacatttcctccggctctggtatgctacctgttccacttttgactatttactcggccacaaaaaccttcgtggacttcttctcgcagtgcctgcatgaggagtacaggtccaagggcgtgttcgtacaatcggtgctgccctacttcgtggctaccaaattggctaagattcggaaacccacactggacaaaccatctcctgagacattcgtgaagtcagcaataaagaccgtcggcttacagagtaggactaacggttacctcattcatgccctgatggggtccatcatctccaatctgcctagctggatctatctgaaaatcgtaatgaatatgaacaagagtacacgggcacattacctgaagaagaccaagaagaattag

SEQ ID NO: 10313 - DNA, 2214 bp, synthetic construct
  misc_feature 1..2214: note = source = /note="Description of Artificial Sequence: Synthetic coding sequence"
  source 1..2214: mol_type = other DNA
atggagctggggtgctggactcagctggggctgaccttcctgcagttgctgctgattagtagtctgccacgggaatatacagtgatcaacgaggcttgtccaggggctgaatggaacatcatgtgcagggagtgttgtgaatatgatcagatcgaatgcgtctgtcccggaaaaagggaagtagtcggatatacaattccatgttgcagaaatgaagagaatgagtgcgatagttgtctaatccacccagggtgcaccattttcgagaattgcaagtcatgtaggaacggatcttggggagggacattggatgacttttatgtcaaagggttctactgcgctgagtgcagagctggttggtatggaggcgactgcatgcgctgcggccaggtgcttagagcccctaaaggacagatattgttggagtcctatcctctgaacgcacactgtgagtggacgatccatgcaaagcccggatttgttatacagctccggttcgttatgctgtcgctggaattcgattatatgtgccagtatgactacgtggaggtccgcgatggagacaatcgcgacggccaaatcatcaaacgggtttgtggcaacgagagacctgcgcctatacagtccataggctcctctctccacgtgttatttcattctgacggttccaaaaactttgatggcttccacgcgatttacgaggagatcactgcttgctccagtagcccttgcttccacgacggaacctgcgtactggataaagccggatcctataagtgcgcctgcctggcaggctacactggccaaagatgcgagaacctgttagaagcaggaaagtccaaaatcaaggcatccgaagattccctgtcagtcctggaggaacgaaattgctcagaccctgggggacctgtcaatggctaccagaagattacaggtggacctggattaattaacgggagacacgccaaaataggtacagtggtatccttcttctgcaacaacagctatgtccttagcggcaacgagaaaagaacatgccagcagaatggcgagtggagtggcaagcaacctatttgcataaaggcgtgtagggaacccaagatctctgaccttgtgcggaggcgtgtgttgcctatgcaagtgcagtcacgtgaaacgcccctccaccagctatattccgcagcgttttccaaacagaagctgcaatctgcacctacaaagaaacctgccctgccctttggagatctgcccatgggataccagcacctgcacactcagcttcaatacgagtgcattagcccattttaccgccgactgggcagttctaggagaacctgcctccgaactggaaaatggtctggtagggccccttcatgcatccccatctgcgggaaaatagagaacatcaccgctcctaaaacacagggcctacggtggccctggcaggcagccatttaccggcgaaccagcggggtgcatgatggttccttgcataagggggcttggttcctggtgtgctccggggctcttgtgaacgagagaactgtcgttgtcgctgctcactgtgttacagaccttggaaaagtgactatgattaagactgcagatctgaaagtggtcctagggaagttctatagggatgatgatcgagatgagaaaacaatacagtccctgcagatttccgccatcatcttgcatcccaactacgaccccatcctcctggatgcagatattgccatcctcaagctgctggataaagccaggatttctactagagttcagccgatttgcctggccgcttccagagatctcagcacgtcctttcaagagtctcacataaccgtagctggttggaacgtcctggccgacgtgcgttcccccggtttcaaaaatgacaccctgcgcagcggcgtcgtcagcgtggtggactcgttactgtgcgaagaacagcatgaagaccatggaattcccgtgtctgtaacagataacatgttctgtgcctcttgggagccaactgcaccaagtgatatttgcaccgccgaaacaggtggcatcgccgcagtgtccttcccaggaagagcaagcccagagccccgatggcatctgatgggcttggtgtcgtggagttatgacaagacctgtagccatcgcttatcaacagcctttacgaaggtgctgcctttcaaggattggattgagcggaatatgaagtag

SEQ ID NO: 10314 - DNA, 1503 bp, synthetic construct
  misc_feature 1..1503: note = source = /note="Description of Artificial Sequence: Synthetic coding sequence"
  source 1..1503: mol_type = other DNA
atggggaccgctagatggctggcccttgggtcactgtttgctcttgccggtttattggagggccgattagtgggcgaagaggaggctggcttcggcgagtgcgataaatttttttacgctggcactccaccagcaggcctggctgctgattcacatgtgaaaatctgtcagcgggctgaaggcgcagaacgattcgctaccttatacagcacacgagaccgtatccccgtatattcagccttcagagctccaaggcccgcacccggaggagcggaacagaggtggcttgtcgagccccagattgacgaccctaactccaatttggaagaagcaattaacgaggcagaggccataacatcagttaatagccttgggagcaaacaggcactgaatacagattacctggactcagactaccagcggggtcagttgtaccccttctcgttaagttcagacgtacaagtcgctacgtttaccctgactaattcagcacccatgactcagagctttcaagagagatggtacgttaacctccattccctgatggaccgagctctcacacctcagtgcggctctggggaggacctgtacatcttgactgggactgtgccctcagattatagagtcaaagacaaggtcgctgtgcctgagtttgtgtggctcgctgcttgttgtgccgtcccgggagggggatgggctatggggtttgtaaagcacactcgggatagcgacataattgaggacgtgatggtgaaggatctccagaagctcttgccttttaatccgcaacttttccaaaacaattgtggggaaacagaacaagataccgaaaagatgaagaaaattctggaggtggtgaaccagattcaggatgaggagcggatggttcagagtcagaaatcgtcgtctcctttgagctccacacggtcgaaacgttcaacactgctccctccggaggccagtgaagggtcatccagcttccttgggaaattaatgggcttcatcgccaccccttttataaaactctttcagctgatttactacctggtggtcgctatcctcaagaatattgtgtacttcttgtggtgcgttaccaagcaagtaatcaatggaattgaaagctgtctctacaggctcgggagcgctactattagctacttcatggcgatcggggaggaactggtctccatcccctggaaagtactgaaggttgtagcaaaagtcattagggccctgctgcgcatcctctgctgcctcctgaaagccatctgccgtgtcttgtccataccagttcgagtgctggtggacgtggctacattccctgtctacaccatgggtgcaattccgattgtgtgtaaggatattgccctaggtctggggggaacggtgagtctgctttttgataccgcttttgggactctgggcggtttgttccaagtggtctttagcgtttgcaagcgaatcggatacaaggtcaccttcgacaatagcggtgagctgtag

SEQ ID NO: 10315 - DNA, 300 bp, synthetic construct
  misc_feature 1..300: note = source = /note="Description of Artificial Sequence: Synthetic coding sequence"
  source 1..300: mol_type = other DNA
atgaagtcggcaaagctggggtttctccttagatttttcattttctgtagcctcaatacgctgctacttggaggcgttaataagatagccgaaaaaatctgcggggacttaaaagatccctgcaaactggacatgaacttcggttcttgctatgaagtacatttcagatatttctacaataggaccagtaagcgatgcgagacctttgtgttttctggctgcaatggaaacctgaacaactttaagctgaaaatcgaaagagaggtggcttgtgtagcaaagtataaacctcctaggtag

SEQ ID NO: 10316 - DNA, 390 bp, synthetic construct
  misc_feature 1..390: note = source = /note="Description of Artificial Sequence: Synthetic coding sequence"
  source 1..390: mol_type = other DNA
atgcccatggcttctcctcagacccttgttctgtacctgcttgtgctggctgtcaccgaggcctggggtcaggaggctgtgatcccgggttgtcacctacatccctttaatgtcacggttaggagcgaccgacaggggacctgccaggggtcacacgtagctcaggcttgcgttggtcactgtgagagcagtgccttcccttccagatacagcgtcctagtggcctcaggctaccgacacaacatcacctccgtgtcccagtgctgcactatctctggcctcaagaaggtgaaggtgcaattgcagtgcgtggggtccagaagggaagaactggaaattttcacagccagggcctgtcagtgcgacatgtgcaggctctctcgctactag

SEQ ID NO: 10317 - DNA, 1965 bp, synthetic construct
  misc_feature 1..1965: note = source = /note="Description of Artificial Sequence: Synthetic coding sequence"
  source 1..1965: mol_type = other DNA
atggctaaatttggcgtgcacagaatcttacttttggccatctcccttacaaagtgcctggaatcaacgaaattactcgccgacctcaagaagtgcggggacctcgaatgcgaggcactgattaatcgcgtgtccgccatgcgcgactaccggggacctgattgtcggtaccttaatttcaccaaaggtgaggaaatttcggtctacgtgaagctggcgggagagcgcgaggacctgtgggcaggatcaaaaggcaaggagtttggatactttcctagagacgccgtgcaaatcgaggaggttttcatcagcgaggagatacagatgagcaccaaggagtcagactttttatgtttgctaggagtatcttatacattcgacaacgaagactccgagctgaacggagactacggcgagaacatatacccttacgaggaagacaaggacgagaagagttctatctatgaatctgattttcaaatcgaacctggtttttatgcgacttacgagtccactttatttgaagatcaggtccctgctttggaagctcctgaggacataggcagcaccagcgagtcaaaagattgggaggaggtggttgtagagtctatggaacaggaccgtattccagaggtgcatgttcccccttcatctgctgttagtggggtgaaggagtggtttgggctcggcggagaacaagcagaagaaaaggcctttgaatcggtcattgaaccggtgcaggaatcatcatttagatctcgaaaaattgccgtcgaggacgaaaatgatctggaggaattaaataatggggaacctcagactgaacaccagcaagaatcagaaagcgaaatagacagcgtgcccaagacccagtctgaactagcatcagagagcgagcacattcccaaaccgcagagcactggctggttcggcggaggcttcactagttatttgggattcggggatgaggacaccggactcgaactgatcgctgaggagtctaacccccctctgcaggattttccgaacagtatcagttccgataaagaagctacggtgccatgtaccgaaatcctcaccgagaaaaaagatactatcaccaatgattccttgtcgctgaagccaagttggttcgacttcggcttcgctatactagggttcgcttatgctaaagaagataaaatcatgctggatgaccgaaaaaatgaggaggacggcggtgcagatgagcacgagcacccactcacatctgagttggacccagagaaggaacaggagatcgagaccataaagatcatcgagacagaagaccagattgacaagaaaccagtgagtgaaaagaccgacgaaagcgatacaatcccctacctgaagaaattcctatataacttcgataatccttggaattttcagaatattcctaaggaaaccgagctcccatttccaaaacagatcctggaccaaaacaatgtgatcgaaaatgaagaaacaggggaattcagcattgataactaccctacagataacactaaagtaatgatcttcaaatcctcctatagccttagtgacatggtgagcaacatcgaactgccaactcgaattcacgaggaggtgtatttcgaaccatcttcctctaaggactctgatgagaacagcaaaccctcggtggacaccgagggtcctgctcttgttgaaatcgatcgaagcgtggagaatactttattgaattcacagatggtgtccacggataactcgctctcatctcagaactacattagtcaaaaggaggatgcttctgaattccaaatcctgaagtacctatttcagattgatgtctacgattttatgaactcggccttctccccgattgttatcctcactgaaagggtgagtttgcctttcaagccgttcgccattatcctgccaattttactaaatattcgcgttgctacaaagtatgtgtag

SEQ ID NO: 10318 - DNA, 1152 bp, synthetic construct
  misc_feature 1..1152: note = source = /note="Description of Artificial Sequence: Synthetic coding sequence"
  source 1..1152: mol_type = other DNA
atggccggtataccaggattgctgttcctactattcttcctgttatgtgctgttggacaagtaagcccatatagcgccccttggaagccaacttggcctgcataccgccttcctgtagtgcttccccaatcaacgttaaatctagctaagcccgattttggggcagaagccaagctcgaagtgagtagttcatgtggcccacagtgccacaagggaacacccctgcccacatatgaagaggcgaagcagtatttaagctatgaaactctgtatgccaatggcagtagaactgaaacacaggtgggcatttatatcctttcctcatcaggggatggggctcagcatcgagactccgggtcctctgggaagagcagacggaaaagacagatctatggctacgactcaaggttttcaatattcggtaaagactttctgctcaattacccattctcaaccagcgttaagctcagtaccggctgcactggcacactcgtcgccgaaaaacacgtcctgaccgctgcccactgcatccacgacggaaagacttacgtaaagggaacacaaaagctccgggtaggttttctgaaacctaagtttaaagacggaggacgaggggcaaatgattctacgtctgcaatgcctgagcagatgaaattccagtggattcgggttaagaggacgcatgtgccaaaaggctggatcaaggggaatgctaacgatattggaatggattacgactacgcgctgcttgaactgaaaaagccccacaaacgtaagttcatgaagatcggagtctctcctcccgcaaaacagctccctggtggcaggatccatttttccgggtatgacaatgatcgcccaggaaatctcgtgtacagattttgtgacgtgaaagacgagacgtacgacctcctctaccagcagtgtgatgctcagcccggagcctctggtagtggagtttacgtaaggatgtggaaacgtcagcagcaaaagtgggagaggaaaatcattgggatcttttctggccaccagtgggtggatatgaatggctccccacaggatttcaacgtcgccgtacgcattacaccactcaagtacgcccaaatttgttattggattaaggggaattaccttgattgtcgcgaggggtag

SEQ ID NO: 10319 - DNA, 1662 bp, synthetic construct
  misc_feature 1..1662: note = source = /note="Description of Artificial Sequence: Synthetic coding sequence"
  source 1..1662: mol_type = other DNA
atgaagtggtgctgggggccagtcctgcttattgccggtgcaacagtcctcatggaaggcctccaagcggctcagagagcatgcggacagaggggcccaggaccgcctaagcctcaggagggcaacaccgtacccggagagtggccttggcaggccagcgttcggaggcagggggctcacatctgctctgggtccctggtggccgacacctgggtgttgactgccgcacattgtttcgagaaggcggcagccacagagttgaatagttggtccgtagtacttggctccctgcagcgggagggactgtccccgggagcggaagaagtgggagttgccgcacttcagctgcctagggcctacaatcactactcccaggggagcgacttggccttgttacagcttgcgcacccaaccacgcatactcccttatgtttgccacagccagcacatcggttcccattcggcgcttcctgctgggccacgggatgggatcaggacacgtcggatgctcctggcacattgcggaacctcagactgcggctgatctctagaccaacgtgcaattgcatctataatcaactccatcagcgtcacttgtctaatccggcacgaccaggtatgctgtgcgggggtccacaaccaggggtccaaggaccctgccagggggactcagggggtcctgtgctatgcctggagccggatggccactgggtacaagcgggaataataagtttcgctagtagttgtgctcaggaggatgcccctgtgctgctgacaaatacagcagctcatagttcttggctacaggcccgagtccaaggtgcagccttcctcgcgcagagcccagaaacaccagagatgagtgatgaggactcttgtgtggcatgcgggtctttgcgaaccgcgggaccgcaggctggcgctccgtcaccatggccctgggaggctcgcctgatgcaccagggacaattagcctgcggcggagcactggtctccgaagaagctgtgctgactgctgctcactgtttcattgggcgtcaggccccagaggagtggtctgttgggttaggaacacgtccagaggaatgggggttgaagcagctgattctgcacggcgcttacacacatccagagggaggctacgatatggcccttctgcttctcgcgcagcctgtcacgctgggggcaagtttgcgccctctctgtctgccctatccagaccatcacctgcccgatggagagcgcggatgggtgctcggcagagcacgcccaggcgcagggatatcctccttgcagaccgtcccagttaccctgctgggaccacgtgcctgcagccgcctgcacgccgctccagggggagatggtagtcccattctcccgggtatggtgtgtacttccgccgtgggcgagctaccctcttgcgaggggctaagtggggctcccctggttcacgaggtcaggggcacttggttcctggcaggccttcacagttttggagacgcatgtcaaggtccggcacgacctgcagttttcaccgccctccctgcatacgaagactgggtctcaagcctggactggcaagtgtattttgctgaggagcctgagcctgaggcagaaccagggtcctgcttagctaacatcagccagccaacctcgtgctag

SEQ ID NO: 10320 - DNA, 936 bp, synthetic construct
  misc_feature 1..936: note = source = /note="Description of Artificial Sequence: Synthetic coding sequence"
  source 1..936: mol_type = other DNA
atgggcataattcagtctattttagcaacctccagagactgttactcgtttaaaaagaaaccaatccccaagaaacccaccatgctggcccttgctaagattctgctcatatctactctgttctattctctactcagtggatcccatggcaaagaaaatcaggatatcaataccactcagaacatcgcggaggtgtttaagacaatggaaaacaagcctatttctctagaatctgaggctaacttgaacagcgataaagagaatattacaaccagtaacctgaaggctagtcacagcccacccctaaatcttccaaataactcccatggaatcacagatttcagctctaattcctcggccgaacatagtcttgggagtctcaagccaaccagcactatctcaacatcccctccacttatccacagcttcgtcagtaaagtgccctggaatgctcccatcgcggacgaagacctgctgcctatttctgcccaccctaatgctaccccagcattgtcctcagaaaattttacctggtcactggttaatgatactgtgaaaactcctgacaattcaagcatcactgtttccatcctatcctcagaacctacgtctccatccgtcaccccacttatagtggagccatctggctggctgactaccaactcagatagcttcaccggtttcacaccttaccaagagaaaacgaccttacagcctactttgaaattcaccaacaactccaagttgtttccaaacacatccgacccacagaaggtgctgaggctcgacaacgcccctgaaccttacgatgtttcattcggcaattcgtcttattacaacccaaccctcaatgactccgctatgcccgagtcagaggagaatgccagagatggcatcccaatggacgatatcccacccctgcgcaccagtgtgtag

SEQ ID NO: 10321 - DNA, 3120 bp, synthetic construct
  misc_feature 1..3120: note = source = /note="Description of Artificial Sequence: Synthetic coding sequence"
  source 1..3120: mol_type = other DNA
atgcagtcacgcttactgctgcttggcgctcctggcggacacggaggtccagcctctcgtagaatgagactattgttgcgccaggtggttcagcgcagacctgggggagatagacagcgcccagaagttcggctgctccatgctggcagtggggcagacacgggcgataccgtgaatataggtgatgtgtcttataagttaaagattcccaaaaaccccgaattggtaccccagaactacatcagcgatagtttggcacagagcgtcgtgcagcacttgcggtggatcatgcagaaagacctgctcggacaggacgtgttcctgattgggccacccggacccttgcggaggagcatcgctatgcaatacctcgagcttaccaaaagggaggtcgaatatattgccctgtctagggatacgaccgagacagaccttaagcagagacgggagattcgcgctggtactgctttctatattgaccagtgtgctgtacgggctgccaccgaagggagaacactcattctcgagggcttagagaaggccgagcgcaatgtgcttcctgttcttaataatctccttgaaaatcgagaaatgcaactggaagacggacggttcctcatgtccgccgaacgctatgataaacttctcagagaccacactaagaaagaactggattcctggaaaatagtgagagtctccgaaaacttcagggtgattgccctgggtttgcccgtgccaaggtattccggtaacccattggaccctcctctgcgtagtcgcttccaggctcgagacatctactatctaccttttaaggatcagttaaagctgttgtacagtatcggcgcaaacgttagtgccgaaaaagtaagtcagcttctctccttcgctaccacattgtgcagccaggagtcatccacattaggattgccggatttcccactggattcactggcggctgctgtgcagatcctggactcgttccctatgatgccaattaagcatgcgatccagtggctgtacccctattcgattctgttgggccacgaaggcaaaatggcagtggaaggggtgttgaagagattcgaattgcaggactccggcagcagcctgttacccaaggagatcgtcaaagttgagaaaatgatggaaaaccacgtgagccaagcgagtgtgactattcggatcgctgataaagaggttaccataaaggtcccagctggcacccgcttgttgtcccaaccatgcgccagcgaccggttcattcagaccctgtcccacaaacaactacaggccgagatgatgcagtcgcatatggtaaaggatatttgcctgatcggcggaaagggttgcggcaagaccgtgatcgctaaaaattttgccgataccctcgggtacaatatagaaccgatcatgctgtatcaggacatgaccgccagggatttgctacaacaaaggtataccctacccaatggggataccgcatggcggtccagcccgttggtgaacgcggcattagaaggaaagcttgtgttgctcgacggcatacatagggtgaacgccggtactttggccgttctgcagcgattgatccacgatcgcgaactttctttatacgatggatctagattgctcagagaggatcgctacatgcgcctgaaggaagaactgcagttgtctgatgagcagttgcagaagagatctatctttcccatacatccctcctttcgcatcattgcactcgccgagccaccagtgattgggtcgacagcccaccagtggcttgggcctgagttcctcactatgtttttctttcattatatgaaaccacttgtaaaatccgaggagattcaggtaataaaggaaaaggtgcccaacgtcccccaggaagctctcgacaagcttctgagctttacccacaaactacgagaaactcaggacccaaccgcccagtctctggctgcatcgttatcaaccagacagttgcttagaatatccagaaggctaagtcagtaccccaacgaaaacctgcacagtgccgtcacaaaagcctgcctgtccagatttttgccatctctcgcaaggtcggctctggaaaaaaacctggctgacgctaccatcgaaattaatacagacgacaatctggaaccagagttaaaagattacaagtgcgaggttacctcgggtactctgagaataggggcagtgtcggcccctatttacaatgcccacgagaagatgaaggtgccagacgtgcttttttacgataacattcagcacgtcatcgtaatggaagacatgttaaaagacttcctcctgggggaacacctgctcctagtgggaaaccagggggtgggaaaaaacaaaatagttgaccgctttctgcacctcctgaaccggccacgcgaatacatccagctgcaccgcgacaccacagtgcagaccctcaccttacaacctagtgtgaaggacggcctcatagtgtatgaagactcccctcttgtgaaggcagtcaaattgggtcacattctcgtggttgacgaagcagacaaggcccctacaaatgtaacttgcattctgaagactctggtcgagaacggcgaaatgatcctggctgatggacgacggattgttgcgaattccgcgaatgtcaacggtcgagagaatgtggttgtaatccatcctgacttccgtatgatcgttttagcaaaccgtcctggtttccccttcctcgggaacgacttcttcgggaccttgggggatatcttttcctgccatgccgtggataatcctaagccccacagcgagctagagatgctgcgacagtacggtcccaatgtgcccgaaccaatccttcaaaaactggtcgccgcttttggcgagttacggtcactggctgaccaggggatcatcaactatccctactccacacgggaggtcgtaaatatagtcaaacatcttcagaaattcccaacagagggattgtcctcagtggtccgcaacgtgttcgattttgacagttataataatgacatgcgtgaaatcctgatcaataccctgcataaatacggaatccctattggagccaagcccacttctgttcagctcgccaaggaatag

SEQ ID NO: 10322 - DNA, 801 bp, synthetic construct
  misc_feature 1..801: note = source = /note="Description of Artificial Sequence: Synthetic coding sequence"
  source 1..801: mol_type = other DNA
atgaggctgctcttcctggcggtactacgccctcatacaggcaatgccgtgaccgcccagcgcgtgcgggctcacctagaagctgcagggcatgtgtgcgtcttgaaagatgctttcgatttcgagagtaggtcagagatcgctaacttaatcctcgctgagaattgcgaggctgccctcgccttacatctatacagggggggtcgtctgctccaaggacaccgcatcccttttggcgtgattttcggcggaacggacgtaaacgaggacgcaaatcaggccgagaaaaacaccgtgatgggaagggtgctggaggaggcaagattcgccgtcgcctttacggagtctatgaaggaaatggcccaggcccagtgggtcgacccagtcttcactagggaagtgaaagcgaaagtgaagcgggcagcaggagttaggctgatcggagagatgccccaggaggacctccatgccgtggtcaagaattgtttcgcggtagtaaactccagcgtctcagagggtatgagtgcagccatcctagaggccatggacctggaggtcccggtactggcgcgaaatatccctggtaatgcggcagtcgtcaaacacgaggtgaccgggctcctgttcagcaatccccaagagttcgtgcacctggccaaaaggctggtgtccgatcccgctctcgaaaaggagatagtcgtgaacggcagagagtacgtccgaatgtaccacagttggcaggtggagagggacacctatcagcaactgatccggaaactagaaggttccacggaggactag

SEQ ID NO: 10323 - DNA, 2478 bp, synthetic construct
  misc_feature 1..2478: note = source = /note="Description of Artificial Sequence: Synthetic coding sequence"
  source 1..2478: mol_type = other DNA
atgttcagtggattcaacgtgtttcgagtaggaatctcatttgtgatcatgtgcattttttacatgccgacagtgaattctttgccagaactaagcccccagaagtacttcagcacacttcagcccggaaaggcatccctggcttacttttgtcaggccgattctccaagaacaagtgtattcctggaagaattgaacgaagcagtacgtccactgcaggactacggtatttctgtcgctaaggttaattgcgtaaaagaggaaatatctcgttactgcgggaaggagaaggatctcatgaaggcttacctattcaagggcaacatcctgctgagggagtttcccaccgacaccctgttcgacgtcaacgccatagtcgcacatgtcctgttcgcactgctgtttagtgaagtgaaatacatcacaaaccttgaagatctccagaatattgagaacgcactcaagggtaaggcaaatattattttcagctacgtccgagccattggcattcctgagcatagagccgtcatggaggccgcttttgtgtatggcacgacttaccagtttgtcttaacaactgagatcgcccttctcgaatctattgggtcagaagatgtggagtatgcccacctgtactttttccattgcaaactggtgctggatcttacccaacagtgcaggcgcactctgatggagcaaccgctaaccactttgaacatacatctattcataaagaccatgaaagcccctctgctgactgaggttgcggaggatccccagcaggtgtctaccgttcatcttcagctgggtctgccgttagttttcattgttagccagcaagccacttacgaagcggaccgccgaactgctgaatgggtcgcttggcggctcctggggaaggccggtgtgctgctcctccttcgggattcacttgaagtgaatattccccaggacgccaatgtggtgttcaaacgcgcagaggagggagttcccgtggaattcctggtcctccatgatgttgacttaattatttctcacgttgagaataatatgcatatagaagagatccaggaggacgaagataatgacatggaaggacctgatattgatgtccaggacgatgaagtcgccgaaacggtgttcagggacagaaagcggaagctgcctctggagctgaccgtggaattgacagaggagacatttaacgctactgtgatggcatcagacagcatagttctcttttatgctgggtggcaagctgtgtccatggccttcctgcagtcctatattgatgttgctgtgaagctgaaggggacatccacaatgctgctcactaggatcaattgcgcagattggagcgacgtctgtactaaacagaacgtgacagaattccccataatcaaaatgtataaaaaaggagaaaacccagtgagctacgcaggcatgctggggacagaggaccttctgaaatttatccaattaaacaggatctcctatccagtgaacataacaagtatacaggaagctgaggagtacctgtccggagagctctacaaagatttaattttgtacagtagcgtgagcgtcttgggcttgttttcccctacgatgaaaaccgctaaagaagacttctctgaagccggaaactatctgaaggggtacgtcatcacaggcatctattccgaagaggatgtattactgttgagcacaaagtacgcagcaagtctgccagccctgctgctcgcccgtcacaccgaaggcaagatcgagagtattcccctagcttccacccatgcgcaagatatagtgcagattattacggacgcactgctggagatgtttcccgaaatcaccgttgaaaatttgcctagctattttaggctgcagaaaccgctgctgatcctcttttctgacggcaccgtgaatcctcagtacaagaaagcaatccttacactggtcaagcagaaatacctggacagcttcaccccttgctggctgaacctcaagaacacccctgtggggagaggcatcctgagagcatactttgaccctctgccaccgctgccactgttggtgctagtcaatctccacagtggcggacaggtcttcgccttccccagtgaccaggccataatcgaggagaatttggtactctggctaaaaaagctggaagcaggattggagaaccacataacgatcttgcctgcccaggagtggaagcccccactcccagcttacgacttcttgagtatgattgatgcagccacatcgcagagagggacgcggaaagtacccaagtgtatgaaagaaacagatgtgcaggagaatgacaaggaacagcacgaagataaatccgccgtcagaaaggaacccatcgaaaccctgagaatcaagcattggaacagaagcaactggtttaaagaggctgagaagagtttccgcagagacaaggaactgggatgcagtaaggtgaactag

SEQ ID NO: 10324 - DNA, 672 bp, synthetic construct
  misc_feature 1..672: note = source = /note="Description of Artificial Sequence: Synthetic coding sequence"
  source 1..672: mol_type = other DNA
atgacatggagacatcacgtccggcttctgttcacagtctccctcgccctccagattattaatcttggcaactcctatcagagggaaaaacacaacggtgggagggaagaagtgaccaaggtggccacccagaaacatagacaatcgccattgaattggacatcaagccactttggggaggtgacaggctcagccgaaggttggggccctgaagaacccttgccctatagctgggcttttggcgaaggtgcatctgctaggccacggtgttgccggaatggaggaacttgtgtgttaggatcattttgtgtgtgtccagctcactttaccggccgatattgtgagcacgatcagcggaggagcgagtgcggggcattagagcacggcgcttggaccttgagggcatgccacctctgtaggtgcattttcggagccctgcactgcctgccactccaaacacctgatcgatgtgaccccaaagactttctagcgtcccacgcccatggcccttcagccggaggagctcccagccttctcctgctgcttccctgtgctctgctgcatagactactccgtccagacgcaccggctcacccgagatctctggtgcccagcgtactgcagagagagaggaggccctgtgggcgacccggtctgggacaccgactgtag

SEQ ID NO: 10325 - DNA, 1320 bp, synthetic construct
  misc_feature 1..1320: note = source = /note="Description of Artificial Sequence: Synthetic coding sequence"
  source 1..1320: mol_type = other DNA
atgcctgcaatagccgtcctggccgcagccgcagcggcttggtgcttcctccaggtggaaagccggcatctggacgcgctagccggtggcgcaggacccaatcatggtaactttttggataacgaccagtggttgtcaaccgtctcacagtacgacagggataagtactggaaccgctttagagatgatgattacttccggaactggaatcccaacaaaccgtttgaccaggctctagatcccagcaaagatccctgtctgaaggtgaaatgttctccgcacaaggtgtgtgtgacgcaggattatcaaacagccttgtgtgtgagcaggaaacatctgctgccaagacagaagaagggcaatgtagctcaaaagcattgggtggggccttctaacctggtgaaatgcaagccgtgtcctgtcgctcagtccgccatggtgtgcggaagcgatggacatagctatacgtccaagtgtaagctggagttccacgcctgtagtacgggaaagtcgctggcgacactgtgtgacggtccctgtccttgcctgcccgaacctgaaccccctaagcataaagcagagaggtctgcatgcaccgataaggagctgaggaatctggcttcgcggctgaaggattggttcggagccctgcatgaggacgccaaccgagttatcaaacccacatcctctaatacagcccagggaagatttgatacgagtatcctcccaatctgtaaggactccctcggatggatgttcaataagttagatatgaattacgatttactcctggatcccagtgagatcaacgctatttatttggacaagtacgagccttgcattaagccgctatttaactcctgtgacagctttaaggatggtaagctgagcaataacgaatggtgttactgcttccaaaaacccggtggcctgccatgccagaacgagatgaaccgcatccaaaaattaagtaaaggcaagtccttgctgggggcattcattccgagatgcaacgaagaggggtattacaaagcaactcagtgccatggctcaactggccagtgttggtgtgtggacaaatatgggaatgaactcgcgggaagcagaaagcaaggagctgtgtcttgcgaggaggaacaagagacgtcaggggatttcggttctggcggttccgtggtgctcctcgacgatctggaatatgagcgcgagctggggcctaaggacaaggagggcaagctcagagttcatacacgcgcagtcacagaagacgatgaggacgaggatgacgacaaagaggacgaagttgggtacatctggtag

SEQ ID NO: 10326 - DNA, 7871 bp, synthetic construct
  misc_feature 1..7871: note = source = /note="Description of Artificial Sequence: Synthetic coding sequence"
  source 1..7871: mol_type = other DNA
atgaaagtaaagggccgagggattacgtgccttctcgtctcttttgccgtgatttgcctggtggcgactcccggaggaaaggcttgcccaaggcggtgcgcttgctatatgcctaccgaggtccactgcactttccgatatttgacatcgatcccagatagcatacccccaaacgtggaaagaataaacctgggctacaatagcctcgtgaggctgatggagactgatttcagcggcctgaccaagctggagctgttgatgctccattctaatggcatacacacaattccggacaaaaccttctcagaccttcaagctctgcaggtgctgaagatgagctacaataaagttcgtaagctccagaaagacaccttttacggactgcgcagccttactcgcctgcacatggatcacaacaatattgaattcattaacccagaggtgttctatggactcaactttttgaggctcgtgcacctcgaaggcaatcagctaaccaaacttcacccagatacatttgtcagcctgagttatttgcagatattcaaaattagtttcattaagtttctgtatctctcagataacttcctgacatctctaccccaggaaatggtgtcctacatgcccgatctcgacagcctctacctgcacgggaacccgtggacctgcgactgccatctgaagtggctgagcgactggattcaggaaaaacccgacgtgataaagtgtaaaaaggatagaagcccttcaagtgcacagcaatgtcctctgtgtatgaaccctcgtacgagtaaagggaagcctcttgctatggtgagcgcggcagccttccagtgtgctaaaccaactatagactcttcattgaaatctaaatcattgaccattctcgaggatagtagttcagcattcatttcacctcagggcttcatggcaccgttcgggtcgctgacactgaatatgacagaccagagtgggaacgaagccaacatggtatgctctatacagaagccttcaaggacaagtcctatagccttcactgaggaaaatgactacatcgtcctcaacacctccttttcgaccttccttgtctgcaatatcgactatgggcacatccagcctgtctggcagatcttggccttgtattcagatagcccactgatcctggaaaggtctcacctcctgagcgagacaccacagttgtattataagtacaagcaagtggccccaaagcctgaagatatctttaccaacatcgaggctgacctacgagcagacccaagctggctgatgcaggaccaaatttcactgcagctgaatcgtactgcaaccaccttctctacgcttcaaattcagtattccagcgatgcccagataaccctgccaagagccgaaatgagaccagtgaaacacaaatggacgatgatcagcagggacaacaacacgaaattggagcacaccgtgctcgtcggcggaaccgtgggcttgaattgcccaggacagggagatcccacaccgcacgtagactggctgcttgctgatgggtcgaaggtcagagccccatacgtttctgaagacggcaggattctgatcgataaaagtggcaagctggaactgcagatggcagactcctttgacaccggcgtctaccactgcatctctagcaattatgacgatgccgatatactgacctaccgtatcaccgtggtcgaacccttagttgaggcctaccaggagaacggaatccatcacactgtgttcattggagagacacttgacttgccttgtcactcaaccggaatcccagatgcgagtattagttgggtgatcccaggcaataacgttctctaccagagctctagagacaagaaagtgttgaacaatgggactctaagaatcctccaggttaccccaaaggatcaaggatactaccgatgcgttgccgcaaatccatcaggggtggacttcttgattttccaagtgagtgtgaaaatgaagggtcagcgcccactggaacacgacggggaaacagagggctcaggattggacgagtctaaccccatagctcacttaaaggaaccccctggagcccaactgcggacttccgctctgatggaggcagaggtgggcaagcacacctcctccactagcaagcgccacaactaccgcgaactaacgttacagcgaaggggggattctactcaccgcagatttcgagaaaatcgccgacacttccctcccagcgccagacgaattgatccacagcactgggcagccttattggagaaggcaaaaaaaaacgccatgcccgacaaaagagaaaacaccactgtgtcaccgccacctgtggtaacccagttgccaaacatcccaggcgaggaagacgacagctccgggatgctggccttacacgaggagttcatggtgcctgcaacaaaagccttaaacctcccggctagaactgtcaccgccgatagtaggaccatatcagattctcctatgaccaacattaattatgggactgaattctctcccgtggtcaatagtcaaatcctgccgcctgaagagccaacagactttaagctctcgacggcaattaaaactaccgccatgtcaaaaaacatcaaccctacgatgtcctcacagattcagggtaccacaaatcagcactcatctacagttttcccactgctgctcggggctactgagttccaagacagcgatcagatggggagagggcgagaacatttccaaagtagaccacctatcacagttaggactatgattaaggatgtcaacgtcaagatgttgtcatctaccaccaacaagctactcctcgaaagcgtgaatacaaccaactctcaccaaactagtgttcgggaagtgtccgagccaagacacaatcatttttattcccacacgacgcagattctctccaccagcactttccccagcgatcctcacacagcagctcacagtcaatttccaatacctcgaaactcaaccgtgaatatccccctcttccggaggttcgggaggcagcgtaaaattggaggtcgtggaaggatcattagcccctaccgaacccctgtgcttaggcgacataggtattctatcttcaggagcactactcgaggctcttccgagaaatccactactgccttctcagcgaccgtccttaacgtgacctgcctaagctgtttgccacgggagcggctgacgactgccaccgccgctctgagctttccctccgcagcaccgataaccttccccaaggccgatattgccagagttccaagtgaggaatcaacaaccctggtgcagaaccccctcctgttgttggagaataagccttcagttgagaagaccacgccaactataaagtacttccgcaccgagatcagccaggtgaccccgaccggcgcagtgatgacttacgccccaacttcgatcccaatggaaaagacccataaggtgaatgctagttacccacgggtgagtagcactaatgaggccaaacgagatagtgtaattacctcctccctctccggcgctattaccaagccccctatgacaataattgctattacaaggtttagccggcgaaaaattccttggcagcagaatttcgtcaacaaccacaaccccaagggcaggcttcgaaatcaacacaaggtttccctgcagaagtcaacagccgttatgttgcccaaaacctcaccggctttgcccagggacaaggttagtccctttcacttcacaaccctctccacgtcagtgatgcaaattccatccaacacccttacaacagcccatcataccacaaccaagacgcataatccagggagtttaccgacaaagaaagaactgccctttccacccctcaaccccatgctgcccagcattatttccaaagactcctctaccaaatcaataataagtactcagaccgcaatccctgcaacaacgcctacatttcctgcctccgtgattacatacgagacgcagacagaaagatcacgagcacagacaatccaaagggaacaggagccacagaagaagaaccggacagatcctaatatttctccagatcagtcatctggtttcaccacaccaacagcaatgaccccaccagtcctgaccaccgctgaaacaagcgttaaaccaagtgtctctgcattcacacacagtcccccagaaaatacaacagggataagctccactatatcattccatagccgcaccctgaatctgacagacgtgatcgaggagctggcacaggccagcacccagactctgaagtccactatcgccagtgagaccacccttagcagcaaatctcaccagtccacaacaaccagaaaggccataattcggcacagcactatccctccctttctctcctcgtcagccacattgatgcccgtccccattagccccccattcacccagagagccgtgacggataacgtggctacccccatatcaggcttgatgaccaataccgttgtcaagttgcacgaatcgagccggcataacgctaagccccagcagctcgttgctgaggtagccaccagtccgaaagtgcacccaaacgctaaattcaccatcggcactacccactttatttactcgaacttgcttcactctacacctatgcccgcactgaccactgtgaagagtcagaactctaagctgacccccagcccatgggccgagaaccagttctggcacaagccgtactcggaaattgctgaaaaaggaaaaaagcctgaagtcagtatgctagccactacaggactgagcgaagcgaccacccttgtgtccgattgggacggacagaagaatacaaagaaatcagacttcgacaagaagcctgtccaagaagcaaccacatcgaagctcctacctttcgattccctgtccagatacatattcgaaaaacccagaatagtgggtgggaaggcagctagtttcacaatcccagctaatagcgacgcattcctgccgtgcgaagccgtggggaatccgttgccaactattcactggactcgtgtccctagtggcctggacctttctaagagaaagcaaaactctcgggtgcaagttctccccaacggtaccctgagtatccagagggtggagatacaagatagagggcagtacttatgtagtgctagtaatttattcggcaccgatcacttacacgtcacactgagtgtggtctcctatcctccaaggatcttggagagaaggacaaaagagattactgtgcatagcggttccacagtcgagcttaaatgcagagccgagggtagaccatcacccactgtgacctggattttagcgaaccagactgtggtgtccgagagcagccaaggaagcagacaggctgtagtcaccgtcgacggaaccctggttcttcataatctgtcaatttatgatcgcggtttttataaatgcgtggcctctaacccgggagggcaggattctttactggtcaagattcaggtcattgctgcccctcccgttatcctggagcagcgcagacaagtgatcgttggcacctggggcgaatcccttaagttgccttgcactgccaaaggcacccctcagccatcagtctattgggtcctcagcgatggcaccgaggtgaaacctctgcaattcaccaactccaagctcttcctcttcagcaacggtaccttgtacatccgcaacctggcaagtagcgaccggggtacttacgaatgtatcgccaccagttccacaggctcggagcggagggtggtgatgctcacaatggaggaacgggtgacctcaccccgtatcgaggccgcatcccagaaacgtaccgaggtcaacttcggggacaagctacttctcaattgcagcgccacaggggaacctaaacctcaaatcatgtggcggttgccctccaaagcagttgtggaccagcaacatcgcgttggcagctggatacatgtttatccaaacgggagtctcttcataggctcggttacagagaaagacagcggagtgtacctatgcgttgctcgcaacaagatgggagacgatctgatcttgatgcatgtctcactgagactgaagcccgctaagattgaccacaagcagtatttccggaagcaagtcctccacggtaaagacttccaggtcgattgcaaggctagtggatctcctgtgccggagattagctggtcattgcctgatggcacaatgattaataatgcaatgcaggcagatgacagtggacaccggacccgtcggtacaccttgttcaataacggaacactgtactttaacaaagtcggggtggctgaggagggcgactacacctgttatgcgcagaatacattgggcaaagacgagatgaaggtacacctcaccgtaatcacggccgcaccccgtatccggcagagcaacaagacaaataaacgcataaaggccggagacactgccgtccttgattgtgaagtcactggagaccctaaaccaaagatcttttggctgcttccctcaaacgacatgatttccttctctatcgacagatacactttccacgccaacggatcacttactatcaacaaggtaaagttgctggattccggcgaatatgtgtgcgtcgcgaggaatccaagtggagatgacaccaaaatgtacaaattagacgtggtgtcaaaacctcccctcatcaatggtctttacacgaatagaactgtcataaaagctactgcagttaggcattcaaaaaaacacttcgactgtcgcgctgagggcaccccctcaccagaggttatgtggattatgccagataatatctttttgacagccccatactacgggagtagaatcaccgtccataaaaatgggactcttgagattcgaaatgtcagactgagtgattctgccgatttcatttgcgtcgccagaaatgagggaggcgagagcgtacttgtcgtgcagctggaggttctggaaatgcttcgcaggccaacatttaggaacccctttaacgagaaaatcgttgcacagcttgggaaatcgactgccctgaactgctccgtcgacggcaatccaccacccgagatcatctggatcctgcctaatgggaccagattctcaaatggtccgcagtcttatcaatacctgatcgccagcaatggttccttcatcattagtaaaactacgagagaggacgccggaaaatataggtgcgctgctcggaacaaggtggggtatatagaaaagctcgttatcctcgagatcgggcagaaacctgtgatccttacctatgccccaggtactgtgaaggggatctcaggtgagagcctcagcttgcactgtgtgtccgatggaatccccaagccaaatatcaaatggacaatgccgtcaggctacgtggttgaccgccctcagatcaatgggaagtacatcctgcatgataatggcaccctggtgatcaaagaagcgaccgcgtacgaccgcggaaattatatatgcaaggcccagaattctgtcggccacaccctgattacagtgcctgtgatgattgtggcttaccccccacggattaccaacagacccccaaggagcattgtgaccagaacaggcgctgcctttcaactccattgtgtggccctgggcgtgccaaaaccggagataacatgggaaatgccagaccactcgctgctgagcacagcaagcaaagaacgtactcacggtagtgagcagctccatctgcagggaaccctcgtcattcagaaccctcagacgtccgattccgggatctacaagtgtacagccaagaatccattgggtagcgactacgcggcaacttacatccaggtcattta

SEQ ID NO: 10327 - DNA, 1995 bp, synthetic construct
  misc_feature 1..1995: note = source = /note="Description of Artificial Sequence: Synthetic coding sequence"
  source 1..1995: mol_type = other DNA
atgaaaactgggttattttttctgtgtttactcgggacagcagcggcaattccaaccaatgcaagattactaagcgatcatagtaaacctactgctgaaaccgttgcccctgacaatacagcaattccttcactacgggctgaagctgaagagaacgagaaggagacagccgtgtctactgaagacgactcacaccacaaggctgagaaatcaagcgtcctgaaatccaaggaggaaagccatgaacagagcgcggagcagggcaagagtagctcacaagagctggggttaaaggatcaggaggatagcgatggtcatctttctgtaaacctggagtacgcgcctactgagggcacccttgatattaaagaggatatgtctgaaccccaggagaagaagctcagtgaaaatacagattttctcgctcctggcgttagttctttcaccgattctaaccagcaggagagcatcacgaagcgcgaagaaaaccaggagcaaccccgtaactatagtcatcaccagttgaaccggagctctaagcattcacaggggcttagggaccagggtaatcaagagcaagatcccaacatctcaaacggggaggaggaagaggaaaaggaacccggtgaggttggcacgcataacgacaatcaagagagaaagaccgaactcccgcgagagcacgctaattctaaacaggaggaggataatacccaaagtgatgatatcctggaagagagcgaccaaccgactcaagttagtaagatgcaggaagatgagttcgatcaggggaaccaggaacaggaggacaattctaacgctgaaatggaggaagagaatgcgagtaacgttaacaaacacatacaagaaacggaatggcagagccaggagggcaagaccggactcgaagcaatctccaaccacaaggagacggaagagaagaccgtgtcggaggccctgctaatggaaccaactgatgacggtaatacaacccccaggaaccacggcgttgacgatgacggagacgatgacggagatgatggcggtaccgacggcccaagacattcagcttctgatgactactttatcccatcccaggcattcttggaagctgagagggcccagtcaattgcctaccatctgaagatcgaagagcagcgcgagaaagtgcatgaaaacgagaatattggcacaaccgagccaggcgagcaccaggaagccaaaaaagccgaaaattccagtaatgaggaagaaacgtcgagtgagggcaacatgcgcgtgcatgcagtggactcttgcatgagcttccagtgtaagaggggccatatctgcaaggcggaccagcagggtaagccacattgcgtatgtcaggacccagtcacttgccccccaactaagcccctcgaccaggtttgcggtaccgataatcagacctacgccagcagttgtcacctctttgcgaccaagtgcaggttggagggcactaaaaaaggccatcaactccaactcgactactttggggcatgcaaatctatccctacgtgtacagatttcgaggtcattcagttcccattgaggatgagagactggcttaagaatatcctcatgcaactttacgaggctaattccgagcatgccggatatttgaatgagaagcagagaaataaggtgaagaaaatctatctcgacgagaagcgactgctcgccggagaccacccaatcgacctgcttttgcgcgattttaaaaaaaactatcacatgtacgtgtatcccgtacattggcagttctccgagttggaccagcaccccatggatcgggtgctcacccactcagaactcgccccactccgtgcatcgctggtccctatggaacactgtatcacccggttttttgaggaatgtgacccaaacaaggataagcatatcaccctgaaggaatgggggcactgtttcgggatcaaggaggaggacatagatgagaatttgctgttctag

SEQ ID NO: 10328 - DNA, 1254 bp, synthetic construct
  misc_feature 1..1254: note = source = /note="Description of Artificial Sequence: Synthetic coding sequence"
  source 1..1254: mol_type = other DNA
atgcttgccctgttagtgctcgtcacagttgcgctggcctcagcacaccatgggggagagcactttgaaggcgagaaagtgttcagagttaacgtggaagacgaaaatcacattaatattattagagaactcgcctccaccacacagatcgatttttggaaacctgactcagtgacacagataaagcctcattccacggtggatttcagggtgaaagctgaagacacagtcacagtggagaatgtcttaaagcaaaacgaactgcagtataaggtgctaatcagtaacctgaggaatgtggtcgaggctcaattcgatagtagagtgagggcaacaggccattcctacgagaaatataacaagtgggagaccatcgaggcgtggacccagcaggttgctacggaaaatcccgctcttatcagcaggagcgtgattggaacaacattcgaggggcgagctatttatctgctgaaggttggcaaagccggtcagaataagccagctatctttatggactgtggctttcacgctagggagtggattagccctgctttctgccagtggtttgtccgcgaagccgtgcgaacctacggtagggaaatccaggtgaccgagctcctggacaagctcgatttttacgtactgcctgtcctcaacatagatggatacatatatacatggaccaaatccagattttggcgtaagacccggagcacccataccgggagtagctgtattgggacggacccgaacagaaacttcgacgctggatggtgtgagattggcgcttcgcggaacccatgtgatgagacttactgcgggcctgccgcagaatccgaaaaagagaccaaggcgcttgcggactttatccggaacaagttgagctctatcaaggcttatctgacaatacactcctacagtcagatgatgatatatccttattcatatgcctataagctcggagaaaacaatgcagaattaaatgcattggcaaaggcgacagtcaaggaactggcaagccttcacggaaccaaatatacatatggtcctggagctactactatataccccgcagcaggagggagtgacgactgggcttacgaccaggggattcggtattcttttacatttgagctgcgggacacaggtaggtacggatttctgctcccagagtcccagatccgagctacatgtgaggaaacctttttggccattaagtatgtcgcttcctacgtgctggagcacctctactag

SEQ ID NO: 10329 - DNA, 588 bp, synthetic construct
  misc_feature 1..588: note = source = /note="Description of Artificial Sequence: Synthetic coding sequence"
  source 1..588: mol_type = other DNA
atggccgtcagccaaggtgacgggactctgtgctttgtgctgctcttgtgttgctggcaggagactgaactccgaccaaggacagtaataccaggcagccccaccgaaatccccttctcctccaaacaggaagatatgtccgaactgcttgatgagatcctggtgcaagagatcttagatcttaataaaacgaccccatctgagatgccttccacggccagcactctgagtacaccactccacgccggtattgacgagaactatcaggccggtggcagtgaaaattatcatgagcttctcgaaaacctccagtttagtccaggcatagaggtgaagatatctaatgacgaagccaacgccaacgctaatctgcacggagatccctccgaaaattatagaggcccacaggtgtcccctggcagcgagaaatctgtatcttctaaggagaaaaactccaagaacacacagtacgaaaatctgtcgattttggatcagatactccagaatattgggaggagttcggggaatatcttccataaagaacagcaacgaacgagcgcccagcgccgtagccaaggcagccagtag

SEQ ID NO: 10330 - DNA, 2334 bp, synthetic construct
  misc_feature 1..2334: note = source = /note="Description of Artificial Sequence: Synthetic coding sequence"
  source 1..2334: mol_type = other DNA
atgaacgcgaataaagacgaacgtttgaaagccaggagtcaagactttcacctattcccggcactgatgatgctgtctatgaccatgctctttttgcccgttactggcactctgaagcaaaatatccccaggctgaagttgacttataaggacttgctgttatccaacagctgcattccttttcttgggtcctccgagggcctggatttccagacgctgctgctggacgaagaacggggaagattgctgctaggcgctaaagatcacatcttcctccttagcctggttgatctcaacaagaatttcaagaaaatctactggcctgcagctaaagagcgcgtcgaactgtgtaagttggccggtaaggatgccaacaccgaatgtgccaacttcatccgtgtacttcaaccttacaacaaaacgcatatatacgtgtgtgggacaggagcgttccaccccatctgcgggtatatagacctgggggtgtacaaggaagacattatctttaagctcgacactcataatttggagtccggccgtctaaaatgcccgtttgacccccaacagccatttgcatcagttatgacagatgaatacttgtacagcggtacggcatctgacttcctgggcaaggacacagcttttacacgtagcttgggacccacgcacgaccaccattatatccgcaccgacatcagcgagcactattggttgaatggggcaaagtttatagggacattctttatacctgacacctacaacccagatgacgataaaatctattttttctttagggagtcaagtcaggaggggagtacaagcgataaaaccattctctcacgggtggggcgagtatgcaaaaatgacgtgggtggccagaggtcacttattaataaatggaccactttccttaaggctcggctgatctgctctatccccggttcagacggggctgacacctactttgacgagttacaagacatctacctgctgcctacccgtgacgagcgaaaccctgttgtttatggcgtgtttacaactacctcaagcatcttcaaagggtctgccgtgtgcgtttattcgatggccgatatccgcgcagtgtttaacgggccatacgcacataaagagagcgcagaccatagatgggtacagtacgacggacgtatcccttacccacgaccaggcacctgtccatccaagacatacgacccactcatcaagtcaacgagggatttccctgacgacgtgatcagtttcatcaaaagacactccgtgatgtataaatcggtctaccccgtcgctggcggtccaacctttaaaagaataaatgttgattatagattgacccaaatcgtggtggatcatgtcatcgctgaagatggccagtatgatgtcatgtttctcggaacagatatcggcactgttctgaaagtggtgagcatatcaaaagagaaatggaatatggaagaagtggtactcgaagagctgcagatattcaagcattccagcatcatcctgaatatggaactcagcttaaaacagcaacagctttatatcggatctcgagacgggcttgtgcaactgtccttacaccgatgcgacacatatggcaaggcttgcgcggactgctgtttagcccgagatccatactgcgcatgggacggtaatgcctgttctaggtatgccccaacttctaagcgacgggcaagaagacaggatgttaaatacggtgatccaatcacccagtgctgggatattgaggactctatcagtcacgagactgccgatgagaaggtcatcttcgggattgagtttaatagcacctttttggagtgtatacccaagtcacagcaggctacgataaaatggtacatccagaggtctggagatgaacaccgcgaggagctaaaacccgacgagaggatcattaaaactgaatatggcctattgattcggagtctacagaaaaaggatagtggcatgtactattgcaaggcccaggagcatacgtttatacacacgatcgtgaagctcacattaaatgtcattgagaatgaacagatggaaaacacccaaagagcagaacacgaggagggcaaggtaaaggatctgctggccgaaagccggcttcgctataaagattacatacagattttgtctagccctaacttttctcttgatcagtactgcgaacaaatgtggcaccgtgagaagcgaagacaacgcaacaaaggaggccctaaatggaaacatatgcaggaaatgaaaaaaaagaggaaccggagacaccaccgcgatttggacgagctgccgagagccgtggctacttag

SEQ ID NO: 10331 - DNA, 1332 bp, synthetic construct
  misc_feature 1..1332: note = source = /note="Description of Artificial Sequence: Synthetic coding sequence"
  source 1..1332: mol_type = other DNA
atgcagcccagcgagatggtgatgaatcccaagcaagtgtttctgtctgtactcattttcggtgtagccggattgctgctctttatgtacctgcaggtttggatcgaagaacagcacacagggagagttgagaagagaagggaacagaaggtcaccagcggctggggacctgtcaagtacttgcgacctgtgccccgaatcatgtcaactgagaagatccaagagcacattaccaaccaaaaccccaagttccatatgccagaggatgtgagagaaaaaaaagaaaatctgctgttgaattccgagcgctctacgcggttactaaccaaaacatcccatagtcagggaggggatcaggcgctgtctaagtctaccggcagtcccaccgaaaagctgattgaaaaaagacaaggagccaagactgtatttaacaaattttctaacatgaactggccagtggacatccatcccctgaataagtctctggtcaaagacaacaagtggaaaaagaccgaggaaacacaagaaaagcgacggtccttcctgcaagagttctgtaagaaatatggcggagtaagtcatcaccagtcacacctgtttcacaccgtatccaggatttacgttgaggacaagcacaagattctgtactgtgaggtgcccaaggcaggttgctcaaattggaagaggatcttgatggtgctgaacggtctggcaagctccgcgtataacatcagtcacaacgcagtccactatggtaagcacctgaagaagctggatagctttgatctgaaagggatatacaccagacttaacacatatactaaagcagtttttgttagggacccgatggagcgactcgtgtccgccttccgggacaaattcgagcatccgaactcatattaccacccagtctttggtaaagccattatcaagaagtaccgccctaacgcctgtgaagaggctctgattaacggcagcggagtgaaattcaaggaattcatccattacctgctggatagccaccggccagtcggcatggatatccactgggaaaaggttagtaagctttgttatccctgccttataaattacgactttgtcggcaagtttgagaccttggaggaagatgcaaactatttccttcagatgattggcgctcccaaggaattgaagttccccaactttaaggacaggcacagctctgacgaaagaaccaatgctcaagttgtccgccagtacctgaaggacctgacaaggacggagcgtcagctgatttacgatttttactatttggactacctgatgttcaattacactactccctttctgtag

SEQ ID NO: 10332 - DNA, 3228 bp, synthetic construct
  misc_feature 1..3228: note = source = /note="Description of Artificial Sequence: Synthetic coding sequence"
  source 1..3228: mol_type = other DNA
atgcggggtgggaagtgcaatatgttgagctcactggggtgcctgctgctgtgtgggagtattacgctcgctttggggaatgcacagaaactccccaagggaaaaagaccaaatctgaaagtacatattaatacaacctccgactccattctgctgaagtttctgagaccttctcccaatgttaagctggaaggcctgttattaggatacggatcgaatgtgtcccccaaccagtacttccctctccccgcagaaggcaagttcactgaagcgatcgtggacgctgagccaaagtatctgattgtagtgcgccctgcaccaccccctagccagaagaagagctgcagcggtaagacgcgctctcggaagcccctgcagctggtggtcggaactttgactccaagcagcgttttcttgtcatggggctttcttattaaccctcaccacgattggacactaccctcccattgccctaacgatcgattctacaccattcggtaccgcgagaaagacaaggagaagaaatggatctttcagatctgccccgcaactgagactatcgtggagaacctgaagcccaatacagtgtacgagttcggggttaaggataatgtggaggggggaatttggtctaagatattcaatcacaaaacagtggtgggatcaaagaaagtgaatggaaaaatacagtcaacctatgatcaggaccataccgtacccgcatacgttcccaggaaactgatcccgatcaccattatcaagcaggtgattcagaacgtgactcacaaggattcagctaaaagcccagagaaggccccactggggggtgtgattctggtgcatcttatcataccgggattaaatgaaactaccgtcaagttgccggcatctctgatgtttgagataagcgacgcgctcaagacgcaactcgctaaaaacgagactctcgctttgcccgctgagtccaaaactccagaagtggagaagatatccgccagacctacaaccgttactcctgagaccgtgcctcggagcactaagccaaccaccagtagtgccctggatgtgtcggagacaactttagccagctcagaaaaaccgtggattgtccccaccgctaagattagcgaagattccaaagtgctgcaacctcaaaccgccacttatgatgtgttcagtagcccaaccacttctgacgagcccgagatctccgattcctacacggctacgtccgacagaatccttgattctatcccccctaagacaagtcgcactttggagcagcctcgggcaaccctcgcaccctctgaaacaccctttgtgcctcagaagctggagatattcaccagtcccgagatgcagccaacgactccagccccacagcagacgacctcaattcccagcactccaaagcggagaccccgtccaaagccgcctagaactaaacccgaaaggaccacaagcgccggaacaatcacccctaagatctcaaagtctccagagcctacttggactactccagcacccggtaaaacacagttcattagtttgaaaccaaaaatcccattatcccctgaagtgacccatacgaaaccagctccgaaacagactcccagagcacccccaaagccgaaaacgagtcccagaccccgtatacctcagactcagcccgtccccaaagtgccacagcgtgttacagctaaacccaaaaccagcccaagccctgaggtgagctacacaacgccggcacccaaggacgtcctcttgcctcacaaaccctatccagaggttagccaatccgagcctgctcctctggagacgcgtggcatccccttcattcctatgatcagcccgtcgccatcccaagaggagctacagacgaccctggaagaaaccgaccaatcaacacaggagcctttcaccactaagatcccccgtaccactgagcttgccaaaaccactcaagctccccaccgattttataccaccgtccggccaagaacaagcgacaagcctcatatcaggccaggagtcaagcaagcccctcggccatccggggcagacagaaacgtttccgtcgacagcacacatcctactaagaaaccaggcacccgcagacctccgcttcctcctaggccgacgcaccctcgcagaaagccactgcctcctaacaatgttaccgggaaacccggatccgcagggattatcagtagtggtcccattaccacacctccgctgcgtagtacacctaggcctacaggtacccctctcgaacgtattgagaccgacattaagcagcctacagtgcctgcatcaggtgaggaactggagaacattaccgacttttcctccagcccaacccgcgaaacggatcccctgggtaagcctcggtttaaaggcccacacgtgcgctacatacagaagccggacaattccccctgcagcatcactgactctgtgaagagatttccgaaagaggaagccacggaaggcaacgctacttccccaccacagaatccccctaccaaccttactgtcgttaccgtcgaggggtgtccctcctttgtgatacttgactgggaaaagccactgaatgataccgtaaccgagtacgaggtgattagcagggagaacggttcgttcagtgggaaaaataagagcatccagatgactaatcagacctttagcaccgttgagaatctcaagcctaataccagctacgagttccaggtcaagccaaagaatccactgggagaaggccctgtctctaatacagtggccttcagcaccgaatctgccgatcctcgggtctccgagcctgtcagtgccggaagagatgcaatttggacagaaagaccatttaatagcgactcatactcagaatgcaaggggaaacaatatgtcaagcgaacctggtataagaaattcgttggggtgcaactctgtaactctctgcgctataagatttatttgagtgattctctgaccggtaagttctacaatatcggcgaccagagagggcatggcgaagaccattgccagtttgtagacagtttccttgacggccgaactggacagcaactcacaagcgatcagctccccatcaaagagggttattttcgcgcagttcgtcaggagcccgtgcagtttggggaaattggaggccatacacaaatcaattatgtgcagtggtacgaatgtgggactactatcccagggaagtggtag

SEQ ID NO: 10333 - DNA, 483 bp, synthetic construct
  misc_feature 1..483: note = source = /note="Description of Artificial Sequence: Synthetic coding sequence"
  source 1..483: mol_type = other DNA
atgctccctttcctttttttctccactctgtttagtagcatcttcaccgaagcccagaagcagtactgggtgtgcaactcaagcgatgcctcaatttcttacacctattgcgataagatgcaataccccatctctattaacgtcaacccctgcattgaactcaaaagaagcaaaggtttgctgcacatcttctacatccctaggagggacctaaagcaattgtacttcaacctttacattaccgtaaatactatgaatttacctaagagaaaggaagttatttgtcgcggtagcgacgatgattacagcttctgtcgagccttgaagggcgagacagtaaatacaacaatctcgttctcgttcaagggtattaagttttctaaagggaagtacaagtgtgtggtcgaagccataagcggttccccagaggagatgctcttttgccttgagttcgttatactacaccagccaaattccaactag

SEQ ID NO: 10334 - DNA, 780 bp, synthetic construct
  misc_feature 1..780: note = source = /note="Description of Artificial Sequence: Synthetic coding sequence"
  source 1..780: mol_type = other DNA
atggctgccctcatgcgaagcaaagattcatcctgttgcctgttgctgctggccgctgttcttatggtggagagtagccagattggtagcagcagagctaaactcaactccattaagtcatccttgggcggagagaccccagggcaggccgcaaaccgcagtgccggtatgtatcagggcctagcattcggcggtagtaagaaggggaaaaaccttgggcaggcttatccgtgttcatcagataaggagtgtgaggtgggcagatactgccatagtccacaccaggggagcagcgcttgcatggtttgcaggcgtaaaaagaagagatgccacagagacgggatgtgctgcccatccacacggtgcaacaacggaatttgtatacccgtcacagagagtattctgaccccacacatccccgctctcgacggaactcgtcaccgtgacaggaaccacgggcactactcaaatcacgatctcggctggcagaacctcggccgacctcatacaaaaatgagccacataaagggacatgagggcgacccctgtctccgctcatcggactgcatcgaaggattctgctgcgcacggcacttttggaccaagatttgcaagcctgtgctgcaccagggagaagtgtgcactaagcagcgcaaaaaaggttcacacggccttgagatattccagcgctgcgactgcgctaagggactgagttgtaaggtctggaaagatgctacatatagtagcaaagccaggttgcacgtctgccagaaaatatag

SEQ ID NO: 10335 - DNA, 3030 bp, synthetic construct
  misc_feature 1..3030: note = source = /note="Description of Artificial Sequence: Synthetic coding sequence"
  source 1..3030: mol_type = other DNA
atgggccagctttgttggctgccactcttggccccacttctgttgctaaggcctcccggtgtgcagtctgctgggccaattagggctttcgtcgtccctcatagtcacatggacgtgggatgggtatacacagtccaggaatctatgcgggcttacgcagctaatgtatacacttctgtagttgaagagctagctcgaggacagcagcgtcgcttcatagccgtcgagcaggagtttttccggctgtggtgggatggcgtggcttccgatcaacaaaaatatcaagtgcgccagcttttggaggaaggccgactggagttcgtcattggcggacaagtgatgcatgatgaggcagtcacccacctcgacgatcaaatcttgcaactaactgaggggcatggctttctctacgagactttcggaatcagaccgcagttcagctggcatgtggaccctttcggggcttcagctacgaccccaactctgtttgctctggctggctttaatgctcacttaggctctcgcatcgattacgacctgaaagcagccatgcaggaggcccgaggcctgcagttcgtatggcgtggttccccctcgctgtcagagagacaagaaatttttacacatattatggaccaatattcatattgcacaccttcacacatccccttcagcaaccgaagtggcttctactggaacggcgtagccgtcttccccaagccacctcaggacggcgtttatcccaacatgtctgagccagtgaccccggctaacataaacctctatgctgaagcactggtcgctaacgtaaagcaacgcgcagcctggttcagaacccctcatgtcctgtggccttggggttgcgacaaacagttcttcaacgcgagcgtccagttcgccaacatggaccctctgcttgatcacataaatagccacgccgctgagctgggagtgtccgtgcagtacgcaaccctgggggactattttagggcacttcacgctcttaacgtcacttggcgcgtcagggaccaccacgacttcctcccctactctacagagcccttccaggcttggaccgggttttacacttccaggtcatccttaaagggtctggcacgacgggcatcggctctgctgtacgccggagagagcatgttcacacggtacctgtggccagccccaaggggacacctggatccaacgtgggccctgcagcagcttcagcagctgagatgggctgtgtcagaggtgcagcaccacgacgctatcaccggcacggagagtccgaaagtaagggatatgtacgcgacacatctggcttctggtatgcttggcatgaggaagcttatggccagcattgtcctggatgaactccagcctcaggcccctatggctgcctcctctgacgctggtcccgctggccacttcgcgtcagtttataatcccttagcctggaccgtcacaacaatcgtaacgctgacagtgggcttccctggcgtgcgggtgaccgatgaggccggacaccccgtgccatctcagatacagaacagtacagaaacaccaagcgcctatgacctccttatcctcaccactatacctggcctgtcttatagacactataacatccgcccaacggctggtgcccaagagggcacacaggagcccgctgccactgttgcgagcactctacaatttggtcgcaggcttaggcggaggacatcacacgctggtcgttatctagtgcctgtggctaacgattgctacatcgttcttctagaccaggatacaaacctgatgcattccatttgggagcggcagtctaatagaactgtgcgcgtgacacaggagttccttgaataccatgtgaacggcgacgtgaagcagggccctatcagtgacaattatctgtttacacccggtaaagccgcagtccccgcatgggaagccgtagaaatggagattgtggctggccagttggttaccgaaattaggcaatacttctacaggaacatgaccgctcaaaattacacttacgctattaggagccggctgacccacgttccacagggtcatgacggcgaactactgtgccataggattgagcaggagtatcaggctgggcctctagagctgaaccgggaggcggtcctgcggactagtactaatctgaacagtcaacaagtcatttactctgataacaacggctatcagatgcaaaggcgcccttacgtgagctacgtgaataacagcattgcccgaaactactaccctatggttcagtccgcattcatggaggacgggaagtctcggttagtccttctgtcagagagggcccatggaatttcctcacaggggaacggccaggtcgaagtgatgctccaccgtaggctatggaataattttgattgggatctaggctacaacctcaccctgaacgatactagcgttgtgcatcctgtgctgtggttgctgctggggagctggtccctcaccacagcgctcagacagagatcagccctggctctccagcaccgaccagtggttctgtttggtgacctggcagggaccgctcctaagctaccagggccacagcagcaagaagctgtgacacttcccccaaatctgcacctgcagatccttagcattccaggttggcgctacagttccaatcacaccgagcacagccagaatttgaggaaaggccatcggggagaggctcaggccgacctgaggcgcgtgctcctcagattgtatcacctatacgaggtgggagaggacccggttctgtcccagcccgttaccgtgaatcttgaggcagtgctgcaggcgctaggatcagtcgtggccgttgaagaaaggtcgcttacgggtacttgggatctcagcatgctccacagatggtcctggcggaccggcccaggaagacataggggggacaccacatcgcccagcagacctccaggaggaccgattataactgtgcaccctaaggagataaggacctttttcatacactttcagcagcagtag

SEQ ID NO: 10336 - DNA, 1443 bp, synthetic construct
  misc_feature 1..1443: note = source = /note="Description of Artificial Sequence: Synthetic coding sequence"
  source 1..1443: mol_type = other DNA
atgttatttagaaataggttcctgttgctcctagccctcgcagccctgctagcgtttgtatccttatctctgcagttttttcatctgattcctgtatctactcccaagaacggaatgtcaagtaagagcagaaagagaattatgcctgaccccgtcaccgaacctccagtgactgacccggtgtatgaggcactgctatattgtaatatcccaagcgtggccgaacggagtatggagggacacgcaccacaccattttaaactagtttccgtacacgtatttattaggcatggagatagatatcccttgtatgtcatccccaaaacaaagcggcctgagatcgattgtaccctggtggccaaccgcaagccctaccatcccaagctggaggcatttatctcccatatgtctaaaggctcgggagcctcgtttgaaagccctctgaacagcctcccattgtaccctaaccatccactgtgtgaaatgggcgaactcacacaaaccggcgtggttcaacacctgcagaatgggcagttgctgagggacatctacctgaaaaaacacaaactgctgcccaatgattggtcagcagaccaattgtatctggagacaacaggcaagtctcggactctacaatctggactcgcactgctatatggctttctccccgattttgattggaagaaaatctacttccgtcaccagccatccgctctattctgctctggaagctgctactgccctgtgaggaaccagtatcttgaaaaagagcaaaggcggcagtatcttctgcgccttaagaatagccaactcgagaagacatacggcgagatggcgaagatcgtggacgttcccaccaagcaattacgggctgcaaacccaatagacagcatgctttgtcacttctgccataatgtttccttcccttgcacaagaaacggctgcgtggacatggagcactttaaggtgatcaaaactcaccagattgaggatgaacgagagcggcgtgaaaagaaattgtatttcggatattctctgctgggcgcacaccccattttgaaccagactattggaaggatgcagagagctacagaaggaaggaaagaggagcttttcgcgttgtatagtgcccatgatgtgaccctaagccctgtcctgtccgccctgggcctcagcgaagcaaggttcccgagattcgctgctcggctcatcttcgagctctggcaggatcgcgagaaaccttctgagcactctgtgcgcatcctttataacggtgtggacgtcacctttcataccagcttttgccaggatcaccataagagatcccctaagcccatgtgtcctctggagaacctggttcgtttcgttaagcgcgacatgttcgtcgccctgggtggctccggaaccaactactatgacgcctgccaccgagagggattctag

SEQ ID NO: 10337 - DNA, 1341 bp, synthetic construct
  misc_feature 1..1341: note = source = /note="Description of Artificial Sequence: Synthetic coding sequence"
  source 1..1341: mol_type = other DNA
atgctgcacccggaaactagtccgggtcggggacaccttctggctgtcttactggccctccttggaacagcctgggccgaggtgtggcctcctcagctacaagagcaggccccaatggctggcgctctgaatagaaaagagtcgttccttttgctgtcactgcataatcgtttaaggtcttgggttcagcccccagcagccgacatgagacgactggactggagcgactctctggctcaactggcccaggccagggccgcattgtgtggtactccaactccctcgctggcctcaggtctttggcggacactgcaagtcggctggaacatgcagctcctcccagcaggccttgtctcctttgtggaagtcgtttcattatggttcgcggagggccagagatactctcatgctgctggcgagtgcgctcggaatgcaacatgtactcactacacccagctggtgtgggccacctccagccaactggggtgtggacgacacttgtgctccgccggtcaggctgccatcgaagccttcgtgtgcgcatacagtccaagagggaattgggaagtgaatggtaaaactatcgtaccatacaaaaagggggcatggtgtagcctgtgtacagcctctgtgtctgggtgtttcaaggcgtgggaccacgcaggtgggctgtgtgaggttcctcgaaacccctgccgaatgtcgtgccagaaccatggccgactgaatatctcaacctgccactgccattgtccgcctggatataccggcagatactgccaggttagatgttcactgcagtgcgtccatggacgttttcgggaggaagagtgcagttgtgtctgcgatattggctatggcggagctcaatgtgcgacaaaggtccactttccttttcacacatgcgacctgaggatagatggagattgctttatggtgagctctgaagcggacacatattaccgagccaggatgaagtgccagcgaaagggcggtgtcttagctcagataaaatctcagaaggtgcaggacatcttagccttttatttgggccgtctcgaaacgaccaatgaggttatagatagtgatttcgagacgcgaaacttctggattggcttgacctataagaccgcgaaggattccttcaggtgggcaactggtgagcatcaagccttcacctcttttgcttttgggcaaccagacaaccacggattcggaaactgcgtcgaactgcaagctagtgcagctttcaattggaacgaccaacgctgcaagacgcggaatagatacatttgccagttcgctcaggaacatatcagtagatgggggccaggaagctag

SEQ ID NO: 10338 - DNA, 2313 bp, synthetic construct
  misc_feature 1..2313: note = source = /note="Description of Artificial Sequence: Synthetic coding sequence"
  source 1..2313: mol_type = other DNA
atggtggagagcgcaggcagagccggacaaaagcgacctggattcttggaggggggtttgctgctgttgctactgctggtgaccgcagctctggtcgccctgggtgtgctgtacgctgatcgacggggaaaacaactcccaagattggcctcacgactctgcttccttcaggaggaaagaacttttgtcaagagaaagcccagaggtatccccgaggcccaggaagtgtccgaggtatgcacaacacccggttgcgtaattgctgccgcacgcatcctccagaacatggacccgacaaccgaaccttgtgatgacttctatcagtttgcgtgcggcggatggctgcggcgacatgtgatccccgagacaaattctcgctatagtattttcgacgtcctgcgggacgagctagaggtgatcctcaaggccgtgttggagaactctaccgcaaaggacagacctgccgtggagaaggcaagaaccctgtatcggagttgtatgaatcagtctgtgattgagaagcggggatcccagcctctgctggacatcctagaagtagtcggcggatggcccgttgccatggaccgatggaacgagaccgtcggcctcgagtgggagctcgaacggcaattggctttaatgaactctcaatttaataggcgcgtgctgatcgatcttttcatctggaacgatgatcagaatagttcacgccatatcatctacattgaccaaccgacccttggaatgccttccagggaatattactttaatggaggatccaatcgaaaggtgcgtgaggcataccttcagttcatggtgtccgttgcgacgttgttgcgagaagacgctaacttgccaagagattcttgtttggttcaggaagatatggttcaggtgcttgagcttgaaacacagctggccaaagcaaccgtaccacaagaagagcggcacgatgtgatcgcactctaccatcgtatgggtctcgaggaattacagtctcagtttgggctgaaaggctttaactggacactctttatacaaactgtgctgagtagcgttaagattaaattgctccctgatgaggaagtggtcgtgtacggaattccctatctgcagaacctcgagaatattatcgatacatactccgccagaaccatccagaattacctggtgtggaggctggtattagataggatcggatccttatcacagcgcttcaaggacactcgggtgaactaccgaaaggcattattcggcacaatggtggaagaggtccgctggcgcgagtgcgttggatatgtgaactccaacatggaaaatgcggtgggaagcttgtacgttagagaagctttcccaggcgactccaagtctatggtgagagaattaattgacaaagttagaactgtgtttgttgaaaccctggatgagcttggctggatggacgaagagagcaagaaaaaggcccaggagaaggccatgtcaattcgcgagcagatcgggcacccagactatatacttgaggagatgaaccgcaggctcgacgaagagtactctaaccttaatttctctgaggacctatactttgagaatagcctccaaaacctgaaggtcggggcacagaggagtctgagaaaacttagggaaaaggtggaccctaatttatggatcataggggcagcagtggtgaatgcattttactcacccaacaggaaccagattgtgttccccgctggtattctgcagccaccattcttcagcaaagagcagccgcaggccttaaactttggcggtattggcatggtgatcggccatgagattacacatggcttcgatgacaacggtcgaaatttcgataaaaatggtaacatgatggactggtggtccaactttagtacgcagcacttccgcgagcagtccgaatgtatgatctaccagtacggtaattattcttgggatttggccgatgagcagaacgtaaacggttttaataccctgggcgaaaacatagccgataatggcggtgttcgccaggcttacaaggcttatctaaagtggatggccgaggggggaaaagaccaacagcttccgggattagatctgacccatgaacagctgttttttattaactatgcccaagtgtggtgcggtagctaccgacctgagtttgccatacaaagcatcaagacagacgtccactccccgctcaagtacagggtcttgggatctctgcagaatctcgccgcatttgccgatactttccactgtgctcgcggtactccaatgcatccaaaggagaggtgccgagtctggtag

SEQ ID NO: 10339 - DNA, 1317 bp, synthetic construct
  misc_feature 1..1317: note = source = /note="Description of Artificial Sequence: Synthetic coding sequence"
  source 1..1317: mol_type = other DNA
atgtctaagagagataaagcgggaaaagacacagctagagggaaaggcaaggatattagcaagtacgggtccgtacagaagagttttgcagatcgcggactgcccaagcctcctaaggaaaaactgctgcaggtggagaagttaaggaaagagtccggaaaaggaagttttcttcagcccactgcgaagccgcgagctcttgctcagcaacaggcagtgatcagaggtttcacctattataaagctggtaaacaggaagtgaccgaagccgtagccgacaacacacttcagggaacatcctggctcgaacagcttccacctaaggtggagggaaggtccaactcggcagagcctaacagcgcagaacaagatgaagctgagcctaggtcatccgaacgcgtggacttggccagcggaacgccaacatctattcctgctacaacgactaccgcaacaacaacacccacccccaccaccagtcttctacccactgagccaccgtccggcccagaagtttcttctcagggcagggaggccagctgtgaggggactctacgcgctgtggatccccctgtccgtcatcacagctacggcagacacgaaggcgcttggatgaaagacccagctgcgcgagatgaccgcatctacgtgactaactattattatggaaattcactggttgagttccggaatttggaaaatttcaagcagggaaggtggtctaacatgtataagctgccctacaactggattggcacagggcacgtggtgtaccagggtgcattttactataatagggccttcaccaaaaacataatcaagtatgatcttcgccagaggtttgtagcctcctgggcactgttaccagacgtggtctatgaggacaccactccatggaagtggagaggccattccgacatagatttcgccgtggacgaaagcggcctttgggtgatttatccagcagtagatgatcgggatgaggcccaaccagaggtcattgtccttagccgcctagatcccggtgacctctcagtacatcgagaaaccacgtggaagaccaggctcaggagaaattcgtatggaaactgttttcttgtctgcggtatcttgtacgccgtggatacttacaatcagcaagagggccaagtggcctacgcatttgatactcataccgggacggacgccaggccacagctgcccttcctaaacgagcacgcctacactactcagatcgactataaccctaaagagcgcgtgctgtacgcctgggacaatggccaccagttgacctacactcttcactttgtggtttag

SEQ ID NO: 10340 - DNA, 3570 bp, synthetic construct
  misc_feature 1..3570: note = source = /note="Description of Artificial Sequence: Synthetic coding sequence"
  source 1..3570: mol_type = other DNA
atgcctggcctgttaaactggattaccggggcagccttgccactgaccgcctccgacgtcacatcttgcgtctctggatacgcactgggactgactgctagcctgacttatggcaatttagaagcccagccttttcagggtttatttgtatatcccctcgatgagtgcacaactgtaatcggctttgaggcagtgatcgccgacagggtggtgaccgtccaaatcaaggacaaagccaagctggagagcggccatttcgacgcttctcatgtaaggtctcctactgtgacgggtaatattcttcaggacggtgttagcatcgcaccgcacagctgtacacctggaaaggtaacactcgatgaggatcttgaacgtatactgtttgtggccaacctcggcacgatagccccaatggagaacgtaactatcttcatctcaaccagctccgagctccccactttgcctagcggcgcagttcgggtactccttccggctgtgtgcgcccctaccgtgccgcagttctgtactaaaagtacggggacctccaatcagcaggcccagggcaaggaccgtcattgcttcggggcttgggctcctgggtcatggaataagctttgccttgctacgctgctgaacactgaggtgtctaaccctatggaatatgagtttaacttccaattggagattaggggcccatgtctgttggccggagtggaaagcccaacacatgagatccgagctgacgcggctccaagcgccaggagcgccaaatcaatcatcatcactctagcaaacaaacatacttttgaccgcccagtcgaaatcctgattcatccctctgagccgcatatgccacacgtgctcattgaaaaaggcgatatgaccttgggagagtttgaccagcatctgaaaggcagaactgacttcataaaaggaatgaaaaagaagagtcgagccgagaggaagaccgaaattatacgaaagcggttgcataaggacataccacatcactccgttattatgctgaatttctgcccagaccttcaaagcgtacagccctgcctccggaaagcacatggagagtttatcttcctgatcgataggtcttccagcatgtccggcataagcatgcaccgtgtcaaagacgctatgttggtggcgctcaaatcgcttatgccagcctgcttatttaacattattggatttggtagcaccttcaaaagccttttcccctcctcccagacctacagtgaggattccctggcaatggcttgcgacgacattcagagaatgaaagcagacatggggggaaccaatatcctctcacccctgaagtgggtgataaggcagcccgtgcaccggggtcatcccagactgctctttgtcattactgatggcgcagtcaataatacaggcaaggtgcttgaactggtgcgaaaccatgcgttcagcactcgctgctacagctttggcatcggacctaacgtctgtcaccgattagtcaagggcctagccagcgtctcagaaggctcagctgaactcttgatggaaggagagaggttgcaacctaaaatggttaagtctctgaaaaaggctatggcaccagtcctgagcgacgtgactgtcgagtggattttcccagaaacaacagaagtcttggtcagtcccgtgagtgcttccagtctgtttccaggagagcgcttagtcgggtatggtatcgtgtgtgatgcttccctgcacatctctaacccacggagcgataagcgtcgtaggtactcaatgctgcatagccaagagagtggcagctctgtcttttatcacagtcaggatgacggacccggtctggaaggaggtgattgcgctaaaaacagtggcgctcctttcattttgggccaggctaaaaatgcaagactcgctagcggagacagtactactaaacacgacctgaatctgtctcaaaggcgaagagcgtactccacaaatcagattaccaatcacaagccactacctcgcgctaccatggccagtgatccaatgcctgctgctaaacggtaccctctgcgtaaagcccgacttcaagatctgaccaatcagacatctctggacgttcagcgctggcaaatcgacttgcagccgctcctgaactccggccaggacctgaatcaaggacctaaactgagagggcctggcgctcggaggccttcgctcttgccccaaggttgtcaacccttcctcccttggggccaagaaacacaagcatggagtcctgtcagagaacgaaccagtgactcccggagccccggagacctggagccaagtcaccaccctagtgcgtttgaaacagagacatcttcagattgggacccgccagccgagtcccaagagcgcgctagtccatcccggccagcaactcctgccccagtccttggcaaggctctcgtgaagggcctacacgactcacagcggctgcaatgggaagtttcctttgaactcggaacacctggaccggagcgaggaggcgctcaggacgccgatttatggtctgagacatttcaccaccttgccgctcgggcaatcattcgggacttcgagcaactggctgaacgagagggcgaaatcgaacagggctccaatcggagatatcaggtgtctgccctccacacctcaaaagcctgcaacataatttccaagtatacagcattcgtgccagtcgacgtttccaagagtaggtatctcccaaccgttgttgaatatccgaatagcgcagctctccggatgcttgggagtcgggctctggcacagcagtggcgtggcactagctcaggcttcggcaggcctcagactatgcttggtgaggactcggcaccgggtaatgggcctcagcgatccttagctactaataccctgtctagtatgaaagcttccgaaaacctgttcggtagctggctcaacctgaacaagtcccggctgctgacccgcgcagccaaaggcttcttgagcaagccccttatcaaggccgtggaaagcacctctggaaatcagtctttcgattacatcccccttgtatcgctgcaactagcgtcgggggcattcctgctcaatgaggccttttgcgaggccacgcacattccgatggaaaagctgaagtggacctcaccttttacttgccacagagtcagcctgaccacacggcctagtgagtctaagactccctctccacagctctgcacgtctagtcctccacgtcatcctagctgcgatagcttttcccttgagcccttggctaaagggaagctggggctggagcccagagccgtagtcgaacataccggcaaactgtgggcaactgtcgtcggcttggcctggctcgagcattctagtgcaagttatttcaccgaatgggaactggtggcagctaaagcaaactcgtggctagagcagcaggaggtgcctgaaggcaggactcaagggacactaaaggcggcagctcgccaactattcgtgctgctccgacactgggacgaaaatcttgagtttaatatgttatgttacaaccccaactacgtgtag

SEQ ID NO: 10341 - DNA, 1344 bp, synthetic construct
  misc_feature 1..1344: note = source = /note="Description of Artificial Sequence: Synthetic coding sequence"
  source 1..1344: mol_type = other DNA
atgccccacgtacttattgagaaaggagacatgacgctcggtgagttcgatcagcacctgaagggccgaacagacttcatcaagggaatgaaaaaaaaatctcgcgctgaaagaaaaaccgaaattatcaggaagaggttacacaaggacattccccaccattctgtaattatgctgaatttctgcccagacctgcagagcgtgcagccctgcctccggaaggctcacggagaattcattttcctaatagaccgatctagcagcatgtctggaatatctatgcatagagtgaaggatgccatgcttgtcgcactcaagtcccttatgccagcctgtctgtttaatattatcgggttcggatccacctttaagtctctgtttcctagctctcagacatacagtgaggactcgttagctatggcttgcgacgacatccagcggatgaaggcagatatgggagggaccaacatcctgagccctctgaagtgggtcatccggcagcccgtgcatcgtgggcacccacgcctgttatttgtcattaccgacggcgcagtgaacaacacaggaaaagtcttggagctggtgcgcaaccacgcattttccacccgatgttacagctttggaattgggccaaacgtctgtcacaggttggtgaaggggctggctagtgtttctgaaggctcagcagaactgctgatggagggcgaacggctccaaccgaagatggtgaagagccttaagaaagcgatggcccctgtgctctcagacgttacagtggagtggatttttcccgaaacaactgaggtgcttgtgagtccagtctctgcctcgagtctgttcccgggagagcggctggtagggtacgggatcgtgtgcgacgcttccctgcatatctcaaatccacggtcggataaaaggaggagatacagcatgctgcacagtcaagagagtggcagtagtgtgttctatcactcccaggatgatggccctggattggaggggggagactgtgctaagaatagcggggcacccttcatcctcggccaggcaaagaatgccaggctggcttccggcgacagcacaactaaacacgatctgaacttgtctcagcgcagacgtgcgtacagcactaatcagattactaaccataaacctctccccagagcgacaatggcatcagaccccatgcccgctgccaagagatatcctctgcggaaggccaggctgcaggatctgaccaaccagacctcgctagatgtgcagcggtggcagatcgatcttcaagccttcatctgcctgacttcagaggataccttccagatccgtactccaactggtcagtag

SEQ ID NO: 10342 - DNA, 726 bp, synthetic construct
  misc_feature 1..726: note = source = /note="Description of Artificial Sequence: Synthetic coding sequence"
  source 1..726: mol_type = other DNA
atgtggacggtcaggactgagggaggacacttcccattacactctccaaccttctcctggcgtaacgtggcctttttgctcctgctctcgctggccttggagtggacatccgcaatgcttaccaaaaaaatcaaacataagcctggcctgtgtccaaaggagagactaacatgtacgactgagttaccagattcttgcaatactgacttcgactgtaaggaatatcaaaaatgctgcttctttgcctgccagaagaagtgcatggatccatttcaggagccgtgtatgctcccggtgagacacgggaattgcaaccacgaagcacagcggtggcattttgacttcaagaactatagatgcacccccttcaaatatcgtggatgcgaaggaaacgcgaacaatttcctgaacgaagatgcctgccggaccgcgtgcatgctcattgtgaaggatggccagtgccccctttttcctttcaccgagcgcaaagagtgcccacctagttgtcactctgatattgactgtcctcaaactgacaaatgttgtgagagccgctgcgggttcgtctgcgcacgggcatggactgttaaaaaggggttttgtccacgcaaacccctactgtgcactaaaattgataaaccgaagtgcttgcaggatgaggaatgccctctcgtggagaagtgttgttctcactgtggcctgaagtgtatggacccacgcagatag

SEQ ID NO: 10343 - DNA, 1074 bp, synthetic construct
  misc_feature 1..1074: note = source = /note="Description of Artificial Sequence: Synthetic coding sequence"
  source 1..1074: mol_type = other DNA
atgagaccaccgccagctctcgccttggcaggcctgtgcctgcttgccttgccagccgctgccgcttcgtacttcgggctgactggaagggaggttttgactccatttcctggattaggaacggcagccgcacccgcacagggtggcgctcacctgaagcagtgcgacctgctcaagttgtcccgacgccagaagcagttgtgtaggagagagccgggactggcagagacccttcgtgacgctgcccacctcgggctcctggagtgtcagttccaattcaggcatgagaggtggaattgctcactcgaagggagaatgggactgctcaagcggggtttcaaggaaaccgcatttttatacgcagtatctagtgccgcacttactcacaccttggccagggcctgttccgccggacggatggagaggtgcacctgcgatgacagtccgggtctggagagccggcaggcgtggcaatggggcgtctgcggggacaacctgaagtacagtacgaaatttctttctaacttcctgggcagtaagaggggtaataaggatcttcgggctagggctgatgctcataacactcacgtaggcattaaggccgtaaaaagcggactgcggaccacttgcaaatgtcacggagtgtcgggatcttgcgcggttcgaacgtgctggaaacagctgtccccgtttagggagactgggcaggttctcaaactcagatacgatagcgcggtgaaagtctcctcagccaccaacgaagccctgggtcgcctggaactttgggcgccagcccgacagggcagcctgacaaaaggattagccccacggtctggcgacctggtctacatggaagacagtccatccttttgtcggccttctaagtattcgccaggtactgcaggacgtgtatgctctcgcgaagcctcttgcagctccttatgctgcggacgtggttacgacactcaaagcaggctcgtcgccttttcctgccactgtcaggtgcaatggtgctgttacgtcgaatgtcagcaatgtgtgcaagaggaattagtttacacctgcaagcattag

SEQ ID NO: 10344 - DNA, 810 bp, synthetic construct
  misc_feature 1..810: note = source = /note="Description of Artificial Sequence: Synthetic coding sequence"
  source 1..810: mol_type = other DNA
atggtgcgttgcctggggcctgcccttctgcttctgctcctgctgggctccgccagctcagttgggggtaaccgttgtgttgatgctgccgaagcctgcaccgctgacgccagatgtcagcgattaaggtccgaatacgtagcacaatgtctggggagagccgcacagggcggttgtcctcgcgcaagatgccggagagcacttaggcgatttttcgcaagaggaccacccgcacttacacacgcattgctcttttgtccttgcgccggtccagcatgcgcggagcgtagaagacaaaccttcgtgccatcttgtgcattctccggaccgggtcccgctccaccaagttgtcttgagccccttaacttctgtgagcgcagccgagtgtgccgccctaggctgcttgcctttcaggtgagttgcacaccagcaccctctgcccctgacggctgcctgctggaccaaggtgctaggtgtcttagagcctacgcaggattggtaggaacagctgtaaccccaaactatgtggacaacgtctcagctcgcgtagctccctggtgcgactgtggtgccagcgggaataggagagaggattgtgaggccttccggggtctgtttactcggaataggtgtcttgatggcgctatacaggccttcgcgagtgggtggccgcctgtgctgctggaccagctcaatccacagggtgaccccgaacacagcttattgcaggtgtcttctaccggtagggccctcgagcggaggagcctcctgagtattcttccggtgttggcgctacctgctcttctgtag

SEQ ID NO: 10345 - DNA, 1728 bp, synthetic construct
  misc_feature 1..1728: note = source = /note="Description of Artificial Sequence: Synthetic coding sequence"
  source 1..1728: mol_type = other DNA
atgagcggcaattgggtgcacccgggtcagattctcatctgggcaatctgggttctcgcagcccctaccaaaggtccttctgccgaaggcccacagcggaacacaagattggggtggattcagggcaagcaggttacagtgctcggctcccccgtaccagtgaatgtttttcttggtgtcccctttgccgctccccctctcgggagcctgaggttcaccaatccacagccagcctctccgtgggacaatctacgcgaggcgacttcctaccctaacttgtgtctgcagaatagtgaatggcttttgctggatcaacacatgctgaaagtgcattatcctaagttcggtgtatccgaggattgtttgtacctaaacatttatgccccagctcatgcagacaccgggagtaaactcccggtgctggtttggtttcccggtggcgcatttaagactggtagtgcatcgatcttcgatgggtccgctctcgcagcatacgaggacgtcttagtagtggtggtgcagtaccgcctggggatttttggattctttacaacatgggatcaacatgcaccaggaaattgggcctttaaggatcaggtggccgctctgtcctgggtgcagaagaatatagagtttttcggaggagatcccagttctgtgaccattttcggggagagcgcaggcgctatatccgtctcttcactgatcctgtctccgatggccaaggggctgtttcacaaggccattatggagtccggtgtggcaataattccctaccttgaggcccacgactacgaaaaatccgaagacctgcaggtagttgctcatttctgcgggaacaacgcttctgactcagaagctcttctgcggtgtctgagaacaaagccttcaaaggagctccttacactgagtcagaaaactaaatcattcactcgcgtggtcgacggcgcttttttcccaaatgaaccccttgatctactgagccagaaagccttcaaagccatccctagtattattggcgtcaataatcacgagtgtggcttccttctgcctatgaaggaagccccagagatcctgtccggctccaacaagagcttggctctacatctgattcagaacatcctccatatcccacctcagtacctccacctggtcgccaacgagtatttccacgacaaacactccctgactgaaattcgggattcgctgctggaccttctgggggatgtgttcttcgtcgtgcccgctttaattacagccagataccacagggacgcgggagcccctgtatacttttacgaattccgacaccgacctcagtgtttcgaagataccaagccagccttcgtcaaagctgatcacgccgacgaggtcagattcgtttttggtggcgcatttttgaaaggcgacatcgtcatgtttgagggagctactgaggaagaaaagctcctctctcgcaagatgatgaaatactgggcaaccttcgctcggaccggaaaccccaacgggaatgacctctcactatggcctgcctataatctgactgaacaatacctgcagctcgacctgaatatgagtctcggtcagagactgaaagaacctagggtggatttctggactagcacgattcctctgatcctctctgcatctgacatgctccatagccctctgtcaagtctaacgtttctgtccctcctacaacctttcttcttcttttgcgcaccctag

SEQ ID NO: 10346 - DNA, 1026 bp, synthetic construct
  misc_feature 1..1026: note = source = /note="Description of Artificial Sequence: Synthetic coding sequence"
  source 1..1026: mol_type = other DNA
atgggcacactgccctggctgctagctttcttcatattaggcttgcaagcctgggacacgcctacaatcgtgtcaagaaaggaatggggagcaaggcctttggcctgtcgagccttactgactttacccgtcgcctacatcataaccgatcagctgccagggatgcagtgtcagcagcagtcggtctgtagtcagatgctgcggggtttgcagagccactccgtttacaccatcggctggtgtgacgtggcttataactttcttgtgggagacgatgggcgtgtctatgaaggcgtcggctggaacatccaaggtctccatacacaggggtataacaacatttctctcggtattgcattttttggcaacaagatcggctcttccccttctccagctgcgcttagcgctgcagaaggcctgatctcatacgcaatacaaaaaggacatctcagcccacgctacatacaacctctcctgctgaaggaagagacctgcctcgatccccagcaccctgtgatgcctcgaaaggtctgccctaacattattaagcggtccgcatgggaggcccgagagactcattgtcctaaaatgaatctgcctgcaaagtacgtgataatcatccacacggcaggtacatcctgcaccgtgtctactgattgccagaccgtcgtaaggaatatccagtcattccacatggatacaagaaatttctgcgacatcggttatcatttcttggtgggccaggacgggggagtgtacgaaggcgtcggatggcacattcagggcagccacacatatggttttaatgatatcgcactcggtatagcgtttatcggctacttcgttgaaaagccacccaatgccgctgccttggaagcggcacaggacctgattcagtgcgccgtcgtggaaggatatcttacaccaaattacctgctcatgggtcattccgatgttgtgaatattctgtccccaggccaggcactgtacaacatcattagtacttggcctcacttcaagcattag

SEQ ID NO: 10347 - DNA, 897 bp, synthetic construct
  misc_feature 1..897: note = source = /note="Description of Artificial Sequence: Synthetic coding sequence"
  source 1..897: mol_type = other DNA
atgggcatcgtgtgcgcacaatgttctttcatcctgctgctttccatcattagagctcggccaccaccattcctgttttgtcctttatcctcccagcggactgaatcgccttataaaccagtgcacttgggcctgggaccaaccgataaggttgccgctatagcgatggccaggattatcgacctggttccctgggatgatgggtcaactcacgtatatgccagcccagccattctgctgccgatggaaagacaaaggaatcagctcgctggggtaaaacagcagctgtatcatccagcactccccacactgaggcacatggatcgggataccgtgaaagcgtgtttgcctgacgaacactgtcaatcaacaacgtactgtcggaaagatgaatttgacaatgcccattttacattgttaggagttcccaacaagcccctgcagtgtctggacatcactgcgacgggtcagaagcttcggaatcgatatcatgagggcaaattagcaccaattgccccaggtatcaaccgggtagattggccttgcttcacccgagccatagaggactggagtcatttcgtgtcttcggccggagaatttaagttgccctgcctgagaaaacgggctgagggcctgagtggctatgccgtgaggtaccttaagccagatgtgactcagacgtggaggcaggaagccctgtgtggggcatgggctggacgcccatgttccccagatagcccacggccttatccctgttgccccccacagtactgtctaagtcagaacccctccttagataggtatgggcagaagccgctgccatttgacagtctcaacaccttcaggtctttcggatcctcttatagtcgcgttaactatctgacaccatggcattag

SEQ ID NO: 10348 - DNA, 5798 bp, synthetic construct
  misc_feature 1..5798: note = source = /note="Description of Artificial Sequence: Synthetic coding sequence"
  source 1..5798: mol_type = other DNA
atggcccctggggctctacgcggagggtgtgaacagcgggctccgggtggtggagccaggactgcagccctgggcccatggccatggccatcacctggtccagccccatcccctggcgctgcgcctcctcggtcgcggaagatgtctggcgctcttttgtggcccctgctgccacttctgttgttgcttctctcggcacgcgacggtgtgcgggcagcacagcctcaagcccctggctatctgattgcagccccatctgttttcagagcaggcgttgaggaggttatcagcgtaacaatttttaactcaccaagagaggtcacagttcaagctcagctggtggcccaaggagagccagtggtgcagtcacagggtgctatcctagataagggcaccattaaacttaaagttccgactggactacgtggccaagccttactcaaagtgtgggggaggggttggcaagccgaggagggtccactattccacaatcagacatcagtcacggtcgatggaaggggcgcttctgtgttcatccagactgataaacctgtgtatcgtccacagcatagagtgctaatctccatatttaccgtgagtcctaacctgcgccctgtcaatgaaaaattggaagcctatatcctggatccacgcggatcccggatgattgaatggcggcacctgaagcctttctgttgtgggatcacgaatatgtcctttccactatccgatcaacccgtgctgggcgaatggtttattttcgtggagatgcaggggcatgcctacaacaagtcgtttgaagtccaaaagtacgtcctgccaaagttcgaactcctaattgatccgcctagatacatccaggatctggatgcatgcgagacgggaacagtcagggcccgatatacatttggtaagcccgtagccggagctctgatgatcaacatgacagtgaatggggttggctattacagccacgaagttggacgtcccgtgctacgtaccacaaagatcctcgggagccgcgactttgacatatgcgtccgagatatgattccagcagacgtcccagaacacttcaggggaagagtctctatctgggcaatggtaacatccgtggatggatcccagcaggtcgcttttgatgatagcactcctgtacagaggcagctcgtcgacatcagatattccaaagacactaggaagcagttcaagcccggtctcgcatatgtgggtaaggtcgagctgtcataccctgatggctctcctgctgaaggagttaccgtccagataaaggcggagctcacccccaaggataatatttatacaagtgaagtggtctcgcagagaggtttggtcggattcgagatcccgtccatcccaacatctgcacaacacgtctggctggagactaaggtcatggctcttaacggcaaaccagtgggcgctcagtacctgccatcatacctctctctggggagttggtacagtcccagccaatgctatctccagttgcagccccctagccatcccttgcaagtgggtgaagaggcttacttctccgtgaagtctacttgcccatgcaactttaccctgtattacgaggtggccgcacgaggcaacatcgtattgtcaggccaacagcctgcccataccacacagcagcgatccaagagggccgctcccgctctggagaaacccattcgcctgacacacttatccgagaccgagcctccgcctgcccctgaagccgaggtcgatgtgtgcgtcacgtctctgcacctcgctgtcacgccatctatggtaccactaggaaggctgctggttttttacgtgagagagaatggggaaggagtggctgatagtctgcaattcgccgtggagacgttcttcgaaaaccaagtgtccgtcacctacagcgccaatgagacgcagccaggcgaggtcgttgacctacggatcagggccgctagagggtcatgtgtatgtgtggctgccgtggataagagcgtctatctgttgaggtcgggtttcaggctgacaccggctcaggtattccaggaactagaagattacgatgtgagcgattcattcggagtgtcacgtgaggacggtccgttttggtgggcgggactaaccgcccaacggaggaggaggagtagcgtgtttccctggccctggggaatcactaaagactccggctttgcctttaccgagaccggcttggtcgttatgacggatcgagtgagtttgaatcatcgtcaggacggagggctgtataccgatgaagctgtgcctgctttccagcctcacaccggctcacttgtggctgtagcacctagtcgacacccgccacgaacagaaaagcggaagcggacctttttccctgagacatggatctggcactgtttgaatataagtgaccccagtggtgagggcaccctctcagtgaaagtgcccgattccataacgtcttgggtgggagaggcagtggcgctgtctacttcgcaaggactcggcatcgctgaacctagtctactgaagacttttaaacccttttttgtcgacttcatgctgccggctctaataattcgaggagagcaggtcaagatcccactctccgtgtacaactacatggggacttgcgccgaggtatacatgaagctctcagttcccaagggcattcagtttgtaggtcacccaggcaaacggcatgtcaccaaaaagatgtgcgtggcccctggagaggccgaacctatctgggtagtgctaagtttcagcgacctgggattgaacaatataacggcaaaggccttagcctatggggacacaaattgctgtagggatggacgctctagcaaacaccctgaggagaatcacgccgacagaagggtccccattggcgtggaccacgtacgcagaagtgtcatggtagaggcggagggcgtgcctcgagcatacacctattcagcttttttttgtccttctgaaagagtccacatcagtaccccgaacaagtacgaattccagtacgtccagcgccctttgaggctcacccgattcgacgtcgccgtgagagcccacaacgatgcacgcgtcgctctctccagcggtccacaggacaccgctggtatgatcgagatcgtactcggtggacaccagaatacccgatcctggattagtacatctaagatgggggagcctgtggccagcgcgcacacagctaagatcctgtcctgggacgaattccgcaccttttggatttcctggagaggaggactcatccaggtcggccatggacccgagccgtctaatgagtccgttatcgtggcctggaccctaccacgtcccccagaggtccagtttatcgggttttcaacagggtggggaagtatgggtgaatttcgtatttggaggaaaatggaggtggacgagtcatacagcgaggcatttactctgggcgtcccacacggcgctatccctggctctgagagagccaccgctagcataattggggacgttatggggccaacccttaaccacttgaataacttgctacggctgcctttcggctgtggcgaacagaatatgatccactttgcccctaacgtcttcgtgctgaagtacctgcagaagacccagcagctaagcccagaggtagagagggagacaaccgattacctggttcagggctatcagaggcagctaacctacaagagacaggatggaagttacagtgcttttggagaacgggacgctagtggtagcatgtggctgaccgccttcgtgcttaaatcgtttgcacaggccagatcttttatcttcgtcgatccaagagagctcgcggcagctaaatcttggattatccagcaacagcaggctgatgggtccttcctcgcagtcggtagggtactgaacaaagacatccaaggtggaatacacggtaccgtgcctctgaccgcctacgtcgtcgtggcattgctggagaccggtaccgcctccgaggaagaacgcggaagtaccgacaaggcaagacacttccttgagtcagccgctccactggccatggatccctactcttgcgccctcaccacgtacgctctaacgttgctcagatctcccgctgcccctgaggctctgaggaaactgcggtcactggctataatgcgggacggtgttacacattggtcactttcaaattcatgggacgtggacaaggggacctttctaagtttttctgaccgggtctctcaatctgttgtgtctgcagaggtggagatgacagcttacgcactcctgacctacacgctcctcggcgacgtcgccgcagctcttcccgtggtgaaatggctgagccagcagcgtaacgccttgggcggtttctcatccacccaggatacctgcgtagctctgcaggcattggcagaatacgccattctttcgtatgcgggtgggatcaatttaaccgtcagtcttgcaagcaccaatctcgactaccaagaaactttcgaacttcatcgcaccaatcagaaagtgctacagacggctgccattccatcactgccgaccggtctgttcgtttccgcaaagggggacggctgctgcctgatgcagatcgatgtaacgtataacgtcccagaccccgtcgctaagccagctttccagctgctggtctccctccaagaaccagaagcacaggggaggcctccgcctatgcccgcaagtgctgccgagggatcacggggtgactggccaccagccgacgatgatgatcctgccgcagaccagcaccaccaggagtacaaggtgatgctggaagtgtgcacaagatggctccacgctggatcctctaatatggcagtcctcgaggtgcctttactctctggttttagggccgacatcgaatccctggagcaacttctgctcgataagcatatgggcatgaagcggtacgaagtcgctgggaggcgcgtcctgttctactttgacgaaatccccagtagatgtctgacctgcgtcaggttccgtgccctgcgggaatgtgttgtgggtcgcacgagcgctctgcctgtcagcgtttacgattattatgaacctgcctttgaagccactaggttctataatgtgtccacccattccccactggcacgcgagctctgtgccggtccagcgtgtaatgaggttgagcgtgccccagcgagaggaccagggtggttccccggagagagcggcccagcggtagctccggaggagggtgccgctatcgcgagatgtggttgtgatcatgattgtggcgctcagggtaatcccgtgtgcggcagcgatggcgtggtgtatgcatccgcttgcagattgcgagaagctgcgtgccgccaggccgctcctctggagcctgctcctccctcttgttgtgccctggagcagagacttccagcatcctcgtcatctacttacggagatgatctcgcttcagtggctccagggcctctacagcaagatgttaaactcaacggcgcaggactcgaggtggaagactccgaccccgaacccgaaggggaggccgaggacagagtgacggccggtcctcgccctcccgtgagctccggaaacctagaatcttccactcagtcagctagcccatttcacaggtgggggcagacaccagccccacagaggcattccggccgtgtagtgggcgcacacaggcccggactgcttagtcccgtgtttgtatactcgccggcattccaaagcggaggtgaagagggcctctggatgagtaatacgtgcaccctgagata

SEQ ID NO: 10349 - DNA, 1209 bp, synthetic construct
  misc_feature 1..1209: note = source = /note="Description of Artificial Sequence: Synthetic coding sequence"
  source 1..1209: mol_type = other DNA
atggtttgcgccagagctgccctggggccaggagcgctttgggctgcggcatggggcgtgctgctgcttactgcccctgcgggtgcccaaagaggcagaaagaaggtcgtgcatgtgctggaaggtgaaagcggctccgtcgtcgtgcaaactgcaccgggtcaagtggtgagccaccggggtggtacaattgtgcttccctgccggtatcactacgaagcggcagcgcacgggcacgatggcgtgcgcttaaaatggacgaaagtcgtggatccactggcattcactgacgttttcgtggctctcggtccacaacaccgcgcttttggtagttaccggggacgcgcagaactgcagggagacggcccaggtgatgctagcctggttctccgtaatgttaccctccaggattacggacgttatgagtgtgaagttacaaatgagctcgaggacgatgcgggtatggtgaaactggatttggagggtgtggtttttccttaccatccccgaggcggacggtataaactcactttcgcggaggcccaacgcgcttgcgctgagcaagatgggattctcgcatcagctgagcaactccacgctgcttggagggatggtttggactggtgcaacgccggttggttgcgggacggttctgtgcagtacccggtgaatcgccctcgggagccctgcggcggacttgggggtaccgggtccgctggtggaggtggagacgccaatgggggactccgaaattacgggtatcggcacaatgcggaggaaaggtatgacgcattctgttttacgtctaacctaccgggaagagtgttttttcttaagcctctcaggcctgttcctttctccggggcagctcgcgcttgcgccgctcgcggagctgccgtggccaaagtcggccaattgttcgccgcatggaaacttcaactgctggaccgctgcacagcaggttggctcgctgacggaagcgcacggtaccccattgtgaatcctcgggctaggtgcggtgggcgtagacccggagtccgctcactgggatttccagacgccacacggcgtttgttcggagtttactgttaccgagccccaggcgcaccggacccagccccaggtgggtggggatgggggtgggctggaggcggagggtgggccggtggcgctagagatccagctgcatggacccccctacacgtatag

SEQ ID NO: 10350 - DNA, 1740 bp, synthetic construct
  misc_feature 1..1740: note = source = /note="Description of Artificial Sequence: Synthetic coding sequence"
  source 1..1740: mol_type = other DNA
atgtccgctttgcggcctctgctgctgcttctgttgccactttgtccaggcccaggccctggacctgggagcgaggctaaagtgacgaggtcttgtgctgaaacccgccaggtcttaggcgcaagaggatattccttgaatctgatccctcccgctctcatctccggagagcatctaagggtgtgtcctcaggagtatacatgctgtagcagtgaaacagaacagaggctgatccgagaaactgaggccacctttagggggttggtggaggacagtggttctttcttagttcatactctcgccgcacgccataggaaattcgacgaattctttttagaaatgctgtccgtcgctcagcattcgcttactcagcttttttctcactcatacggtagactgtatgcccaacacgcactgatcttcaatggactattcagtcggctgagagatttctacggggagtctggggaaggcctggacgacaccctggctgacttctgggcccagctcctcgaaagagtctttccactcctgcacccccagtactctttcccccctgactacttgctgtgtctgtcacgcttagctagtagtacggacggaagcctgcagcctttcggagatagtccacgcaggctgagactgcaaatcaccagaaccctcgtggctgctcgcgcatttgttcagggcttggagactgggaggaacgttgtgtctgaagcccttaaagtgccggtctctgagggttgttctcaagccctgatgcgacttattggatgccctctgtgtcgcggagtcccctctctcatgccttgccaaggcttctgcctgaacgtggtgaggggttgtctgtcatctcggggactggagccagattggggcaactaccttgatggccttctcatcttagccgataaactgcagggacccttctcattcgaactcacagccgagagcatcggagttaaaatctcagagggcctgatgtatctgcaggagaactccgccaaagtgagtgcccaggtctttcaggagtgtggccctcctgatcccgtgcccgcaaggaaccggcgagccccaccacccagagaagaagccggaaggctgtggtctatggtgacagaagaggagcgccctacaaccgccgctggcacaaatctgcaccggctggtctgggagctgcgggagagactggctcggatgcgaggtttctgggcgagactgtctttgacggtctgcggggattctcgaatggctgcggacgcctcactagaggccgcaccttgttggaccggagccggtagaggacgttacctgccacccgtggtcggcggtagtccggctgaacaagtgaataatcctgagctaaaagtggatgcttccggcccagatgttcctacccggaggagacggctgcagctcagagccgcaacggcgagaatgaagacagccgcactcggtcatgatctggacggtcaggatgcagatgaggacgcaagcggctctgggggtgggcagcagtatgcagacgactggatggcaggcgctgtggccccacctgcaagaccccctagaccaccgtaccccccaaggagagacggctccgggggtaagggaggcggaggttctgccagatataaccaaggccgttcccggtccggtggggcttctatcgggtttcacacacagaccatcctgatccttagcctcagcgcgctggccttgctgggcccacgttag

SEQ ID NO: 10351 - DNA, 498 bp, synthetic construct
  misc_feature 1..498: note = source = /note="Description of Artificial Sequence: Synthetic coding sequence"
  source 1..498: mol_type = other DNA
atggccctgctggccctgcttttggtcgtagccctcccgagagtgtggacagatgctaatctcaccgcgaggcagcgcgatccagaagactctcagaggaccgacgaaggtgataatcgggtatggtgtcatgtgtgcgaacgggaaaataccttcgagtgtcagaatccgaggcgatgtaaatggacggaaccttactgtgttatcgccgctgttaagatttttccgaggttttttatggtcgccaagcaatgctccgccggatgtgcagccatggaacgacctaagcctgaggagaaacggtttttactggaggaaccgatgccttttttctacctcaagtgttgtaagatccgttactgtaacttggaagggccacccatcaattcctcggtcttcaaggagtacgctggaagcatgggagaatcatgtggcggactgtggcttgccattctactgttgctggcttccattgcggctggcctcagcttgagctag

SEQ ID NO: 10352 - DNA, 933 bp, synthetic construct
  misc_feature 1..933: note = source = /note="Description of Artificial Sequence: Synthetic coding sequence"
  source 1..933: mol_type = other DNA
atgaatggactgtctctgagcgaactctgctgcttgttttgctgccctccatgccctggcagaatcgctgctaaactggcttttttgccaccagaggctacctacagcctggtcccagagcccgaacctggcccaggcggagctggtgcagcccctctcggcacgcttcgagcatcttccggggcacccggtcggtggaaactgcacctgaccgagcgagcagactttcaatattctcagcgtgaactggacacaattgaggtgttcccaacaaagagtgccagaggcaatagagtgtcttgcatgtacgttaggtgcgttccaggcgctcgttacacagtactctttagtcatggtaacgctgtggatctgggccaaatgtccagtttctacataggcttaggctcaaggctacactgcaatattttctcctacgattattctggatatggcgctagtagtggcagacctagcgaacggaatctctacgcggatatcgatgccgcttggcaggcgctgcgcacacggtacggaatctcccctgatagcatcattctgtacggacaaagtattggcaccgttcccacagtggaccttgcgtcccgctatgagtgcgccgctgtggttctgcacagccctttaacctccggcatgcgggtggcgttccccgacaccaagaagacatactgctttgacgctttcccaaatattgaaaaggtcagcaagataacctctcccgtactgattattcatgggactgaggatgaggttatagacttttcccacggcctggcactatatgagaggtgcccgaaagccgtggagcccctgtgggtagagggagccggtcacaacgatatcgagttgtatagtcagtatctggaacggctgcgccgattcattagtcaggagctgccttctcagagagcctag

SEQ ID NO: 10353 - DNA, 1905 bp, synthetic construct
  misc_feature 1..1905: note = source = /note="Description of Artificial Sequence: Synthetic coding sequence"
  source 1..1905: mol_type = other DNA
atggcgcaaggcgtgttatggatactgctgggtctgttgctgtggtcagatcctggtaccgcaagcttgcctctcttaatggacagtgtcatccaagctttggcagaactggaacagaaggtgccggcagccaaaacacggcacaccgcctcagcatggctgatgagcgccccaaattcaggaccacacaataggctatatcacttcttgctcggagcttggagcctgaacgctacggagctcgacccctgccccctgagccctgaactcctggggttgacaaaagaagttgcgagacatgacgtccgcgaggggaaagagtacggggtagtgctggcgccagatggctcgacggtcgcagtggagccgctgttggccggtttggaggcaggccttcaaggtaggcgagtgattaatttgcccctggactctatggcagccccatgggaaacgggggacacttttcctgacgtggtagcaattgcaccagatgtgagggccacgagctcccccggtctgagggatgggagccctgatgtgacaactgcggacataggagcaaacacccctgatgccacaaagggatgtcctgatgttcaagctagtctgcctgatgcaaaggcaaagtctccccctacaatggtggatagcctgctggcggtgactcttgctggcaacctggggctgacctttctgagaggctcacagactcagtcgcatcccgacctggggaccgagggatgctgggaccagctgtctgctccaaggaccttcacgcttctcgatcccaaagcaagcctcctgaccatggcattcctgaatggagccctggacggtgtgatactgggcgattacctgtcccggaccccagagccccgacctagcctgtcacacctgctgagccagtactatggagccggagttgcacgggatccgggattccgatccaatttcagaaggcagaacggtgctgcactcacttcagccagcattctggcccagcaggtatggggcacactggttctcctgcaacgtctggaaccggtgcatctccagctccagtgtatgtcccaggaacagctcgcacaggtggccgctaacgctacgaaggagtttaccgaagcgttcctagggtgcccagctatccaccccaggtgtagatggggcgcagccccataccggggacggccaaagctcctgcaactgccgctgggattcctgtacgtccaccatacttacgttcctgctccaccctgcactgacttcactaggtgtgcggctaatatgagatccatgcagaggtatcatcaagatacccaaggatggggggatattggatactcctttgtggtggggagcgatggctacgtgtacgagggcagaggctggcattgggtgggggctcacactctcggacacaacagcagggggtttggcgtggccatagttggtaattacaccgcggctttgcctacagaggccgcactcaggaccgtcagggatactctgccgtcatgtgccgtcagagctggcctgctccgtcctgactacgctttactcgggcatcgccagctagtgcgcactgactgccccggtgacgctttgttcgatctgctccgcacatggcctcacttcacagcggtgtcgctgaggtcgctgcactacacagcccgacgaccgagtgtgtacacgtcatccacgcgcccactcccgcctgcttgcaatagctgcgccaggacagcctccgccagaccaccaacttcccggagacatgtatacagtggaaacctggggcctgcattcgccggacattccgcgggaaacatacccgatccagtaacatcggcctacgctgcctcggcccagcctcagacccaaccagcttgcccattcccttcctcatag

SEQ ID NO: 10354 - DNA, 777 bp, synthetic construct
  misc_feature 1..777: note = source = /note="Description of Artificial Sequence: Synthetic coding sequence"
  source 1..777: mol_type = other DNA
atgctggtgttgtacggacatagtacacaggacctgcccgagaccaatgcccgtgtggttggcggtacagaggcaggacgcaactcttggcctagccagataagtttgcagtaccgatccgggggatctcggtaccacacatgtgggggaactctcatccggcagaactgggtcatgacggctgcccactgtgtggactatcagaagacttttagagtcgttgccggagaccacaacctgtcccaaaatgacggcacagaacagtatgtgtctgtccagaagatcgtcgtccatccctactggaacagcgataatgttgctgcgggttacgatattgccctcttgcggcttgcgcagtctgtaacgcttaattcatacgtgcaactgggtgtcttgccacaagaaggagctatactggccaataatagtccttgttatatcacgggctggggcaagaccaaaacaaatggtcagctggcacagactctgcagcaggcttacctacccagcgtcgactatgccatctgctctagtagtagctactggggatccacagttaagaatacgatggtgtgcgccggaggcgatggtgtcagatcgggctgccagggcgactccggtgggcctctccattgtctggtgaacggcaaatacagcgtgcacggggtgacgagcttcgtttcctcaagaggttgcaatgtgagtcgcaagcccacagtcttcacccaggtgagcgcatatatctcctggattaataacgtcatagcatcgaattag

SEQ ID NO: 10355 - DNA, 993 bp, synthetic construct
  misc_feature 1..993: note = source = /note="Description of Artificial Sequence: Synthetic coding sequence"
  source 1..993: mol_type = other DNA
atggctgctcggaggtctcagcgcagacgcggtcgtcgcggagagccagggacagcactgttggtcccccttgctctcggactcggactagctctggcctgcctcggattgttgctggctgtcgtctctcttggttccagggcatccctctcagcgcaggagcctgcacaggaggagttagtggctgaagaggaccaggacccctctgaacttaatcctcagaccgaggagtcacaggatccggcacccttcttgaatagactggtgcgccctagacggtccgccccaaagggccgaaaaacccgggctaggagagctattgcagcccactatgaggtccacccccgtcctggacaagatggagcacaagctggagtcgacgggacagtgtccggttgggaagaggctagaataaattcatcatcacctctgcggtataacagacagataggagaattcatcgttacccgagccggattgtactatctatactgtcagtctagtgatgccttagaggcctgggagaacggcgagaggtcccgaaagcggagagccgttttaacgcagaagcagaaaaagcagcattctgtactgcatcttgtgcctatcaatgcgacctcgaaggacgacagcgacgttaccgaagtcatgtggcagccagcccttagaaggggtagaggtctgcaagcccagggctacggcgtgcgtattcaggacgcaggcgtgtacctcttgtactcccaagtactcttccaggatgtgaccttcactatggggcaggtggttagcagggaaggtcagggccgacaggaaaccctgtttcgttgtatacgctccatgccaagccaccccgatagggcctacaattcttgctatagcgctggggtctttcacctacatcagggcgacatcctcagtgtcattattccacgggctcgggctaaattgaacttgtccccccacggaacattcctggggttcgtgaaattgtag

SEQ ID NO: 10356 - DNA, 2253 bp, synthetic construct
  misc_feature 1..2253: note = source = /note="Description of Artificial Sequence: Synthetic coding sequence"
  source 1..2253: mol_type = other DNA
atggcgaagcctaggctgctcgtgctttatttcgctctcatagtggtgccggcttgggtgtcaagcatagtcctgaccggcacctctgagccaccagacgcccaaacagtagcaccagctgaagatgagacgctgcaaaacgaagctgacaaccaagagaacgtgttgtcccaactactcggagattacgacaaggtgaaagctatgtcggagggttccgactgccaatgcaagtgtgttgtgaggcccctgggcagagatgcgtgccaacgaatcaacgctggagcatctcgcaaggaggatttttataccgtggaaactataaccagcggcagttcttgcaaatgtgcatgtgtggccccaccaagcgcccttaatccctgtgaaggtgatttcaggctgcagaagctgagagaggctgacagccaggaccttaagttgagcaccatcattgatatgctggagggcgcattctatggcctggacttgctcaagttgcactctgttacaaccaagttagtcgggagggtcgacaaattagaagaggaagtcagcaaaaacctcaccaaggagaatgagcaaatcaaggaggatatggaggagatccgcactgaaatgaataagcggggaaaggaaaattgctctgagaatatactcgattctatgccagatatccgctcagctttgcagcgggatgctgcagccgcttacgcacatcctgagtatgaggagcgcttcctgcaggaagaaacggtgagccagcaaatcaattctattgagctgctccagacaagacctctggccctaccagaggtcgtgaagtctcagcgaccacttcagcggcaggtgcacctgcggggtagaccagcctctcagccgacagttatccggggaatcacctactacaaggccaaggtgtctgaggaggaaaacgacatcgaggagcagcaggacgagttcttcagtggcgataatggagtagatcttctcatcgaagatcaattgcttaggcataacggtctcatgacatctgttacgcgccgtcccgcagccacgaggcaaggccatagtaccgcggtcacctctgacctaaacgctcgcacagctccatggtcctcagcactgccccagccttcgacctctgacccctccattgccaatcacgctagcgttggtcccactttgcaaaccaccagtgtgagcccagatcccacccgtgaatccgtcttacagccatctccacaggttccagccactacagtggcccatacagctacccaacagcctgctgcccctgccccaccagccgtgagcccaagggaggccctaatggaagcaatgcacacagtgccagtccccccaaccaccgtgagaaccgattcacttggaaaagatgctcctgcgggatggggcacaacccctgcaagtccaaccttgagtcctgaggaagaagacgacatcaggaacgtgattggcaggtgcaaagatacactctccacaattacaggccctacaacgcagaacacttacggacgtaatgagggcgcatggatgaaagatcctctggctaaagacgagcggatctacgtgaccaactattactacggaaatacactcgttgaatttagaaacttagaaaatttcaagcaaggcagatggagtaactcttataagctgccttatagctggatcggcacaggtcatgtggtttataatggagcattctattacaatagagcctttactcgcaatatcatcaagtatgatctcaagcagcggtatgttgcagcatgggccatgctccacgacgtggcatacgaggaagccacaccttggcggtggcagggtcactctgatgttgatttcgccgtggacgagaacggcctgtggctcatatacccggcactcgacgacgagggcttctctcaggaggtcatcgtactgtccaaattaaacgcggctgacctgagcacacaaaaggaaactacttggagaacaggcctgcgtcgcaacttttatggaaattgtttcgtcatctgcggggtcctttacgctgtggatagctacaaccagcgtaacgctaatatctcctatgcttttgatacacataccaatactcagattgttcctaggctgcttttcgagaatgagtactcctacactactcaaatcgactataacccaaaagaccgacttctgtatgcatgggacaatggacatcaggttacctaccacgtgatcttcgcatattag

SEQ ID NO: 10357 - DNA, 678 bp, synthetic construct
  misc_feature 1..678: note = source = /note="Description of Artificial Sequence: Synthetic coding sequence"
  source 1..678: mol_type = other DNA
atgaagctgggctgcgtgctgatggcatgggcgttgtacctgtctctcggtgtgctgtgggtagcccaaatgttgctcgccgctggctgtcatgctgagctgttccccgcacccatactccgggcagtgccctcagccgaacctcaagcagggtcacccatgacactctcatgtcagaccaaacttccgttgcagcgaagcgccgctcgtctgctgttcagtttctataaggacgggaggattgtccagtcacgcggactgagctctgaattccagattcctacagcctccgaagaccattctggctcttactggtgcgaagcggctacagaagacaatcaggtctggaaacagagtccccaattggaaatcagagttcaaggagcaagctccagtgctgctcccccaaccctgaatccggcaccccaaaaatctgcggcaccaggtacagcacccgaggaagcaccaggacctttaccaccaccccctacccccagctctgaggaccctggtttcagctcaccactcggcatgccggacccgcacttgtaccaccagatgggtctactcctgaagcacatgcaggacgtgcgggtgctcctggggcacttactgatggaactgcgagagctttccggtcataggaagcccggtactacaaaggctaccgccgaatag

SEQ ID NO: 10358 - DNA, 891 bp, synthetic construct
  misc_feature 1..891: note = source = /note="Description of Artificial Sequence: Synthetic coding sequence"
  source 1..891: mol_type = other DNA
atgagccgtcaggagccaaagatgttcgtgctcctctatgtgacatctttcgcaatctgcgcttccggacaaccaagaggcaatcagctgaaaggcgagaattacagtcccagatatatttgtagcatacccggtctccctggccctccagggccacccggagctaatggatcacctgggccacatgggcgaattggcttgcccggaagggacggaagggacggcaggaagggcgagaagggcgagaaaggaacagcgggtttaaggggtaagaccggacccttaggactagccggagagaaaggagaccagggagagactggaaaaaagggaccaatcggccctgagggggaaaagggcgaagtgggccctattggacctccgggacctaagggtgacaggggagagcagggggaccctggcctgcccggtgtctgccggtgcggctccatcgtccttaaaagcgccttcagcgtcgggatcacaacatcatatccagaggaacggctcccaattatttttaataaggttctctttaatgagggcgaacactacaaccccgctacgggaaagttcatctgtgcctttccagggatctattatttttcttatgatattacgctggcaaacaagcaccttgccattggactggtgcataatggtcagtaccggatcaaaaccttcgacgccaatacgggcaatcacgacgtggccagcgggagcacagtgatatatctgcagccagaggatgaggtgtggttagaaatcttctttactgaccagaacggtctattttcggatcctggttgggctgactctctgttcagtggcttcctgctttatgtcgacacggactatttagactccattagcgaggatgatgaactgtag

SEQ ID NO: 10359 - DNA, 1275 bp, synthetic construct
  misc_feature 1..1275: note = source = /note="Description of Artificial Sequence: Synthetic coding sequence"
  source 1..1275: mol_type = other DNA
atgggcagcctcgtcctcactctttgtgctcttttctgcctggccgcatacctcgtgagtggctcccctatcatgaacctcgagcaaagcccattggaggaagatatgtctctctttggggatgtgttttcagagcaagatggggtcgacttcaacactctgctccaaagcatgaaggacgaatttctgaagactctgaacctgtctgatattcccacccaggattcagccaaagtggatcccccagaatatatgttagagttgtataacaagttcgctactgacagaactagcatgccaagtgcgaatatcattcgaagcttcaagaacgaggacctgttttctcagcctgtaagctttaatggactgagaaagtaccccctgctgtttaatgtcagcatccctcaccacgaagaagtcattatggcggaactgcgactctacacactggtccaaagagataggatgatctacgatggagtcgacaggaaaattacgatctttgaggtgctagaatccaagggggacaacgaaggagagcgcaacatgctggtgttggtgagcggtgagatatacggcaccaacagtgaatgggagacttttgatgttacagatgccatcaggcgctggcagaagtctgggtcctcgacccaccagttggaggtccacattgagagcaagcatgacgaggcggaagacgccagctccggccgtctcgaaatcgacaccagtgcgcagaataaacacaaccccctcttgattgtgtttagtgacgatcagtcctccgataaagaacgcaaagaggagctcaatgagatgatctcacacgagcagttgccggagctagataatttggggctcgattccttcagctcaggaccaggggaggaggccctgttgcagatgcggtcaaatataatttatgatagtacagccaggatacggcgtaatgccaagggaaattactgcaagcggacacccctctatatcgactttaaggagatcggatgggatagctggataatcgcccctcctggctacgaggcctacgagtgccgaggtgtctgcaactaccccctcgcagaacacctcactcctactaagcacgccattatccaggctcttgtgcacttaaaaaactcccagaaagcatcaaaagcctgttgcgtgccaaccaagcttgagcccatttcgattctctacctggataagggcgtggtcacctacaaatttaagtatgaaggaatggccgtgtctgaatgtggctgtcggtag

SEQ ID NO: 10360 - DNA, 381 bp, synthetic construct
  misc_feature 1..381: note = source = /note="Description of Artificial Sequence: Synthetic coding sequence"
  source 1..381: mol_type = other DNA
atgcacctgtcacagttattggcctgtgccctgctcctgactctcctgtcgctgcggccaagcgaagccaaacctggagcccctcctaaagttcctaggacaccccctgccgaagagctggcggaaccacaggctgcgggagggggtcagaagaaaggggacaaggctcccggtggaggtggcgcaaacctgaaaggcgaccgatcacggctgcttcgcgacctgcgggtagacacgaaaagtcgcgcagcttgggccaggctgctgcaggagcaccctaacgcaaggaagtataaaggagctaataaaaagggcctgtcaaaggggtgtttcggcttgaagctggacagaatcggctctatgtcaggtttgggctgttag

SEQ ID NO: 10361 - DNA, 423 bp, synthetic construct
  misc_feature 1..423: note = source = /note="Description of Artificial Sequence: Synthetic coding sequence"
  source 1..423: mol_type = other DNA
atgagatccccaagaatgagagtgtgcgccaagtctgtcctgctttctcattggctgtttctggcttatgtcctaatggtgtgctgcaagctgatgagtgcttcaagccagcatctgagagggcacgccggtcaccatcagatcaagcaagggacatgtgaagtggtggctgttcaccggtgctgtaataaaaatcggattgaggagaggtcccagacagtgaagtgtagctgcttccccggtcaagttgccggaaccacaagggcccaaccgtcctgtgtggaggcttctatcgtgattcaaaagtggtggtgccatatgaacccatgcctggagggcgaagattgtaaagttttgcccgactacagtggatggtcctgttcctccggaaataaggtgaagactactaaggtaacacggtag

SEQ ID NO: 10362 - DNA, 1332 bp, synthetic construct
  misc_feature 1..1332: note = source = /note="Description of Artificial Sequence: Synthetic coding sequence"
  source 1..1332: mol_type = other DNA
atgcttatgctgtttgtttttggtgtgctgctgcacgaagtcagtctgagcggacaaaatgaggcgccacctaacacacactccatccccggagagccgctgtacaattacgcctccatacgcctgcctgaggagcatatccccttcttcctacacaataatcgccatatagcaacggtttgtaggaaagattccctgtgtccttacaaaaagcaccttgagaagctaaagtattgttggggctacgagaaaagttgtaagcccgaattcagatttggatatcccgtttgctcctatgtcgacatgggttggacagataccctcgagagtgctgaagacatattctggaagcaggctgatttcggctacgcccgagagcgtcttgaggagatgcatgtgctgtgccaacccaaggagactagcgactcaagtctcgtgtgctctcgctatctgcagtactgcagagcaactaatctctacctggatttgcgcaatatcaagaggaaccatgatagatttaaagaagacttttttcaatctggcgaaatcggaggccactgtaagctcgatatcaggaccctgacctctgaaggccagcgcaagtcacctctccagagctggttcgccgagttacaatcctacacccagcttaattttcggcctatcgaagatgccaagtgtgacattgtcattgaaaagcctacttacttcatgaagttggatgccggtgttaacatgtaccatcacttttgtgatttcataaatctctatattacgcaacatgtaaacaacagcttctcaactgatgtgtatattgtcatgtgggacaccgatggcaaaattagggtgacaatccttgctcgaagtactgaatatcgaaaaatccttaaccagaacgagctcgtgaacgcgctcaagactgtgtctactttcgaagtgcaaattgtggactacaagtatcgagagttgggttttctggaccaactgaggatcacgcataacactgatatcttcattggaatgcatggtgccggacttacccacctactgtttctgcccgattgggctgccgtttttgaactgtataattgcgaggacgagagatgctaccttgacctggcgcgactgcgtggtgttcactacataacttggcgcagacagaacaaagtattccctcaggataaaggccaccaccccacactgggagagcatcctaagtttacgaactactcattcgacgtggaggagttcatgtacttagtactgcaagctgccgatcacgtgctccagcacccaaaatggcccttcaagaagaaacatgacgagctgtag

SEQ ID NO: 10363 - DNA, 336 bp, synthetic construct
  misc_feature 1..336: note = source = /note="Description of Artificial Sequence: Synthetic coding sequence"
  source 1..336: mol_type = other DNA
atggggccatcttcttgtctgctgctgattctgatcccactactgcagctcattaacccaggaagtacacaatgcagccttgacagtgtgatggacaaaaagattaaggatgtgttaaacagcctggagtatagccctagccctatttcaaaaaagctgtcctgtgctagcgtgaaaagtcaagggaggccatcttcttgtccagcgggaatggccgtaacaggatgtgcctgtggttatgggtgtggtagctgggatgtgcaactggagaccacctgtcattgccagtgctctgtggtggactggactacagccagatgttgccatctgacctag

SEQ ID NO: 10364 - DNA, 1965 bp, synthetic construct
  misc_feature 1..1965: note = source = /note="Description of Artificial Sequence: Synthetic coding sequence"
  source 1..1965: mol_type = other DNA
atggccccaaagaagctgtcatgtttgagatctctgctactgccgctgagtctgaccctgcttctgcctcaagcagatacacgaagctttgtggttgaccgaggacatgacaggttcctattggacggcgcaccatttcggtatgtatcgggctctctccattattttagagtgccaagggttttgtgggctgatcgtctactcaagatgaggtggagtggcctgaacgccatccagttctacgtgccgtggaattaccatgagccacagccaggagtgtacaacttcaatggttcccgcgaccttatcgccttcctaaatgaggccgcactggccaatctcctcgtaatacttagacccggtccctatatatgtgccgagtgggaaatgggaggtctcccttcttggctgctgcgtaagcccgaaattcatctgcgaacctcagatccggatttcctcgctgctgtggattcctggtttaaagtgctcctgcccaagatctacccatggttgtaccacaatggcggaaatatcatcagtatccaggtggaaaatgagtacggctcctatcgcgcatgcgattttagctatatgcgccacctggcaggactgttccgcgcactgctgggcgaaaaaattctgctcttcactaccgacggtccagaaggtctgaaatgcggaagcctccgaggactgtacacaactgtcgacttcgggcctgcagacaatatgaccaaaatcttcactctgctcaggaaatatgagccacacggccctcttgtcaactccgagtactacaccggctggttagactactggggccagaatcacagcaccagaagcgtgtcagcggtgacaaaagggctggagaatatgcttaagctgggggcaagcgtgaacatgtatatgtttcacggcggtacaaatttcggatattggaacggtgcagacaagaaggggaggttccttcctataactacctcttacgattacgatgcccctatctccgaggccggagatcccacaccaaagctctttgcacttcgggacgttataagcaagtttcaggaggtgcctctcggcccactgcctccaccatcccccaagatgatgctaggaccggtgacccttcatctggtggggcacctgctcgcctttctcgatcttctttgtcctagaggtcccatccactccatcttgcccatgacgttcgaggctgtgaagcaagatcacggatttatgctatacaggacatatatgacgcacacaatttttgagcctacacccttctgggtgcctaacaatggggtgcatgatcgggcttatgttatggtagatggggtgtttcagggagttgtcgagcgcaacatgagggataagctcttcctaacaggaaaattgggttcaaaactggatatcttggtggaaaatatgggacgattatctttcggctcaaactcttctgactttaagggtctgctgaagccccctattctcggccagaccatcctgacgcagtggatgatgttcccccttaagattgacaatttagtgaaatggtggttccccctgcagctgcccaagtggccttatcctcaggccccttctggcccaacgttttatagcaaaacctttcctattctgggttcggtaggagacaccttcctgtacctgccgggatggaccaagggccaggtatggataaacgggttcaacctgggaaggtattggacaaaacaggggccacagcagacactctatgttccacggttccttttattccctcggggagccctgaacaaaatcactttgcttgagctggaggatgtaccgctacagcctcaggtacagttcctggataagcccatactgaacagcacaagcaccctgcatcggacgcacattaattctcttagcgccgacacactttctgctagcgagcctatggagctgtcaggccactag

SEQ ID NO: 10365 - DNA, 2502 bp, synthetic construct
  misc_feature 1..2502: note = source = /note="Description of Artificial Sequence: Synthetic coding sequence"
  source 1..2502: mol_type = other DNA
atgaatatggaaatcggccacccccatgagggaaaagacgatcttggtgacaaaagagtgattatgggcaccaaatttccaatggagttaggaatccgagtaggcctgggaaaggaggactcacgttgtggggaaagtcctgtggtgagcaacaaatgcgagggaagaatggctcctccggaaacaaagttccccttatccaaaggtctggaaatgggcctcgagaggcagaatatctcccggacagtcatgcaaagaggatccctcggcgtggacagcgtcagcgcttcacagggtacaaagcccagtttgcttcctggacggatgggactcgaaaatgagtcactgctggcaggttacactcacgagcgaatcattcaaccccctctggggagggtctgtggaagttctcaggccgcagggagtagacgagccccacttgcaagcggtcccgaaggcgtggaagaactggtggggaagccagcttttgttatggagccaagacaagaaatggagaaagaaagcacctgtgtgctcatgaaaccaaacaccgagatcaaactgcctgtggaagtcgacattgggctgacccaggcagaagggcctgatgaaactaaaaatactgaaccacagatgggtctggttatcgagccacctcaatgccagtttgcacagcagcatgaacagaggaaggaagctggcaatattgagtcaggagttgagccgccagataggatccggccaatttatagtggaaaattcttcgaccggactccatgttggccctcagccggaaaagtgatccctgtgggttatagagtcgcaacgtgtttaacggaaaagctgccaaggctgatcacgccccctgaggccaaaaagtatttcaacttccggtacccaccggctggagtcgaaagggttttttatggcagagccaacgacccacagatcgcgccttacctcactcatgggatccgctccaaaatttccgtgctggccaacacgctgatcaaccctcagccaatcacaacttttcagcagaaaataaaggataagaaagagagtatttatctgagcaaccgcagggccccactaggtaagtctcacgaccaagcaccagggttgcccaagggtatggatactactaataccacgtttggcacggcagtgattaaggagtacagcgcaaaggatgtggttaacccgccaaagtcctacgaggaggtcttcaaggagggaaatgagggacacgatctgtatgtggtgtctcacaatgattattatgcaggagaggccaagaataggaaatacaatccatcctcattccaccgttgctctgtgtatggggtgcctacccctcattttaacgatggacgggctatggcaaagtctctttattggctgcatgagctgcaaatgaaaagaggagccaagtttgtaagcaagcgagcagacgatttcaaggagaagttccaacacaagctgggccgtgtgctggacccaatcgcagagactatgaatgtgccaccagactgcacattcggagcatgcttacgacctgaggagtacggagttggagatcttatccacaataggcttcccgatgagtatctgaggggcaaggaccgccagcgcgcactgatagccgcagtgcgccatcacctgaaaaaagtcaattaccagaagttcgacaccttactggctgcgtttaggcactacgacaagaagggcgacggaatgatagacaaggacgagctccaggaagcatgtgaccaggcgaatctgtccttagacgataaactgctggatcagctgttcgactactgtgatgttgacaacgatgggttcattaactatctggagtttgccaatttcttgaattggaaggacaagatgttacttaaagaatacgaggagagagtgatcataaaaggccgaaaaccagactgtgtgaacccaactgaagccaacgtggaagagccagagcaaactctgctgattaaaccagaggacatagtcctgaaggaggccggatcgacagaaaagactttgcgcacccttttacggccatctgataaggtcagtaattattataagaccacttcctcggaaattaacgcaattgtaggagccattccttcaacttgctatccaatctgcggggtccctacaatccggtcagatatccctgcccctcgcatcagaagaataagcgaccgtacgaactatggcgaagaagggagcgcatactctctcttgtacccaactatctttgcaaggaagggcgtgtttgaaagggactttttcaagacgagatcgaaggaagagattgccgaaattctgtgcaatatcggagttaaattatctgatgaggagttcgaaaacgtctggaatctggctagtaaaaagcatcatagaggggaagtgtgcgtcgaaaatattcgaaacgtcctcgacgaacttaggcacgcagatagaatcaaatgtaagaccctgatgtag

SEQ ID NO: 10366 - DNA, 2004 bp, synthetic construct
  misc_feature 1..2004: note = source = /note="Description of Artificial Sequence: Synthetic coding sequence"
  source 1..2004: mol_type = other DNA
atgggatcctcccgtctggccgcactgctcttgcctctgctactgatcgtgatcgacttgagcgactctgcaggtatcgggtttagacacctcccgcattggaacacgaggtgcccactcgcttcccacactgatgactccttcacgggaagctctgcgtacatcccatgtcggacctggtgggccctcttttctaccaagccatggtgtgtccgcgtttggcattgcagccgctgtctatgccagcatctgctcagtggcggaagcgggcttcagagaggcctctttcatcttctggtccagaagtccaagaagtcttcgacctttaagttttaccggaggcataagatgcccgcaccggctcagcgcaaactgttacctcgccgtcatctcagcgagaagagccaccacatttctatccccagccccgatatctcgcataaaggcctgagatctaaacggacacagccctccgaccctgagacatgggaatctctccctcgactggattcccaacgccatggaggcccagagttctccttcgatcttctgcctgaggctcgcgcaatccgggtgaccatatcatctggcccagaagtcagtgtccgattgtgccatcagtgggcgctcgaatgcgaagagctcagctctccctacgatgtccagaaaatcgtctccggtggccatactgtggagctaccgtacgagttcctcctgccatgtctgtgtatcgaagccagttacttacaggaggacactgtacggcgtaagaagtgcccgttccagagctggccagaggcctatgggagtgacttttggaaaagcgttcattttaccgactatagtcaacatacccagatggtgatggccttaaccttacgttgtccgctgaagctggaggcagcactctgccaaaggcatgactggcacaccctatgtaaggacttgcctaatgctacagctagagagagcgatgggtggtacgtcttggaaaaggtggatctccatccccaactatgtttcaagttcagctttggcaactcctcccacgttgagtgtcctcaccagacgggatctctgactagctggaacgtgtccatggatacccaggctcagcagctgatcttgcacttcagtagcaggatgcatgccacattctccgccgcttggtccctgccaggcctcggacaggacaccctggtgcctccagtgtacactgtaagccaagctcgcggtagctcacctgtctcactggaccttatcattccgttcttgaggcctggatgctgcgtgctcgtttggcgatctgatgtgcagtttgcctggaagcatcttttgtgccctgatgtatcttaccggcacctgggactgctcattcttgctctgttagctctattgaccctcctgggtgtggtgttagctttgacttgccggaggcctcagtcagggccagggcctgctcggcctgtgcttctcttgcacgcagctgatagcgaagcccagcgcaggcttgtcggcgcactggctgagctattgagagctgccctcggcggtggccgtgatgtaattgtggacctctgggagggtcgccacgtagccagggtgggtcccctgccgtggttatgggctgctcgtacaagggtggccagagaacagggtacagtgttgctgctgtggtctggagccgatttaagaccggtgtcaggaccagaccctagggctgcgcctttgctggccctcttacacgccgctcctcgacctctgctgctcttggcctatttttccagactctgtgcgaagggagatatcccaccgccactgagggcgctgccgagataccgcctgctccgagatttaccacggttgttgagggcactggacgctagaccattcgcagaggcgacatcgtggggcaggctgggtgccagacaaagacggcagagccgactggagctgtgttcacggctggagagagaggctgcaagactagccgaccttggatag

SEQ ID NO: 10367 - DNA, 609 bp, synthetic construct
  misc_feature 1..609: note = source = /note="Description of Artificial Sequence: Synthetic coding sequence"
  source 1..609: mol_type = other DNA
atggagctgtggggcgcttatttgttactgtgcctgttttccctgttgacacaggtgaccaccgagccccctactcaaaaacctaaaaaaatagtgaatgccaagaaggatgtggtgaataccaagatgtttgaggagctcaaaagtcggctagacaccctggcccaggaagtcgccctcctaaaagagcagcaggccctgcaaactgtgtgcctgaaaggtaccaaagtgcatatgaaatgctttctagcattcacccaaaccaaaacttttcacgaggcctctgaggactgcatctctaggggcggaacgctggggactccccagaccggaagcgagaacgatgctctgtacgagtatcttagacagtctgtggggaacgaagctgaaatttggctcggactaaacgatatggcagccgagggcacctgggttgatatgaccggagctcgaattgcttataagaactgggagacggagatcacagcacagcccgacgggggaaagaccgaaaattgcgcagtcttgtctggcgcagctaatggaaaatggtttgataagcgctgccgggatcagctgccgtatatttgccagtttggaatagtctag

SEQ ID NO: 10368 - DNA, 1839 bp, synthetic construct
  misc_feature 1..1839: note = source = /note="Description of Artificial Sequence: Synthetic coding sequence"
  source 1..1839: mol_type = other DNA
atgctcgaaggtcttggatcgcccgcaagcccaagggccgcagcatcagcaagcgttgctggaagttccggccctgctgcctgctctcctccatcgtccagtgcacccaggagtccagagagtcctgccccaaggcgaggcggagtgcgcgcttcagtgccccaaaagctggcagaaatgttgagcagtcagtatggtctgatcgtctttgtggctggactgttgttactccttgcttgggctgtgcacgcggcaggagtctcgaaatcagatctcttgtgcttcctgaccgcgctgatgctcctgcaactactatggatgctgtggtacgtgggccgatcttccgcccaccggagactatttagattaaaagacactcacgccggagccggatggctgcgtggctccatcacccttttcgctgttattactgtgatactgggctgtcttaagatcggatactttatcggcttctccgagtgcttgtctgccactgagggggtgttccccgttacgcacagcgttcatactttacttcaggtatactttctgtggggccatgccaaagatattattcaaagcttcaaaactctggagcggtttggcgtgatccattcagtcttcaccaacctactgttgtgggctaacggggtacttaatgaatccaaacaccaacttaatgaacataaagagcgcctaatcacattgggattcggcaacatcactaccgttcttgacgatcacaccccccaatgcaactgcacccctcctactctttgtaccgcgatcagtcacggaatttactacctttatccctttaatatcgaatatcagattttggccagcactatgctctatgtgttatggaaaaatatcgggcgtaaagtggactcacatcagcaccaaaagatgcaatttaagagtgacggggtgatggtcggagctgtgctggggctcacggtcctggctgctaccattgcagtagttgtggtctatctgatccatatcggtagatctaagacgaagtctgagtccgctctgattatgttttatctgtacgctattactctgctgatgcttatgggcgctgccggattggcagggataagaatttatcgaattgatgagaagagcttagacgagtctaaaaatcccgctcgtaaactggactctgacctactggtcggaacagcatcaggctcctggttgatcagctgggggtcaatactagccattctttgcgccgagggccacccaaggtacacttggtacaatctcccgtactctattttggctatcgtggagaaatacattcagaatctgttcatctttgagtcaatccacagagagcctgagaaactttccgaagacattcaaactcttcgagtagtcactgtgtgcaatggaaacacaatgcctctcgcttccagttgtcccaagtctggcggagtcgccagagacgtcgcccctcaggggaaagacatgcccccagcggctaacgggaatgtgtgtatgcgtgaaagccacgacaaagaagaggaaaagcaggaagagagcagttggggcggatctccctcacccgtgagactgccccgttttttgcagggaaacgctaagagaaaagtgctgagaaatatcgccgctttcctgtttctttgcaatatatcactctggattcctccggcatttggatgccgaccagaatatgacaacggattggaagagattgtgtttggatttgagccttggattatcgtggtgaacctggccatgccattttccattttctatagaatgcatgccgctgcctctcttttcgaggtgtactgcaagatctag

SEQ ID NO: 10369 - DNA, 786 bp, synthetic construct
  misc_feature 1..786: note = source = /note="Description of Artificial Sequence: Synthetic coding sequence"
  source 1..786: mol_type = other DNA
atggaattgctgcaggtcacaatcttatttttactgcctagcatttgtagctcaaattcaacaggtgtgctggaggcggcaaataatagcctggttgtgaccaccactaagcccagcatcacaacgcccaacaccgagtccctacagaagaacgtagtaacgccaacaactgggacaacccctaaaggcacaataacgaatgagctcctaaaaatgtctctcatgtctacggccacattcctgaccagcaaagatgaaggcctcaaggccaccacaacagatgttcgaaaaaacgactccattatttccaacgttacagtcacctctgtgactttacccaacgctgtttcaaccctccagtcttccaagccaaagaccgagacccagtcctctatcaaaaccacagagataccaggtagcgtcttacagccggacgcatcaccgtccaaaacgggcacactgacctcaattccagtgaccatccccgaaaatacctctcagtcacaggtaattgggaccgaaggtgggaagaatgcttccaccagcgccacatcccggtcttatagttccataatcctacccgtagtcatcgctttgatcgtgattaccctgagtgtgtttgtgctggtggggttgtatagaatgtgctggaaagccgaccctggcacccccgagaatggcaacgatcaaccgcagagcgataaggagtcggtgaaactgcttacagtgaaaaccataagccacgagtccggcgagcacagcgcccagggaaagacaaagaattag

SEQ ID NO: 10370 - DNA, 6408 bp, synthetic construct
  misc_feature 1..6408: note = source = /note="Description of Artificial Sequence: Synthetic coding sequence"
  source 1..6408: mol_type = other DNA
atgcccgcactgggaccagccttacttcaagccttgtgggctggctgggttctgaccctgcaaccactcccccctacagcgttcactcccaacggcacatatctccagcaccttgccagagatcccacgtccggcaccctctaccttggcgcaaccaatttccttttccagctctcgccaggcctccagctggaggctactgtctctacgggcccagtcctcgatagtcgtgactgtctcccccctgtcatgccggacgaatgtccacaagctcagccgactaacaatcccaatcagctgctcctggtgtcacctggcgctttagtggtgtgcggatccgtgcaccagggagtctgtgaacagagacgcttaggacaactggaacagctcctgttgagaccggagcggccaggggatactcagtatgtggctgccaacgatccagctgtgagcactgtcggactcgtggctcaaggcctggctggcgaaccactattgtttgttggcagaggctacacctcccgaggagtggggggaggcattccaccgattactacccgggctctttggccgcctgatccccaggcggcatttagctatgaggagactgccaaactggccgtaggcaggctttcggagtactcccatcatttcgtcagtgcattcgcaagaggggcttcagcctattttctgttccttagaagagatctgcaggctcaatcccgcgctttcagagcatatgtgtcaagggtatgtctccgggatcagcattactactcctatgtcgagttgcccctggcctgtgaaggaggacgatatggtctcatccaagcagcagcagttgccacatctcgcgaggtagcacatggggaggtactgttcgcagccttctccagcgcagcacctccaacggttggcagacctcccagcgctgccgcaggcgcttcaggcgcaagtgccctgtgtgctttccctctcgatgaggtggaccgactcgctaacaggacgagggatgcctgttataccagggagggaagagcagaagatggaacagaagtagcatacatcgaatacgatgtgaactccgattgcgctcagctgcccgtggataccctagatgcatatccttgcggttcagaccataccccaagcccgatggcaagtagagtgccccttgaagccacgccaatcctggagtggccaggtattcaactgacagccgtggcagtgactatggaggacggacatacgatcgcattcttaggggactcccaagggcagcttcacagggtctacctcgggccaggcagcgacggccacccctactccacgcagtccattcagcagggatccgccgtgtctcgtgatctgactttcgatggtaccttcgaacacctgtatgtgatgacgcagagtacccttctgaaggttcctgtcgcttcttgtgcccagcacctggattgtgccagttgtttggctcacagggacccatactgcggatggtgcgtccttctcggcaggtgtagcaggagaagtgaatgttctaggggtcaggggcctgaacaatggctgtggtctttccagccggagctgggctgtctacaggttgccgctatgtctcctgccaacatttcccgcgaagaaacccgcgaggtgtttctctccgttcccgacttgcctcccctgtggcctggagagtcatatagttgccattttggtgagcaccagtcccccgcactgcttactggcagcggggtgatgtgcccatcgcccgatccatccgaggccccagtcctgcccaggggagctgattatgtgagcgtgagtgtggagctacgcttcggcgcagtggtcatcgctaaaactagtttgtccttctacgactgcgtcgcggtgactgagctccgtccctcggcacaatgccaggcttgtgtaagtagcagatggggatgtaattggtgcgtgtggcaacacctgtgtacccataaggccagttgtgatgccggaccaatggtggccagccaccagtcccccctggtgagtcccgacccgccagctagaggcggtccatcacccagtcctcctactgcccctaaagcccttgcgaccccagcacctgacaccctgcccgtggaacctggggctccaagtacggcaaccgcatcggacatcagtcctggagccagcccctcgctgttgagcccatggggtccctgggcgggttcaggttccatcagctctcctggttccacgggctctcctttacacgaagagccctcaccacctagcccccagaatggaccgggtaccgctgtgccagcaccaaccgattttcgccctagtgctactccagaggatctgctcgcgtctccactcagcccaagcgaggtcgctgccgtccccccagccgatccagggccagaggcactccacccaaccgtccccttggaccttcctccagcgacggtgcccgctaccactttccccggtgcaatgggatccgtgaaacccgcactcgactggctaactcgggaaggtggcgagctacctgaagccgatgaatggacgggaggcgatgcccctgctttttccacatccacactgctgtctggagacggcgactctgcggagctggaaggacctcctgctcctttaatcctgccaagttcccttgattatcagtatgacactcccggattgtgggaattggaggaagcgaccttgggcgcaagttcatgtccatgcgtggagagcgtgcaaggctcaactctaatgcccgtacacgtggagcgggaaatcagactcctaggcagaaacctacatctcttccaagacgggcctggtgacaatgaatgtgtgatggagctcgagggcttagaggttgtggttgaagctcgcgtcgagtgcgagcctccccctgacacacagtgccacgttacttgtcagcagcaccagctgagctatgaggctctgcagccagagctgagggtgggattatttcttaggagagccggacgactgcgcgtagattccgctgaagggctgcacgtggtgctgtacgattgctcggtcggacacggagattgcagccgctgccaaaccgccatgccgcagtacgggtgtgtgtggtgcgaaggggagcgacccaggtgtgtgacacgtgaggcgtgtggcgaagctgaagccgtggcaacgcagtgtccagcaccactcattcattctgtcgaacctctgaccggaccggtcgacgggggaacccgagtcaccattcgtggctctaaccttggtcagcacgttcaggacgtgcttggtatggtgactgtagctggtgtgccatgcgccgtcgacgcccaggagtacgaggtcagtagcagccttgtatgcattactggagccagcggggaagaagtagctggggcaactgctgtggaggttcccggacgcggacgcggtgtgagtgagcacgatttcgcctatcaagaccctaaggttcacagcatcttccctgctagaggcccacgggctggtggaacccgtctgacactcaatggatccaaactgcttactggtagacttgaggatattcgtgttgttgtgggcgatcagccctgccatctactgccagagcaacagtccgagcagcttcgttgtgagaccagcccacggcctacccccgcaacactcccagtggctgtgtggtttggagccaccgagcgccgtctgcagagggggcagttcaagtataccctggatccaaatattaccagcgcaggacctaccaagtcttttctgagcgggggacgcgaaatatgtgtccggggacaaaatctggatgtggtgcagacgcctaggatccgagttacagtggtgagcagaatgctgcaaccctctcagggcttgggcaggcggcgtcgggtggttccagaaactgcctgcagcttgggaccctcttgcagcagccaacagttcgaggaaccctgtcatgtgaactcttcgcaacttattacctgcaggactcccgcactcccagggctgcccgaggacccctgggttcgggtggagttcattctggacaacctagtattcgattttgcaacgttaaaccccacacctttcagttacgaagctgatcccacactccagcctttgaatcctgaagacccaacaatgcccttccggcacaagccagggagcgtgttttctgtggagggggagaacctcgacctggccatgagcaaagaagaggtcgtggccatgattggtgatggcccatgtgttgtgaaaactctcacacgccatcatttatattgtgagccacccgtcgagcagccacttccacgccaccatgctctgagagaagcacccgatagtctccccgagttcaccgtacaaatgggaaaccttaggttttcacttgggcacgttcagtatgacggggagagtcctggggctttcccagtggctgcccaggtgggactgggggtggggacaagcctcctggccttaggagttatcatcatcgttctgatgtaccgtaggaagtcgaagcaggctctgagagattacaaaaaggtgcagatccagctggaaaacctggagagctccgtacgtgaccggtgtaaaaaggagttcacagatctaatgacggagatgacagacctaacttcagaccttctcgggagtggcatcccctttcttgactacaaggtgtatgctgaacgtattttttttccaggtcaccgcgaaagtcccctgcaccgggacctgggcgtgcctgagtcacgccgtccgactgtggaacagggtctgggccagttgtccaatctcctgaacagtaaacttttcctgacaaagttcatccacaccctggaatcacagcgaacgttttcagctcgtgaccgagcatatgtagcgtctctgcttacagtggctctgcatggaaagttagagtattttactgatatcctcagaacacttctgagtgatctggtggcgcagtacgtggctaaaaaccccaagcttatgttacggagaacagagacagtcgtggagaagttgctcactaactggatgtctatttgtctgtacactttcgttcgggactctgttggcgaaccgctgtatatgctttttcggggtatcaaacatcaagtcgacaagggcccagttgattcagttaccggcaaagccaagtatacgctgaatgacaacagactgttgagagaggatgtcgaatacagacctctgactctgaacgcattgttggccgtgggcccaggcgctggcgaggcccagggcgttccagtgaaggtgctggactgtgataccatttctcaggcaaaagagaagatgctggatcagctgtacaaaggcgtgcctctcacgcagcgaccagatcccaggaccttggatgtggagtggcggtcaggagtggccggacatctgatcctatcggacgaggatgtaaccagcgaggtgcaggggctatggcggagattaaatactctacagcactacaaagtgcccgacggagccacggtggcactcgtcccatgcctaaccaaacacgtgctcagagaaaaccaagattatgtacctggagagcggacacccatgctggaagatgttgatgagggtggcattagaccctggcatcttgtcaaaccctccgacgaacccgagccaccccgtcccaggaggggcagccttagaggaggcgaaagagaaagagcgaaagcaataccagagatttatctgactcgattgctctctatgaagggcactctgcagaagttcgtggacgatctgttccaagtcatactatctactagtagacctgtgccactggcagttaagtacttttttgatctgcttgacgaacaagcccaacagcatggaatctccgatcaggacacaattcatatctggaaaaccaattctttacccctaaggttctggatcaatataatcaaaaatcctcaattcgtgttcgatgtccaaaccagtgacaatatggacgcagtcctgctggttatcgcccagacctttatggatgcctgtaccctggccgaccacaagctagggcgagatagtcccatcaacaagctgctgtatgctagggacattccaagatacaaacgaatggtggaacggtactatgccgacataagacagaccgtacctgctagcgaccaagaaatgaactcagttcttgccgagttatcatggaactattccggggacctcggagcacgggtggcattgcacgagctgtacaaatatattaataaatactacgaccagattatcacagcactcgaagaagatggtacggcgcagaaaatgcagctgggctatcgcctgcagcagattgcagccgcagtggaaaacaaggtgaccgacctttag

SEQ ID NO: 10371 - DNA, 297 bp, synthetic construct
  misc_feature 1..297: note = source = /note="Description of Artificial Sequence: Synthetic coding sequence"
  source 1..297: mol_type = other DNA
atgaagctgatggtgctcgtgtttaccattggcctcaccctgcttttaggggttcaggcgatgccggctaacaggctgagctgttaccgcaaaattctcaaagaccacaattgtcacaacttacccgaaggcgtcgcagacctcactcagatagatgtgaacgttcaggaccatttctgggacggcaagggctgtgaaatgatctgctactgcaacttctccgaattgctgtgttgtccaaaggacgttttctttggccctaaaataagttttgtcattccctgcaacaaccagtag

SEQ ID NO: 10372 - DNA, 1443 bp, synthetic construct
  misc_feature 1..1443: note = source = /note="Description of Artificial Sequence: Synthetic coding sequence"
  source 1..1443: mol_type = other DNA
atgaaaagaagtgtagctgtgtggctgctggtaggcctgtctctgggtgttccccagttcggcaaaggcgacatctgtgaccctaacccatgtgaaaatggtggaatctgcctgcccggactagccgacggctcatttagctgtgagtgccccgacggctttactgacccaaattgctcatcagtggtcgaagtggcctctgacgaggaggaacccactagcgctgggccttgtactcctaatccttgccataacggtggtacctgcgagatcagcgaagcgtacaggggggacacttttattggatacgtctgtaaatgtcctagagggttcaatggcatccactgccagcacaatatcaacgagtgtgaggtggagccctgtaagaatggcggaatctgcactgacctggttgctaattacagctgcgaatgccccggtgagtttatgggaaggaactgccaatacaagtgcagcggtcccctgggcatagaaggaggcatcatctccaatcagcagattaccgcctctagcacacaccgcgctctttttgggcttcaaaaatggtacccatattacgccaggctcaataaaaaagggctgattaatgcatggaccgcagctgaaaatgaccggtggccgtggatacagataaacctgcagcgtaagatgagggtgactggagtcatcactcagggcgctaagcgcatcgggtcacccgagtacatcaaatcctataaaatcgcctactccaacgatggcaaaacctgggccatgtacaaagtgaagggcaccaacgaagacatggtgttccgcggaaatattgacaacaataccccatacgctaacagtttcacaccccctatcaaggcacaatatgtgcggctgtatccacaggtgtgcaggagacactgcaccctaagaatggagctgctgggctgcgagctttcggggtgctccgagccattgggcatgaaatcagggcatatccaagactatcagatcaccgcttccagtatctttagaaccctgaacatggacatgttcacctgggaacccaggaaggccaggctggacaaacaaggaaaggtcaatgcctggacgagcggtcacaacgatcagagccaatggttacaggttgatctgctggtgcctactaaagtgactggcatcatcactcagggtgccaaggacttcggacacgttcaattcgtcgggtcttataagttggcttactccaacgatggggaacactggactgtgtaccaagacgaaaagcaaagaaaggataaggtgtttcaagggaacttcgacaatgatacacacagaaagaacgtaattgaccctcctatctacgccaggcacatcagaatactaccttggtcttggtatggacgaatcacactcaggtctgagctcctcgggtgcacagaagaggaatag

SEQ ID NO: 10373 - DNA, 1323 bp, synthetic construct
  misc_feature 1..1323: note = source = /note="Description of Artificial Sequence: Synthetic coding sequence"
  source 1..1323: mol_type = other DNA
atggccgtgaagctggggactctgttgctggccctcgcacttggcctggcccaacctgccagcgcgcgtagaaagttgctggtatttctcctggatgggtttcgcagcgattacatatctgacgaggcactggaatcactgccgggtttcaaggagatcgtcagccgaggcgtgaaggtggattatctcactcctgacttcccctccctctcctatcctaattactacacactgatgacaggccgtcactgcgaggtgcatcagatgatcggaaactacatgtgggatcccaccactaacaaatcgttcgatataggtgttaacaaggacagcctcatgccactctggtggaacggcagcgagccattgtgggttaccctgaccaaagccaagaggaaagtgtatatgtactactggcctggttgtgaggtcgagatcctaggggtgcgccctacctactgtctggaatataagaacgttccaaccgatatcaatttcgccaacgctgtgagcgatgcccttgacagcttcaagagtggaagagccgaccttgccgctatttatcatgagcgcatagatgtggaaggacaccactacgggcctgctagcccccagcgaaaggatgctctgaaagcagtggatactgtcctcaagtacatgactaaatggatccaggaaaggggattgcaggaccggctgaatgtgattatcttctcggatcacggtatgaccgatatcttttggatggataaagtaattgaactcaataagtacatctctctcaatgatcttcagcaggtgaaggaccggggacccgtggtgagtttgtggccggcacctggaaaacatagcgagatctacaataagttatctacagtagagcatatgaccgtctatgagaaggaggctattccgtccagattttattacaagaagggcaaatttgtgtccccgctgactctcgtggccgacgaaggctggttcattactgagaatagggaaatgctgccattttggatgaacagcaccggcagaagagaggggtggcagcgtggatggcatggttacgacaatgagctgatggatatgagagggatcttcctggcgtttgggcctgatttcaagagcaattttcgcgcagcgcctatccgctctgtcgatgtgtacaatgttatgtgcaatgtagtcgggattactcccctcccaaataacggctcttggtccagggtgatgtgcatgcttaagggcagggcgtccaccgcaccgccagtgtggccctcacactgcgcactagcccttatactgctgttcctgttggcttag

SEQ ID NO: 10374 - DNA, 351 bp, synthetic construct
  misc_feature 1..351: note = source = /note="Description of Artificial Sequence: Synthetic coding sequence"
  source 1..351: mol_type = other DNA
atggagagcagccgggtgaggctgttgccattgctcggggcagctttactccttatgctgccgctgctgggcactcgggctcaggaagacgctgaattgcagcctcgcgcactggatatctactcggctgtggatgatgcttcgcacgaaaaagagctcatcgaggcgcttcaggaggtgctcaagaagctaaagagtaagagagtgcctatctacgaaaagaagtatggacaggtgccgatgtgcgatgccggtgaacagtgtgcagtgagaaaaggtgccagaatcgggaagttatgtgattgcccgagaggcactagctgcaacagtttcttacttaaatgcctttag

SEQ ID NO: 10375 - DNA, 1365 bp, synthetic construct
  misc_feature 1..1365: note = source = /note="Description of Artificial Sequence: Synthetic coding sequence"
  source 1..1365: mol_type = other DNA
atggccagacccaacaaatttctactatggttttgttgtttcgcctggctgtgtttccctatcagccttggatcccaagcctctggaggagaggcccagatcgccgctagtgccgaattagagtcaggtgcaatgccgtggtcattactgcaacacattgatgagcgagatagggccggactcttgccagctctgttcaaggtgctgtccgttggcagaggaggtagtcccaggcttcaaccggactccagggccctccactacatgaaaaaactgtataagacctacgccaccaaagaagggatcccaaagagtaatagatcgcacctgtacaataccgttcgactctttactccatgtacccggcataaacaagcccctggcgaccaggtcaccggcattttgccctctgtcgaactgctgtttaatttggatcgcattacaactgtcgaacacctgcttaaatccgtcctcctgtacaacatcaacaactctgtcagtttctccagcgccgtgaaatgcgtatgtaatctgatgatcaaagaaccaaaatcatcatctcgcaccctggggcgtgctccttattcattcacattcaacagccagttcgagttcggtaagaagcataagtggatccagatcgacgttaccagcctcctgcagcctctggtagcctccaataaaagatccattcacatgagcataaacttcacctgcatgaaagaccaactggagcatccatccgcccaaaacggcttatttaatatgacgctggtatctccaagcctgatactgtacctgaatgacacctccgcccaggcttatcattcttggtattccctgcactacaagaggagaccttcccaggggccagaccaagaacgcagtttaagtgcatatccagtcggggaggaagcagccgaagatgggagaagctcgcaccaccgccatcggaggggccaggaaaccgtcagctctgagttgaagaagcccctaggcccagctagcttcaatctaagtgagtatttcagacaatttctactgcctcagaatgaatgcgagctgcatgatttcagactcagctttagccagctgaagtgggacaattggattgtcgcaccccatcgatataatcctcggtattgcaagggggactgccctagagcggtgggccacagatatggctctcccgtgcataccatggtacaaaacatcatctacgagaaactggattccagcgttccccgaccatcctgcgtgccagccaaatattctcctctttctgtgttgaccatagaacccgatggtagtatagcctacaaggaatacgaagatatgatagctactaagtgcacttgcagatag

SEQ ID NO: 10376 - DNA, 234 bp, synthetic construct
  misc_feature 1..234: note = source = /note="Description of Artificial Sequence: Synthetic coding sequence"
  source 1..234: mol_type = other DNA
atgtggcacttaaagctttgcgctgttctgatgatttttctcctgttgctgggccaaattgatggctctccaatacccgaggtatcatccgctaagcgacgaccccgtaggatgacccctttttggcgtggagtaagcttgcggcctattggtgccagttgccgcgacgattcggagtgtatcacccgtctctgtagaaaaaggcgctgctccctgagtgtggcccaggaatag

SEQ ID NO: 10377 - DNA, 912 bp, synthetic construct
  misc_feature 1..912: note = source = /note="Description of Artificial Sequence: Synthetic coding sequence"
  source 1..912: mol_type = other DNA
atgtctgagccccaaccggatctggagcccccacagcatgggctatacatgttgtttctgttggtcctagtattcttccttatggggttggttggctttatgatctgccacgtgttaaaaaagaaaggctataggtgcagaaccagcagaggctccgagccagacgacgcacaacttcagcccccagaggacgatgatatgaatgaagatacagtagagcgaatagtccgatgcatcatccagaatgaggccaacgctgaggctctcaaagaaatgcttggggactcagaaggagaaggtacagtccagctaagctcagtcgacgccacctcctcgttgcaggatggggcaccatcgcaccatcacaccgtgcatttagggagtgccgctccctgccttcactgctcgcgaagtaagcggcctccgctggtgagacaggggaggagtaaagaggggaagtccaggcctcgtacgggggagactacggtgttctctgtggggaggttcagggttactcacatcgaaaaaaggtacggactgcacgagcatcgggacggttcaccgaccgatcggagctgggggagtgggggtggccaagacccaggtggtggccaaggaagcgggggaggacaacccaaagcaggtatgccagccatggaacggttgcccccagaaagaccccagccacaagttttggcttcaccccctgtccagaacggaggcctgcgggactcaagcctgacccctcgggctcttgagggcaaccctcgtgcatccgcagagcccacactgagagctggcggtaggggaccaagcccaggactcccaacccaagaagcaaatggacagccttctaaaccagatacatcagaccaccaggtgagcttaccccagggcgcaggttctatgtag

SEQ ID NO: 10378 - DNA, 795 bp, synthetic construct
  misc_feature 1..795: note = source = /note="Description of Artificial Sequence: Synthetic coding sequence"
  source 1..795: mol_type = other DNA
atgagaaccctttggatggccctgtgtgcgctgtcacggctgtggcctggcgcacaggccggatgcgcggaggccggaaggtgctgccctggcagggacccagcttgtttcgccagaggctggcgtctggaccgcgtctacggtacctgcttttgtgatcaggcctgccgattcaccggcgattgctgctttgactatgatagggcttgcccggcacgaccatgctttgttggagagtggtctccatggtctgggtgtgccgaccagtgcaagcctacaacacgcgtaagacgtcgcagcgtacagcaggaaccccaaaacggtggtgcaccctgccctcctcttgaggagagggcgggatgcctggagtatagcacaccccaggggcaggactgtgggcacacatacgtgcctgcattcataaccactagcgcctttaacaaggagaggacccgtcaggcaacctccccccactggtcaacccacactgaggatgctggatattgcatggagttcaaaacagaatcgctcacccctcactgcgcactagagaactggcccctaacgagatggatgcagtacctccgcgaggggtatacggtttgcgtcgactgtcagccaccagccatgaattcggtcagcctgcgctgctccggggacggtctagattccgatggaaatcagaccctacactggcaagccatcggcaatcctcgctgtcagggtacctggaaaaaagtccgtagggttgatcaatgcagctgtcctgccgtccactcattcatcttcatatag

SEQ ID NO: 10379 - DNA, 312 bp, synthetic construct
  misc_feature 1..312: note = source = /note="Description of Artificial Sequence: Synthetic coding sequence"
  source 1..312: mol_type = other DNA
atgcgacagcgcctactgccgtccgtgactagcctgctcctagtggccctgctatttcccggatcctctcaagctcgccacgtgaaccactccgcaacagaagctttgggcgaattgcgcgagagggcccctggtcagggtaccaatggcttccaactgctccggcatgctgtgaagagagacctcctgccacctcgcacccccccttaccaggtgcatatttctcaccgcgaggctcggggaccttcttttagaatctgcgtagacttcctgggacctaggtgggcccgaggctgcagcacgggaaattag

SEQ ID NO: 10380 - DNA, 3867 bp, synthetic construct
  misc_feature 1..3867: note = source = /note="Description of Artificial Sequence: Synthetic coding sequence"
  source 1..3867: mol_type = other DNA
atggcctctgtggcatgggcggtgttgaaagttctgctgcttctccccacccagacctggagccctgtaggcgcaggcaacccacctgactgcgatgctccactcgcctccgctttgcctagatccagcttcagttcttcctccgagctatctagctcccacgggcctggcttctcgagattaaaccgcagagatggtgcaggtggttggacgcccttagtctccaataaatatcagtggctccagatagacctgggggaacgaatggaagtcactgcagtggctacgcagggagggtatggatctagcgactgggtcacttcttatctgttgatgtttagcgacggtgggcgaaattggaaacagtacaggcgcgaagaatcaatctgggggtttcctggaaacaccaacgccgattcagtggttcactacaggctacagcctcctttcgaggcccgattcctgcgtttcctgccccttgcctggaatcccagaggtcgaatcggaatgagaatcgaagtttacggatgcgcttataagtctgaggtcgtctatttcgatggtcagtcagcactgctgtaccgcctcgataaaaagcccctgaagccgatccgggatgtcattagcctcaagttcaaggccatgcaaagtaacggaatcctgctgcatagagaaggccagcacgggaaccacattacgctggagctgataaagggcaaactggtgttcttcctcaactctggaaacgccaaattgccttccacgatcgctcccgtgacactgacccttgggagcctgctagacgatcaacattggcacagcgtgctgattgaactgctcgatacacaggtgaactttacagtcgacaagcatacacaccacttccaagccaagggagattctagctatcttgatctgaatttcgagatcagtttcgggggaattccaactcccggaaggtctcgtgcttttaggagaaaaagtttccacggttgtctagaaaatttatactataacggggtggacgtgacggagcttgcgaagaagcacaagccccagatcctgatgatggggaatgtgtccttctcctgtcctcagccacagacagtgccagtgactttcctgagctctcggtcctatctggccctgcccggtaattccggtgaagataaggtatcagtaacctttcagttcagaacatggaatcgcgcagggcatctgctctttggtgagctcagacggggtagtgggagcttcgtcctatttctaaaggatggcaagctgaagcttagcctattccagccgggacaaagccctaggaacgtcaccgccggagcgggacttaacgacggacagtggcatagcgtgtcattctccgctaaatggtctcatatgaacgtggtcgtggatgatgataccgccgtacagcccctggtggccgtgctgatcgactcgggcgacacatactattttgggggatgcttggacaacagctctggaagcgggtgcaaatccccactaggaggatttcaggggtgcttgcgtcttatcacgattggcgataaggctgtagatccgattctagttcagcagggggcactgggctcattcagagacctccagatagattcttgtggcataacagacagatgccttccatcatactgcgagcatggaggcgagtgttctcagagctgggacaccttcagctgcgattgccttgggaccgggtacacgggcgaaacctgccactcttctctgtacgaacagtcctgcgaagcacacaagcaccgtggcaacccttccggtctctattatatcgacgcagacggttccggaccacttgggccattcctggtgtattgtaacatgactgctgatgccgcatggacagtggtgcagcacggagggcctgatgcagtgactctgcggggtgccccttctgggcaccccagaagcgctgtgagctttgcctatgcagcgggtgcaggccagctccggtcagcagtcaacctagcagagagatgcgagcagcggctggcgctgagatgtggaaccgctcgccgacctgacagccgtgatggtactcccctctcttggtgggtggggcgaacaaatgagactcacacgagctggggtgggtctttacccgatgctcagaaatgcacatgtgggctcgagggcaattgtatcgactcccagtactattgcaactgcgatgccggacggaatgaatggacgtctgacactatcgtgttaagccagaaagaacacttacccgtgactcagatcgttatgacagatgcgggacgcccacactccgaagctgcttacacccttgggcctcttctctgtagaggagatcagagtttttggaactcagcctcgtttaatacggaaacaagctatctccactttccggctttccacggagaattaaccgcggatgtgtgcttttttttcaaaacaacagtgtcttccggcgttttcatggaaaacctcggcattaccgatttcattaggattgagctacgggctcccaccgaggtcacgttttccttcgacgtgggcaatggtccctgtgaagttaccgtgcaatctccaactccatttaatgataatcaatggcaccacgtccgcgctgaacgaaacgtgaagggcgcatctctgcaggttgatcagctgccccagaagatgcagcctgcccctgcggacggacacgttcgccttcagctgaactcccaattattcatcggaggaaccgccaccagacagcggggattcctgggttgcattcggtcactgcaattgaacggtgtggctcttgacctcgaagaaagagcgaccgtgaccccaggagtggaaccgggatgtgctgggcactgctccacttatggccatttatgccggaacggaggtagatgcagagaaaagcgcagaggcgtcacctgtgactgtgcattttcggcctacgacgggccattctgctccaacgagatttcagcctactttgccaccggttcttccatgacttaccatttccaggaacactatacactttccgaaaactcctccagcctggtcagttcccttcaccgcgatgtcacactcactagggagatgatcaccctgtccttcaggaccactcgcacaccaagtctcctgctgtatgtgagcagtttctacgaagaatatctgtctgtgatcctggccaataacgggagcctgcagatccgctataagctggacagacaccagaacccagacgcattcaccttcgattttaaaaatatggccgatggacaactgcaccaagtgaaaattaatagggaagaggctgtcgttatggtagaggtgaatcagtcaactaaaaaacaggtaatcttgtcctcggggacagaattcaacgcagttaagagcctgatcttaggcaaggtgcttgaggccgcaggcgctgacccagatacgcggcgagctgctacatccggatttacgggttgtctgagcgcggtaagattcggtagagcagccccattgaaggccgcattgcgccctagtgggccttctcgcgtcaccgttagagggcacgtggcccctatggcgcgatgcgcggcaggtgctgccagcggatcaccagctcgagagctggcgccacggctcgccggtggtgcaggaagaagcggacccgcagatgagggagaacccctcgttaacgccgataggcgagactccgcggtaatcgggggtgtcatcgcagtggtcatctttattctgttgtgtatcaccgcaatcgccatccggatttaccagcagcgcaagcttaggaaagagaacgaaagtaaggtttccaagaaggaagaatgttag

SEQ ID NO: 10381 - DNA, 369 bp, synthetic construct
  misc_feature 1..369: note = source = /note="Description of Artificial Sequence: Synthetic coding sequence"
  source 1..369: mol_type = other DNA
atggtacctggtccaccggaaagcgtggttcgattctttctgtggttctgtttcctactcccacctactagaaaggcatcctgtgaccccagagacctgaaaagctgcaaccggccatgtgtgtggagcaggcttttgaaaccaaattcatcccttagcaatctggagaccgcttatttccctcagatcctgcggtttctgcgcccttggtatttttcacggagccacctgaattaccaccagaaggcccctgccaggtgggaatggctgtattccatctacagaaagggcaccaaggcgcaaagaagaaatgtcctacggtccccatgcgccccaccgcagccgagttggccgtgctcggtcatctag

SEQ ID NO: 10382 - DNA, 1887 bp, synthetic construct
  misc_feature 1..1887: note = source = /note="Description of Artificial Sequence: Synthetic coding sequence"
  source 1..1887: mol_type = other DNA
atggctccgagcgctgatcccggtatgagcaggatgttacccttccttctactgctgtggttcctgcccatcacagagggttcacagcgcgctgaacctatgttcaccgctgtcactaacagcgtgctacctcccgattacgatagcaaccccactcagctgaattatggagtcgctgtcacagatgttgatcatgacggcgactttgagattgttgtggctggctacaatggcccaaacctggtgcttaagtatgatcgtgcccagaaaagattggtgaatattgccgtggacgagaggtcgtccccttattacgctctgagggaccgacaaggtaatgctatcggggtcaccgcatgcgatatcgacggagatggtcgagaggaaatctattttttgaataccaacaacgccttcagtggtgtcgccacgtacacggacaaactgttcaaatttagaaacaataggtgggaggacatcctatccgatgaggtcaacgtggcccgaggtgtggcaagtctattcgctgggagatctgtggcatgcgtggatcgtaaaggaagtgggagatattcgatctatattgctaactatgcctatggcaacgtgggacccgatgccctgatcgaaatggaccccgaggcatcagatctctcccggggtatcctggctctccgcgacgtggcagccgaggccggagtcagcaaatacacaggtggccgaggcgtttcggtcggtccgatccttagctcctccgcatcggacatcttctgcgataacgagaacggccctaatttcttgtttcacaaccgtggtgacggaacctttgtggacgcagccgctagtgctggggttgatgacccacatcagcatggtcggggagttgctttggccgattttaaccgcgatgggaaggtggatatcgtctacggcaactggaacgggccacacagactttacctgcaaatgagtactcacggcaaagtgcgtttccgggatatagcatcacctaaattttcaatgccttctccagtcagaacagttatcacggctgactttgacaatgaccaagagctggagatcttcttcaacaatatcgcgtacagaagttcatccgccaaccgactttttcgggttattaggagagagcatggcgatccgctgatagaggagctcaaccctggtgacgcactggaacctgagggcagagggacgggcggtgtggtgaccgatttcgacggcgacgggatgctggatctgattttgagccacggagaatccatggctcaaccactttctgtgtttcggggtaatcagggtttcaacaacaactggctcagggttgtccctagaactaggtttggcgcttttgccagaggagctaaggtcgtactgtacaccaaaaagtcaggcgcacacctacgtattatcgacggtggtagtggctacctatgcgaaatggagcccgtggctcattttggcctaggtaaggacgaagcaagctccgtagaggtcacctggcctgatggcaagatggtttcgcgcaatgtcgcgtctggggagatgaactctgtgctcgagattctctacccaagggatgaggacacactgcaagatccagcccctctggagacacctatgaacgccagctcaagccactcatgcgcactggaaacgagcccgtacgttagcacacctatggaagccacaggcgcaggacccaccagatcagcggtgggcgctaccagtcctacgcgaatggcccagccggcatggggactgtcagcctctcatcgcgctccagcccctcctcctccacccctgttgctcccgcttcccctattactgccactcttggagcttcctctcttacatagatcttcgtag

SEQ ID NO: 10383 - DNA, 1008 bp, synthetic construct
  misc_feature 1..1008: note = source = /note="Description of Artificial Sequence: Synthetic coding sequence"
  source 1..1008: mol_type = other DNA
atgcagggacaggggaggcgcaggggaacatgtaaagacattttctgtagcaaaatggcgtcctatctgtatggtgttctgttcgccgttggcctgtgcgcccctatttactgcgtcagcccagccaatgcaccctctgcctatccccgtccatctagcaccaaaagtacacccgcatctcaggtctacagccttaatacagattttgcattccggctgtaccgccgtttggtgctagaaaccccctcacagaacatcttcttcagccccgctcgcataaactctcatgtgaagaagaaaacgcagggaaaggttgtggatattattcaaggccttgatctgctgaccgcgatggtgttggtcaatcatatcttcttcaaagccaagtgggaaaagccgtttcatccagaatatacacgtaagaactttccttttttagtaggcgaacaggtgaccgtgcacgtgcctatgatgcatcagaaggagcagttcgctttcggtgtagatactgaactcaactgctttgtcttgcagatggattataaaggtgacgccgtcgccttcttcgtcctcccgagcaagggcaagatgcgccagctggaacaagctctttcggctcgcacattgaggaaatggtctcactcccttcagaagcggtggatcgaagttttcatacccaggttctccattagtgcatcttacaacctagaaacaatcctgccaaagatgggcatccagaacgttttcgacaagaatgctgatttttccggaatagctaagagggattcactacaggtgtctaaagcaacccacaaagccgtactggatgtgagcgaggaaggtacagaagccacagcggcaacaacaaccaagttcatcgtgaggtccaaggacggaccctcctattttacagtgtctttcaatagaactttcctgatgatgattacaaataaagctaccgatggcattttattcctcggcaaggtagagaatcccaccaaaagctag

SEQ ID NO: 10384 - DNA, 768 bp, synthetic construct
  misc_feature 1..768: note = source = /note="Description of Artificial Sequence: Synthetic coding sequence"
  source 1..768: mol_type = other DNA
atggtgcttttgctcgtgatcttgattccagtcttggtgagcagcgcgggtacttctgcacattatgagatgctcggcacctgtcggatggtttgcgacccttacggaggaaccaaggcgccaagtaccgccgctacaccggacagaggtctgatgcagagcctgcctacatttatacagggccctaagggcgaagccggtcgcccagggaaagccggtcctcgcggtcctcctggagaacctggccctccagggcctatggggccacccggtgaaaagggtgaacctggcaggcagggcctccctggaccaccaggggcacccggactgaacgccgctggggcaatatctgcagccacgtattcaacagtgccaaaaattgccttttatgccggtctgaagaggcaacatgagggttatgaggtcctgaagttcgacgacgtagtaaccaacctggggaatcactacgacccaactactggtaaattcacgtgttcgatccctgggatctatttctttacctaccacgtgctgatgcggggtggtgatggtacaagcatgtgggcagacctgtgcaaaaacaaccaggtgcgtgccagtgccattgcccaggacgcggaccagaactacgattatgcgtccaacagcgtggtgcttcatcttgagccaggggacgaagtgtacatcaagcttgacggagggaaagctcacgggggaaacaacaataagtactcaaccttctcaggtttcataatatacgcagattag

SEQ ID NO: 10385 - DNA, 1617 bp, synthetic construct
  misc_feature 1..1617: note = source = /note="Description of Artificial Sequence: Synthetic coding sequence"
  source 1..1617: mol_type = other DNA
atgtcattttctgctacaattctcttctcccctccctcggggagtgaagcacgctgttgttgctgtgcctgcaagtccgagacaaatggaggcaacacaggatctcagggcggaaatccccctccctccacacctataacagtcacgggccacggcctggcagttcagtccagcgagcagcttctgcacgtcatctaccagagagtcgacaaggctgttgggttagcggaggccgctctgggtctcgcaagagccaacaacgaattgctgaagaggctacaggaagaggtcggggatctgcgccagggtaaggtgagcatccccgacgaggatggtgagagcagggcccattctagtcctcctgaagaacctggccctcttaaggagagccccggagaggccttcaaagcgctcagcgctgttgaagaggagtgtgactctgtcggttctggagtccaggtcgtcatcgaggaattaaggcagctcggagcagcttcagtcgggcctggtcctctgggtttcccggctacacaacgggacatgaggctaccagggtgtacactcgcagccagtgaagcggcacctctgctcaaccccttagtggacgactatgtggcttctgaaggagctgtacagagggtcctcgtcccggcatacgcaaagcaacttagtcccgcaacgcaactggctattcagagagcaaccccagagaccggacccgagaatggcactaagcttccccctcctcgcccagaagatatgttgaatgccgctgcggctctagactccgctctcgaagaatccggcccaggctctacaggggaactgaggcatagccttggcctaaccgtttcaccttgtcgaacacggggatcaggacagaaaaatagtaggagaaagcgggatctggtactatcgaagctggtccataatgtccataaccacattaccaacgacaagcgatttaacgggtcagagtctatcaagtccagttggaacatctctgtagtcaagtttcttctagagaaactcaagcaggaacttgtgacatcaccccataattacacagataaggaattaaaaggagcctgtgtggcctattttctgacaaagcggagggagtatagaaactccctgaacccattcaaaggcctgaaggagaaggaggagaagaagctccgcagcaggcggtatagactgttcgctaatcgttcttcgattatgcgacatttcggacctgaagaccaacggctctggaacgacgtgactgaagagctcatgtctgatgaggaggattccctcaatgagcccggtgtctgggttgcgagaccacccaggtttcgggcacagcgacttactgagctctgttaccaccttgacgccaactccaaacacggcacaaaagcaaatcgggtctacggtcctcctagcgaccgtctcccctcggctgaagcacagctgctcccaccagaactctacaatccaaactttcaagaggaagaggatgagggcggagatgagaatgccccaggctcccctagctttgatcaacctcataagacttgttgccccgacctcaacagctttattgaaattaaggttgagaaagacgagtag

SEQ ID NO: 10386 - DNA, 2853 bp, synthetic construct
  misc_feature 1..2853: note = source = /note="Description of Artificial Sequence: Synthetic coding sequence"
  source 1..2853: mol_type = other DNA
atgcttctgctgggtatcctgacccttgcttttgctggcagaaccgcgggaggttccgaacccgagagggaggtcgtcgtgccaatccgcctggatccagacataaacgggcgacgctattactggagaggccctgaggacagtggcgatcaggggctgatctttcagatcactgcatttcaggaggatttttaccttcatcttacccccgatgcccagttcctggctcctgcattctcaacagaacacttgggagtccccctccaggggctgactggaggttcaagcgacctgcggcgatgcttctattcaggggatgtgaacgctgagcccgactcatttgctgctgtttccctgtgcggaggcctacgtggagctttcgggtaccggggagccgaatacgtcatcagtcccctccccaacgcttcagctcccgcagctcagcggaacagccagggcgcacacctgctgcagaggcgtggcgtccctggagggccttcgggcgaccctacgtctagatgtggggtagcaagcggctggaatcccgctattctacgcgcattagacccttacaaacctagacgagctggcttcggggagtcgcgctcaaggcggagatccgggagggccaagaggttcgtgtccattccaaggtacgtcgagacgctagtggtggccgatgagagcatggttaagtttcacggcgctgacctggagcactatctgctgaccctgctggctacagccgcacgactctaccgccacccctctatccttaatcccataaacattgtcgtggtgaaggtgctgcttttgcgagacagagactcgggacctaaggtgaccggaaatgccgctttaaccctgcggaacttttgcgcatggcagaagaagctgaacaaggtttccgataagcacccagagtactgggatacggcaatactgtttacgcgccaagacctgtgcggagccaccacctgcgatacactgggcatggctgatgtcgggaccatgtgcgatccaaagcgcagctgttccgtgatagaggacgacggactcccaagtgcatttactaccgcccacgagctcggacatgtatttaacatgcctcacgacaatgtgaaagtctgcgaagaggtcttcggaaagcttagggcgaaccacatgatgtctccaacgctgattcaaattgatagggccaacccatggagtgcatgtagcgcagcaattatcactgactttctcgatagcggacacggggattgcctgctagatcaaccatctaagcctatttctctgccagaagatctgccgggtgcctcgtataccttgtctcaacaatgtgagctcgcttttggcgtgggcagcaaaccttgtccgtatatgcaatactgtacgaagctttggtgtacagggaaagccaaagggcagatggtctgccagacacggcatttcccctgggcagatggtacatcatgcggagagggcaagctttgtcttaagggcgcttgcgttgagagacataatctgaacaagcatagggtggatggatcctgggccaaatgggacccctacggcccatgttcacgtacctgcggcggtggagtgcagctggcccgacggcagtgtacgaatccgaccccagccaacggtggtaaatattgcgagggagtccgcgtgaagtatcgtagctgtaatttggaaccttgcccctcttcagcctcaggaaaaagctttcgtgaggagcaatgtgaggccttcaacggatacaatcacagtaccaatcgcctcaccctggcagtggcctgggtgcccaagtactcgggagtttcgccacgggacaagtgcaaattgatctgtagagccaacgggacgggttatttctacgtgttggccccaaaggtagttgacgggacactatgttctcctgacagcacttctgtctgcgtgcaaggaaagtgcataaaagcaggatgtgacgggaacttaggcagtaagaagagattcgacaagtgtggggtctgtggaggcgacaataaatcttgtaagaaagtaaccggcctgtttactaaacctatgcacgggtacaatttcgtagtggccattcctgccggagccagttctattgacatccggcagcgcggatataaggggttaattggagacgacaattacctggccttgaagaatagtcagggcaaatacctactgaatggccattttgtggtttctgctgtcgagcgcgatctcgttgtcaagggttccttactgcgttatagcggtacaggcaccgctgtcgagtctctccaagctagcagaccgattttagaaccactgacagtcgaagtcctgtccgttggaaagatgacacctcccagggtgcggtacagcttttatcttccaaaagaaccacgcgaagataagtccagtcacccgaaagatcctagaggaccctctgttttgcataattctgtgttgagtctttccaaccaagtggagcagcctgatgacagacctcctgccagatgggtggcagggtcgtggggcccatgctcagcttcctgcggatcaggcctgcagaaacgggcagtggactgcaggggatccgcaggtcagcgtacagtccctgcttgcgatgcggctcatagaccagtagagacccaggcttgcggcgaaccttgcccaacctgggaactcagcgcctggtccccgtgttcaaaaagctgcgggagaggctttcagcggagatctttaaagtgtgttgggcacggcggtcggctgctggcaagggatcagtgtaacctgcaccgcaaaccccaggagcttgatttctgcgtgctcaggccttgctag

SEQ ID NO: 10387 - DNA, 1521 bp, synthetic construct
  misc_feature 1..1521: note = source = /note="Description of Artificial Sequence: Synthetic coding sequence"
  source 1..1521: mol_type = other DNA
atgacaagcaagccccattccgattggataccatacagtgtcctcgatgacgagggacggaacttaaggcagcagaagcttgaccggcagcgggctcttctggagcagaagcagaagaagaagcgccaggaacccctgatggtgcaggccaatgcagacggacgtcctaggagtcgaagagctcggcagtctgaggagcaggcacccctggtagagtcatacctttcttcatccggcagcacatcttatcaggtccaagaggcagactcactggcctccgtgcaactgggtgcaactaggccaactgcacccgctagcgcgaagcggacaaaggcagcagcaactgcgggtggacagggcggtgcggcaagaaaggagaaaaagggtaaacataaagggacttctggcccagccgctttagctgaggataagtctgaggcacagggtccagtacagattctgacagtgggtcaatcggatcatgcccaggatgcgggagagaccgccgcagggggtggagaacggccatctggccaagacctgagggccactatgcagcggaaaggaatctcctccagtatgtcgttcgacgaggatgaggaggacgaggaagagaatagctcatcctcttcacagttgaatagcaacaccaggccatctagcgccacgtcaagaaaatccgtacgcgaggctgcctcagcccctagtccaacagccccagaacagcccgtagacgtggaagtgcaggacctggaggagtttgcacttcgcccagccccacagggaatcaccatcaaatgccgaattacccgggataagaaaggtatggaccgtggtatgtatcccacttacttcctgcatctggatcgagaagacgggaaaaaagtgttcctgttagcgggaagaaaaagaaagaagagcaagacgtctaattacctgattagtgtcgacccgacggatctatcccgaggaggggacagttatattggcaagctgaggtccaatctgatgggtaccaagtttaccgtctatgacaacggcgtgaacccccagaaggcctcctcttccacccttgagtctgggactttgcgacaggagctcgccgctgtgtgttatgaaacaaatgtactcgggttcaaggggcctaggaagatgtctgtcattgtcccgggaatgaacatggtgcacgagcgggtgtcaatcaggcccaggaacgaacacgagacgcttcttgccaggtggcaaaataaaaacaccgaatctataatagagttgcagaacaaaactcccgtgtggaatgacgacacccaatcttacgtgctgaactttcacggcagggtgactcaggcctcagtgaaaaacttccagattatccacggcaatgatcctgactacattgtgatgcaattcggcagggtcgcggaggacgttttcactatggactataactacccactctgtgctctccaggcctttgcaattgcactttccagctttgactccaaacttgcttgcgagtag

SEQ ID NO: 10388 - DNA, 594 bp, synthetic construct
  misc_feature 1..594: note = source = /note="Description of Artificial Sequence: Synthetic coding sequence"
  source 1..594: mol_type = other DNA
atggcaaaaaatggcctagtgatatgcattctggtaataaccctgctgctggaccaaactactagtcacacgtctcggctgaaggcacggaaacattctaaacggagggtccgcgacaaggacggggacctgaagacgcagatcgaaaagctctggacagaagtcaacgcactaaaagagattcaggcgctccagaccgtttgtctcagaggcactaaagtgcacaagaaatgctatctcgcttcagaaggtctgaaacattttcacgaagctaatgaagactgcatttctaagggcggaattctggtaattcctaggaattctgacgagatcaatgccctccaagactatggaaagagatccctgcccggagtcaatgacttctggctggggattaatgacatggtaacagaggggaagtttgttgacgtgaacggcattgctatttcattcttgaattgggaccgggcacagcctaatggcggtaaacgggagaattgtgtgttgttttcccagagtgctcagggaaagtggagcgatgaggcgtgtcgaagctctaagaggtatatctgtgagttcaccattccccagtag

SEQ ID NO: 10389 - DNA, 2424 bp, synthetic construct
  misc_feature 1..2424: note = source = /note="Description of Artificial Sequence: Synthetic coding sequence"
  source 1..2424: mol_type = other DNA
aaaaagaaaaggaagatctcactgttgcctaagcctcctaaacacgacgctccactgactatcgaatttccaaacctggacaaaaccagcgccgagtggctgaaggtgaatggactcaaggctaaaaaactcagcctttatcaggtcctcgcccctaacgccttcagcccagtggaagaatttgtgcctattcttcaaaaaactgtatcttctactatccatgagaaagccatgattcagtttgagtggcatgatgggacagtgaagaatatccacgtagacccgccattcctatacaagtaccagcagcagcttagtagggccatgcggatgtacgaacgcaggattgagtggctctccctcgcaagtcgcaggatctgggggaccgtgtgtgagaagagagtggtagtgttactggatattagcgctacaaattctatgtatatcatccatatccagcacagcctccggctgcttctcgaggaacagctgtcaaataaggactgttttaacctcatcgccttcggaagtaccattgaatcatggcgacctgaaatggtgccagtctcccacaacaatctgcagtccgcctggcgctgggccctgaatctccggtgcagaggctctagaaacgtgctctctgccctgaggaaagctgttgaagtggacttcaaagataaggataaacatcagtcacaaggcatttacctgttcaccgggggaattccagatcaggacatgccaacactgtcagcctacatggccgaagcttgcggcggatgtgatctgcagctgaatgtctgtctgttctatgtcggtgagccaaaaatggatacaactcctccagccagatacgcaagccacactgatacagccgctgcctacaaggaggtcacacgagccgcaggaggccgttttcactggttcggggacacaggaatctacgagtccgacgacattaactctatcatgtccgagatggaaaaagccctgaattacagtcagaaatgtgccttcctgatggcgagcctcaaaaatcactctggtaaggtcctgggctccagtgctctgcccaaagaaaaacccaagacactgcagcttaggtctcagcctaaaaagctctgccctccgcgacccacagttcccctcggggcaaggatgtctatcaaggacgacccggatcgggaaaaatctccacccctgaagtcccttaagtggaggcccctgagctcgcgagtgggaatcagtcccgctgcggcacagccgactaaggaaggaatgatggagctccgcaggaagacaaaaagccgcgaagctgagacctccctgttgctgttctacactgagaagggcaacgatgtgggtagtgtctacaagaagtatcctcagggacggggtctcaggcgaacatcaagttctatagatctgccaagaaaggacaccgtttgcagttcacaggaatgggtagctaagtacggcttgaaaaaactgaagctggagattagtcggtgcatgggccctaattgtacacaccagaaaagtgggcagcggtctgcaagtgccaaacattgctccatttttcccagcgtggaaatccatggcgttgtccggcacatccagtggacgcctagggaaatggaagtttatatccggcacctagaaaaggtcctcagaagatacgtccagagactgcagtggcttctgagcggaagcagaaggttgtttggcaccgtactagaaagcaaagtgtgcattctgctcgatactagcggatccatgggcccttacctgcagcaggtgaaaacggaattagtacttctgatctgggaacagctgcgaaaatgctgcgattcttttaatttactgtccttcgctgagagcttccagagctggcaggatacgctggtggagacaacagatgcagcatgccacgaggcaatgcagtgggttacgcatttacaagcccagggctctacatctatcctccaagctctgctgaaggctttttcattccacgatctcgagggcctgtacctgttgacggatggcaagcctgacacctcatgctctctcgtgcttaatgaagttcagaagttgagagaaaaacgagacgtaaaagtgcacactatctccctgaactgttcagatcgcgcagccgtcgagtttctgagaaagctggcatctttcacgggtggccgttatcattgccctgtcggagaagatacactgtcgaagatccacagtctcctcactaagggttttattaacgaaaaggatcccacacttcctccttttgaaggtgatgaccttaggattctggcccaggagatcaccaaagccaggtcattcctgtggcaggcgcagtcgttcagaagtcagctgcagaagaagaacgacgctgagcctaaggtgacactcagttag

SEQ ID NO: 10390 - DNA, 639 bp, synthetic construct
  misc_feature 1..639: note = source = /note="Description of Artificial Sequence: Synthetic coding sequence"
  source 1..639: mol_type = other DNA
atggtgagccgcatggtgagcacaatgctgtctggcctcctcttttggttggccagcggttggacgcccgcatttgcatattcccccagaacccctgatcgggttagcgaggcagacatccagagactgctgcacggagttatggaacagctgggaattgcaagaccacgggtggaataccctgcgcaccaggcaatgaatctcgtagggccacagtccattgaaggcggagcccacgaggggttacagcacctcggcccatttggaaacattcctaatatagtcgccgagctgacaggcgacaatatacctaaagacttttctgaagaccaagggtaccctgatcccccaaacccatgccccgtgggtaaaaccgccgacgatgggtgcttagaaaatacaccagacacggccgaattttcccgcgagttccagctacaccagcacctgttcgatcctgaacatgactacccgggactgggaaagtggaacaagaaactactgtacgagaaaatgaaaggaggtgaacgcagaaagaggaggagtgtgaacccttacctgcaggggcaaagactggacaatgtggtggccaaaaagtctgtgccccacttcagcgatgaagataaggaccccgagtag

SEQ ID NO: 10391 - DNA, 1524 bp, synthetic construct
  misc_feature 1..1524: note = source = /note="Description of Artificial Sequence: Synthetic coding sequence"
  source 1..1524: mol_type = other DNA
atgtgcaccaagaccataccagtgctctggggatgtttcttgttgtggaatttatacgtttcctccagtcagaccatttacccagggataaaggctcgaattactcagagagcgcttgactacggcgtgcaagccggtatgaagatgatagagcagatgttaaaagagaagaagctgcccgatctatctgggtccgaatccctggagttcttgaaggtcgattacgtcaactataactttagtaatatcaagattagcgcgttctctttccctaacacctcactggccttcgtccccggagtggggataaaagccctgaccaaccacggcaccgccaatatcagtaccgactgggggtttgagtctcctctgtttcaggacacaggcggtgcggacctattcctgtcaggtgtttacttcactggtatcattatcctcacccggaacgattttggtcatcctaccctgaaactgcaggactgttacgcccagctgagccacgcccacgtttctttttctggcgaactgtcagttctttacaactccttcgcagaaccgatggagaagcctatacttaagaacctgaatgaaatgctatgccccatcatcgcatcagaggtaaaggccctcaacgccaacctgtctactcttgaagtcctcaccaagatcgataattacacactcctcgactattccttgatctccagccccgaaattaccgaaaattatctggaccttaatctgaaaggagtattctacccactggaaaacctgactgatcccccatttagccccgtgccatttgtgctgccggagaggagcaattctatgctctatattggaattgccgaatacttcttcaagtccgcaagcttcgctcacttcaccgctggggtctttaatgtgactctctccactgaggaaatctctaaccacttcgttcaaaattcgcagggtttgggcaacgtcctctcccgaattgccgagatttacatcctctcccagcccttcatggtgagaattatggccaccgaaccccctataattaatctgcagccagggaatttcaccctggatattccagccagcattatgatgctcactcaacccaagaactctacagtcgaaaccatcgtgtcgatggacttcgttgcctctacatcagttgggcttgtgattctcggccagcgtctggtttgttccctgagcttaaatcgatttcggctggccttgccagagtccaaccgtagcaatatcgaagttctgagattcgagaacatcctctcctctatactccattttggagtcctccctctggcgaatgcaaagttacagcaaggcttcccactttctaacccacacaaatttctcttcgtgaactccgatatcgaggttctggagggtttcttgctgatcagcaccgacctcaaatatgagactagttccaaacagcagccatcatttcacgtgtgggaggggctgaatctgataagtcgtcagtggagaggcaagagcgcaccgtag

SEQ ID NO: 10392 - DNA, 474 bp, synthetic construct
  misc_feature 1..474: note = source = /note="Description of Artificial Sequence: Synthetic coding sequence"
  source 1..474: mol_type = other DNA
atgcatccctggttgggcagcgcccttggcttccctaaatgtcgagggatacatctgtgcgcctgtggaaatggctggactcccggagagaccctgtcccagaacaagactgagattaccaagaacaaagtgacctgctggagaccccacgggtgcgaaccaaacacgggcctggggtatcagggttcccacaccagcaagtataccctactgccttggaacctgttaaaaaccaagcccctcccccctagccatggcaaagaagggggaaaagaggccaaggttccatcgggtgataattcagggagaggcgaggtcccacgggctcaggagggccaggctgcatgtggccgagccgcttctggtgattcccaagaggggatgagacgaggatatgaggagcgtgccacggctcagcggcctgctgtccggtccgccgagacgacagcgcacggaacatggatctacccttag

SEQ ID NO: 10393 - DNA, 213 bp, synthetic construct
  misc_feature 1..213: note = source = /note="Description of Artificial Sequence: Synthetic coding sequence"
  source 1..213: mol_type = other DNA
atgagcaacaacatggccaagatcgcggaggcccgtaaaacagtcgagcaactgaagctagaagtgaatatcgataggatgaaagtctctcaggctgccgctgagctgctggcattctgcgagacccatgctaaagatgaccctctcgtgacaccagtacctgccgctgaaaatccgtttagggacaaacgtctattctgcgttcttctctag

SEQ ID NO: 10394 - DNA, 645 bp, synthetic construct
  misc_feature 1..645: note = source = /note="Description of Artificial Sequence: Synthetic coding sequence"
  source 1..645: mol_type = other DNA
atggcacttttattatgtctggtctgtctcactgcagccctcgcccatgggtgcctacattgccattcaaatttttccaagaaattctctttttaccgccatcatgtgaatttcaagagttggtgggtaggcgatatccctgtttcaggagccctcctgactgactggagtgatgatacaatgaaagagctgcatttggccatacccgctaagatcacaagagaaaagctcgaccaggtggcaacagcagtatatcaaatgatggaccagctctaccaaggcaaaatgtatttccctggctatttccccaacgaattgcgcaacatttttagggaacaagtgcacctgatccagaacgccattatcgaaagcagaatcgactgccagcaccggtgcggcatatttcagtatgaaaccattagctgtaataactgtacagactcccatgtagcatgtttcggctacaactgcgaatcatctgcccaatggaaatccgcagtgcagggcctgctgaactacatcaacaactggcacaaacaggacacaagcatgagtctcgtgagtccagcactgaggtgcttggaaccaccacaccttgctaacttgacgctggaggatgccgctgaatgcctgaagcaacattag

SEQ ID NO: 10395 - DNA, 459 bp, synthetic construct
  misc_feature 1..459: note = source = /note="Description of Artificial Sequence: Synthetic coding sequence"
  source 1..459: mol_type = other DNA
atgagccctcacctgaccgcgttgctgggcttggtcctgtgcctggcccaaacaatccatacccaagaaggcgctctccccaggccatcgatctctgccgaacccggtacggtgattagccctggctctcatgtgactttcatgtgccggggacccgtgggagtgcagacgtttcggctggaaagagaggaccgtgcaaagtataaggatagctataacgtcttccgcctgggcccttctgaatcggaggccagattccacattgatagtgtttcagagggcaatgccggactgtaccggtgtctctactataagcctccgggttggagcgaacatagcgatttcttagagcttctcgtgaaagagtcctctggcggacctgacagccctgatactgagccaggatcaagcgcaggaacagtgccaggaaccgaagccagcgggttcgacgctccatag

SEQ ID NO: 10396 - DNA, 900 bp, synthetic construct
  misc_feature 1..900: note = source = /note="Description of Artificial Sequence: Synthetic coding sequence"
  source 1..900: mol_type = other DNA
atggctccatggagccaccctagtgcccagttgcagccggtggggggagacgcagtatcgcccgcactcatggtgctgctttgccttggactatccctgggtccacgcactcatgtccaggctggtaatttgtcgaaagctactttatgggcagagcccggaagcgtcatctcccggggaaattccgtcactataagatgccagggaactctggaagcccaagaatacaggctagtgaaagagggcagccctgaaccatgggacacccagaaccccctggagcccaagaacaaagccagattttccattcctagtatgacagaacatcacgctggacgataccggtgctattattatagtcccgcaggctggtcagagccctcggaccccctcgaactggtagtgactggattttataataaacccacactctccgccttaccttctccggtggtcacttccggtgaaaacgtgacattgcaatgcggatccagacttcgctttgatagatttatcttaaccgaagaaggcgatcacaagttgtcttggaccctggacagccagcttactccctctggccagtttcaagcgttgttccccgtgggtccggttactccaagccaccgttggatgttgcgctgctatggttccagacgtcacatcctgcaagtttggagtgaaccgtccgatctgcttgagatcccagtctccggggcagccgacaacctcagcccaagtcagaacaaatcggacagcggaacagcctcacatctccaggactacgctgtcgaaaacttgatccggatggggatggccggactcatcctggtggtcctggggatactcatctttcaggactggcacagtcagcggagcccgcaggcagccgcaggcagatag

SEQ ID NO: 10397 - DNA, 618 bp, synthetic construct
  misc_feature 1..618: note = source = /note="Description of Artificial Sequence: Synthetic coding sequence"
  source 1..618: mol_type = other DNA
atgaaagtcttattactcacaggcctcggcgcattgtttttcgcctactactgggacgacaactttgatccaggtgggctcgattacctggtgttgaaccacattgggggtgccccagccggtacacgtgcacgctcccctcaggcgacaagatggcttatgcaggtcaatttcgtgtcctatgtccagctgacttcccgcgcactgccgtccctgacagactcaaaggggagtctcgttgtggtgagctcactgttgggtagggtgcccaccagtttctctactccttatagcgccgctaagttcgcactggatggctttttcggatcgctgcgacgcgagctggacgtccaggacgtgaacgtggcgatcacaatgtgcgtgcttggactgcgagacagggctagtgcagcagaggcagtgcgcggagttacaagagtgaaggctgccccaggcccaaaggctgcactggccgtcatacggggaggtgccacacgcgctgcaggcgttttctacccgtggcgctttcggttactgtgtctgctccggagatggctccccaggccgcgagcttggttcattcgccaagagctgaacgtgaccgccgctgccgcatag

SEQ ID NO: 10398 - DNA, 795 bp, synthetic construct
  misc_feature 1..795: note = source = /note="Description of Artificial Sequence: Synthetic coding sequence"
  source 1..795: mol_type = other DNA
atgttgaggtgtggcggacggggacttctgttgggactggcagtggcagcagctgcggtaatggccgctcggctgatgggatggtgggggccacgcgcaggtttccggctttttattccggaagagctgtcccgctacagaggcggtcctggtgacccgggtctgtatttggcgctcctgggcagggtgtacgacgtaagttcaggtcggagacactatgaacccggatcccactattctgggtttgctgggcgagacgcgtctcgggctttcgtgaccggggactgttcggaggcagggcttgtagacgatgtctctgatctctctgccgctgagatgctcacgcttcacaactggttgagcttttatgaaaaaaactacgtatgcgtgggcagggtgaccggacgtttctacggggaggatggccttccaacccccgcattgacccaggtcgaagccgctattaccagggggctggaggcaaataagctacagttgcaagaaaagcagacatttcccccttgcaacgcagagtggagcagcgcgagagggtctcgcctatggtgctctcagaaaagtgggggagtgagccgggattggataggtgtacccagaaaactatacaaacctggcgcaaaggagccgagatgcgtctgtgtgaggactaccggccctccaagcggccagatgcccgataacccccctcacagaaaccgtggcgaccttgaccaccctaacctcgccgagtatactggatgtccacccctcgctataacttgttcgtttcccttatag

SEQ ID NO: 10399 - DNA, 468 bp, synthetic construct
  misc_feature 1..468: note = source = /note="Description of Artificial Sequence: Synthetic coding sequence"
  source 1..468: mol_type = other DNA
atgtcaaagcgcctgctgctgctgttgttactgtccatgggaggcacgtgggctagcaaagaaccactacgccctcgctgccggccaattaatgcgaccctggcagtggagaaggagggatgccccgtgtgcatcactgtgaatactacaatctgtgcaggttactgtccaaccatgacccgcgtcttgcagggcgttctgccagcgcttccccaagtggtctgtaattatagagacgtgcgattcgagagtatccgtcttccgggttgccctcgcggagtcaatccagttgtcagctacgctgtggctctcagctgccagtgtgccctctgccgtcggtccaccaccgactgcgggggtcccaaggaccatcctcttacatgcgatgaccccagatttcaggactctagcagtagcaaagctccacctccctccctgccaagtccaagtcggctcccaggcccatag

SEQ ID NO: 10400 - DNA, 498 bp, synthetic construct
  misc_feature 1..498: note = source = /note="Description of Artificial Sequence: Synthetic coding sequence"
  source 1..498: mol_type = other DNA
atggagatgtttcagggcctgcttctacttctgctgctgagcatgggcggaacgtgggcttctaaggagcccctaagaccacgctgtagacccataaatgctaccctcgccgtagaaaaagagggctgtccagtctgtatcactgttaacacaacgatttgcgcaggatactgtccaactatgacgcgcgtgttgcaaggcgtactcccagcgcttcctcaagtagtctgcaactacagggatgtgagatttgagagtatccgcttacccggatgccccagaggtgtaaacccagtggtctcatatgcagtggccctgtcctgccagtgcgcactgtgccggagatccacgaccgactgtggcggtccgaaggaccatccactcacttgcgacgatcctcggtttcaggacagcagctccagtaaagccccacccccaagcttgccatctccatcgagactgcccggaccaagcgacacgcctatcctcccacagtag

SEQ ID NO: 10401 - DNA, 990 bp, synthetic construct
  misc_feature 1..990: note = source = /note="Description of Artificial Sequence: Synthetic coding sequence"
  source 1..990: mol_type = other DNA
atgctaccgctgctactaggcctgctggggccagccgcatgttgggcactagggccaacccctggtcctggatccagcgaactaaggtcagccttctcagctgcacgtaccacaccccttgaggggactagtgagatggctgtgactttcgataaagtgtatgtaaacattggaggagatttcgatgtggccaccggccagtttaggtgtagagttccaggggcttacttcttcagcttcacagctggaaaggcccctcacaagtccctctccgtgatgttggtgcgtaatcgcgatgaagtgcaagctttagcatttgacgagcagagacgtccaggggctcgacgggctgcctcgcagtcagctatgctgcagctggattacggcgacacagtctggttgcggctgcatggggctcctcagtatgctcttggtgctcccggtgctaccttctccggatacctggtatacgctgacgccgacgccgacgcacctgcccgaggacccccagcgcctcccgaacccaggtccgccttttccgcggctcgcaccagaagtctcgtggggagcgacgccggtccaggtccaagacaccagccactggccttcgacactgaattcgtcaacataggcggtgattttgacgctgcagccggagttttcagatgccgactccctggggcttacttcttttcattcacacttggtaagttgccaaggaagacgctgtccgttaaactgatgaagaacagggacgaagtccaggctatgatctatgatgacggagcatctcgacgccgtgagatgcagagccaatcagtgatgctcgctttgagacggggtgacgccgtgtggctgctgagccatgaccacgacgggtacggcgcatactccaatcacggaaaatatattacgttcagtggatttctcgtgtaccctgatctggctccagccgctcccccaggccttggggcatctgagttattgtag

SEQ ID NO: 10402 - DNA, 873 bp, synthetic construct
  misc_feature 1..873: note = source = /note="Description of Artificial Sequence: Synthetic coding sequence"
  source 1..873: mol_type = other DNA
atgcggcgtccggcagcagtgcctctattgctgttgttatgtttcggatcacagcgggctaaggcagccacagcatgtgggaggccacggatgctgaatcggatggtcggcggacaggatacccaagaaggtgaatggccttggcaggtctcgattcagcgcaacggctcccacttttgcggcggttcactaatcgcggagcaatgggtcttaacagccgctcactgcttcagaaatacctctgaaacaagtttataccaagtgctcttgggagcgcgtcagctcgtgcagcccggacctcacgctatgtatgcccgagtgaggcaggtggagtctaaccctctgtatcaaggcaccgccagttccgcggacgtcgctctggtggagctcgaggccccagtcccatttaccaactatattctgcccgtgtgcttgccggacccaagcgtcattttcgagacaggcatgaactgctgggttacagggtgggggagcccttctgaagaggacttactccctgaaccacggatcttgcagaagctggccgtcccgataatcgataccccaaagtgcaatctcctgtattccaaagatacggagttcggatatcaacccaagaccattaaaaacgacatgctgtgcgccggattcgaggagggcaagaaagatgcttgcaagggggatagcggcggacctctggtgtgtttggttggtcaatcctggttacaggcaggcgtcatctcatggggcgaaggttgtgcccgtcaaaaccgccctggagtatatatcagagttacagctcatcataactggattcatcgcatcatccccaagttgcaatttcaacctgccaggcttgggggtcaaaaatag

SEQ ID NO: 10403 - DNA, 792 bp, synthetic construct
  misc_feature 1..792: note = source = /note="Description of Artificial Sequence: Synthetic coding sequence"
  source 1..792: mol_type = other DNA
atggcttttctttggctgctgagctgctgggcattactcggcactactttcggctgtggtgtgcctgctatccatcctgtactatccggcctgtcccgaatcgtgaatggcgaggacgccgtgccaggttcctggccctggcaggtgtctcttcaagacaagactggatttcatttttgtgggggatccttgatcagcgaggactgggttgtgacagccgcacattgcggcgtgaggacaagcgatgtcgtggtagccggagagtttgaccagggttcagacgaggagaacattcaggtcctgaagatcgccaaagtctttaagaacccaaaatttagcattctgacagtcaacaatgacattaccctgttgaaacttgctacacccgctcgattctctcagaccgtatcagctgtttgtctgccgtctgcagatgacgacttccctgctgggactctgtgcgccacaactgggtggggtaaaaccaagtacaacgctaacaagacccctgataaattgcaacaggcggctctgccccttctgtcaaacgcggaatgcaagaaatcctggggaaggaggattacagatgtgatgatttgtgcgggtgcgtccggcgtttccagttgcatgggagattctgggggtcccctcgtttgccagaaggacggcgcttggacattagttggtatcgtgagctggggttcccgcacatgctccaccactacccctgccgtgtatgcccgagttgccaagcttattccttgggtgcagaaaatactcgccgcaaactag

SEQ ID NO: 10404 - DNA, 228 bp, synthetic construct
  misc_feature 1..228: note = source = /note="Description of Artificial Sequence: Synthetic coding sequence"
  source 1..228: mol_type = other DNA
atgggcgctgctattagtcaaggcgcactgattgcgatcgtatgcaatggactcgtgggtttcctgcttcttctcttgtgggtgatactgtgctgggcatgccacagccgcagcgcagacgtggatagtttgtcagaaagccggactcaggagtctgcttgcctggagctggaccccgctgcgcaatcactagcatctctcgccccaattggagctcagtggccctag

SEQ ID NO: 10405 - DNA, 762 bp, synthetic construct
  misc_feature 1..762: note = source = /note="Description of Artificial Sequence: Synthetic coding sequence"
  source 1..762: mol_type = other DNA
atggctcggagcctgctcctccctctgcagattctgcttctatctttagcgttagagaccgccggagaagaggcgcaaggagacaaaatcattgatggcgcaccgtgcgctagaggctcacatccctggcaggtagctctgctctccggcaatcagcttcactgtggcggagtgctcgtcaacgagagatgggtgcttaccgctgcccactgtaagatgaacgaatacacagttcacctgggttcagacacactgggcgaccggcgtgcccagcgtatcaaggcttccaaatcttttcggcaccctggatatagcacccagacccacgtcaacgatttgatgctggtaaaactaaacagccaagcccgactctcctccatggtaaagaaagtccgcctgccttctaggtgcgaaccccctggcacgacttgcactgtgagtggctgggggaccacaacctccccggacgtgactttccctagcgatttgatgtgcgtggacgttaaactgatctctccccaagactgtacaaaagtatacaaagatttgctggagaattccatgctgtgcgccggaatcccagactccaagaagaatgcctgcaatggcgattccggcggacctctggtttgtcggggtactctccagggtctcgtctcttgggggacctttccttgtggccaaccaaatgatccaggagtctacacgcaagtgtgcaaatttacgaaatggatcaacgataccatgaagaagcatagatag

SEQ ID NO: 10406 - DNA, 480 bp, synthetic construct
  misc_feature 1..480: note = source = /note="Description of Artificial Sequence: Synthetic coding sequence"
  source 1..480: mol_type = other DNA
atgaaggcgtggggtaccgtggtcgttactctcgccacgctgatggtggtgaccgttgacgccaaaatatatgagagatgcgaactggcagcaaggctcgaacgggctggattgaacgggtataagggctacggagtgggggactggctttgcatggcacactacgagagcgggtttgatactgcattcgtggaccacaatccagacgggtcttcagagtatggtatttttcaactcaatagtgcttggtggtgtgataatggcattacccccaccaaaaacctctgtcacatggactgtcacgacctgcttaacaggcatatcctggacgatatccgatgtgcgaaacagattgtgtcttctcagaatggcctgtccgcatggacttcttggagacttcactgtagcgggcatgatctgagcgaatggctgaagggatgtgatatgcacgtaaaaattgatcctaagatacatccatag

SEQ ID NO: 10407 - DNA, 501 bp, synthetic construct
  misc_feature 1..501: note = source = /note="Description of Artificial Sequence: Synthetic coding sequence"
  source 1..501: mol_type = other DNA
atggctcagacaaactcgttcttcatgcttatctcctcccttatgtttctgtctctgagccaggggcaggaaagccagactgagctacccaacccaagaatctcgtgccccgaagggaccaacgcttacagatcctactgctattatttcaacgaggaccctgagacctgggttgatgccgatctctactgtcagaatatgaatagtggcaacctcgttagcgtgttaacacaggccgaaggagcctttgtcgctagcctcattaaagagagttcaacggacgactccaacgtctggatcggcctgcacgatcccaaaaagaatcgccgatggcactggtcaagcgggtccctagtctcttataagtcctgggatactggttctccttccagtgctaatgccggatattgtgcgagtttgacgtcatgttcggggtttaaaaaatggaaggatgagtcatgcgaaaaaaaattttcatttgtttgtaagttcaaaaattag

SEQ ID NO: 10408 - DNA, 528 bp, synthetic construct
  misc_feature 1..528: note = source = /note="Description of Artificial Sequence: Synthetic coding sequence"
  source 1..528: mol_type = other DNA
atgctccctccaatggcccttccttccgtcagttggatgctcctgagttgtctgatgctgctgagccaagtccaaggagaggaaccacagcgagaattaccgtcggcaaggatccgatgccctaaaggctctaaggcttacggttcccattgttatgccctgttcctcagccccaaatcttggaccgacgcagacttagcctgccagaaaaggcccagtggaaatttggtctctgtgctatcaggagcagaaggatcttttgtttcatccctggtaaaatctattggaaatagttacagctacgtctggataggactgcacgaccctactcaaggaaccgagccgaatggggaagggtgggaatggagctccagcgatgtcatgaattattttgcatgggaacgaaatcctagcacgattagctcccctggacactgcgccagcttgagccggtccactgctttcctccggtggaaggactacaactgtaacgtgagattgccctatgtctgcaagttcactgattag

SEQ ID NO: 10409 - DNA, 1686 bp, synthetic construct
  misc_feature 1..1686: note = source = /note="Description of Artificial Sequence: Synthetic coding sequence"
  source 1..1686: mol_type = other DNA
atgggggctcggacacccctcccaagtttctgggtttctttctttgctgaaacaggaattctttttccagggggaacaccctggcccatgggatcgcagcactccaagcaacacaggaaacccggtcctcttaagaggggacatcgtagagatagacggaccaccaggaggaaatactggaaggaggggagagaaatcgctagagtgctggacgacgagggacgtaacctcaggcagcagaaactggacaggcagcgagctctgctggaacagaagcagaaaaagaagcggcaggaacccctgatggttcaggccaatgctgatggaaggcctcgctccaggcgcgctcgccaaagtgaggagcaggcaccccttgtggaatcctacttgagctcgtcgggctccacctcttatcaagtgcaagaggcagattcactcgctagtgtgcagcttggcgctaccagacccacagctccggctagcgctaagaggaccaaggcagctgctacagctggagggcagggaggcgctgcccgaaaagaaaagaaaggaaaacataaaggcacttcagggccagctgctctggccgaggataaatctgaagctcaaggacctgtacaaatacttactgttggccagtccgaccatgcccaggatgccggagagacagcggctgggggaggagagcgacccagcgggcaggatttgagggccaccatgcagcgcaagggcatctctagttctatgtcattcgatgaagacgaagaggatgaggaggagaattctagtagctcctctcaacttaacagtaataccaggcccagttccgctacctctagaaagtcggttcgcgaagccgcaagcgctccatcccccacagcgcctgagcagccagtcgatgttgaggttcaggacctagaggaattcgccttacggcctgcaccgcagggtattaccataaagtgccgtatcactcgtgataagaagggcatggacagggggatgtatcctacctacttcctacatctggatcgtgaagatgggaagaaggtgtttttgctggccggacggaagcggaagaagtccaaaacgtctaattacctgatcagcgtggaccctaccgacctcagcaggggcggagactcttacattggcaaactacgttcgaatctcatggggactaaattcactgtgtacgacaacggtgtgaacccgcagaaagcttcatcaagtactctggagtctggaacgctccgccaagagctcgccgcagtgtgttacgagacaaatgtgctgggctttaagggccctcggaagatgtcggtaattgtgccaggaatgaatatggtgcacgaacgagtctctatccgcccacggaatgagcacgagacattgctcgcaaggtggcagaataagaataccgaaagcatcattgaactccaaaacaaaactccagtgtggaacgatgacacgcagtcctatgtcttgaattttcacggccgtgtgacacaggcctcggtgaaaaattttcaaattatccacggcaatgatcctgattatatcgtgatgcagttcggtcgtgttgctgaagacgtctttaccatggattataattacccgctgtgtgctctccaggctttcgccatcgctctgtcaagctttgactcaaaattggcctgcgagtag

SEQ ID NO: 10410 - DNA, 1272 bp, synthetic construct
  misc_feature 1..1272: note = source = /note="Description of Artificial Sequence: Synthetic coding sequence"
  source 1..1272: mol_type = other DNA
atgatgtaccgaccggatgtggtgcgggcacgcaaacgcgtatgctgggaaccttgggtcattggcctggtaatttttattagcctaattgtcctggctgtgtgtatcggacttacagttcactacgttcgctacaaccaaaaaaagacttacaattactacagtaccctcagctttacaactgataagttatacgctgagttcgggcgagaggcatcgaacaatttcacagaaatgtcccagaggcttgagtccatggtcaagaatgcattttacaaaagccctttgcgcgaggagttcgttaagagtcaggttatcaaattttctcagcagaagcatggggtcctcgcccacatgctgttgatatgtagatttcactccactgaggatcccgagaccgtagataagatagtgcaactggtccttcatgagaaattgcaggatgccgtgggaccgcctaaggtcgaccctcacagcgtcaagataaagaaaataaataaaactgagaccgattcatacctgaatcattgctgcggcacaagaagatccaagacattgggacagtcacttagaatagtggggggaaccgaagtggaagagggagagtggccctggcaagcatctctgcagtgggatggatcccatcgctgcggtgctaccctaataaatgcaacttggctggtgagcgctgcacactgtttcactacctacaagaacccagccaggtggacagcctcattcggagtcaccatcaaaccctccaaaatgaagcggggtttgagaagaatcattgtgcacgagaaatacaaacaccctagccacgactatgacatctctctagctgaattatcgtctcccgtgccctacaccaacgcggtccatcgggtgtgcctacctgacgcttcatacgagttccaaccaggtgatgtaatgtttgtcacaggctttggggctcttaagaatgatggatactcacagaatcacctacggcaggctcaggtgaccctgatcgacgccacgacgtgcaatgaacctcaggcgtataacgacgccataaccccccgaatgctgtgcgcaggaagccttgagggcaaaactgacgcatgtcagggagactcagggggaccacttgttagcagtgatgcccgtgacatatggtacctagctgggattgtgtcatggggggacgagtgtgccaaaccgaataagcccggtgtctatactcgtgtaactgcattaagagactggattactagcaagacaggtatttag

SEQ ID NO: 10411 - DNA, 282 bp, synthetic construct
  misc_feature 1..282: note = source = /note="Description of Artificial Sequence: Synthetic coding sequence"
  source 1..282: mol_type = other DNA
atgaagcccgtgctaccccttcagttcctggtggtgttttgtctggcactgcagctggtgccaggctccccaaaacagcgtgtgctgaaatacatcctggaacccccaccttgcatttcagcccctgaaaactgtacacacctctgcaccatgcaagaggactgcgagaagggattccagtgttgctcttccttctgtggaattgtgtgttcttcagaaactttccagaaaaggaaccgcatcaagcataagggcagtgaggtcatcatgccagctaattag

SEQ ID NO: 10412 - DNA, 1530 bp, synthetic construct
  misc_feature 1..1530: note = source = /note="Description of Artificial Sequence: Synthetic coding sequence"
  source 1..1530: mol_type = other DNA
atggattttcttctggctctggtgctcgtttcctctctgtatctgcaggccgcagctgagtttgacgggaggtggcccaggcagatagttagctctatcgggttgtgtcgctacggcggtcgcattgattgctgttggggctgggccaggcagtcctggggtcagtgccagcctgtctgtcagccacgctgtaaacacggggagtgcatcggaccaaacaaatgtaaatgccatcctggttatgcgggtaaaacttgcaatcaggacctgaatgagtgcgggctgaagccgaggccttgcaagcataggtgcatgaatacttacggttcctataagtgctattgtctgaatggatacatgctgatgcccgacggatcatgctcctcggccctgacgtgcagcatggctaactgccagtatggctgtgacgtcgttaaaggtcagatacgttgtcaatgtcccagtcccggtcttcagctggcaccagacggtagaacttgtgtggatgttgacgagtgtgccaccggaagagcatcttgcccccgattccgccagtgtgtgaacacctttggttcatatatctgcaagtgtcataaggggtttgatcttatgtacataggtggtaagtatcagtgtcacgacattgatgagtgctcacttggacagtatcaatgtagttcctttgcccgttgctacaacataaggggatcctacaagtgcaagtgcaaggagggatatcaaggagatggtctgacctgcgtgtacataccgaaggtcatgattgaaccgagtggccctattcacgtcccgaagggaaacggtactattttaaaaggtgacaccggcaataataactggattcccgacgttgggagcacctggtggcctccaaagactccctatattcctcctatcatcacgaataggcccaccagcaagccaaccactcgccctacaccaaagcccactccaatacctacgccaccaccccctcctccactgcctaccgagttgcggactccgctaccaccgacaacgcccgagcgcccaaccacgggtctgaccacgatcgcccctgccgcttctaccccacccggtgggatcacagtggacaatcgcgtgcaaacagacccccagaaacctcgcggtgatgtgttcagtgtcctagtgcactcctgcaattttgatcacggactgtgcggatggatcagggaaaaggataacgacctccactgggagcccatcagagatccggctgggggacagtacttgacagtctctgcagcgaaggctcccggagggaaagccgcaagactggttctgcccttaggacggctcatgcactcaggagatttatgccttagcttcagacataaggtcacgggcttacatagcggcactctacaggtgtttgtgcgaaagcatggcgctcacggggctgccttgtggggcaggaatggtggacacggctggcgacagacacagatcacgctgaggggcgctgatatcaagtcggaatcccagaggtag

SEQ ID NO: 10413 - DNA, 381 bp, synthetic construct
  misc_feature 1..381: note = source = /note="Description of Artificial Sequence: Synthetic coding sequence"
  source 1..381: mol_type = other DNA
atggataaatcactgctgcttgagctgccgattctcctttgttgctttagggcgctttccgggtcgctgagcatgaggaatgacgccgtgaatgaaatcgtcgctgttaaaaataacttccccgtgatcgaaatcgtacagtgtagaatgtgccacctgcagtttcctggtgaaaagtgttctcgtggccgaggcatatgcaccgccaccacagaggaagcttgcatggtcgggaggatgtttaagagggatgggaacccatggttgactttcatgggatgtttgaagaactgtgcagatgtgaagggcatcaggtggagcgtttatctcgtgaacttccggtgttgccgatctcatgacctgtgcaacgaagatctctag

SEQ ID NO: 10414 - DNA, 537 bp, synthetic construct
  misc_feature 1..537: note = source = /note="Description of Artificial Sequence: Synthetic coding sequence"
  source 1..537: mol_type = other DNA
atggaattgctccaggtgacaattctgttcctgctgccctcaatctgttcgtctaactcaaccggagtgctggaagcagcgaataatagtttggttgtcactacaaccaagccgtcgatcacgacacctaatacggaatcactgcaaaaaaatgtggtcacccctactaccggtacgacacccaagggcacgattacaaatgagctgcttaagatgtccctgatgtcaactgccacgtttcttacatccaaggacgaggggcttaaagccaccactactgatgtccgaaagaacgattcaataataagcaacgtaaccgttacttccgttacattaccgaacgccgtctccactctccagagcagtaagcccaagactgagacgcagtccagcatcaagactaccgaaattccgggtacaccagagaacggcaatgatcagccccagagcgataaagaatctgttaagttgttgaccgtgaagactatctcacacgagtctggtgaacactcagcacagggcaagactaaaaattag

SEQ ID NO: 10415 - DNA, 2544 bp, synthetic construct
  misc_feature 1..2544: note = source = /note="Description of Artificial Sequence: Synthetic coding sequence"
  source 1..2544: mol_type = other DNA
atgtttaaatgttggagtgttgtcctcgtgttgggatttattttcctggagagcgaaggcagacccactaaagagggcggttatggattgaagtcttaccagccccttatgcgcctgcggcacaaacaggagaagaaccaggaaagttcccgggttaaaggttttatgatccaagatggaccattcggttcttgtgaaaacaaatattgtggtctcgggcgacactgtgtgacttctagagaaaccggtcaggccgagtgcgcttgcatggacctgtgcaaacggcactataaacctgtgtgtggaagcgacggagaattttatgagaaccactgcgaggttcatcgggctgcctgtttaaagaagcagaaaattactatcgtacacaatgaggattgtttcttcaaaggcgacaagtgcaagacaaccgagtactcaaagatgaagaacatgcttctggatctgcagaaccagaagtatatcatgcaagaaaacgagaacccgaacggagatgacattagtagaaaaaaactgttagtggatcagatgttcaaatactttgatgccgattccaatggcctcgtcgacatcaacgaactcacccaagtgatcaagcaggaagaactgggcaaagatctcttcgattgtacactgtacgtgctgctcaagtatgacgacttcaacgcggataagcacttagcccttgaagagttctaccgtgctttccaagtcatacagttgagcctcccagaagatcagaagctgagtatcacggcagccactgtgggccaaagtgcagtgctctcatgcgccattcaggggacattgaggcctccgatcatctggaaacgcaataatattatcctaaataatttggatttggaagacattaatgactttggggatgatggctccttgtatataacaaaagtgacaacaactcacgtcgggaattacacatgctatgctgacgggtacgagcaggtttatcagactcacattttccaggtcaatgtgccccctgtcatccgcgtctacccagaaagtcaggccagggaaccaggcgtcactgcctccctgcgctgtcacgctgaaggaattcccaaaccgcagttagggtggctcaagaatggaatcgacattacccccaagctgtcaaagcagctgacactacaggcgaatgggtcagaggtacacatctccaacgtgaggtacgaagataccggggcttacacttgtatagcaaagaatgaggcaggcgtggatgaggacatttcatccttgtttgttgaggattccgctcgaaagacacttgcaaatattttgtggcgtgaggagggactcggcattgggaacatgttttacgtattttatgaggacgggattaaagtgatacagcctatcgaatgcgagtttcaaagacacatcaagccctctgagaagttactcggatttcaggacgaggtatgccccaaagcagagggagatgaggtgcagcgatgcgtgtgggcatcggccgtgaatgtgaaggacaagttcatctacgtggcgcagcctacactcgaccgggttctgatagtcgacgtgcagtctcagaaggtggttcaggcggtttctacagacccagtcccagtaaaactccactatgataaatcccatgatcaagtgtgggtactctcctggggcaccctcgagaaaaccagccccacccttcaggtcattacattagcatctggaaacgtgcctcatcatactatacatacccagcccgtggggaagcagttcgatcgagtggacgatttctttattcccaccaccaccctaattatcacgcacatgagatttggatttattctccacaaggacgaagccgctctgcagaaaattgacttagaaacaatgagctatatcaaaacaatcaacttgaaggactataaatgcgtaccccagagtctggcctacacccacctcggtgggtattacttcatcgggtgcaagcctgattctacaggcgctgtcagtcctcaggtgatggtggatggagtcactgattcggtgattggcttcaatagtgatgtaactggaacaccctacgtgagcccagacggccattacttggtgtccatcaacgacgtaaaaggattggtaagggtgcaatatattaccataaggggcgaaattcaggaagcctttgacatatatacgaacttgcacatttcggacctggccttccaacccagcttcactgaagctcaccaatacaacatctacggaagctccagcacccaaaccgacgtgctgtttgtggagctgtcatcaggaaaagttaagatgattaagagtctgaaggagccgcttaaagcagaggaatggccatggaacagaaaaaacagacaaatccaggattccggcctgtttggccagtacctcatgaccccaagcaaagactcacttttcattttagacggacggcttaacaaactgaattgtgagattactgaggtggagaaggggaacaccgtcatctgggtgggtgacgcttag

SEQ ID NO: 10416 - DNA, 273 bp, synthetic construct
  misc_feature 1..273: note = source = /note="Description of Artificial Sequence: Synthetic coding sequence"
  source 1..273: mol_type = other DNA
atgagactcagcgtctgtttactcctgctgacactggcactatgctgttatcgggctaacgctgtggtttgtcaggccctcgggtcagaaattacaggcttcctgttggccggtaagcctgtgttcaaattccagctcgccaagtttaaggcaccactggaagccgtggctgccaagatggaagtgaaaaagtgtgtggacactatggcctacgagaaacgagttcttatcaccaagaccttggggaaaattgcagagaagtgcgaccgctag

SEQ ID NO: 10417 - DNA, 1044 bp, synthetic construct
  misc_feature 1..1044: note = source = /note="Description of Artificial Sequence: Synthetic coding sequence"
  source 1..1044: mol_type = other DNA
atgtccagttggtctcgacaaagaccaaaatcacctgggggaatccaacctcatgtttccagaacactgttcctgttgctgctgcttgccgcatccgcgtggggagtgactctcagccctaaggactgccaggtcttccgaagcgaccacggatcaagcatcagttgccagccgccagctgagataccagggtatctgccggcagacacagtgcatcttgctgttgagttctttaatctcacccatctgccagcaaatctccttcaaggagccagtaagctccaggaactgcacttgtcatctaatggtctagaatcattgtctcccgagtttttgcgtcctgtgccacagttgcgagtccttgacctaactaggaacgccctgaccggacttcccccaggactcttccaggcttccgcaactctggacacactggtgctcaaagagaatcagctggaagttctagaggtgagttggctgcatgggctcaaggctttgggtcacctcgatttatccggcaacaggttgaggaaattacctccaggcttactggccaatttcaccttactacgaacattggacctgggcgagaaccagttggagactctcccgcctgacctgctccgaggccctctccagctcgagaggctccacctggaaggaaacaaactgcaagtactgggaaaagacctgctgctccctcaaccagatctgaggtatctattccttaatggcaataagctagcccgtgtggccgcaggggcattccaaggacttaggcagctcgatatgctagacctgagtaataattcattagccagcgtgcccgaggggctgtgggcttctctggggcagcccaactgggatatgagagacgggtttgacatttctggaaacccttggatttgcgatcagaatctgagcgatctgtatagatggctccaggcgcagaaagacaagatgttttctcaaaatgacacccggtgcgccggtcctgaagccgtgaaagggcagaccctccttgcagtcgccaagtcccagtag

SEQ ID NO: 10418 - DNA, 1407 bp, synthetic construct
  misc_feature 1..1407: note = source = /note="Description of Artificial Sequence: Synthetic coding sequence"
  source 1..1407: mol_type = other DNA
atgccgccttggggagccgcactggccttgattctggcggtcctcgctctcttagggcttttgggtccccgtctgcggggtccttggggcagagccgtgggcgagcggaccttgcctggtgcacaagacagggacgatggtgaagaagctgatggcggaggtcccgctgatcagttttcagatgggagagaacccttgccaggaggatgttcgttggtgtgcaaacctagcgccctggcccagtgcctcctgagagctctacggcgatccgaggcactcgaggcgggaccacgctcgtggttttccggcccacacttgcagactctatgccacttcgtacttcctgtcgcaccaggacctgagctggcccgagaataccttcagctggccgacgatggactcgttgccctggactgggtagtcggtccttgcgtacgaggcaggagaatcaccagtgctgggggacttcctgcagtgttgctcgtaatccccaatgcttggggacgattaacgagaaatgtgctcgggctttgcctgcttgcactggagaggggctactatcctgtgatcttccatagaaggggtcatcatggttgcccattggtttctcctcgcctgcaaccattcggcgatccttcagatctgaaagaagcagtaacctacattcgctttagacaccctgcggctccactttttgcagtctctgaggggagcgggtcagccctgttgttatcatatttgggggagtgcgggagcagtagctatgtgaccggcgcagcttgcatctccccggtgctgaggtgtcgcgaatggtttgaggccggactgccctggccttacgaaagagggtttctgctgcatcagaagattgctcttagtaggtatgccacagctctagaagataccgtggacacctctcgcctgttccgctcacggagcttgagggagttcgaagaggctctcttttgtcatactaaaagttttccaatttcatgggatacatactgggacaggaatgacccactccgcgatgttgatgaagcagccgtcccggtgctgtgtatttgctctgccgatgacccggtctgcgggccacctgatcacaccctgaccactgagctatttcactcaaatccctactttttcctactactctctagacatggaggccattgcggctttctccgccaagaacccctgcctgcctggtcccatgaggttatccttgaaagctttcgcgcactgaccgaattttttcggactgaggaacgaattaagggtctatcgcgacacagagctagcttccttgggggaaggaggcgagggggagccttacagagacgcgaggtgtcaagcagctcaaacttggaggagatcttcaactggaagcgttcctacacccggtag

SEQ ID NO: 10419 - DNA, 423 bp, synthetic construct
  misc_feature 1..423: note = source = /note="Description of Artificial Sequence: Synthetic coding sequence"
  source 1..423: mol_type = other DNA
atgttttttactatctcaagaaagaacatgagtcaaaagctctcactgcttctccttgtgttcggtctcatttggggtctgatgctgttgcattacaccttccagcagccacgtcaccagtcctctgtaaaattgcgagagcaaatcctcgatctctccaagaggtacgtgaaagctttggccgaggaaaacaagaacacagtcgacgttgagaatggcgcttcaatggccggttatgctgaccttaagcggacgatcgcagtgctcttggacgacattctccagagactggtgaaacttgaaaataaggtcgactatatcgtggtgaacggatcagctgccaacaccactaacggcacttccgggaacctggtaccagtcacaaccaataaacgcactaacgtgtccggatccatccggtag

SEQ ID NO: 10420 - DNA, 993 bp, synthetic construct
  misc_feature 1..993: note = source = /note="Description of Artificial Sequence: Synthetic coding sequence"
  source 1..993: mol_type = other DNA
cgaggagctctcgtgggagcacctagaagtgcacgggcaagctgcctgcgtggcaggaggcccggaagacggcagccctgcggcagatgccccgatccgcctagatctggccctggccaagccggtagggcaagatgcgccagagatgttgcagctcagacagctctggcaccacgtgccctggctctgggtgctggcgcagccggaccaggatggagaggggctgtgccccgacgacccgcagcgcgagtgtctagagccgcacaaagacaggagcaagaactggtgcgcctgcacagagagcaggaatgcgagcttcagcccgagcccgctccacccaggccctccgggccagcgaccgcagaggacccgggtaggcgccctgtgctgccacagagaccccctgaggaaagacctccgcagccacctgggagcacaggcgtgatcgccgaaacaggccaggccggaccacctgccggtgccggagtcagcggctaccctaagtcaccccctgttgcttcacccggagcacccgtcccatcccttgtgagcttttcagctggcctcacacaaaagccttttcctagtgacggcggagtggttttgttcaacaaagtgctagtgaacgacggggatgtgtacaatccctcgactggcgttttcactgcaccgtatgatgggagataccttatcacagccacactaacccccgagcgtgatgcatacgtggaggccgtgctttccgtcagcaacgctagtgtcgctcagctgcacaccgctggatacagacgggagtttctcgagtaccatcgcccaccaggagccctccatacgtgtggcggtcctggcgcattccatcttattgtccatctgaaggctggcgatgctgtgaatgtcgttgttactggagggaagctagcccataccgattttgatgagatgtactccactttctcaggcgtgtttctgtatccttttctgtctcatttgtag

SEQ ID NO: 10421 - DNA, 585 bp, synthetic construct
  misc_feature 1..585: note = source = /note="Description of Artificial Sequence: Synthetic coding sequence"
  source 1..585: mol_type = other DNA
atgtctgccctgtggctcctcttagggctgctcgcccttatggatctttcagagagttctaattgggggtgctatggcaacattcagagtctggacacgcccggtgcttcgtgtgggattggtcgccgtcacgggctgaactactgcggcgtaagggcatctgaaaggttggcggaaatcgacatgccctacttactgaaatatcaacccatgatgcagacaataggccagaagtattgcatggatcccgctgtgatcgccggagtcttaagcagaaaatcacctggagataagattttagtgaacatgggggatagaacatccatggtccaggatcccggttcccaggctccaaccagctggatctcagagtctcaggtttctcagaccacggaggtgctgacaacccggataaaggagatacagcggagattccctacgtggacaccagaccaatatctgagaggaggcctctgcgcgtactccggaggcgctggatacgtgcgaagctcacaagaccttagctgtgatttctgcaacgatgtgctggcacgggctaagtacttgaagcgccatggcttctag

SEQ ID NO: 10422 - DNA, 273 bp, synthetic construct
  misc_feature 1..273: note = source = /note="Description of Artificial Sequence: Synthetic coding sequence"
  source 1..273: mol_type = other DNA
atgaagtttctggccgtgctcgttcttttgggggtgagtattttcctggtatccgcccagaatcccacaacggctgccccagctgatacctaccccgctaccgggccagccgacgacgaagcgccagatgcagagactacagccgctgccaccaccgcgactaccgccgcaccaactacggccaccacggccgcttcaacaaccgctcggaaggatatcccagtactcccgaaatgggttggagatctaccgaatggtagggtctgtccttag

SEQ ID NO: 10423 - DNA, 1914 bp, synthetic construct
  misc_feature 1..1914: note = source = /note="Description of Artificial Sequence: Synthetic coding sequence"
  source 1..1914: mol_type = other DNA
atgtctaggatgctgccctttttactcttactgtggttcctgcccattacagaaggttcacagagagccgagccaatgttcaccgccgtgacaaattcagttctcccccctgattatgatagcaaccccactcagctaaactacggcgtagccgtgaccgacgtagaccatgacggggatttcgaaattgtggtggcaggctacaatgggccaaatctcgtgctcaagtatgatagggctcagaagcgcctggttaacatcgccgtcgatgaacgatcttccccctactacgccctgagagatagacaggggaacgccattggagtcaccgcctgcgatatcgacggagacggcagggaagagatctattttctcaacaccaataacgcttttagcggcgtcgctacctacaccgataagctcttcaaattcaggaacaatcggtgggaggacatcctgtctgacgaggttaacgtggctaggggtgtggccagtttgttcgcgggtcgaagcgtagcatgtgtcgaccgcaagggaagcggaaggtacagcatctatatagcgaactatgcctatggtaacgtgggccctgatgccctgatcgagatggacccagaagccagcgacctgagccggggaatcctagccctaagggatgttgctgctgaagccggtgtgtccaaatacaccgggggacggggtgtgtccgttgggccaatcttgagctcctctgccagcgatatcttctgtgataacgagaacggacctaactttttatttcacaacaggggagacggcacgtttgtggacgctgctgcgagcgcaggcgtcgacgaccctcatcaacatgggcgtggggtggcactcgccgatttcaacagggatggcaaagtagacatcgtgtacgggaattggaacgggcctcaccgattatacctacagatgtccacccatggaaaggttaggtttcgggacattgcgagcccaaaattttctatgccatcccccgtgcgtacggttattacagcagacttcgataacgatcaggaactcgagatcttttttaataacattgcctataggtcttcctccgccaatcgcctttttagggtgattaggcgagagcatggtgacccattgattgaggagctcaatcccggtgatgcgttggaacccgaggggcgaggaacagggggagtagtcactgactttgatggcgatggcatgttggacctgatcctttctcacggggagagcatggcacagcccctgagcgtgttccggggaaatcaggggttcaacaataactggctgcgagtcgtgccccgaactaggtttggcgcattcgccaggggagccaaggtggtcctatacactaagaagtcaggtgcccatctgcgcataatcgacgggggttcgggatacttgtgtgagatggagcccgtggcgcatttcggacttggaaaagatgaagcctctagcgtggaggtaacgtggccggatgggaaaatggtgagtagaaacgttgcaagcggtgaaatgaatagtgtcttggagatactatacccgcgtgacgaagatacactgcaagatccggcacctctcgaatgcgggcaaggatttagccaacaagagaatggccattgcatggacacaaatgagtgcattcagttcccctttgtctgccccagagataagcccgtgtgcgttaatacttacggctcctacaggtgcagaaccaataagaagtgctctcggggatacgagcccaatgaagatgggactgcctgtgtagcgcaggtggccttcttgggcggatatagttccgcggcaagccggatatcagagccacttagtcgggcttcttatctcagccttgggcttggactgtgcttacagttgtacgctctatag

SEQ ID NO: 10424 - DNA, 600 bp, synthetic construct
  misc_feature 1..600: note = source = /note="Description of Artificial Sequence: Synthetic coding sequence"
  source 1..600: mol_type = other DNA
atggctcttaatggcgcagaggttgacgacttctcctgggaaccccctacagaagctgagacaaaggtactccaggcccgacgggagcgccaggacaggatctcaagactgatgggtgattatcttctgaggggataccgcatgctgggcgagacctgcgccgattgcggaacgatactcttgcaggacaaacaaagaaagatatattgcgtggcatgtcaggagctggattcagatgttgataaggacaaccccgcactgaatgcccaagctgccctttcacaagccagagagcaccagctggccagcgcttccgaacttcccctgggaagtaggccagcccctcagcctccggtgcctaggccagagcactgcgagggtgctgccgctggtcttaaggctgcccagggtccacctgccccagcagtccctcctaatactgacgtcatggcctgcactcagacggcactactgcagaagttaacctgggcctccgctgaactgggtagtagtacctctctggagaccagcatacagctgtgtggtctgatccgagcctgcgctgaagcgttaaggtctttacaacaactgcagcattag

SEQ ID NO: 10425 - DNA, 813 bp, synthetic construct
  misc_feature 1..813: note = source = /note="Description of Artificial Sequence: Synthetic coding sequence"
  source 1..813: mol_type = other DNA
atgaagctgggctgcgttctaatggcctgggctctgtatttgtccttaggagtgctatgggtcgcccagatgcttctggccgcttcattcgagactctgcagtgtgaggggcctgtgtgtactgaagagtcctcatgccatacagaggacgaccttactgatgccagagaagctggattccaggttaaagcctacacgttttctgagccgttccacctgattgtttcttacgaactcttccccgcacctattctgcgcgcagttccttccgctgaaccacaagccggtagtcccatgaccttgagctgtcagaccaaacttcccctccagcggagcgccgcaagactgctgttcagcttctacaaagacggcaggattgtgcagagtagggggctgagcagcgaatttcaaatacccaccgctagcgaggatcactccgggagctattggtgtgaagctgccaccgaggacaaccaggtatggaagcagagtcctcagctggagattcgggtgcagggggcttcttcatccgcggcacctcccaccctcaaccctgctccccagaagtccgcagctccaggcactgcgcctgaagaggcgcctggccctttaccaccccctcctaccccctcctccgaggacccaggcttctcctctccgttaggcatgcctgacccgcacctttaccaccagatgggattactgctgaagcacatgcaggatgtgcgggtcctactcggacacctgcttatggagcttcgggaattgagcggtcacagaaagcccggtacaactaaggctacagctgagtag

SEQ ID NO: 10426 - DNA, 2421 bp, synthetic construct
  misc_feature 1..2421: note = source = /note="Description of Artificial Sequence: Synthetic coding sequence"
  source 1..2421: mol_type = other DNA
atgcgtctgtctccagcacctctgaaattaagccggacgcctgcactacttgccctggcactgccactggccgctgctcttgctttctcggacgagaccttggacaaggtcccgaagtctgaagggtattgctcccggatcttacgagcccaggggacccgcagggaggggtacactgagttctctctccgggtcgagggggaccccgatttttataaacccggaacgtcttaccgagtgactctctctgccgcacccccttcttactttcgcggttttactctgatagctctccgagagaatagggagggtgataaggaggaagaccatgccggtactttccagattatcgatgaggaggagactcagtttatgagcaattgtcccgtcgccgtcactgagagtaccccaagacgacgcacaagaatccaagtcttttggatcgcacccccagccggaacaggttgcgtcattttaaaggcctcgatagttcagaagaggattatctactttcaggacgaggggtctttgacaaaaaagctgtgcgagcaagatagcacatttgacggcgtcaccgacaagccaatcctggattgttgctgcggaactgccaagtatagactgacattttacggcaactggtccgaaaagactcatccaaaagattaccccagacgggctaaccactggagtgctatcataggcggaagccacagtaaaaattacgtgctgtgggaatacggtggttacgccagcgagggcgtgaagcaagtagctgaactgggttcccctgtgaaaatggaagaagagatccgccagcagagtgatgaggtcctcaccgttataaaggccaaagcgcaatggcctgcctggcagcccttgaatgtgcgcgcagcaccttccgccgaattctccgtggataggacccggcacctgatgtcattcctgaccatgatggggccaagtcccgattggaacgtaggtctgtccgctgaggacctgtgcacgaaggagtgcggatgggtccagaaggtagtccaggacctgattccatgggacgccggaactgattctggcgtcacttacgaatctccaaataaaccgactattcctcaggagaaaattcggccactgacaagtctcgatcatccacagtccccgttttatgaccctgagggaggttctataactcaggtggcaagggtggtgatcgaacgaatcgcccgaaaaggggaacaatgcaatatcgtaccagacaacgtcgacgatattgtcgccgacctcgctcctgaagaaaaggacgaagatgacactcctgagacctgtatctactcgaattggtcaccttggtcagcatgctccagttctacttgtgacaaggggaagcgcatgcggcagcgaatgctgaaagcgcagctggacttgtcagtgccatgtccagacacccaggattttcagccatgtatggggcctgggtgctctgacgaggatggaagtacttgtaccatgtcagaatggatcacatggtccccctgcagtattagttgcggaatgggcatgaggtcaagggagcggtatgtcaaacagttccccgaagatggctctgtgtgcactctgcccactgaggagactgagaagtgtactgtcaatgaggagtgtagtccctcctcttgcttgatgaccgaatggggtgaatgggatgaatgttccgcaacttgtgggatgggcatgaagaaacgacacaggatgattaaaatgaaccctgcagacgggagcatgtgtaaggctgaaacatcgcaggccgaaaaatgtatgatgcccgaatgtcacaccatcccctgcctgctgtccccttggagtgaatggtcagactgttcggtaacttgtggcaagggaatgaggacccggcagagaatgcttaagtctcttgccgagctgggggattgtaacgaggacctggagcaggttgagaagtgcatgcttcccgagtgtccgatagactgcgagctgacagagtggtcccagtggtcagagtgcaacaagagttgcggaaaaggccacgtgatcaggacccgcatgattcagatggagccccagttcggaggcgctccgtgtcctgaaaccgtccagagaaagaagtgtcggattagaaaatgtttacgtaatccttctattcagaaactgagatggagggaagcccgagaaagcaggcgatcggaacaactgaaagaggagagcgaaggcgaacagtttccaggatgtcgcatgcggccatggactgcttggtccgagtgtacaaagctgtgcgggggaggtatccaggaacgctatatgaccgtgaagaagagatttaagtcctctcagttcacctcatgtaaggacaagaaagagatccgggcatgtaatgttcatccatgttag

SEQ ID NO: 10427 - DNA, 4242 bp, synthetic construct
  misc_feature 1..4242: note = source = /note="Description of Artificial Sequence: Synthetic coding sequence"
  source 1..4242: mol_type = other DNA
atgagacacggtgttgcgtgggcactgctcgtggcggcagcactgggacttggggcaaggggtgttcgcggagcagtggcgcttgcggatttctaccccttcggagccgagcggggagacgccgtcactccaaagcaggacgatggcggatctgggctgagaccactgtccgtgccgtttccgttctttggcgcagagcactctgggttgtatgtaaataacaacggaatcattagcttcctgaaggaagtctcccagttcacccccgtggctttccccattgccaaagaccggtgcgtggtggcggcattctgggctgacgttgacaacagacgagcaggagatgtgtactatcgcgaggctacagatcccgcaatgctgagacgggctaccgaagacgtcagacactattttcctgagctgctcgactttaacgcaacctgggtattcgtggcaacatggtaccgggtcacgttcttcggtggctcatccagctcgcccgttaataccttccagacagttctgattactgatggaaagttgtccttcacaattttcaattacgagtccattgtgtggacaactggaactcatgcttcttcaggcggaaatgctaccgggctgggcggtatagccgctcaagctggctttaatgctggggacggacaacgttacttctccatccctggttcacgaactgctgatatggctgaagtggaaacaacgaccaatgtgggcgtcccaggtcggtgggcttttcgtatagacgatgctcaggtgagagtgggtggatgtggccacacgacaagcgtgtgcctggcactgcgcccttgccttaacgggggtaagtgtatcgatgactgtgtgacaggcaatcctagctatacctgtagctgtttgagcggcttcacagggcgtagatgtcatcttgacgtaaacgaatgcgcctcgcagccttgccagaacggtgggacatgcacacacgggattaatagttttcggtgccagtgccctgcaggtttcggcggacccacatgcgagaccgcgcagtccccatgcgacactaaggaatgccagcatgggggacagtgccaggtggaaaatggctcggcagtctgcgtatgccaggcaggctacacaggagctgcgtgtgagatggacgtggatgactgttccccagacccgtgcctcaacgggggtagctgtgttgatctggtggggaactacacttgtctatgcgctgaacctttcaaggggttacggtgcgagaccggagatcatcctgtccctgatgcctgtctgagcgcaccatgtcataacggtggaacttgcgttgacgcggatcagggctatgtgtgtgagtgccccgagggcttcatgggtctcgattgccgtgagcgcgtgccagacgactgtgagtgtcgcaatggcggtcgatgtctgggggctaacacgacactgtgccaatgtccgctcggcttttttggactattgtgcgagttcgagattaccgccatgccatgcaacatgaatacccagtgtcctgacggcggttactgcatggagcatggtggaagctacctttgtgtgtgccataccgatcacaatgccagccactcgctgccctctccttgtgacagtgacccctgctttaacggtggcagctgcgacgcccatgatgactcctacacctgtgaatgcccacgcggtttccacggtaagcactgtgagaaagctcgcccacacttgtgttcatcaggtccctgtcggaacgggggaacttgtaaagaagctggtggcgaataccattgcagctgtccctaccgatttacaggccgtcattgtgagattgggaaaccagattcctgcgccagtggcccttgccacaacgggggaacatgttttcactatatcggaaaatacaagtgtgactgtcctccgggattcagtggtcggcattgcgagatcgcgccatctccatgttttcgcagcccatgcgtgaacggcggtacctgtgaggatagggacaccgactttttttgccattgccaggccggttacatgggtcgcagatgtcaggccgaggtggattgtggtccacccgaagaagtcaagcacgccactttgcgatttaatgggacccggctgggcgctgtcgcgttatatgcatgtgatagaggatattctttatctgccccaagtagaatccgggtctgccagccacatggggtgtggagtgaacctcctcaatgcctcgaaattgatgagtgtcgctcccagccttgcctgcacggcggttcttgtcaagacagagtggccggatatctttgtctgtgtagtaccggctatgaaggcgctcattgtgagctggaaagagacgagtgccgagcccacccttgcaggaacggcggatcatgccgaaacctgcctggtgcttacgtctgcaggtgccccgctgggttcgtcggtgtgcactgcgagaccgaggtcgatgcctgtgactcatcaccctgtcagcatgggggtagatgcgagagcggcggaggagcctacctttgtgtgtgtcctgagtcgttctttggttaccattgcgaaacagtatcggatccttgcttctctagcccttgtggcggacggggatactgtctggccagtaatggttctcatagctgcacctgcaaggttgggtatactggcgaggactgcgcaaaagaactatttcccccaactgcactgaaaatggagagagtggaagagtcgggggtgagcatcagctggaaccccccaaatggtcccgctgctagacagatgctagatggctacgccgtaacttacgttagttctgacggcagctacagaagaactgatttcgttgaccgaaccaggtcttctcatcagctgcaggccctggccgcaggccgagcttacaatatttctgtcttttcagtcaaaaggaacagcaataacaagaacgacatctcaagaccggctgtcctgctggccaggacgcgccctagacccgtcgaggggttcgaagtgaccaatgtcaccgctagtaccatcagcgtgcagtgggcactacacagaattcgccacgctacagtcagcggtgttagggtgtcaataaggcatccagaggccctaagagaccaggcgacggacgttgatcgttctgtggataggttcacattccgcgcactgttaccagggaaacgctacacaattcagctgaccaccctaagtggactgcgcggagaggaacaccctactgaatcgctggccacagcacctactcatgtgtggacgcgccctttgccccctgccaacctaacagctgcacgggtgacagctacaagcgcacacgtggtgtgggacgccccaacacccggatcgctcctggaggcctatgtgattaatgtcaccacttctcaatccaccaagtccagatacgtgccgaacggaaagctcgcttcatacacagtgagggatctgctccctggtcgcagataccagctcagcgtcatagctgtccaatccaccgagctaggcccacaacattccgagcctgcacacctgtacatcatcacgtcacccagggacggggctgatcgcaggtggcaccaggggggtcaccacccacgtgtactcaaaaaccgacctccaccagccaggctcccagagttgagactgctgaatgaccactctgcccctgaaaccccaacccagccaccacggtttagtgagttggtggacggaaggggccgagtctccgccaggtttggtggcagcccctcaaaagccgcaaccgtgcggtcgcaaccaacagcctccgctcagttagagaatatggaggaggccccaaaacgtgtcagccttgctctccaattgccggagcatggcagcaaggatattggaaatgttccaggaaactgcagtgaaaacccatgccaaaatggaggaacttgtgtccccggagcggacgctcattcttgcgactgtggccctggctttaaggggaggagatgtgagctggcttgcattaaggtgagcagaccatgcacccggcttttctctgagaccaaagccttccccgtgtgggaggggggagtctgccatcatgtgtacaaaagggtgtatagggtccatcaggacatctgctttaaagagtcctgtgagagtaccagtttgaagaaaacaccgaaccggaagcaaagtaagagtcagaccctcgagaagtcgtag

SEQ ID NO: 10428 - DNA, 1008 bp, synthetic construct
  misc_feature 1..1008: note = source = /note="Description of Artificial Sequence: Synthetic coding sequence"
  source 1..1008: mol_type = other DNA
atgtttctggctacattatctttccttcttccttttgcacacccttttggcaccgtcagctgtgagtatatgctgggaagccctcttagttctctggcccaagttaacctgagccctttcagtcaccctaaagtgcacatggatcccaattattgtcacccatcgacatctctgcatctttgctctctggcgtggagttttactcggctgctgcaccccccactcagcccaggaattagtcaagtcgtaaaggatcacgtgacaaaacccacagccatggcccagggtagggtggcacatttgattgaatggaagggctggtcaaaacctagtgattcccccgctgcactggagtctgcgttctcctcatattccgacctgagcgaaggagagcaggaggcgaggttcgccgcaggcgtagccgagcagtttgctatagccgaagcaaagctccgggcttggagtagcgtggacggggaggatagcaccgacgactcatacgatgaagacttcgccggaggtatggacactgatatggccggacaactcccactggggccacatttgcaggatcttttcacaggccaccgcttcagtaggccggtcaggcagggaagcgtcgaaccagaaagcgattgcagccaaactgtctcgcccgatacgttatgcagttccctttgctccctcgaggacggcctgctggggtcacctgccagattggcatctcaattactgggtgatgagctgttactggcaaaactaccccctagcagagaatctgcttttagaagtctgggaccccttgaggctcaagactcattgtataatagcccgcttaccgagtcatgtctctcccctgctgaagaggagccggctccatgtaaggactgccagcccctctgtccacctctgaccggctcctgggagagacaacgacaggcatctgacctggcatcttccggcgtggtcagcctggatgaggacgaagcagaacctgaggaacagtag

SEQ ID NO: 10429 - DNA, 828 bp, synthetic construct
  misc_feature 1..828: note = source = /note="Description of Artificial Sequence: Synthetic coding sequence"
  source 1..828: mol_type = other DNA
atgcagccaccaggtccaagggaccctcttataagactctgcttcttccgcgaagagggaacgaatgtagtgcagaaaatctgcttctcgacgcaaatcataaggcactttgagagcaaactctcagatacaattgaagtgtaccaagagagaattcagtggctcacagagaactctaaaaaggccttcggtctgataaagggagccagggtgagcatattgatcgacgtgtccgctatctcctcaggcccacagaaggaagagttccagaaggacttgatgtctttgatcgacgaacagctctcccacaaagagaaattattcgtgctgtcatttggcacgaacgccggaagtctgtggcctgaccctatggaggtctccgccagcaccttacaagaattgaaactttgggtgaagactctgcagcccgacgggggaagcaacctcttgcaggccctcaagaagatattcactctgaagggcctcgattctttagtggctattatgcgctcatgcccggatcagccttctgagatactgtctgattacatccaacagtctacaatggggagggacctcatcatccacttcatcacctatagatgtgacgaccagatgccacctgcagtgttgaagaacctcgctgaagccgtgagaggctattatcactgctattctccaaagatggaacactacacctccagggacatggatgaactgcttgctgagattcagaaggcgcagtctctgctgtcacacgttcaggccctgcagcacagcagcccttgtgaagcactgacctgcaccatggaggaacccagaaattag

SEQ ID NO: 10430 - DNA, 438 bp, synthetic construct
  misc_feature 1..438: note = source = /note="Description of Artificial Sequence: Synthetic coding sequence"
  source 1..438: mol_type = other DNA
atgttgactaggctggttttaagtgcccatctctccagcactacgtcccccccatggactcacgctgcaatctcctgggaacttgataatgtgctgatgccatcacctaggatctggcctcaggtcacacccaccggtcgctctgcttctgttcggtctgaaggcaacacttctagcctgtggaacttttcagctggacaggacgttcatgccatcgtgactaggacatgcgagagcgtactgtctagcgcagtttacactcacggttgcggctgtgtgaggtcagccaccaacatcacttgccagtcaagcggacagcaaaggcaggcggctcggcaggaagaagagaactccatatgtaaagcccacgattcaagagagggtcgactgggataccccttgagcgcccaccagcccggtagtggaggcccaaattag

SEQ ID NO: 10431 - DNA, 777 bp, synthetic construct
  misc_feature 1..777: note = source = /note="Description of Artificial Sequence: Synthetic coding sequence"
  source 1..777: mol_type = other DNA
atgacgccacccaagctgagagcgagtctgtcaccttcattactgttacttctgtctgggtgcctgttggctgctgctcgccgagagaagggagctgccagtaatgttgcagagcccgtcccaggtccgaccgggggatcaagtggtcgatttctatcccccgagcaacacgcatgcagctggcagttgcttctcccagctcctgaggccgctgcaggctctgaacttgccctgcggtgccagtcgcctgacggcgcacgacatcaatgcgcctaccgagggcatcctgaaaggtgcgcggcttatgcagccagaagagcccatttctggaagcaggtgttgggaggcctgcggaaaaagcggcgtccctgtcatgatccagcaccccttcaggcacgattgtgtgccggaaaaaagggacatggagccgaacttcgactggtcccacgcgcaagccctccagcccgacccaccgtcgcaggcttcgccggagagagtaaaccacgggctagaaacaggggaagaacccgagagcgtgcctccggtcctgccgcaggtacccccccacctcagagcgcacccccaaaagaaaacccgtcggagaggaagaccaatgaaggcaaacggaaagccgcacttgttccaaatgaggagagacccatgggaactggtccagatcctgatggcttggacggaaacgctgagttgaccgaaacgtattgcgctgagaaatggcacagtctgtgcaattttttcgtgaacttctggaacggatag

SEQ ID NO: 10432 - DNA, 393 bp, synthetic construct
  misc_feature 1..393: note = source = /note="Description of Artificial Sequence: Synthetic coding sequence"
  source 1..393: mol_type = other DNA
atggcgaggaggcattgcttctcctactggctgctggtctgctggttagttgtaacagtggccgagggtcaagaagaggtttttacgcctcctggcgattcgcaaaacaacgccgacgccaccgactgtcagatctttactctaacaccaccacctgcacctaggtcccccgtgacgcgcgctcagcctataacaaaaaccccacgctgtccttttcacttcttccccaggagaccgagaatacactttaggttcccaaaccggccttttgtcccttccaggtgcaatcacagattcccttttcagcccttctattggccccacagatatctaacctaccgttattttccaagacggagactccagagaggtagttcttctgaagagagttag

SEQ ID NO: 10433 - DNA, 600 bp, synthetic construct
  misc_feature 1..600: note = source = /note="Description of Artificial Sequence: Synthetic coding sequence"
  source 1..600: mol_type = other DNA
atgtatccagctacagccgtgccacagatcaacattaccatactcaagggagaaaagggtgaccgtggtgatcgcggtttacagggtaaatatggtaagactggatcagccggagcacgcggacacactggacctaagggtcagaagggttctatgggtgcaccaggcgagcgctgtaagagtcattacgccgctttttctgtagggcgtaagaagcctatgcattctaatcactactatcagactgtcatcttcgacacagaattcgtgaatttatacgaccactttaacatgttcacaggcaagttctactgttacgttccaggcttatacttcttttcactgaacgtgcacacctggaaccagaaggaaacatatctgcatataatgaagaatgaggaggaggtggtcattctgtttgctcaagtgggtgatagatccatcatgcagtctcagtccttgatgctagagctgagggaacaagatcaggtctgggtgcggctgtataagggggaaagagagaacgcaatcttttcagaggagctggatacatatattaccttctcgggttatctggtcaaacacgccacagagccctag

SEQ ID NO: 10434 - DNA, 702 bp, synthetic construct
  misc_feature 1..702: note = source = /note="Description of Artificial Sequence: Synthetic coding sequence"
  source 1..702: mol_type = other DNA
atggcccttaagaataaattctcttgtttatggatacttggcctctgcctcgtggcgacaactagcagcaaaattccctctatcacagacccacatttcatcgataattgcatcgaggcccataacgagtggcgagggaaggtgaacccccctgccgcagacatgaagtatatgatctgggacaagggattagctaagatggctaaagcatgggccaaccaatgtaagtttgagcacaatgactgtctggataagtcctacaagtgttacgccgcattcgaatacgtaggggaaaacatttggcttggaggtatcaagtccttcactcccagacatgccatcaccgcttggtacaatgaaacccagttttacgatttcgattctctatcttgttccagagtgtgtggccattatactcagctggtctgggcgaattctttctacgtggggtgcgctgttgccatgtgtcctaatctgggtggcgcatcaaccgctatttttgtttgcaattacggaccagcaggcaacttcgctaatatgcccccttatgtgcgcggtgaaagctgctcgctttgtagtaaagaggaaaaatgtgtgaagaacctgtgcaaaaatcctttcctgaagcctactggcagggcccctcagcagactgcatttaaccctttcagcctgggttttttgcttttgcgcatcttttag

SEQ ID NO: 10435 - DNA, 669 bp, synthetic construct
  misc_feature 1..669: note = source = /note="Description of Artificial Sequence: Synthetic coding sequence"
  source 1..669: mol_type = other DNA
atggcactccatattcatgaggcatgcattttgctgctggttattcctggtctggtaacatccgctgcaatctcccatgaggattatccagcggatgaaggtgaccagatcagctccaacgataacttgattttcgatgactaccgcggtaagggatgcgtggacgatagcggcttcgtttataaactcggggaacgattttttcccggacactccaattgcccttgtgtctgtgcattagatggcccagtctgcgatcagccggagtgccccaaaatccaccccaaatgtacaaaggtggagcacaacggatgttgtccagagtgtaaagaagtgaaaaatttttgtgagtatcacgggaaaaattacaaaatccttgaggaatttaaacccagcccttgtgagtggtgccggtgtgaaccatcaaacgaagtgcattgtgtggtagctgattgcgcggttccagagtgtgttaatccggtctacgagcctgagcagtgttgcccagtgtgtaaaaatggacccaactgtttcgctggcacaacaatcatcccagcaggtatcgaggtgaaggttgatgaatgcaacatttgccactgtcataacggcgactggtggaagcctgctcagtgtagcaaaagagaatgccaggggaagcagaccgtctag

SEQ ID NO: 10436 - DNA, 957 bp, synthetic construct
  misc_feature 1..957: note = source = /note="Description of Artificial Sequence: Synthetic coding sequence"
  source 1..957: mol_type = other DNA
atgctcccattgactatgacggtattgatcctcctactcttgcctaccgggcaggccgcacccaaggatggcgtgacacggccagattccgaagtccagcaccagcttttaccaaaccccttccagcccggtcaggagcagctcggcttactccagagctacctgaagggtctgggaaggacagaagtgcaactagaacacttgtctagagagcaagtgctgctctatctcttcgcgcttcacgattatgatcagtctgggcagctggacggcctagaactacttagcatgctgaccgccgcattggccccaggagctgctaattcgcccactacaaaccccgtgattctgattgttgacaaagttctagagacacaggatcttaatggcgatggactgatgacaccagccgagctgatcaattttcctggcgtcgccttaaggcatgtggaaccaggggaacctcttgcaccgtcaccccaagaaccacaggctgtgggtagacagagcctcctggcaaaaagcccgctgcgacaggagactcaggaggcaccaggacccagagaggaggccaagggtcaagtggaagccaggcgggaaagcctggacccagtccaggagcccggaggccaggcagaagcagatggtgatgtacctggacctcggggtgaagcagagggccaagcagaagctaaaggggatgcccctgggcctcgcggagaagctggaggacaagcagaggccgaaggagacgcacctggccctaggggtgaagccggtggccaagccgaggccgagggagatgctccaggacctcgtggggaggctggcggtcaggctgaggccagggagaatggagaggaagccaaagagctgcctggggaaacactggagtccaagaatactcagaatgatttcgaagtgcacattgtgcaggtggagaacgacgaaatctag

SEQ ID NO: 10437 - DNA, 393 bp, synthetic construct
  misc_feature 1..393: note = source = /note="Description of Artificial Sequence: Synthetic coding sequence"
  source 1..393: mol_type = other DNA
atgctggccccacttttcctatgctgtctccgcaatctgttccgaaagctaatatccttccagcctcctcagcttgggagaacaaatatgcattattcaaagcttcctcgtacggccatagaaacagagtttaagcagaatgtgggtccaccccctaaggacctgaccgcggaagtctattttccctctattaagagcagaagtcatcttcccgctgtcttctataaccagtacttcaagcatccaaagtgcgtaggcgagtatgggccaaagaacggagcagaacgccaaatagaagagaggaaggtgcttccgactactatgatgttctcgatgcttgctgattgtgtcctgaagtccacaccgattccaatactgggtgttgctatgtag

SEQ ID NO: 10438 - DNA, 4362 bp, synthetic construct
  misc_feature 1..4362: note = source = /note="Description of Artificial Sequence: Synthetic coding sequence"
  source 1..4362: mol_type = other DNA
atgatgctccctcaaaactcatggcacattgacttcggacgctgctgttgtcatcaaaatctctttagtgcagtagtgacgtgcattctgctcctgaattcctgcttcctcatctcgtcgttcaacggcacggatctcgaactgagattggtgaatggcgacggaccatgttcaggcacagtcgaggtcaagtttcaagggcaatggggtaccgtgtgtgacgatggttggaatactactgcttctacagtggtgtgcaagcagctcggatgtcccttctcgtttgctatgttccgtttcggccaagcagttactcgccacggcaaaatctggctagacgacgtgagctgctatggaaatgagagcgccctctgggaatgccaacaccgggaatgggggagtcacaactgctaccatggagaggatgtaggggtcaactgctatggagaagctaatctaggcttgcgactcgtggatggaaataattcctgttctgggagggtggaagtgaaattccaggagcggtggggcactatttgtgatgatggctggaacttgaacaccgcggcagttgtctgcagacagctcggctgtcccagcagttttatttcctctggtgtcgttaactcaccggcagtccttcgcccaatatggctggatgacattctctgtcagggcaatgagttggctctgtggaactgccgccaccggggttggggtaaccacgattgctcacacaatgaggacgtgactcttacgtgttacgactccagtgacttggaactgaggctcgtcggaggaacaaaccgctgtatggggagagtggaattgaaaattcaagggaggtggggcaccgtttgccatcataagtggaacaacgctgcagccgatgtggtatgcaagcagctgggctgtggaacagctctgcacttcgccggactcccacatctccagtccggttctgatgttgtctggctggacggtgtatcatgttcaggaaacgaatctttcctctgggattgcaggcactctggcaccgtcaacttcgactgcctgcatcagaacgacgtgagtgttatatgcagcgacggcgcagacttagagcttagattagctgatggctctaataattgcagcggccgagtagaggtaaggattcacgagcagtggtggaccatctgtgatcagaattggaagaacgaacaggccctggtggtttgtaagcagctgggctgcccgttctccgtgttcggaagcaggcgcgctaagcccagtaacgaagctagggatatctggatcaacagcatcagttgcacagggaacgagagcgccttgtgggactgcacctatgacgggaaagctaaaagaacttgctttcgtcggtctgacgccggagtgatttgcagtgataaagcagacctggatctacgcctcgtgggagcccactccccctgttacggcagacttgaagtgaagtaccagggagagtggggcaccgtgtgccacgaccgatggtctacacgcaatgctgcagtggtgtgtaagcagctcggctgcgggaagccactgcacgtctttggcatgacttattttaaggaggctagtggccctatttggctagacgacgtgtcttgtatcgggaatgagagcaacatatgggactgtgagcactccggttggggcaaacacaactgcgtacatcgggaggacgtcatcgtgacctgttctggcgatgcgacctggggcttacggctcgttggtggttccaatcggtgcagtgggagactcgaggtgtattttcaggggagatggggtaccgtgtgtgatgacggctggaatagcaaagccgcagccgttgtttgttcccagctggattgcccaagctcaattatcggaatgggcctcggtaacgctagcacaggctacggcaagatctggctggatgatgtctcctgtgatggagatgagagcgatctgtggtcttgtcgaaactccggctggggcaataatgactgtagccactccgaagacgtcggcgtgatctgttccgacgcttccgacatggaactgcggctcgtgggtgggagcagccgctgcgccggaaaggtcgaggtcaatgttcaaggcgctgttggcatattgtgcgccaacggttggggcatgaacatcgccgaagtggtatgcagacagttggagtgtggctccgcaattagggtctcacgagagccacatttcacggaaagaactttacacatcctgatgtccaactctggctgtaccgggggagaagctagtttatgggactgtatcaggtgggaatggaagcagaccgcttgccatctcaacatggaggctagtctaatttgtagcgctcatcggcagcctagactggtcggcgctgacatgccctgttccggaagagtcgaggtcaagcacgccgatacctggaggagcgtctgcgattctgacttttctctccacgcggctaatgtgttatgtagggagctgaattgcggcgacgctatctccctatcagtgggcgatcactttggcaagggtaacgggctgacttgggctgagaaattccagtgcgaaggatctgaaacacatctcgctctctgtcccatcgtccagcatcctgaggacacctgtatccacagccgcgaggtgggagtggtgtgctctaggtacacagacgtcagacttgtgaatggcaagagtcaatgcgacggccaggtcgaaatcaatgtcctaggacattggggtagcctctgcgatacacactgggatccagaagacgcgagggtcctgtgtagacagctcagctgcgggacagccctctctacgactgggggtaaatatataggggagagatcagtccgcgtttgggggcatagattccactgtcttgggaacgaatctctgctggacaattgccagatgacagtattgggtgctccaccctgcattcacggaaatactgttagcgtgatctgtaccggaagcttgacccagcccctcttcccctgcctcgctaatgtctccgatccctatttaagtgcagtcccagaaggctccgcccttatctgcctggaagataaaaggctaaggctggtggacggagatagtcgctgtgccggacgggtcgaaatctaccatgacggcttttgggggaccatctgtgacgacggttgggatctgtcagacgcccacgtggtgtgtcagaagctgggatgcggtgtggccttcaacgcaaccgtgagcgctcattttggcgaagggagtgggccaatttggttagacgatctgaactgcacaggaatggagagtcatctgtggcagtgccccagcagagggtggggacagcatgactgcagacacaaagaagatgcgggagtgatttgttccgagttcactgcgctgcggctttatagcgagacagaaacggaatcttgcgcagggagattagaggttttttacaatggcacttggggttcagttggaagacgcaacatcactacagctatagccggtattgtgtgcagacagctggggtgcggagagaacggcgtcgtatccctcgccccactctctaagacagggagtggcttcatgtgggtggacgatatccagtgccctaagactcacatctctatctggcagtgtctgtccgcgccttgggagcgaaggataagctcgcccgctgaagagacatggattacctgcgaggacaggatcagggtgaggggcggagacacagagtgctcagggcgtgtagagatctggcacgcaggcagctggggaaccgtttgcgacgactcgtgggatctagcagaggcagaagtggtgtgtcagcagcttgggtgtggatcggccctggccgcattgagagatgcatcattcggccaggggaccggaaccatttggctggacgacatgcgatgcaagggaaacgaaagctttctctgggattgccacgctaagccttggggccagtccgattgcgggcacaaagaagatgctggcgttcgatgtagcggccaatcccttaaaagtctcaatgcctcgtccgggcatctggcactgatcctgtcaagcattttcgggctcctcttgctcgttctgtttatactgtttctcacttggtgtagggtacagaagcaaaagcatcttccattaagggtgagcacccgccgacggggatcacttgaggaaaatctcttccatgagatggaaacttgcttgaagagggaagatccacacgggacccggacctccgacgacaccccgaaccacggttgcgaggatgcttcagacacaagtctgctcggggttttacccgcttctgaggctactaaatag

SEQ ID NO: 10439 - DNA, 759 bp, synthetic construct
  misc_feature 1..759: note = source = /note="Description of Artificial Sequence: Synthetic coding sequence"
  source 1..759: mol_type = other DNA
atgctccctccgcctagaccagcagctgcgctggccttgccggtgctgctcctccttcttgtagtattaacgccgcctccaaccggtgctcgacctagccctggacccgactacctcagacggggttggatgaggctgctggccgagggcgaggggtgtgctccctgcaggccagaggaatgcgctgctccgagaggctgcctggctggccgtgtgagggatgcgtgcggctgttgctgggagtgcgccaaccttgaaggccagctgtgtgatctggatccgagcgctcatttctacggacattgtggcgaacagcttgaatgtcggctggatacggggggagatctttcgaggggtgaggtccccgagccattgtgtgcttgccgtagtcaatcccctctgtgcggcagcgatggacatacatactcccaaatctgcagactacaggaggctgcccgtgcccgacccgatgctaatcttacagtcgcccaccctggcccatgtgagtcagggcctcagatcgtgagtcatccctatgacacttggaggggtccacggctgcaaaccctgggcacagaggatacccttacgacgttggtgggtgcgggtggaatggctagggccgtggcctgcggtgaagcgcctggcgagcatctggccctccaggtcctctgtttaagtggcaagagaagacacctttggcaggtggggtccactggcagctctgagggagtccctagcggtggctcattctggtag

SEQ ID NO: 10440 - DNA, 1323 bp, synthetic construct
  misc_feature 1..1323: note = source = /note="Description of Artificial Sequence: Synthetic coding sequence"
  source 1..1323: mol_type = other DNA
atgaaactggccctcctgttgccctgggcctgttgctgtctgtgtggatccgccctcgccaccggctttctatatccattctccgccgctgcgctgcagcaacacggatatcccgagccaggagcgggttcgcctgggtcaggctacgcatctcgacgtcactggtgccatcataccgtaacacgcactgtatcgtgccaagtgcagaacggctccgaaaccgtcgtacagcgagtctatcagtcttgcagatggcccggaccttgcgctaacttagtgtcatatcggactctgattaggccaacttacagggtgtcttaccggactgtgacagttcttgagtggcgttgttgccccggatttacgggatcaaattgtgacgaggaatgtatgaactgcacacgcctgtctgacatgtctgagaggcttaccacactcgaggctaaggtgctactcttagaagccgcagagcgaccaagctcgcccgataacgacttaccagctcctgaaagtacccctcctacttggaatgaggattttctccctgatgccattccacttgcccatcctgtgcctcggcagcgaagacccaccggacccgctggtccccctggccagaccgggcctcctggaccagccggtcctccgggaagcaagggagataggggccagactggggagaaaggtccagccggtccaccaggactcctgggtcctcccggacctcgtggccttccaggcgagatggggcgacctggtcctcctgggcctcccggtccagcagggaatccaggaccttccccaaattcaccccagggcgctctgtattccctgcagcctccgacggataaggataacggtgacagtagacttgccagtgccatagttgacaccgtactggccggtgtgcccggtccgagaggacccccaggaccccctggcccacctgggcctagggggcctcccggacctccgggaacacccggttctcagggacttgccggtgagcgaggaaccgtggggccaagcggggagcctggtgtgaagggcgaggaaggagagaaggctgccaccgccgagggtgagggagtccaacagctaagagaggctttgaagatcctagctgagcgcgtactgatcctggaacacatgattggaattcacgatcctctggcctcccccgagggaagcggccaggatgcagcgttgcgagctaacctgaagatgaagagagggggtgcacagcccgacggcgttctggccgctctgttaggacccgatcccggtcaaaagagtgtcgaccaggccagtagcagaaaatag

SEQ ID NO: 10441 - DNA, 1341 bp, synthetic construct
  misc_feature 1..1341: note = source = /note="Description of Artificial Sequence: Synthetic coding sequence"
  source 1..1341: mol_type = other DNA
atgcttcatcctgagaccagtcctgggaggggccacctgctggccgtgctactggctcttttagggaccgcatgggctgaagtgtggcctcctcagttgcaggaacaggcccctatggctggcgctctcaatagaaaggagtcgtttctgctgttgagcctgcacaacagactgcgcagctgggtccagcccccagcagcagacatgcgcagactggactggagtgatagtctcgcgcaacttgcccaggcaagggcggcactgtgtggaatccccacacctagccttgccagcggtctttggagaaccctccaggtcggctggaacatgcaactcctgcctgcagggctggcctctttcgtcgaagtggtgtcactgtggtttgccgaaggccagcggtacagccatgccgcaggggagtgtgcaaggaatgcaacctgtacccactacacacagctggtctgggccacctccagccaacttggctgcggcaggcacttatgttccgctggacaggccgcaatagaggccttcgtctgcgcttactccccacgaggcaattgggaagtaaacggaaaaaccattgtgccatacaagaagggcgcatggtgttccctgtgtacagcctctgtctcaggctgttttaaagcctgggaccatgcagggggactgtgcgaagtgcctcggaatccctgccggatgtcctgccagaaccacggacggcttaacatctctacttgccactgccactgtcccccaggttatacgggcaggtactgtcaggttcgatgttcattgcagtgtgtgcatggaagattcagagaagaggaatgtagctgcgtatgcgatatcgggtatggaggcgcacagtgtgccacaaaagtgcattttccattccacacttgtgaccttcgtattgatggagattgctttatggtgtcttcagaggcagatacgtattaccgagcaagaatgaaatgccaaaggaagggaggcgtgctcgcccagataaagagccaaaaggtccaggatatcctggccttttatctgggacgactcgagaccaccaacgaagtgattgattctgatttcgaaactaggaatttctggattggcttaacttataaaacggccaaagattcattccgatgggctacgggtgaacatcaggcatttacctcctttgctttcggacagcctgataaccatggtttcgggaattgcgtggagctgcaggcctccgcggcattcaattggaacaaccaacgctgtaaaacgcgcaacagatacatctgccagttcgcgcaggagcacatctcgaggtggggtccaggctcatag

SEQ ID NO: 10442 - DNA, 219 bp, synthetic construct
  misc_feature 1..219: note = source = /note="Description of Artificial Sequence: Synthetic coding sequence"
  source 1..219: mol_type = other DNA
atgcagcgcctggtgctgctgctcgccatatcattgctgctgtatcaggacctcccagttcgcagcgagttcgaactcgatcggatatgtggctacggaaccgcccgatgccgcaagaagtgcaggtctcaggagtaccgcataggaaggtgccctaacacttatgcatgttgtctgcgcaaatgggacgagagcttgttgaatcgtaccaagccctag

SEQ ID NO: 10443 - DNA, 2349 bp, synthetic construct
  misc_feature 1..2349: note = source = /note="Description of Artificial Sequence: Synthetic coding sequence"
  source 1..2349: mol_type = other DNA
ctgtggctgctgctgtgggccgcagcgtggagactgggggcaagcgcctgccctgccctgtgtacttgcaccggcacaactgtggactgtcacgggactggactccaggcaattccaaagaacatcccccgaaacactgagcggctggaactgaacgggaacaacatcacaagaattcacaagaacgatttcgctggcctgaaacaactacgggtactgcagcttatggaaaatcagatcggagctgtagagaggggcgcattcgatgacatgaaggaactcgaacggcttaggcttaatcgaaaccagctccacatgctgccagagttgttgttccagaataatcaggctctctctaggctggatctgtctgaaaacgcgatccaggcaattcccaggaaagcatttaggggtgctactgaccttaaaaatttgcaactggacaaaaatcagatttcctgcatcgaggaaggtgcattccgcgctctccgagggctggaagtgctgactcttaataataataatataacgacaatcccggtcagctcttttaaccacatgcccaaactgaggaccttccggcttcattcaaaccatctgttctgcgattgccacctcgcctggcttagtcagtggttaagacagcgacctaccatcggactcttcacccagtgttctggcccagcatccctgagagggttgaatgtggccgaagtgcaaaaaagtgagtttagttgctcagggcagggggaggctggacgagtccctacctgcactctgagttcaggcagttgcccagcaatgtgtacgtgttctaacggtatagttgattgtcgagggaaagggctgaccgccattcctgccaacctgcctgagactatgaccgagatccgtctcgaactcaacggaattaaatctataccaccgggagccttcagcccatacagaaaattgagacggatttgtcctctgtcgttttgctccccatgcagagatctgagcaacaatcagatcgccgagatcgcacctgacgcatttcaagggctccgatccctgaatagccttgtgctgtacgggaataaaatcacagaccttcccagaggcgtgtttggtggcttatacactttgcagttgttgttgcttaacgcgaataaaatcaattgcattagacccgacgctttccaggatctgcagaatctgtccctactgtcactttatgacaataagattcagtcgctggccaaggggacatttacctccttacgggcaatccagactctacatctggctcaaaatccctttatctgcgattgcaatctaaaatggctagctgacttcttgcgcaccaatccaattgaaacctcaggagcacgctgtgcctcccccaggcgcctggctaacaagcgaattggccaaatcaagtctaagaagtttcggtgctccgccaaggaacagtatttcattcccggaactgaagactatcaattgaactccgaatgtaactctgatgtggtttgcccacataagtgtagatgtgaggctaatgttgtcgagtgcagctcacttaaactaactaaaatcccagagcgaatcccacagtccaccgcggagttgaggttaaataacaacgaaatctcaatcctggaggctacaggaatgtttaaaaaactaactcacctgaagaagatcaacttatctaacaataaagtgagtgaaatcgaggatggggcttttgaaggagccgcatcggtgtctgagctccacctaacggctaatcagctggaaagtataaggagcggcatgttccgaggtttggacggtcttcgaactctaatgctgcgcaacaaccgcatatcatgcatacataacgatagcttcaccgggcttagaaacgtgcggctcctgagcctctacgacaatcagataacaacggtttcccccggtgccttcgacaccctccagtcactctcaactcttaatctccttgcgaatccttttaattgtaactgtcagctggcgtggctggggggttggctgcggaagaggaagattgtcacgggcaacccaagatgccaaaacccagatttcctgcggcagattccactgcaagacgttgcctttcctgactttcgttgtgaagagggacaggaggaagggggttgcctcccaagaccccagtgcccacaagaatgtgcctgcctggacaccgttgtgcggtgttcgaataagcacctgagggcactccccaaagggatccctaaaaacgtgaccgaactgtacctggatgggaaccaatttacactggtccccggtcagctcagcacttttaagtatctgcagctggtatag

SEQ ID NO: 10444 - DNA, 411 bp, synthetic construct
  misc_feature 1..411: note = source = /note="Description of Artificial Sequence: Synthetic coding sequence"
  source 1..411: mol_type = other DNA
atgtcaaacgtcccacacaagtcctccctacctgagggaattaggcccggaactgtcctccgcatcaggggcctcgttccaccaaacgcatcccgatttcacgtcaatctattgtgtggtgaagagcagggatccgatgcagccttacactttaatcccaggctggataccagcgaggtggtctttaattctaaagagcagggctcttgggggcgagaggaacgagggcctggagtgcccttccagcgaggtcagccttttgaggtcctaatcatcgcctcagatgacggcttcaaagccgtggtgggcgatgctcagtatcaccattttcgacatcgcctaccgttggcccgagtccgactggtggaggtgggcggtgacgttcaactcgacagcgtccgcattttctag

SEQ ID NO: 10445 - DNA, 1926 bp, synthetic construct
  misc_feature 1..1926: note = source = /note="Description of Artificial Sequence: Synthetic coding sequence"
  source 1..1926: mol_type = other DNA
atgccacctcccctgccactcctgttgttaactgtgcttgtggtggcggctgcacgacccggatgtgagtttgagcgaaacccagccgctacttgtgtcgacctacaactaaggacatgcagcgatgccgcatacaatcacactacatttcccaatctgctacaacaccgctcgtgggaggttgtggaggcaagctcagagtacattctgttatcggtgctacatcaattgctggaaggccagtgtaatcccgacctgagactgcttggctgtgcagtcctggcccctaggtgtgagggcggatgggttagacgaccctgccggcacatttgcgagggacttagggaggtctgccagcctgcttttgatgcgattgatatggcatggccatactttctggattgtcaccggtatttcacacgggaagatgaggggtgctacgatcccttagagaaactgcgcggaggccttgaggctgacgaggctttgcccagcggactgccacccacattcattaggttttctcatcatagctacgctcagatggtgcgtgtgctgaggcggaccgcttcccggtgcgcccatgttgccagaacgtactctatcggtcggtcgtttgatggcagagagctccttgtgatcgagttttcctctcgacctggacagcacgagctcatggagccagaggtaaagcttatcggcaacatccacggtaatgaagttgcgggaagggaaatgctcatctacctcgctcagtatctctgcagtgaatacctgctggggaaccccaggattcagcgtttgctgaacactactagaattcacctgttgccttcgatgaacccagacggctacgaggtagccgctgccgagggggctggatacaatggctggacaagtgggagacagaatgctcagaacctggatttgaataggaacttcccagacttgacttccgagtattacaggcttgccgagaccaggggggctaggagtgatcatattccaatcccacagcattattggtggggtaaggtagctccggagacaaaggcaatcatgaaatggatgcagacaattcctttcgtgctgtcagcaagcttgcatggaggggatctcgtggtgagttacccctttgactttagtaaacatccgcaggaagaaaagatgttcagccccacgccggatgaaaagatgtttaaactcctcagtcgcgcttacgcagacgtccatcccatgatgatggacagatctgagaaccggtgcggcggtaactttctcaagaggggttcaattatcaatggggctgactggtactcttttaccggaggcatgtctgattttaattacctgcacacaaactgtttcgagatcacggtggagcttggatgcgtcaagttccctcccgaggaggctctgtatattttgtggcagcacaataaggaatcactgcttaattttgtggagacggttcatcgaggtatcaaaggagttgtaacagacaagttcggcaaacccgttaagaacgccagaattagcgtaaaggggattaggcacgatattacgaccgcccctgatggagactactggagattattacccccaggaatccatattgtgattgctcaggccccaggatacgccaaggtgattaaaaaggtgatcatccccgcacggatgaaaagggctggaagagtggacttcattctccagcctttgggtatgggtcctaaaaacttcatccacggcctcagaagaaccggccctcacgaccccctgggaggggcttcttctctgggtgaggctactgagccggacccactccgtgcccgacggcagcctagtgctgacgggtctaagccttggtggtggtcttatttcacgtctctgagcacacataggccaagatggttacttaaatattag

SEQ ID NO: 10446 - DNA, 1305 bp, synthetic construct
  misc_feature 1..1305: note = source = /note="Description of Artificial Sequence: Synthetic coding sequence"
  source 1..1305: mol_type = other DNA
atggcttcactgggactcttgctgctgttgctgctgactgcactcccgccactgtggagcagttccttgcccggacttgatacagctgagagcaaggcaaccattgccgacttaatcctctcggcactggaacgcgctaccgtgtttttagagcagaggctcccagagattaatctagacggcatggtcggggtgcgggtgctggaggagcaactgaagtctgtgcgagagaaatgggcgcaggagcctctgttgcagcccctgtccctgcgcgtcggcatgcttggagagaagttggaagcagcaattcagaggagcctgcattaccttaagctgagcgatcctaagtacctccgcgagtttcagttaaccctccagcctggcttctggaaactgccccatgcctggatccacaccgatgcaagtcttgtctatcccacctttggcccacaagatagcttttcagaggaaaggtcagacgtgtgcctggtgcaactgctggggactggaacggattcaagcgagccttgcggactgtccgatctatgtaggagcctcatgacaaagcccggatgctccggctattgtctgtcccaccagctgctgttcttcctgtgggcacgaatgaggggctgtacccagggaccactgcagcagtcccaggattacatcaatttattctgcgcaaatatgatggatctaaaccgccgagccgaggctattgggtacgcctacccaactcgcgacatttttatggagaataatgtgactgggcatcctgtcttctacctgcctctttgtgattcttttctcccacctaaggcagccccagtgactgagctatacaccgatggaccagtcatgttttgcgggatgggaggcttttccgacttttataaattacggtggctagaggccatcctttcctggcaaaaacagcaggaaggctgtttcggtgaacctgatgcagaagacgaagagctcagcaaggctattcagtatcagcaacacttttcgaggcgagttaagaggcgggagaagcagttccctgactcccgttctgtggcccaagccggtgtgcagtggcgcaatctgggctcactccaacctcttcctccgggatttaagcagtttagctgcttgatcctgcctagctcttgggactaccggagtgtgccgccatacctcgctaacttttatatttttcttgtcgagaccggttttcaccacgtagctcacgccggactcgaactactgatttctcgagaccccccaacatctgggtcacagtccgtaggtctctag

SEQ ID NO: 10447 - DNA, 555 bp, synthetic construct
  misc_feature 1..555: note = source = /note="Description of Artificial Sequence: Synthetic coding sequence"
  source 1..555: mol_type = other DNA
atgatgtcatttcttcttggagcgatactgacactgctgtgggcgccaaccgctcaagcagaggttctgttgcagccagattttaatgctgagaagttcagcggtctctggtatgtcgtgtcaatggcctctgactgtcgagtgtttctgggaaagaaggatcatctctccatgtctacccgggctattcgtccaaccgaagaggggggattacatgtgcacatggagttccctggggctgatggttgtaatcaagtcgatgccgaatatctgaaagttggatccgaagggcactttagggtccccgctttagggtacctggacgtgagaatcgttgatactgactatagttctttcgctgtgctttacatctacaaagagctggagggagccctgtccacgatggtgcagctctattcacggacccaggatgtcagtccccaggcactgaaatccttccaagatttctatcctacactgggcctgccaaaggatatgatggtaatgctcccacagtcagatgcttgcaaccccgagagcaaggaggctccctag

SEQ ID NO: 10448 - DNA, 219 bp, synthetic construct
  misc_feature 1..219: note = source = /note="Description of Artificial Sequence: Synthetic coding sequence"
  source 1..219: mol_type = other DNA
atgcagcgcctcgtccttctactcgctatctctctcctgttgtatcaggatcttccagtgcggagtgaatttgagctggatcgaatctgcggatatggaactgccaggtgtcgtaaaaagtgcagatcccaagagtaccgcatcggcagatgccccaatacctatgcttgctgcctgcgcaagtgggacgagtctctcctcaaccggactaaaccatag

SEQ ID NO: 10449 - DNA, 2247 bp, synthetic construct
  misc_feature 1..2247: note = source = /note="Description of Artificial Sequence: Synthetic coding sequence"
  source 1..2247: mol_type = other DNA
atggggagggcaggagcggctgctgttattcccggtttggcactgctgtgggccgtagggctgggatctgctgccccaccgcctagattgagactctcattccaagagctgcaggcatggcatggccttcaaaccttctctttagagcgcacctgctgctatcaagccctgctggtcgacgaagagcgcggtcgcctgttcgtcggggctgaaaaccacgtcgccagcctaaacctggacaatatcagtaaaagagcaaaaaagctggcgtggccagcacctgtagagtggcgggaggagtgcaattgggcgggaaaagacattggcacagaatgcatgaactttgttaagctgcttcacgcatacaatcggactcacctgttagcttgtggcacgggcgctttccatccaacctgtgcttttgtggaggtgggccacagagcagaggaaccagtgctcaggcttgatcccggtaggattgaagatggtaaaggcaaatccccttacgacccacgccacagagccgcatctgtcctggtgggcgaagaactatactcaggggtggctgcagacctgatgggcagagacttcaccatcttcaggagtctaggccagaggccatcgctaaggaccgagccgcacgactctcgatggctcaacgagccaaagttcgtcaaggtgttctggatccccgagagcgaaaaccctgatgacgataagatatactttttctttcgagagaccgcagtcgaggccgctcctgcccttgggaggctgtctgtgtctagggtgggacagatttgccggaatgacgttggcggacagagatcactggtgaataagtggacaacattcttgaaagccagactggtttgtagtgtgcctggggtggagggggacacccactttgatcagttgcaagatgtctttcttctaagcagtagggaccataggacccctctgctgtacgccgtgttctccacttctagctcaatctttcaggggtcagccgtttgcgtgtactccatgaatgatgtgcgcagggccttcttgggccctttcgcacacaaagagggaccaatgcaccagtgggtgagctaccaggggcgagtgccatatccaaggcctgggatgtgcccttctaagaccttcggtacattctcctcaaccaaagatttccccgatgatgtaattcagtttgctcgtaaccacccactgatgtacaacagcgtgctgcccactggaggtaggccactgtttctacaggtgggtgccaattacacatttacccaaatcgcggctgacagggtcgccgcagccgatggacattacgatgtcctgttcattggaaccgacgtaggcaccgtgctgaaggtgatttccgttcccaagggctccagacccagcgctgaaggactcctgctagaagagcttcacgtgttcgaagactccgccgcagtcactagcatgcaaatcagctcaaagcgccatcagttatatgtggctagtcggtcagctgtcgcccagattgccctacatcggtgtgccgctcacggtcgtgtgtgcacagaatgctgcctcgcacgcgacccttactgtgcctgggatggggtagcttgtacgagattccagcccagcgccaagagaaggttccggagacaagacgtgaggaatggtgatcccagcaccctgtgcagcggagatagttcccggcctgcattgctagagcataaggtgttcggggtggagggctcttccgccttcttggaatgtgagcctaggtctctccaggccagggttgagtggacttttcagcgcgcaggagtcaccgcacacacccaggtcctggcagaagagcggacggaacggaccgcgagaggcctgttgcttcgccgactccgacggcgtgacagtggcgtttacctgtgcgcggcagtcgaacagggattcacccaaccactccgtaggctttccctgcacgtgttgagtgctacccaggccgaaaggctggccagggccgaagaagccgctccagctgcgcctcctggcccaaaactgtggtacagggactttttgcaattggtggagccaggtggagggggatcagcaaactcactccggatgtgccgccctcagccagcattgcaatccctccccctggaatctcggaggaagggacgaaacagacgcactcacgcacccgaacctcgggcagaacgcggtcctagatcagcgacgcattggtag

SEQ ID NO: 10450 - DNA, 369 bp, synthetic construct
  misc_feature 1..369: note = source = /note="Description of Artificial Sequence: Synthetic coding sequence"
  source 1..369: mol_type = other DNA
atggtgctgctgtgtctgtttctggctagtctagccgctaccccccgagccggagtgaccggcgcatggccaacatctggcttgtcaatcttggcacagcttcagccgtcttgcgagctgaggtggacccagcttagccgctcttcatggagagacctggtgatgaccacttcattatggagcctggcttattttcagcatttcagccaggagactacaacccaggagcagctggatgagatggaggagattccgagagaatcccagtgtggccgacaggacttccatgccctgagttgtcctactgcatctcctcgcgaccgtgtcctcctgtgctgcccaggctggcgtgccatggtaccttcctag

SEQ ID NO: 10451 - DNA, 570 bp, synthetic construct
  misc_feature 1..570: note = source = /note="Description of Artificial Sequence: Synthetic coding sequence"
  source 1..570: mol_type = other DNA
atgttgcttggacagctcagcaccctcctctgcttgctcagcggggctctcccgacaggctctggcagaccagagccacagtctcccaggccccagtcctgggccgctgcaaatcaaacatgggccctgggccctggggcactgccacctctagtgccagcctcagcattaggcagctggaaagccttcctgggcttgcagaaagccaggcaattaggcatgggacgtctccagcgcggacaagacgaggtggcagcagtaaccctgccacttaatccccaggaggtaattcagggcatgtgtaaagccgtgccttttgtgcaggtgttttcaaggcccggatgtagtgccattaggctaagaaaccacttatgttttggacattgctccagcctttacatacccggttccgacccaaccccactcgtgctttgcaacagctgcatgccagcccgtaaacgctgggcacccgtggtgctctggtgcctgaccggaagctctgctagccggcgtcgagtgaaaatctcaactatgttaatcgagggctgtcattgctctccaaaagcctag

SEQ ID NO: 10452 - DNA, 2505 bp, synthetic construct
  misc_feature 1..2505: note = source = /note="Description of Artificial Sequence: Synthetic coding sequence"
  source 1..2505: mol_type = other DNA
atgaagcacacactagccttgctggctccactgttgggcctgggtttaggtcttgcgctctctcagctagcagcgggagctacggactgtaagttcttagggcctgccgagcatctaacattcacacctgcggcacgggctagatggttggctcctagagtgagagctcccggattgctagattccctgtacgggaccgttaggcgatttctatctgtggttcagctgaaccctttcccttctgagctggtgaaggccttactgaatgagctcgcatcggtcaaggtgaacgaggtcgtgcggtacgaggccggatacgtggtgtgcgctgtgattgccggactttacctgctgctggtgccaactgccggactctgcttctgctgttgtaggtgccatagaaggtgcgggggacgcgtaaagaccgaacacaaggccctggcctgcgaacgcgcagctcttatggtgttcctgctactaacaacactcctcttgctgatcggtgtcgtctgcgcatttgtgacaaaccagagaacacatgaacaaatgggaccctccatcgaggccatgcctgagaccttgctctccctatgggggctcgtcagcgatgtcccccaggagcttcaggctgtggcccaacaattctcgctccctcaggaacaagtgtcggaggaactcgatggagtcggcgtgtccatcgggtccgccattcacactcagctgagatcatcggtgtaccctctgcttgccgctgttgggagcctgggacaggtgctgcaggtgtctgtccaccatctgcagacactcaacgctaccgtggtggaacttcaggccggtcagcaggacctggagcccgctatacgggagcaccgcgacaggctgttagaactcctgcaggaggccagatgccagggcgattgcgcaggcgcactgtcatgggctcgaaccctggaactgggagctgatttcagccaggttccctccgtagaccacgttctgcaccagctgaagggtgtgcccgaagccaacttcagtagcatggtgcaagaagagaacagcacctttaatgcccttcctgcgttagcagctatgcagacaagcagtgtcgtccaggaactgaagaaggctgttgctcagcagccggagggcgtacgaaccctggccgaagggtttcctgggctagaggctgcttctcggtgggctcaagccttgcaggaggtggaggagtcaagtcgcccatatcttcaggaggtgcaaaggtatgagacctataggtggattgtgggctgcgtcctgtgcagtgtcgttctgttcgttgtcttatgtaaccttctcggcctcaacctggggatctggggtctcagtgccagggacgatcctagccaccctgaggccaagggcgaagcaggagccaggttcttaatggcaggggtggggctgtcatttcttttcgcagcccctttgattctgctggtctttgctaccttcctggtgggcggaaacgtccagacactggtttgccaatcttgggaaaatggcgaactgtttgagttcgccgacacaccagggaatctccccccatccatgaacttaagccagctcctgggactccggaagaatatcagtatccatcaggcttatcaacagtgcaaggaaggggcagcgctttggactgtcctgcagttaaacgattcttatgatctggaggagcacttggatatcaaccaatacaccaacaagctcaggcaggagctccagtcactgaaggttgacacacaaagtttggatctacttagtagtgcggcacgcagagatctggaggcattgcagagcagtgggctgcagaggatccactaccctgattttctggttcagatccaaagacccgtagtgaagacaagcatggagcagctggcccaggaattacaaggcctggcccaggcccaggacaatagcgtcctggggcaaaggcttcaagaagaagcacagggacttcgcaatttgcatcaggagaaggtagtgccccagcaatctcttgtggccaaactcaacctttccgttcgcgctcttgagagcagtgccccaaacctgcagctggagacatcagacgtccttgccaacgtaacatacctgaagggcgaactgcccgcatgggctgctaggattctgcggaatgtgagcgagtgttttctcgctcgcgagatgggctatttctcccagtatgtcgcatgggtcagggaggaagtcacccagaggatcgccacctgtcagccactatccggggctctggataactcacgtgtgatactgtgtgacatgatggctgacccctggaatgccttctggttctgcctggcctggtgtaccttttttctcataccatccattatattcgctgtgaagacatctaagtatttcagacctattcgcaaacgcttaagctctacctcatccgaggaaacacagctgttccatatccccagggtaaccagtttaaaattatag

SEQ ID NO: 10453 - DNA, 2505 bp, synthetic construct
  misc_feature 1..2505: note = source = /note="Description of Artificial Sequence: Synthetic coding sequence"
  source 1..2505: mol_type = other DNA
atgaagcacacactggccttactcgctcccttactgggcttaggcctggggttggccctgtctcaactagcagcgggagcaacagattgcaaatttctggggccagctgagcacctaaccttcaccccggctgccagggcccgatggctggcccctagagtgagggctccaggactgctggattcgctgtacgggaccgtgcgcagatttctctcggtggtgcagcttaatcccttcccctccgagctggtgaaagctctgctgaatgagctcgccagcgtgaaggtgaacgaggtagtaagatacgaagccggatatgtggtgtgtgctgttattgctggcctgtacctcctcctggttcccaccgcaggattgtgtttctgctgctgcaggtgtcacagaagatgcggtgggagggtcaaaactgagcacaaagccctcgcttgtgagcgggcagcactgatggtgtttctcctcctgactacattgctgctcctcattggcgtcgtgtgtgcttttgtcactaatcagagaacgcacgagcagatgggaccgtccatagaagctatgcccgaaacattgttatccctttgggggctcgtatcagatgtgccacaagagcttcaagccgtggcccaacagttctctctgccccaggagcaagtaagcgaagaactagatggggtgggcgtgtccattggtagcgctattcatacacagctgcggtcttccgtctaccccctactcgccgcagtggggagtctggggcaggttctacaagtctccgtacatcacctgcagaccttaaacgccaccgtcgtggagctgcaggccggtcaacaggatctggaaccggctatcagagagcatagggatcgattactggagctcctgcaggaggccaggtgtcaaggggattgtgcgggagctttgagctgggccaggaccctggaactgggtgccgatttcagccaagttccctctgttgaccatgtgctgcaccagctgaagggggtgcccgaagctaacttctccagcatggtccaagaggaaaattctacctttaatgcgctcccagccttggcagccatgcagacatcgtctgtggtacaagagctgaaaaaggccgtggcccaacagccagagggtgtgcggacactcgcggagggcttccctggtcttgaggccgcaagccggtgggcccaggcactccaggaggtcgaggagagtagccggccatatctgcaggaggttcagaggtatgaaacatacaggtggattgttgggtgtgtgttatgttcagtagtcctctttgtggtgctctgcaatttgctggggctcaatctgggcatttgggggctgtccgcaagagatgatccttctcacccagaagcaaagggggaggccggtgctcgcttcctgatggccggagtcgggctctccttcctcttcgcagctccgcttatactcctggtctttgccacctttctcgtgggcggtaatgtgcagacgctggtgtgccagagctgggaaaatggggagctctttgaattcgcggatactcctggaaacttacccccttcaatgaacctgtcacagctcctgggacttcgcaaaaatatcagcatccatcaggcctaccagcagtgtaaagaaggcgcagcgttatggaccgtgcttcagcttaatgatagttacgatctggaggagcaccttgacataaaccaatacactaacaagctgcggcaggaactacagagtttgaaggttgatactcagagcctggatctcctgagctctgccgctcgccgagacctggaggcactgcaaagctcagggctgcagcgcatccactatcccgacttcctggtacagatccagcgaccagtcgtgaaaaccagtatggaacagctggcacaggagttgcagggcctggctcaagcccaggataactctgtacttggccagagactgcaagaagaagcccagggcctaagaaatttgcatcaggagaaagtggtgcctcagcagtccctggtagcaaaacttaatctatccgtccgggctctagagtccagcgccccaaaccttcaattggagactagcgatgtcctcgcaaacgtcacctatcttaagggagagcttcctgcttgggcagctagaatcctgaggaatgtctccgaatgtttcctggcccgagaaatgggttacttctctcagtatgtggcctgggtcagggaggaagtgacccagcgcatcgctacttgccaaccattgtccggggctctggacaactcacgggtcatcctgtgcgatatgatggccgatccttggaacgcgttctggttttgcctagcttggtgcacgtttttcctgatcccttccatcatctttgccgtaaaaactagtaagtacttcagacccatcaggaagagactgtcttcaacctccagtgaagaaacccagctgttccacatcccgagggtaacaagtctcaaattgtag

SEQ ID NO: 10454 - DNA, 216 bp, synthetic construct
  misc_feature 1..216: note = source = /note="Description of Artificial Sequence: Synthetic coding sequence"
  source 1..216: mol_type = other DNA
atgacccagctgttgctgttcctggtagccctgctggtgcttggccacgtcccttcgggaaggagcgaatttaagcggtgctggaagggccaaggcgcatgccagacgtactgtaccagacaggagacttatatgcacctgtgtcctgacgccagtctatgttgtctgagctatgctctcaagccccctcccgtgcctaagcatgaatatgagtag

SEQ ID NO: 10455 - DNA, 1377 bp, synthetic construct
  misc_feature 1..1377: note = source = /note="Description of Artificial Sequence: Synthetic coding sequence"
  source 1..1377: mol_type = other DNA
atggaggcaaccggcaccgatgaggtcgacaagctcaaaaccaaatttatcagtgcctggaacaatatgaagtattcttgggtgcttaagaccaagacttacttttcgagaaattccccggtcctgctgctgggcaagtgttatcattttaagtacgaggatgaggataagactctgccagcagagagtggctgcaccatcgaggatcatgtgatcgcaggcaacgtggaagaatttaggaaggatttcatttctcgcatctggctcacctacagagaggagttcccacaaatagaaggttcagcgctgacgacggactgcggctgggggtgcactctcaggactggccagatgctgttggcccaagggctcatactccatttcttaggacgtgcttggacctggcccgatgccctgaacatcgagaacagtgactccgagtcctggacttcacacactgttaagaagtttaccgcctccttcgaggcctcgctttcgggagaaagggaattcaagacaccaaccattagccttaaagaaacgattggaaaatatagcgatgatcacgagatgcgcaacgaggtctaccacagaaagatcatttcatggttcggagacagccctcttgctttattcgggctccatcagcttatcgagtatggcaaaaagtctggcaaaaaagccggagactggtatgggccagctgtggtggcgcacatcttaaggaaagccgtggaggaggctaggcatcccgacctgcaggggatcacaatctacgtggctcaggattgcacagtgtacaacagtgacgtaattgacaagcagtctgcctctatgacctccgacaatgccgatgataaggcggtcatcatactagtgcctgtccggctggggggagagaggacaaacaccgattatctggaattcgttaagggaattttgagcctcgaatactgtgtggggatcatcggcggaaaacccaagcagagctactacttcgcgggattccaagacgactcgctgatctatatggatcctcactactgtcaaagttttgtggatgtgagtattaaagatttccccctcgagactttccactgtcctagcccaaaaaagatgtcgttcaggaagatggatccgtcatgcacaattgggttttactgtagaaatgtccaagatttcaaaagggcgtcagaggaaattactaaaatgctaaaattctcatccaaagagaagtatcccttgtttacatttgtcaacggccactcgcgggattatgatttcacgtccactactaccaatgaggaagatctgttttctgaggacgaaaagaaacagctgaagagattctcgaccgaagagttcgtcctgctgtag

SEQ ID NO: 10456 - DNA, 342 bp, synthetic construct
  misc_feature 1..342: note = source = /note="Description of Artificial Sequence: Synthetic coding sequence"
  source 1..342: mol_type = other DNA
atgagacagagactgttgcctagtgtgacatctctgttgctcgtggcacttctgttccctggatcgtcccaggcacgacacgttaaccatagtgccacagaagcactgggcgagctgcgcgagagagcaccaggacagggcaccaatgggttccagctgctacgacatgccgttaaacgcgacctgctgccccctagaacgcctccatatcaggaacccgcatccgatttgaaggtggtcgattgtcgcaggtccgaaggtttctgccaggaatactgtaattatatggagacgcaggtgggctactgttcaaaaaaaaaagatgcatgttgcttacactag

SEQ ID NO: 10457 - DNA, 258 bp, synthetic construct
  misc_feature 1..258: note = source = /note="Description of Artificial Sequence: Synthetic coding sequence"
  source 1..258: mol_type = other DNA
atgaaaaaggttttgttgctgattaccgccattttagcagtagctgtgggatttcccgtatcacaggatcaagaacgagaaaaacggtcaatatccgacagcgacgaattggcctcaggattcttcgtctttccatacccatacccctttcgacctctccctccgataccttttccgaggttcccttggttcagacggaattttcccatccccattcccgaaagcgcaccaacaactcctttgccttcagaaaagtag

SEQ ID NO: 10458 - DNA, 264 bp, synthetic construct
  misc_feature 1..264: note = source = /note="Description of Artificial Sequence: Synthetic coding sequence"
  source 1..264: mol_type = other DNA
atggccgtttcagtgctgcggttaaccgttgtgctggggctccttgtgttgttcctcacatgttatgcagatgacaagcccgataagcccgatgacaagccagatgattccggcaaggatccgaagcccgacttcccgaaattcctttccctccttggaactgagatcattgaaaatgcagtggagttcattttgagatcaatgagccgctcaacgggtttcatggagttcgacgataatgaaggtaagcactctagtaaatag

SEQ ID NO: 10459 - DNA, 945 bp, synthetic construct
  misc_feature 1..945: note = source = /note="Description of Artificial Sequence: Synthetic coding sequence"
  source 1..945: mol_type = other DNA
atgtcgtcagaagctgagacacagcagccacctgccgctcccccagctgcaccagccctatcagcagctgatactaagccaggcacaaccggcgcacagggtgccgtcgcgagggcccacataggaggggcagggggagacaagaaggtgattgcaaccaaggttctcggtacagtaaagtggtttaacgtcagaaacggctacggcttcatcaaccggaacgacactaaggaagacgtgttcgtgcatcaaacagccattaaaaagaacaatccacggaagtacctcagatccgtcggggacggagagactgtggaatttgacgttgtcgaaggagaaaaaggagccgaagctgccaatgtgacgggtccgggtggagtgcccgtgcagggcagcaagtatgccgctgacaggaatcactacagacgctacccccgtcgtcgcggtcctccaagaaactaccagcaaaattaccagaactccgagtctggtgagaagaacgaggggagtgaaagcgcacccgagcggccaaataatgctgggccacaagccaaagtcccaacactgttacacgcggagtacggtaggagacctcagtacagcaatccccctgtgcagggcgaggtgatggaaggagctgacaaccaaggtgccggagaacaaggccgtccagtgcgacagtgtattggggacattgatcatgattcagcgggagctctgctcgctcggcagccaagggaagatggtaatgaagaggacaaagagaatcagggcgatgagacacagggccagcagcctccccagcggagatacaggagaaacttcaactaccgtcgtcggagacctgagaatcccaaaccccaagatggaaaggaaacaaaagctgctgatcctcccgcagagaacagctccgctcccgaggcagagcagggcggagccgaatag

SEQ ID NO: 10460 - DNA, 636 bp, synthetic construct
  misc_feature 1..636: note = source = /note="Description of Artificial Sequence: Synthetic coding sequence"
  source 1..636: mol_type = other DNA
atggtcttcctgaagttcttctgcatgtcattcttttgccacctttgtcagggctatttcgatggcccactatacccagagatgtctaacgggactctgcaccactatttcgtgccagacggagattacgaggaaaatgatgatccagagaaatgccagctgctgtttcgggtctcggatcatagaagatgtagtcagggggagggctcacaggtggggtctctgctgagcctcacactgcgagaggaattcacagtgttaggaaggcaggtggaggatgcaggcagagtgctggaaggaatctcgaagtccatcagttatgacttagatggcgaggagtcctacggcaaatatttgagaagagaaagccaccagatcggcgatgcctattccaattccgataagtcgctgaccgagctggaatcaaagtttaaacagggccaagagcaggactcaagacaggagtcaagactcaatgaagatttcctgggcatgctcgtccataccagaagcctactgaaggagacccttgatatctcagttggtctcagggataagtacgagctcctggccctgactattcggtcccatggaactcgcttgggccgtttgaagaacgactatctgaaggtatag

SEQ ID NO: 10461 - DNA, 1566 bp, synthetic construct
  misc_feature 1..1566: note = source = /note="Description of Artificial Sequence: Synthetic coding sequence"
  source 1..1566: mol_type = other DNA
atgctgtgtgcactgctactgctcccgtccctcctcggagctacaagagcctcgcctacaagcggcccacaggaatgcgctaaggggtcaaccgtttggtgccaggacttgcagacagccgcacggtgcggggctgtcggatactgccagggtgccgtgtggaacaaacccacagctaagtctttgccttgcgatgtgtgccaagatattgccgcagcggcagggaacgggctgaatcctgacgccactgagtctgatatccttgccctggtcatgaagacgtgcgagtggctaccttcacaggagtcaagtgccggatgcaaatggatggttgacgcgcatagttccgcaattctgtccatgctgcgaggtgcccctgattccgcccctgcgcaagtttgcacagccctgagcttgtgcgaacctctgcagaggcacctagccacgctgaggccactgtctaaggaagacacttttgaggccgtggccccattcatggccaacgggccactaacattccaccctaggcaggcacccgagggggctttgtgtcaagattgtgtgcgccaggtcagccgccttcaggaggccgtgcgcagcaaccttaccttggctgaccttaatatccaagaacaatgcgagagcttgggtcccggtctggcggtgctatgtaaaaattacttgtttcaattttttgtgcctgccgaccaggccctgagactcctgccaccccaggaattgtgcagaaaggggggtttctgcgaggagctaggtgcccctgccagattaacacaggtcgtcgccatggatggagtcccctcactggagctcgggctgcccagaaaacagtcagagatgcaaatgaaagccggagtcacctgtgaggtctgcatgaacgtggtacagaaactcgatcattggttgatgagtaatagctccgagcttatgattacccacgccctagaaagagtttgtagtgtaatgcctgcatccattacgaaggagtgtattattctggtcgatacctatagcccttccttggtacagctcgtggctaaaatcacgccagagaaggtgtgcaagttcatcaggctctgcgggaacagacgtcgggctcgtgccgtccacgacgcctatgctatcgtcccctcgccagaatgggacgctgaaaatcagggaagcttttgcaatgggtgtaagcggctgttgaccgtctcatctcataacctggagagcaaatctactaaacgagacattctggtggcttttaaaggtggatgtagcattcttccactcccgtacatgattcagtgtaagcatttcgtcacacaatatgagcctgtcctgatagaaagcctgaaggacatgatggaccccgtagccgtgtgtaagaaagtgggagcctgccatggcccaaggactccactgttgggaaccgatcagtgcgcccttggcccatcattctggtgtaggtcacaggaggctgctaaactctgcaacgccgtgcagcactgccaaaagcatgtgtggaaagaaatgcatctgcacgctggggaacacgcgtag

SEQ ID NO: 10462 - DNA, 2127 bp, synthetic construct
  misc_feature 1..2127: note = source = /note="Description of Artificial Sequence: Synthetic coding sequence"
  source 1..2127: mol_type = other DNA
atggccgcagctgcagttgccgctgctgccgctgcagccgcagcagcatctctccaggtgctcgaaatggagagcatggagacggccgcagctggcagtgctgggcttgccgcagaggtgcgaggatcaggaacagtggattttggacctggcccaggcatcagcgcaatggaagcttccggcggagaccccggtccagaggctgaggactttgagtgctcttcccactgttctgagctgtcttggaggcagaatgagcagaggagacagggcctcttttgtgacattacgctctgtttcggcggtgccggaggacgtgagtttcgggcacatcggtccgtcttggctgccgctacagaatatttcaccccactcttgagtggccagtttagcgaaagtagatcagggagagtcgaaatgcgcaaatggagttctgagcccggaccggagccggatactgtggaggcagtcatagagtacatgtacactggtaggattagagtcagcacagggagtgtccacgaagtgctcgaactggctgatagatttctgttaatcaggctgaaagaattctgcggagaattcttaaaaaagaagctgcacctgtctaattgtgtggcaattcatagtctcgcgcacatgtacaccctcagtcagctggctctgaaggccgctgacatgattcggagaaatttccacaaggttatccaggacgaggagttttacacactacctttccatttgatcagagattggctctcagacctagagattacagtcgactctgaagaggtgctctttgaaactgtgttaaaatgggtacagcgcaatgcggaggagcgcgaaaggtattttgaggaattgttcaagctactcagactcagccagatgaagccaacctacttgacccgtcatgtgaaacccgagcgcctagtggccaacaacgaggtgtgcgtgaagctggtggctgacgccgtggagcgtcacgccttgcgggctgagaacatacagtcaggaacctgtcaacaccccactagccacgttagcctgctgcctcgatacggccagaacatggatgtgatcatggttatcgggggtgtttccgagggcggtgattacctgagtgagtgcgtggggtattttgtagacgaggatagatgggtaaacctgccccacattcacaatcatctggatggccatgccgttgccgtgactgaatcttatgtgtacgtggcgggaagtatggagcccggatttgcaaagacagtggagagatacaacccaaacctgaacacatgggaacatgtatgttcgctcatgaccagaaaacattcttttggacttacagaagttaagggcaaactgtatagtatcggtggacatggaaatttttctccaggcttcaaagatgtgacagtatataacccagagctcgacaagtggcataatcttgagtccgccccaaaaattttaagagatgtcaaggccctagccattgaagacaggttcgtgtacatcgccgctaggactccagtggaccgggacacggaggacgggttaaaggcagttattacatgttacgatactgaaactcgccagtggcaggacgtggaaagtctcccgctgattgacaactattgcttttttcaaatgagcgtcgtaaactccaatttttaccaaaccgctagttgctgtccaaagtcatactgcctggaaaacgaggaggccgttagaaagatagcctcacaggtgtctgacgagatactggagtctttacctccggaagttctttccatcgaaggtgctgctatttgctactataaggatgatgtttttattatcggaggatggaagaactctgatgacattgataagcaatataggaaagaagcgtaccggtattgcgcagaaagaaaaagatggatgctgcttccgccaatgcctcagccacggtgtcgtgctaccgcatgccatgtgagaatcccatatcgctacttacatggtacccaacgctacccaatgcctcagaacctgatgtggcagaaggaccgcataaggcagatgcaagagattcaccgccacgccctgaatatgcgcagggttccctcgagccagatcgagtgttag

SEQ ID NO: 10463 - DNA, 1578 bp, synthetic construct
  misc_feature 1..1578: note = source = /note="Description of Artificial Sequence: Synthetic coding sequence"
  source 1..1578: mol_type = other DNA
atgtccggcaattgggtgcaccctggccagatcctgatatgggccatttgggtgcttgcagcaccaacaaaaggcccttctgcagagggaccacagaggaatactcgactagggtggatacaggggaaacaggtcacggtgcttgggagtccagtccctgtaaacgtgttcttaggagtcccctttgccgcacctccccttggcagcctcaggtttactaatccacagcctgccagcccatgggataacctgagagaagcaacatcctacccaaatttatgcctacaaaatagcgagtggttgctgctcgaccagcatatgctcaaggtccattatccaaaatttggcgtgtccgaggactgcctgtacctcaacatttacgcgccagcccacgccgacaccgggtcgaaactgccagtgctggtatggtttcccggtggcgcattcaagactgggtctgcttccatatttgacgggtctgcactggctgcctacgaggacgtgctggtggttgttgtccaatatagactgggcatcttcggattcttcacgacatgggaccagcacgctccagggaattgggctttcaaggaccaggtggccgctctgtcatgggtccagaagaatatcgagttcttcgggggagaccctagctcggtgaccattttcggcgaaagtgctggcgctatcagcgtgagtagcctgatactatccccaatggctaagggtctttttcacaaggccatcatggagagcggcgtggccattattccatacctcgaagcccatgactacgagaagtcagaagacctgcaagtcgttgctcacttttgcggaaataacgcttcagactcggaggccctgctaaggtgcttgaggacgaaaccatctaaagaactgcttactctcagtcaaaaaacaaagagctttactagggtggtcgacggggcatttttccctaacgagcctctcgaccttctctctcaaaaggctttcaaggccataccaagtatcatcggtgtgaacaatcacgagtgcggctttctactccctatgaaagaggcaccggagatcttgtccggctccaacaaatctctggccttgcacttaatccaaaatatccttcacatccccccacagtatctgcacctggtggctaatgagtactttcacgataaacactcccttacagaaattagagattccctgttggacctgcttggagatgtcttttttgtcgtgccagccctcatcacagcacgatatcatagagaaggcgcaacagaagaagaaaaactgctgtccaggaagatgatgaagtactgggctaccttcgccagaaccgggaatcccaacggaaacgatctgtcactctggccagcctataacctgacggagcagtatctgcagctcgatttaaatatgagtctgggacagcgattgaaggagcccagggtggatttctggacctccaccatcccgttaattctaagcgcttcggatatgctacatagtccactgtctagcctgacatttttatcactgttacagccctttttcttcttctgtgcgccatag

SEQ ID NO: 10464 - DNA, 900 bp, synthetic construct
  misc_feature 1..900: note = source = /note="Description of Artificial Sequence: Synthetic coding sequence"
  source 1..900: mol_type = other DNA
atggtgcggtgcctcggccctgccctgctgttgctcctactgctgggtagcgccagtagtgtgggtgggaaccgctgcgtggatgccgctgaggcttgtacagcagacgccaggtgccagagactacggagcgaatacgtggcccagtgtctgggccgagcagctcaaggcggatgccccagggctcgttgccggcgtgctttacgccgtttctttgcgcgagggcctcccgcactgactcacgcccttttgttctgtccgtgcgctggcccagcatgcgcggaacgcaggcgacaaacatttgtgccgtcttgcgctttctccggcccaggacctgctcctccatcttgcctcgaaccgcttaacttttgcgaacgatcacgcgtttgtcgttgcgcgagagctgctgcaggaccttggcgcggatggggccgagggttaagccccgcacatcgccctcctgcggctcaggccagcccacccggactgagtggtctggtacatccaagcgcgcagaggcctcgccgactgcccgcagggcctggcaggcctcttcccgcaagactgcggggaccccgaggggtgcccgcagggaccgccgtcacgccaaattatgtggataatgtgtcagccagagtcgctccatggtgcgattgcggggctagtggcaacagacgggaagactgcgaagcgtttcgtggcctcttcacacgaaatcggtgtttagacggggctatacaagcgtttgcctcgggctggcctcccgtccttcttgaccagctgaacccacaaggcgaccctgagcatagcctgctgcaagttagcagcactggtcgtgccctcgaaaggaggtcactgctgagcatcctgcctgttctggccttgcctgcactgttgtag

SEQ ID NO: 10465 - DNA, 270 bp, synthetic construct
  misc_feature 1..270: note = source = /note="Description of Artificial Sequence: Synthetic coding sequence"
  source 1..270: mol_type = other DNA
atgcaggcatgcatggtccccggtctggctctttgtctgttgttggggccactggcgggtgctaagcccgtgcaagaggagggcgatccatacgcagagctgcctgctatgccttattggccctttagcaccagcgatttctggaactatgtacagcacttccaagccctcggtgcctacccccagatcgaagacatggcgagaaccttctttgcccacttccccctgggaagcacgctgggattccacgttccgtatcaggaagactag

SEQ ID NO: 10466 - DNA, 663 bp, synthetic construct
  misc_feature 1..663: note = source = /note="Description of Artificial Sequence: Synthetic coding sequence"
  source 1..663: mol_type = other DNA
atggcgagcgagcggctcccaaatagacccgcatgtctgctggtcgcctctggggcagctgaaggcgtgtccgcacagtcttttttgcactgttttactatggcatctacagcattcaaccttcaggtggccacccccggtggtaaggcaatggaatttgtagacgtgactgaatcgaatgcacggtgggtgcaggacttcagactgaaggcctacgccagccccgctaaactggaatcaatcgacggggcacggtatcacgcgctattaatcccatcctgtccgggagccttaaccgatctggctagtagcggctcactggcccgaattctgcagcactttcactcagagagtaaacctatttgcgccgtgggacacggggtagctgctttatgttgcgcgaccaacgaggataggtcctgggttttcgactcctacagcctcacagggccttcagtgtgtgaactggtgcgggcacctggcttcgcccgactgcccttggtcgttgaggatttcgtgaaagacagtggggcttgcttttctgccagcgagcccgacgctgtccatgtagtgctggaccgacatctcgtcacaggccagaatgcgtcttcaactgttccagccgtgcagaatctgcttttcctctgcggtagccgtaagtag

SEQ ID NO: 10467 - DNA, 1158 bp, synthetic construct
  misc_feature 1..1158: note = source = /note="Description of Artificial Sequence: Synthetic coding sequence"
  source 1..1158: mol_type = other DNA
atgtgggggttccgccttctgaggtctcctccactcctcttactgctgccacaactggggatcggtaacgcctctagttgcagccaggctcgtaccatgaatcccggtggcagtggtggagctcggtgctctctctctgccgaagtaaggcggcgtcaatgcctccaattgagtaccgtcccgggagccgatccacagcgttccaacgagttgctgctgctagcggcagccggagaagggttagagcgacaggatctgccaggggatcctgctaaggaagaaccacagccaccaccccagcaccatgtcctgtacttcccaggagacgttcagaattaccatgagatcatgactaggcatcctgagaactaccagtgggaaaactggtctctggaaaatgtcgctacgattctggcccatcgctttcccaatagctacatctgggtgattaagtgcagccgcatgcatctacataagtttagttgctatgacaatttcgttaaatccaacatgttcggggcacccgaacacaacacagattttggagcctttaagcacctgtacatgttactggtgaatgcgtttaatctgtcccagaactccctctcgaaaaaatcactgaatgtgtggaacaaagactctatagcttcaaactgtagatcatcaccctcccatacaacaaatgggtgccaaggtgagaaggtgcggacctgtgaaaagtctgacgagtccgctatgtccttttatccacccagcttaaatgacgcatcctttacgttaattggattctccaaggggtgcgtggtgctgaaccagttgttgtttgagctaaaggaagccaaaaaggataagaacattgatgcctttatcaagagcatccgcaccatgtactggctcgatggcggtcattccggcggttccaacacctgggttacttacccagaggtccttaaagaattcgcccagactggcataatcgtacacacacacgtgacaccataccaggtccgggaccctatgcggagctggatcgggaaagaacataagaaattcgtgcagatactgggagacctcggtatgcaagtgacctcacagatccactttactaaggaggctccttccatcgagaaccacttccgggtgcacgaggtcttctag

SEQ ID NO: 10468 - DNA, 936 bp, synthetic construct
  misc_feature 1..936: note = source = /note="Description of Artificial Sequence: Synthetic coding sequence"
  source 1..936: mol_type = other DNA
atgaggggggctgcccgagccgcatggggccgagcaggacagccatggccacgccctccagctcccggaccaccccctccacctcttcctcttcttctactgctgctggctggcctgctgggtggtgcgggagcccaatactctagtgatcgctgtagttggaaaggatctggtctcacacacgaagcccataggaaggaagtcgaacaagtttatttgcgttgtgcagccggagctgtggagtggatgtacccaacaggagctctgatcgtgaacttgcgcccaaacaccttttctcccgcacggcacctgaccgtatgtatccggtcattcacagactcttccggggcaaacatttacttggaaaagactggggagctccgcctactcgtccccgacggagatggtcgccctggacgcgtgcagtgctttggtctcgaacaggggggtctgttcgttgaggccacaccacagcaggatattgggcgtagaaccaccggctttcagtacgaactggttaggcgccaccgggcaagcgatctgcacgaactctcagccccttgccgaccttgctctgatactgaagtgctactggctgtgtgcacatccgatttcgcggtgcggggatcaattcagcaggtcacccatgagccagagagacaagactcagcaattcatttaagagtctcacgactttataggcaaaagtcaagagtgtttgagcctgtacctgagggggacggccattggcaagggcgtgtccgaaccctactggagtgtggggtgcgccctggacatggggactttctgtttacggggcatatgcacttcggagaggctcgactgggatgtgctcccagattcaaagactttcagcgtatgtaccgggacgcccaagagcggggattaaacccttgcgaagtgggcactgactag

SEQ ID NO: 10469 - DNA, 1221 bp, synthetic construct
  misc_feature 1..1221: note = source = /note="Description of Artificial Sequence: Synthetic coding sequence"
  source 1..1221: mol_type = other DNA
atggggccaagtactcccctgcttattttgttcctcctgtcttggagcggacccctgcaggggcagcaacaccacctggtggagtatatggaaagacgcctagctgccctggaagagaggttggcccagtgtcaggatcaatcgagtcggcacgccgctgaactcagggatttcaagaataagatgctgccgctgcttgaggtcgcagaaaaggagcgtgaggctttacggacggaggctgacaccattagtggacgtgtggaccgcttagagcgggaggttgactacctggaaactcagaaccctgcccttccctgcgtggagttcgatgagaaggtgaccggaggccctggcacaaaaggcaagggcaggagaaacgaaaagtacgatatggtaactgactgtggctatacaatttcccaggtgcgatctatgaaaattttaaagcgcttcggcggtccggcagggctgtggacaaaggacccccttggccagaccgagaagatatatgtgctagacgggacacaaaacgacacggcctttgtttttcctagactgcgcgactttaccctggctatggcagctcggaaggcatccagggtgagagtacctttcccttgggtcgggacaggacagctggtgtacggtggctttctgtactttgccaggaggccacccggtcgtcccggtggcggtggtgaaatggaaaacaccctgcaactcatcaagttccaccttgcgaatcgtaccgtagtggacagctccgtattcccagctgagggcctgattcccccatatgggctcactgccgacacctatattgacttggctgcggacgaggaaggactctgggcggtctatgccacgcgcgaagatgataggcatctatgcctggccaagctggacccccagactcttgacactgaacagcagtgggacactccatgccctcgtgaaaacgccgaggctgcttttgtgatttgcggaaccttgtacgtggtgtacaatacccgccctgcttcacgggctagaatccagtgtagcttcgatgcctccggtaccttgaccccggagagagccgcactgccatattttccacgccgatatggagcccatgcatcattgagatacaaccccagggaacggcaactctacgcctgggatgacggctaccagattgtctataaactcgaaatgcgcaaaaaggaagaggaagtgtag

SEQ ID NO: 10470 - DNA, 900 bp, synthetic construct
  misc_feature 1..900: note = source = /note="Description of Artificial Sequence: Synthetic coding sequence"
  source 1..900: mol_type = other DNA
atgggtgggccaagagctcttcttgccgcattgtgggcactggaggctgctggaaccgcggcactgcgcataggagctttcaacattcagagctttggagacagcaaggtgtcagatccagcatgtggctctatcatcgcaaagatcctggccggatacgacctcgcgctggtccaggaggtgcgcgacccagacttatctgctgtttcagctctgatggagcagatcaacagtgtgtctgaacatgagtattctttcgtttccagccagcctctaggtcgagaccagtacaaggagatgtatctgtttgtataccgcaaagatgcagtgagtgtggttgacacttatctctacccagatcctgaagacgtgttttctcgggagccttttgtggtgaagttctccgctccgggaacaggtgagcgggcaccaccacttccctccaggagggcattgacgccgcctccactgcctgcagctgctcagaatctggtattaatacccttacacgcagccccacaccaggctgtcgctgaaattgatgctctctatgacgtgtatctcgatgtgattgacaagtgggggacagatgatatgctgttccttggcgatttcaatgctgattgttcatatgttcgggcacaggactgggcggcaatcagactgagatcaagtgaggtctttaagtggctcattccagactctgctgacactactgtcggaaactccgattgcgcatacgatcgcatcgttgcttgcggagctaggctcagacggtccctgaaaccacagagtgccactgtgcacgatttccaggaagagttcgggctggatcagacgcaggcacttgccatctcagaccatttcccggttgaggtgaccctgaaatttcacaggtag

SEQ ID NO: 10471 - DNA, 1617 bp, synthetic construct
  misc_feature 1..1617: note = source = /note="Description of Artificial Sequence: Synthetic coding sequence"
  source 1..1617: mol_type = other DNA
atggggtgtctgtggggtcttgcacttccattgtttttcttttgttgggaggtgggtgtgagcggatcttctgctggcccttccacacgccgagccgataccgccatgactaccgatgacacagaagtgccggcaatgacactggccccaggtcatgccgctctggagacccagaccttatccgccgaaacctcctctcgggcttcaaccccggcaggccctatccccgaggccgagacacggggagccaagcgaatcagccccgcaagggagaccaggtcgttcactaagaccagtccgaatttcatggtgttaatcgctacatccgtggagactagcgcagcctccggctctcccgaaggtgctggaatgaccaccgtgcagacgattactggatccgacccacgggaagccatctttgatacgctgtgcactgatgattcatctgaagaagctaaaactcttaccatggacatactcacactagcacatacctctacagaggccaaaggcctttccagcgagagctccgcttctagtgactccccccacccagtaatcactccaagccgagcttccgaaagctctgcaagctctgacggcccacaccctgttatcactccaagtagggcaagcgagtccagcgccagttcagacggccctcaccccgtgattactccatcttggtccccaggatcagacgttactctacttgctgaggcactggttacagtcacaaacatagaggttattaactgctccatcactgagatagagactactacctctagcatccccggagcatcagacaccgatttgatccctactgaaggcgtcaaggcctcctctaccagcgatccgcctgctctccccgattcaactgaggccaagcctcatatcaccgaagtgacagcttcagcagaaacactgagcacagctggaactactgaatccgcagctccagatgctacagttgggacccccctgcccacgaactcagctactgaacgtgaagtgacagctcccggtgctactaccctttctggggcacttgtcacagtttcccgcaacccgctcgaggagaccagtgccctgtctgtggagactcccagttacgtgaaggtgtccggcgcagccccagtctctatcgaagctggatccgcagttggaaagaccacctccttcgcgggttcgagcgcttctagctacagccccagcgaggcagctttgaagaattttacgcctagcgagacacccaccatggatatcgccactaaaggccctttcccaaccagcagggatccgttaccttctgtgcctccgacaaccactaactcgtcccggggtaccaactctactctcgccaaaattacaacctctgccaaaaccacaatgaagcctccgaccgctactcctacaacagcccgaacaagaccaactaccgacgtgagcgcaggagagaacgggggatttcttcttctgcgcctgtcagtagcatcacccgaggacctcactgatcctcgggttgcagaaaggctaatgcagcagttgcaccgcgagcttcatgcccatgcaccacacttccaggtgtctctgctccgcgtccgcagggggtag

SEQ ID NO: 10472 - DNA, 975 bp, synthetic construct
  misc_feature 1..975: note = source = /note="Description of Artificial Sequence: Synthetic coding sequence"
  source 1..975: mol_type = other DNA
atgagttccgaagcggagactcaacaacccccagctgctccccctgctgccccagcgttgtccgccgctgacactaagccgggaaccaccgggtccggggctggctctggaggcccaggagggttgacatcagcagctccagccggaggagataagaaggtgatcgctacaaaagtattgggcacggtgaagtggttcaatgttagaaatggctatggatttattaacaggaacgatacgaaagaagatgtgttcgtccaccaaaccgccattaaaaaaaacaaccccaggaaatacctaagatcagtgggagatggtgagacggtggagttcgatgtggtcgaaggagaaaagggagccgaggctgctaacgttacagggcctggtggagttccggtgcagggtagtaagtacgcagccgatcggaaccactatcggaggtacccgcgaaggcggggacccccaaggaattaccagcagaattatcaaaacagtgaatccggcgaaaaaaacgaaggatccgaatccgctcccgaaggccaagcacagcagcggagaccttataggcggagacgcttcccaccttactacatgcgccgtccctacggccgacggcctcagtattctaatcccccagtccaaggagaggtaatggagggcgctgataaccaaggtgccggtgaacaagggagaccagttagacagaacatgtatcgaggatatcgaccaaggttcaggagaggcccaccgcgtcaacgacagcctcgcgaagatggtaacgaagaggataaggagaaccaaggcgacgaaacacaggggcagcagcctccacagagacgataccggcgaaacttcaactaccgcaggaggagacccgagaaccctaaacctcaagatggcaaagaaaccaaggcggctgatcccccagccgaaaatagcagcgcccctgaagctgagcagggtggggctgaatag

SEQ ID NO: 10473 - DNA, 210 bp, synthetic construct
  misc_feature 1..210: note = source = /note="Description of Artificial Sequence: Synthetic coding sequence"
  source 1..210: mol_type = other DNA
atgaggatcttttactatttacattttctttgttacgtgacctttattttaccggcaacctgcacactggtcaacgcggataggtgtactaaaagatacggaaggtgtaaaagggactgcttggagtctgaaaagcaaatcgacatttgttctctacctcgtaagatttgctgtactgagaagctgtatgaggaggatgacatgttctag

SEQ ID NO: 10474 - DNA, 342 bp, synthetic construct
  misc_feature 1..342: note = source = /note="Description of Artificial Sequence: Synthetic coding sequence"
  source 1..342: mol_type = other DNA
atgaagctcttgaccaccatttgcaggctgaagctggaaaagatgtatagcaaaacgaacacatcatctacgatcttcgaaaaggctaggcatgggaccgagaagatttccaccgcccgatccgaggggcaccatattaccttcagccgttggaaatcctgcaccgcgatcgggggtcgctgcaaaaatcaatgtgatgactcagagttccgtattagctactgcgcgcgtcccacgacacactgctgtgtaaccgagtgtgatcctaccgacccaaacaattggatcccaaaagacagtgttggcacccaggaatggtaccctaaggacagcaggcactag

SEQ ID NO: 10475 - DNA, 3030 bp, synthetic construct
  misc_feature 1..3030: note = source = /note="Description of Artificial Sequence: Synthetic coding sequence"
  source 1..3030: mol_type = other DNA
atggatttaatccgcggagttttactccgtcttctgctcctggcgtccagcctagggcctggggctgtgagcctccgcgctgctatccgcaagccagggaaagtgggacccccattggacattaagctgggcgctctgaactgcactgcattctcgatacagtggaagatgcccaggcatccgggaagccccattctgggttacacggtcttctattcggaagtcggggctgacaaatctctgcaagagcagttacactctgtgcctttatccagagatatacccaccactgaggaagtgattggcgatctcaagccaggtaccgaataccgagtgagcatcgcagcctactcacaagccggtaaaggcagactttcttccccccgtcatgtaactaccctgagccaggactcatgcctgcccccagccgctcctcagcagccgcatgtcattgttgtttctgactctgaggtggcactttcctggaagccgggagcctctgaaggcagtgctcctatccagtactactcagttgagtttatccggccagacttcgacaaaaagtggacaagtatccacgagcgaatacagatggactctatggtaatcaagggattagaccctgacacaaactaccagtttgcagtcagagctatgaactctcatggaccctcacccaggagctggccctccgacattatccggaccctgtgccccgaggaggctggttctggacgctacgggccacgctatattactgacatgggcgcaggggaggatgacgaaggatttgaggacgacttagacctggatataagcttcgaggaggtgaagcctctccctgccacaaaaggcggtaataaaaagtttttggttgagtccaagaaaatgtccatctccaaccccaagaccatttcgcgtctgattccacccacctccgctagtctgccagtgaccaccgtggctcctcaaccaattccaatccaaagaaaaggcaagaacggtgtggccattatgtcccgcttatttgacatgccgtgcgatgaaacactgtgctcagccgatagcttctgtgtgaacgattacacatggggcggttctaggtgccagtgcacactcggaaaggggggagaatcatgcagtgaagacattgtgatacagtatccgcaattttttggccattcgtacgtgaccttcgagccactcaagaatagctaccaagcttttcagattacccttgaattccgcgcagaggccgaggacggattacttctgtactgcggagagaatgagcatgggcgtggtgattttatgtccttagccatcatcagaaggtcattacagtttcggttcaactgtgggaccggcgtggcaatcattgtcagtgaaaccaaaattaagctggggggatggcacactgtgatgttgtatagggacggtctgaacggactactgcagctcaataacggtacaccagtaacaggacagagtcagggtcagtatagtaaaatcacctttagaactcccttgtacctgggtggcgctccatccgcctattggctagtcagagctactggcaccaacaggggctttcagggctgtgtgcagtcactcgccgtgaacggacgaagaattgacatgaggccttggcctctcggcaaggccttgagcggggcagacgtgggagagtgctcttctggcatttgcgatgaggccagctgtattcatgggggtacatgcacagccatcaaagctgactcgtatatttgtctgtgtccgctcggattcaaggggagacactgtgaggatgcatttacgctgactatcccccagttcagagaatccttgcggagctatgccgctacaccgtggccactggaacctcagcactacctcagctttatggagttcgaaatcacatttcggccagacagtggggatggggtcctactttattcttatgacacaggctcgaaggattttctgagtataaacttggctggaggtcacgtcgaatttcggtttgactgtggttccggaacgggcgtgctgaggtcagaagaccctctgacacttggcaattggcacgaactccgagtatcacgtacagcgaagaatgggatccttcaggtggataagcagaagatagtggaaggtatggccgaaggtggctttacacagatcaagtgtaatactgatattttcatcgggggtgtgcccaattatgacgacgtaaagaagaacagcggtgtgctgaaaccattcagcggatctatccagaaaatcatcctgaatgatagaaccattcatgtcaagcacgatttcacctccggagtaaacgttgagaacgcagcccatccttgcgtgagagcgccatgcgctcacggcggatcttgtaggcccagaaaagagggctacgactgcgattgtcctttaggctttgagggtttacactgccagaaggcaattatcgaggccattgaaatcccgcaatttatcggcagatcttacctcacatacgataatcccgacattctcaaacgggtttccggcagccggagcaatgtttttatgcgttttaagaccaccgctaaggatggcttactgctgtggaggggggacagccccatgagaccaaacagtgactttatttcgctcgggctacgcgatggggcactagtgttttcctataaccttggctccggggtcgcaagcattatggttaatgggtcgtttaatgacggcaggtggcaccgggtcaaagctgttcgcgatgggcagtcaggtaaaataacagtggacgattatggggctagaactggaaaatcacctggcatgatgaggcaacttaatattaacggcgctctctatgtgggcggaatgaaggaaatcgccctgcacactaacaggcagtatatgcgagggctggttggatgcatcagccacttcaccttatccactgactatcatatcagtctggtcgaggacgccgtcgatggaaagaacatcaacacttgtggggcaaaatag

SEQ ID NO: 10476 - DNA, 1272 bp, synthetic construct
  misc_feature 1..1272: note = source = /note="Description of Artificial Sequence: Synthetic coding sequence"
  source 1..1272: mol_type = other DNA
atgtctgtgagaggaatcctgcggttgggcactcaggagtacccaagccctctggatcccgaagtgggcccttactgcgacaccccgaccatgcgaacgctgttcaatcttctgtggctcgccctggcgtgtagtcccgttcatacgacactctccaagtcagatgctaagaaggcggcaagtaagaccctgctggaaaagtcccagttcagcgacaagcctgtccaggatagggggttggtggttaccgacttaaaggctgagagtgtggtcttggaacacagatcatactgctcagccaaagctcgggaccgccacttcgctggcgacgtgcttggctacgtcaccccatggaattcccatggctacgatgtgacaaaagtttttggatccaaatttactcagatctcccctgtgtggttacaactgaaacgccgaggcagagagatgttcgaagtcaccggtctccatgacgtcgatcagggttggatgagggcagttcgtaagcacgccaaaggtctgcacattgtgccccgactgctcttcgaggactggacgtatgatgacttcaggaacgtgctcgactctgaagacgaaattgaagagctgtccaaaactgttgtgcaagtggccaagaatcagcattttgatggattcgtggtggaagtatggaatcagctgctctctcagaaaagagtcggcctgatccatatgcttacacacctcgccgaggcgctacaccaggcaaggctgctggcactgttggtaatccccccagccatcaccccgggtacggaccagctgggaatgttcactcacaaggaatttgagcagctcgcaccagtcctcgacggcttcagccttatgacatacgactattcgaccgctcaccagccagggcctaacgccccactgtcatgggttcgcgcttgtgtgcaggtcttggaccccaaaagcaagtggcggagcaaaatcctgctcggtcttaatttttacgggatggactatgccacaagcaaggacgcccgagagcccgttgtgggagccaggtatatccagaccctgaaggaccaccgcccacggatggtgtgggatagccaggcctccgagcacttctttgagtacaagaagagccggagcgggaggcatgtagtcttctacccaactctgaagtccttacaagtgcgactggagctcgccagagaactgggggtgggagtcagcatctgggagctcgggcagggactcgactatttctatgatctcctttag

SEQ ID NO: 10477 - DNA, 1182 bp, synthetic construct
  misc_feature 1..1182: note = source = /note="Description of Artificial Sequence: Synthetic coding sequence"
  source 1..1182: mol_type = other DNA
atgagaactctgtttaacctcctgtggttggcgttggcttgttcacctgtccatactacactgtcaaagtcagacgccaagaaggctgccagcaaaacacttctagagaagagccagttctccgataaacctgtgcaggatcgcggtctcgttgtaacggatctcaaggctgaaagcgttgtgctcgagcatcggagctattgttctgccaaggccagggaccgccacttcgcaggagacgtgctggggtatgtcaccccatggaacagccatggatatgacgtcaccaaggtttttggctccaaattcactcagatcagcccagtctggctccaactcaagcgcaggggcagagaaatgttcgaggtgactggcctgcatgacgtagaccagggctggatgagagcagtgcgcaaacacgcaaaggggctgcatatcgtccctcggctcctgtttgaggattggacctacgacgattttcgtaacgtcctggattcagaggacgagattgaggagttgagtaaaacagtggtccaagtggccaaaaaccagcacttcgatggcttcgttgtggaagtctggaatcaactgctaagtcagaaacgggtggggctcatccacatgctgactcaccttgcagaagcgttgcatcaagccagactcctggccctcttagtcataccgccagcaatcacaccaggcacggaccaactaggcatgttcacccacaaagagtttgagcagcttgcaccggtcctcgacgggttctccctgatgacatatgactatagcaccgcacatcagcccggtcctaacgctcctctatcttgggtgagggcctgtgttcaagtcctggatcccaaaagcaagtggaggtcgaagattttactgggcctcaatttctacggtatggactacgcaacctcgaaagacgctagagaaccggtggtaggggcacggtacatacagaccctaaaggatcatcgcccaagaatggtttgggactcccaggctagcgaacatttttttgaatacaagaaatcaagatctgggagacatgttgtgttctatcccacgttgaagtccttgcaggtgagactggaacttgcacgagagctgggtgtgggtgtatccatttgggaactgggccagggactcgattatttttatgacctcctctag

SEQ ID NO: 10478 - DNA, 1959 bp, synthetic construct
  misc_feature 1..1959: note = source = /note="Description of Artificial Sequence: Synthetic coding sequence"
  source 1..1959: mol_type = other DNA
atggcatcagtggcatgggccgtactgaaggttcttctcctccttccaacgcagacttggagccctgtgggggctggtaatccccctgactgcgacgcacccctagccagcgcactgcccagatcgagcttttcgagctcaagtgagctcagcagctcccacggcccagggttcagtagactaaaccgaagggatggcgctgggggatggacgccgctggtatctaataaatatcaatggttgcagatagacttaggggagcgcatggaggtgactgccgtggctacgcaaggcggatacgggtcgagcgattgggtgaccagctatctcctgatgttttcagacggcggacgcaattggaagcagtacagacgggaagaatccatttgggggttccccggaaataccaatgccgattcggtggtgcactacagactgcagccaccgttcgaggcccgtttcctgcgctttctccccctggcctggaatcccagaggacggataggtatgcgtattgaagtctacggatgcgcctacaagtcagaggtggtgtacttcgacggccagagcgccctgctctacaggcttgataaaaaaccactcaagcctatcagggacgtaatttctctgaaattcaaagcgatgcaaagcaatggaatcctgttgcaccgagagggccagcacggaaatcatatcaccctggagctgataaaagggaagctggtctttttccttaactcagggaatgccaagctcccctcaactatcgcccctgtgaccttgacgttggggagcctgctggatgatcaacactggcactccgtgctgatcgaactcctcgacactcaggttaattttactgtagacaaacatacccaccattttcaggcaaagggcgactcctcttacctggatctaaatttcgaaatttcatttgggggaatccctacaccgggtcgaagccgggcttttaggagaaagtcatttcacggctgcctggaaaatctgtattataacggcgtcgacgtgaccgaactggctaaaaagcacaagcctcaaatacttatgatgggcaacgtttccttctcatgccctcagccccagaccgtgcctgtgaccttcctctctagcaggtcttatttggccctgcctgggaacagtggcgaggataaagtgtctgttacttttcagttccgaacttggaaccgggctggacatttactatttggagagctgcgcagggggtccggtagcttcgtgctgttcctgaaagacggaaagctgaaactctcactcttccagcccggacagagtcctagaaatgtgaccgcaggcgctgggctgaacgatggacagtggcattcggtgtcattttctgccaaatggagccacatgaatgtcgtagttgacgatgatacagcggtgcagccccttgtggcagtacttatagacagcggtgacacctattacttcggcgctctgtacgagcaatcctgtgaggcacataagcacagggggaacccctcaggcctgtactacattgacgcagacgggagcggcccactcggcccattcctggtgtactgcaatatgaccgatgcagcctggaccgttgtccaacacggaggacccgatgccgttactctgaggggggctccatctggccacccccgtagtgcagtgtcattcgcttatgctgcgggagccggtcagctgagatccgccgtgaatctcgctgagaggtgcgaacagcggctggcactccggtgtggcacggcccgaaggccagattctcgggacggtacacccctgtcatggtgggtgggcagaacaaatgagacacacacgtcgtggggtggatctctgcccgacgcccagaagtgcacttgtggtctagagggaaattgcatagactcccagtattactgcaattgcgatgccggaaggaatgagtggtag

SEQ ID NO: 10479 - DNA, 1455 bp, synthetic construct
  misc_feature 1..1455: note = source = /note="Description of Artificial Sequence: Synthetic coding sequence"
  source 1..1455: mol_type = other DNA
atgtggtatgtcagtacccggggagtggccccacgcgtgaatttcgaaggagccctgttctccggctacgcacccgatggagggctgttcatgccagaggaactgcctcagttagacaggggaaccttgtgccagtggagtaccctctcctatcccggtctggtgaaagaactctgtgcgctgtttatcggttcagaactgcttcctaaagatgagctgaacgacctgatagatagggctttttcacgcttccgccacagggaagtggttcacctgtcccgtctgagaaatggcctgaacgttctcgagctctggcatggagtcacctatgccttcaaagacctctcactgtcatgtactacacaatttctccaatactttctggagaaaagagagaaacacgtgactgtggtggtaggaacctctggcgacacgggatccgctgccatcgaaagcgtgcagggtgccaaaaatatggacataattgtactactgccaaaaggtcactgtaccaaaattcaggaactccagatgaccaccgttctcaagcagaatgtgcacgtgttcggagttgagggaaactctgacgagctggacgagcccattaagactgtctttgctgatgttgctttcgtgaagaagcataacctcatgtcgctgaatagtattaattggagcagagttctggtgcaaatggcccatcattttttcgcctacttccagtgcaccccatcgttggatactcaccccctgcctttggttgaggtggtggtaccgacaggagctgcaggaaatcttgctgctgggtacatcgcccaaaaaattggcttaccaattcgtttggtggtggcggtcaaccgaaacgacattatccacagaaccgtgcaacagggcgatttttcgctgtcagaagctgttaagagtacactggccagtgccatggatatacaggtgccctacaatatggagcgagtgttttggttattgagtggaagcgattcacaagtgacacgtgcgctcatggagcaattcgaaagaacccagagcgttaacctgccaaaggaactgcactcaaaactgtctgaggcagtgacttcagtctcggtctcggacgaggcgattacgcaaaccatgggcagatgctgggacgaaaatcagtacctgctctgtccacattccgcagtggccgtcaactatcattatcagcaaatagatcggcaacagcccagcactcccaggtgctgcttggccccagcaagcgccgcaaaatttcccgaagccgtgctcgccgctgggttgactcctgaaactccggctgaaatcgtcgccctcgagcacaaggaaacccgctgcaccctgatgaggcggggagacaattggatgctcatgctccgcgatacgatagaagacttatctcgccagtggcggtctcacgcgctgaacacaagccagtag

SEQ ID NO: 10480 - DNA, 264 bp, synthetic construct
  misc_feature 1..264: note = source = /note="Description of Artificial Sequence: Synthetic coding sequence"
  source 1..264: mol_type = other DNA
atggtgtctttaatgaaactctggatccccatgctgatgacatttttctgtactgtgctgctctctgttttgggggaaatgaggaaaaagaggtacgatagaaaggagctgctcctggaagagtgttgggggaagccaaacgtaaaggagtgcacaaataagtgttcgaaagccttcaggtgcaaggataagaactacacatgttgttggacctactgtggaaacatatgttggattaatgtggaaacttcaggagactattag

SEQ ID NO: 10481 - DNA, 453 bp, synthetic construct
  misc_feature 1..453: note = source = /note="Description of Artificial Sequence: Synthetic coding sequence"
  source 1..453: mol_type = other DNA
atgaggttcatggccggtcccgctgggagccagtcactcggccctttgtgctttcactcctcaccacaggcactttataccgtactcttgattgtccttgttatgatgtccttggtgttcggaaagtttgtgccagtgaattgggagccaccccagccattgccatttcccaagtacctccgctgctatagatgtttactggagacgaaagagctgggctgcttactgggctccgatatttgtttaacaccagcagggtcaagctgcattacgctccacaagaagaatagctcgggctccgacgtaatggtgagtgattgccgcagcaaggagcaaatgagcgactgctctaacactagaactagtccagtgagcgggttttggatttttagccagtactgcttcctcgatttctgcaacgatccccagaaccggggactttatactccatag

SEQ ID NO: 10482 - DNA, 873 bp, synthetic construct
  misc_feature 1..873: note = source = /note="Description of Artificial Sequence: Synthetic coding sequence"
  source 1..873: mol_type = other DNA
atgagcgtgcggcgaggacggagacccgcacgcccaggaacaagattgtcatggctgctttgctgttccgcactgcttagtcctgcagcgggttatgtgatagtgagttcagtgtcatgggctgttacgaatgaggtagatgaggagctggacagcgccagcactgaggaagccatgcccgcactccttgaagacagcggctctatatggcagcagtcattcccagcctctgctcataaggaggacgcacacctcagaccacgagctggggcagccagagcccgaccaccgcctgcgcctcccggtatgttctcctaccggcgtgaaggaggccagactgcatcggctccacctggacccaggttgagagcggctaccgctcgaagccttgcccacgcgtcagtgtggggttgtctagcgactgtcagtacacacaagaaaattcagggcctgccatttggaaactgtttgccagtgtctgacgggcctttcaataactctactgggatcccctttttctatatgactgcaaaagacccagtcgttgcggatctgatgaagaaccctatggcatctctgatgctgcctgagagcgaaggggaattttgcagaaaaaacattgtggatcccgaggaccctcggtgcgtccaactgaccctcaccggccagatgatcgctgtgtcgcctgaggaagtggagtttgctaagcaggccatgttcagccgtcatcctggaatgaggaagtggcccagacaatacgagtggttttttatgaagatgcgcatagagcatatctggttgcagaagtggtatggaggagcgtcctctatcagccgtgaagagtactttaaggccgtcccaaggaaagcatag

SEQ ID NO: 10483 - DNA, 2742 bp, synthetic construct
  misc_feature 1..2742: note = source = /note="Description of Artificial Sequence: Synthetic coding sequence"
  source 1..2742: mol_type = other DNA
atgggcccagaggccctgtcttccctcttactgctgctgctcgtggcctcaggtgacgctgacatgaaagggcacttcgaccctgccaaatgtcggtatgcactcgggatgcaggatcgcaccatcccagatagcgacatcagtgcgtcgtcatcatggtccgattccacggctgctcgtcatagtaggctggagagctctgacggggatggagcgtggtgccccgcaggaagtgtctttcccaaggaggaagaatatctccaggtggacctacagagactccatcttgtggctttggtcggtacgcagggcaggcacgccggtgggctgggcaaagagttcagcaggagttatagactgcgctacagtcgcgatggacggcgatggatggggtggaaggacagatggggacaggaggttattagcggaaacgaggatcccgaaggcgtggtgctgaaagacctgggccctccaatggtggctaggctggtccgtttttacccacgggctgaccgtgtgatgagcgtgtgcttacgggtcgagctttatgggtgcctgtggcgggacgggcttctgtcttatacagctccggtcggccagacaatgtacctatcggaggctgtgtatttgaacgactccacatatgacggtcacacggtcggaggcttgcagtacggcggacttggtcaattggccgacggggtcgtggggttggacgacttccgcaaaagccaggaactgcgggtttggccagggtacgactacgtgggatggagtaaccactcttttagttctggctacgtggaaatggagtttgagtttgatagactgagagcatttcaggcgatgcaggtccattgtaacaacatgcatacattgggggcacgcttacctggtggagtggagtgcagattccgcagaggccctgccatggcttgggagggcgaaccaatgcgtcacaacttaggcggaaatctgggtgaccccagagcgcgagccgtgagtgtgcccctgggaggccgagtggccagatttttgcagtgccgctttctcttcgctggaccttggcttctcttctctgagataagttttatttcggacgtcgttaacaactcctccccagcactaggcggtactttcccccctgccccttggtggccacccggtcccccaccaacaaattttagctctttggagctcgagcccagaggtcagcagccagtggccaaagctgagggctcccctaccgcaattcttatcggatgcctggtggcgattatcctgctcctgcttctgatcatcgctttgatgttatggcgcctgcactggagacgcctattaagcaaggcagagaggagggtgctggaagaggagctgacagtccacctaagcgtacccggagataccattctgatcaataatcggccagggccacgcgaaccgccaccatatcaggagcccaggccgagaggcaaccctccccatagtgccccttgtgtacctaacgggtccgctttgctgttgtccaacccagcctacagactcctgttggcaacctatgctcgtccaccccgaggcccaggccctccaacaccagcctgggctaaacccaccaatacacaagcttacagtggggattatatggaacctgaaaaacctggagccccactgttgcccccacctccccagaactccgtgccacactacgctgaagccgatatcgtaactctgcaaggagttacgggtggaaacacttatgccgtgccggctctccccccaggggctgttggagacggcccacctagggtagattttccccgttccaggttaaggttcaaggaaaaattaggcgagggtcagtttggggaggttcatttatgcgaggtggatagcccacaggacctcgtcagccttgattttcctcttaacgttagaaaaggacacccattgttagtggccgtgaagatactgaggccagatgccaccaagaatgcacggaacgactttctcaaggaagtcaagatcatgtccaggctcaaagatcctaatatcattagactgcttggagtgtgtgtccaggatgaccccctctgcatgattaccgactacatggaaaatggcgacctgaaccagtttctgtccgcacaccagctggaggacaaagcagcagaaggcgcaccgggagatggacaagctgcacagggcccaacaatctcctatccaatgttgcttcacgtggccgcacagatagcatcaggaatgcggtatctggccaccctgaactttgtgcaccgagatcttgctacacgaaactgcctggtcggagagaatttcaccatcaaaatcgcggactttgggatgtccaggaacttatatgccggagactactatagggtgcaggggagggccgtgctgcctattcgctggatggcttgggagtgtatcctcatgggcaaatttacaaccgcctctgacgtctgggcgttcggcgtaactttatgggaagtcctgatgctttgtagggcccagcctttcggccaactgacagacgagcaggtcatcgaaaacgcaggcgagttctttagagaccaaggaagacaagtttacttatcacggccacctgcttgcccacagggactgtacgagctcatgctccgctgctggagccgggagtcggaacagcggcctcccttttctcagctccatcgattcctggcggaagacgctctgaatacagtgtag

SEQ ID NO: 10484 - DNA, 243 bp, synthetic construct
  misc_feature 1..243: note = source = /note="Description of Artificial Sequence: Synthetic coding sequence"
  source 1..243: mol_type = other DNA
atgaaactgagtggaatgttcctgctgctctcccttgcccttttttgttttctgaccggtgtcttttcgcagggaggacaggttgattgtggagagtttcaggacccaaaagtttactgcacacgtgagagtaacccacattgtggaagcgatgggcagacttatgggaacaaatgcgctttttgcaaggccatcgtcaaaagcggaggcaagatctccctcaaacaccccggaaaatgctag

SEQ ID NO: 10485 - DNA, 270 bp, synthetic construct
  misc_feature 1..270: note = source = /note="Description of Artificial Sequence: Synthetic coding sequence"
  source 1..270: mol_type = other DNA
atgaaaccctggatccttttactggttatgtttatatccggagtcgtcatgctgctccccgttctgggcagcttctggaacaaagacccattcctagacatgattagagagacagaacaatgctgggtccagccgccatacaaatattgtgaaaagagatgcaccaagatcatgacttgtgtgagaccgaaccacacatgttgttggacctattgcgggaatatctgcctggataacgaggagccgttgaagagtatgctgaatccttag

SEQ ID NO: 10486 - DNA, 264 bp, synthetic construct
  misc_feature 1..264: note = source = /note="Description of Artificial Sequence: Synthetic coding sequence"
  source 1..264: mol_type = other DNA
atgttaccatgtctggcccttctgctgttgatggagctgtccgtgtgtaccgtggcaggtgatggtggcgaggagcagaccttatcaactgaagctgagacctgggagggcgctggcccatccatccagctgcaactacaggaagtgaagacaggtaaggccagccagttttttggactcatgggaaagagagtgggcggtagaccgttgattcagcccagaaggaagaagggcagagaagacgaggcccaggggtccgagtag

SEQ ID NO: 10487 - DNA, 285 bp, synthetic construct
  misc_feature 1..285: note = source = /note="Description of Artificial Sequence: Synthetic coding sequence"
  source 1..285: mol_type = other DNA
atgcagcacagtcttgtatttttcttcgctgtgatcctacatctgtcccacctgctgcacctggacgccagcatccatcccttcagactgccctttagtagtaagcccttccttctcatacccatgtcgaacaccaccctcccccatacagcatggcctctgtcctttcttcaccaaactgtgtccactcttaaagctgtggccgtcactcatagcctctggcatttgcagattccagtagactgccaggcttgtaataggaaaagcaagaagatatattgctag

SEQ ID NO: 10488 - DNA, 327 bp, synthetic construct
  misc_feature 1..327: note = source = /note="Description of Artificial Sequence: Synthetic coding sequence"
  source 1..327: mol_type = other DNA
atgagacaaaggctactgccttctgtgacctctctcctcctggtggccctgctgtttcccggaagttctcaggcccgtcacgttaatcatagtgcaaccgaagccctgggagaattacgggagagggctcctggacaggggaccaacggcttccagctgctcaggcatgccgtgaaacgagatttactaccgccacgtacccccccttaccagggtgacgtccccctcggcatccggaacacaatttgcagaatgcagcaaggtatctgccgcctctttttctgccattctggcaccggccaacagcatcgccagcggtgcggttag

SEQ ID NO: 10489 - DNA, 807 bp, synthetic construct
  misc_feature 1..807: note = source = /note="Description of Artificial Sequence: Synthetic coding sequence"
  source 1..807: mol_type = other DNA
atgcttcttctggcagcagctttcttggtggcttttgtgctccttttatatatggtctctcctcttatcagccctaaacccttggcgctaccaggtgcccacgtcgtagtcaccggtgggtcctcaggcataggaaagtgcatcgcaatagaatgctataagcagggggctttcataacccttgtggctcgtaacgaggacaaactgctgcaggccaagaaggagatagagatgcactccattaacgacaaacaggttgtgctgtgtatctccgttgacgtgagccaggattataaccaggttgaaaacgttataaagcaggcccaggaaaagttggggccagtggacatgctagtaaactgcgccggaatggctgttagtggaaagtttgaggatctggaggtgtctaccttcgaggtcaaaccttacaacgtttatatcactgtcgcctacccgcctgacactgacacaccgggatttgccgaggaaaatcgaaccaaaccgttggagacccgcctgattagcgagactaccagcgtgtgtaaacccgaacaagtggcaaagcagattgttaaggacgcaattcaggggaacttcaattcatccctgggctctgacgggtatatgcttagtgccctgacttgtgggatggccccagtgacatcaatcaccgaagggctgcaacaggttgtcactatgggactatttagaaccatcgctcttttctatttgggttcttttgatagcattgtacgtaggtgcatgatgcagcgcgaaaaaagtgaaaacgccgataagacggcatag

SEQ ID NO: 10490 - DNA, 1686 bp, synthetic construct
  misc_feature 1..1686: note = source = /note="Description of Artificial Sequence: Synthetic coding sequence"
  source 1..1686: mol_type = other DNA
atgcgctggatactctgttggtccctgactctctgtctgatggcacagacagcactgggagccctgcacacaaagaggcctcaggtggtgactaagtacggtactctgcagggcaagcagatgcatgtaggcaagactcccattcaagtctttttgggtgtcccattctctagaccccctctaggtatccttagattcgcgcctcctgagcctcctgaaccttggaagggtatacgagacgcaacaacctatccaccagggtgtctgcaagaaagttggggacaactggccagtatgtatgttagcactagagaacggtacaaatggctgcgctttagcgaggattgcctgtatcttaatgtgtacgcgccagctagggctcctggcgacccccaactgcctgttatggtctggttcccaggtggtgcgttcatcgtgggtgctgccagctcgtacgagggctctgacctcgccgcacgcgaaaaggtcgtgcttgtttttcttcagcaccgtctgggcatctttggcttccttagcactgatgatagccacgcccgaggaaactggggcctgcttgaccagatggctgcactcagatgggttcaggagaacatagccgcattcgggggagaccctggaaacgttacactcttcggccagtccgctggcgctatgtcaatctctggactaatgatgtcaccgctagcgtccggactgtttcaccgcgctatttctcagagcgggaccgccctgtttagactgtttataacaagtaatccattgaaggtagccaagaaagtggcacacctagccggatgcaaccataactccacacagatcttggttaattgtctccgagcgctctcgggcaccaaggtgatgagagttagcaacaaaatgcgcttcctccagctgaactttcagcgcgatcctgaagaaattatctggagcatgtctcccgtggtggacggagtagttattccagatgatcctttggtattgctcacacaggggaaagtgtccagcgtgccttacttgctcggagtaaataatctggaattcaactggttgcttccatacatcatgaaatttccactcaatagacaggccatgcgcaaggagacaattactaagatgctttggagcactcggacccttcttaacatcaccaaggagcaagttcctttagtcgtagaagagtatctagataacgtgaatgagcacgattggaagatgctccgcaaccgtatgatggacatcgttcaggacgctacattcgtttacgcaacactgcagaccgctcattaccatagggacgcaggcctccccgtctacctgtatgagttcgagcatcacgccaggggaatcatcgtcaaacccaggacggatggagccgaccacggagacgagatgtacttcctgtttggaggccctttcgccactgggctttcaatggggaaagaaaaggccctgtccctacagatgatgaaatactgggcaaatttcgccagaactggaaatcccaacgatgggaatctgccatgttggccccgatacaataaagatgaaaagtatctgcagctggacttcactacacgcgtcgggatgaagctgaaagagaagaagatggccttctggatgagcctctatcaatctcagagacctgaaaaacaaagacagttttag

SEQ ID NO: 10491 - DNA, 444 bp, synthetic construct
  misc_feature 1..444: note = source = /note="Description of Artificial Sequence: Synthetic coding sequence"
  source 1..444: mol_type = other DNA
atggccagctcactaaaaatatggggaacattgctcgcgctcctctgcattctttgcacgctcctggtccagtccaaggaagtgagttggcgtgagttcatgaagcagcattacctctctccttcgcgggagtttcgtgaatacaagtgcgatgtcctgatgcgagagaacgaagcactgaaggacaagtcatctcacatgttcatttacattagctggtataaaatagaacatatctgcacatcggacaactggatggatcggtttcggaatgcgtacgtctgggtgcagaaccccctcaaagtcctcaaatgccaccaggagaatagcaaaaacagttacactgagtcgaggagtttcaactacatcgaattccactgttctatggatggttacgtggatagtatcgaagatctgaaaatggttgaacctattgggaactag

SEQ ID NO: 10492 - DNA, 444 bp, synthetic construct
  misc_feature 1..444: note = source = /note="Description of Artificial Sequence: Synthetic coding sequence"
  source 1..444: mol_type = other DNA
atgaccagcagtctgaaaatctggggaatcctattggctttgctgtgcatattgtgcagactgtgtgtgtacagcaacaatatctactggagagagttcattaagctgcattacctgtcccccagtagagagtttaaggaatataagtgcgacgtgctgatgcgggagaaagaagcattaaaagggaaaagctttcacatgtttatttattctctatggtttaagatccagcgagcgtgcatcaatgaaaagggttctgaccggtacagaaacgcctacgtttgggctcccggagccctgaaggttctggaatgtcactgggagaaatataataaccggtacaccgagtcgcgttccttttcctacatcgagtttcattgcggagtggacgggtacgtcgacaacatagaagacttgcgcatcatagaaccaataagcaattag

SEQ ID NO: 10493 - DNA, 1248 bp, synthetic construct
  misc_feature 1..1248: note = source = /note="Description of Artificial Sequence: Synthetic coding sequence"
  source 1..1248: mol_type = other DNA
atgtcaccatttttgtatttagttttgctggtattaggcctccacgctactatccactgtgccagccctgaaggcaaagtcacagcttgccacagctcccagcctaacgccacgctctacaagatgagctctattaacgcagatttcgccttcaatctataccgccgattcacggtcgagactcccgacaaaaatatcttcttctcacctgtatcgatctctgccgcactagtgatgctgtccttcggcgcttgctgcagtacgcaaactgagatcgtggaaacccttgggttcaatctcaccgacacgcccatggttgaaatccagcacggctttcagcatctgatctgtagtctcaactttccaaaaaaggaattggaacttcaaatcgggaatgctctcttcatcgggaaacaccttaagcccctggccaaattcctgaacgacgttaagacactatatgaaacagaggtcttcagcaccgatttttcgaacatctctgctgcaaagcaggagatcaactcccatgtggaaatgcaaactaaaggtaaagtggtgggcctgatacaggatctgaaaccgaacactatcatggtgctcgtcaattatattcatttcaaggcccagtgggccaacccgttcgatcctagcaagaccgaggacagctccagttttctgatcgataaaaccactacagtgcaggtccccatgatgcaccagatggaacagtactatcacctggtggatatggagcttaattgtacggtcctgcaaatggactacagtaagaacgcgctggctcttttcgttctcccaaaagagggccagatggaatcagtagaggcggcaatgtcgtcaaaaaccctgaaaaagtggaatcgactcctgcagaaaggatgggtcgatctttttgtgcctaaattctctatctccgctacgtacgatcttggtgctactttgttgaaaatggggatccaacatgcctattccgaaaatgcagacttttctgggctgaccgaagacaatggcctcaaactctctaacgcggctcataaagccgtcctgcatattggcgaaaaaggcaccgaagctgcagccgtgccagaggtggaactctccgatcagcccgaaaacacgttcctgcatccgatcatccagatagataggtccttcatgctgctgatcttggaaaggagcacacgctccattctgtttttagggaaggtggtgaaccccaccgaggcttag

SEQ ID NO: 10494 - DNA, 285 bp, synthetic construct
  misc_feature 1..285: note = source = /note="Description of Artificial Sequence: Synthetic coding sequence"
  source 1..285: mol_type = other DNA
atgaggactctggctatcctggctgcaatcctgcttgtggctcttcaggctcaagccgagcccctacaagctcgggctgatgaggtcgcagccgctcctgagcagattgcagcggatattcctgaggtggtggtttctctggcgtgggacgagtcactggcacccaagcaccccggaagtaggaaaaacatggattgctactgcaggatccctgcgtgcatcgccggtgaacgccgttacgggacttgtatttatcagggtcgcctgtgggccttctgctgctag

SEQ ID NO: 10495 - DNA, 1062 bp, synthetic construct
  misc_feature 1..1062: note = source = /note="Description of Artificial Sequence: Synthetic coding sequence"
  source 1..1062: mol_type = other DNA
atgcgcctccccagaagagccgcattaggtctgcttcctctgctgttactgttgccaccagccccagaggccgctaagaaacccacaccttgccatagatgcaggggattggttgacaaatttaatcagggcatggtggataccgctaaaaagaatttcgggggaggaaacacagcctgggaggagaaaacccttagcaaatacgaaagcagcgagatcagactgctcgaaatcttggagggcttgtgtgaaagttccgatttcgagtgcaatcagatgctcgaggcacaggaggaacatctcgaggcctggtggcttcaactgaagagcgagtaccctgatcttttcgaatggttttgtgtgaagactctcaaggtttgttgttcaccagggacctacggccctgactgtcttgcctgccaaggcggatcacagaggccttgtagcggaaatggacactgtagtggcgatggctcacgtcaaggcgatggttcctgtcggtgtcacatggggtaccaggggcctctctgtacggactgtatggatggatatttctcaagtctacggaatgagacgcacagcatatgtaccgcttgtgacgagagctgtaagacctgctccggactcaccaacagggactgtggggagtgcgaggtgggatgggtgctggatgagggcgcttgtgttgatgtcgatgaatgcgccgcagagcctcctccctgcagcgcggctcagttctgtaaaaacgctaatggatcgtacacctgcgaagagtgtgacagttcatgtgtggggtgcacgggagagggtccaggcaattgtaaagagtgcatcagcggatatgcacgggagcacggccagtgcgctgacgtggatgaatgtagcctggccgagaagacttgtgtgaggaagaatgagaattgctacaataccccaggttcttacgtatgtgtttgccccgacggatttgaggagacggaagacgcatgcgttccacctgcagaggctgaggctaccgagggcgagtcaccgacgcaattaccctcaagggaggatctgtag

SEQ ID NO: 10496 - DNA, 651 bp, synthetic construct
  misc_feature 1..651: note = source = /note="Description of Artificial Sequence: Synthetic coding sequence"
  source 1..651: mol_type = other DNA
atgaaattgaatttggtgcagatcttttttatgctgctgatgttactcctcggtctgggcatgggcctgggattaggcttgcatatggcgaccgcggtgctagaggaaagcgaccaacccctgaacgaattctggtcatcagacagtcaggacaaagctgaggcgaccgaagaaggggatggcactcagaccactgagactctcgtactgtccaataaagaagttgtgcagcctggctggccagaggatcctatccttggcgaagacgaagttgggggtaacaaaatgttgagagcaagcgctctcttccaatccaataaagactacctccgtctggaccaaacagacagggagtgtaacgatatgatggcccataagatgaaagaacctagtcagagctgcatcgcacagtatgccttcatccacgaggacctgaatactgtaaaggccgtgtgcaattcccctgtgatcgcctgtgaactcaagggcggtaaatgtcacaagtccagccgtcctttcgatctcacattgtgtgagctgtcacagcccgaccaggtcacgcccaattgcaactatctcacctccgttataaaaaaacacatcataattacgtgcaacgacatgaagagacagcttcccaccggccagtag

SEQ ID NO: 10497 - DNA, 222 bp, synthetic construct
  misc_feature 1..222: note = source = /note="Description of Artificial Sequence: Synthetic coding sequence"
  source 1..222: mol_type = other DNA
atgagaatagctgtcttgttgttcgcgatcttttttttcatgtcacaggttttacctgcgaggggaaaatttaaggaaatctgcgaacggcctaacggatcctgtagggatttctgcctggaaactgagattcacgtcggaaggtgccttaattctcagccctgttgcctgccgcttggacatcagccaaggattgaaagtacgaccccaaagaaggattag

SEQ ID NO: 10498 - DNA, 609 bp, synthetic construct
  misc_feature 1..609: note = source = /note="Description of Artificial Sequence: Synthetic coding sequence"
  source 1..609: mol_type = other DNA
atggagcggggtgcaggcgcaaaacttctgcccctcctcttgctgctgagggctaccggctttacttgtgcccaaactgatggtcgaaatggctacacggccgtcatcgaagtaacttctggcggaccttggggagattgggcttggccagagatgtgcccagacgggtttttcgcatcaggatttagtctcaaggtcgagccccctcagggcatacctggggatgacaccgctctgaatggtattaggcttcactgtgcaagaggtaacgtgctggggaacactcatgtcgtagaaagccaatcaggatcttggggggaatggtccgaacctctctggtgcagagggggtgcttacctagttgccttttctttgagggtggaagcaccaaccactctcggcgataacactgccgctaacaacgtgcgctttagatgctctgacggagaagaactccagggccctggactttcatggggggatttcggcgactggagcgatcactgccccaaaggcgcttgcggccttcagacgaaaatccagggtccgagaggcctgggcgatgatacggccctgaacgatgctcggcttttctgctgccggtcttag

SEQ ID NO: 10499 - DNA, 759 bp, synthetic construct
  misc_feature 1..759: note = source = /note="Description of Artificial Sequence: Synthetic coding sequence"
  source 1..759: mol_type = other DNA
atgcagctgactcgttgctgcttcgtgttcctagtgcagggcagtctttacctagtgatttgtggacaggacgatggcccacctggttcagaggacccagagcgagatgatcacgagggccagccaagaccgagagttcccaggaagcggggacatatttcccccaagtctcgtcccatggcaaattcgacccttctgggtctcctggcccctcccggagaggcatggggcattcttggccaaccacctaatcgcccaaaccattcaccccctccctcagccaaagtcaaaaaaatcttcggatggggagacttctatagcaatattaagacagtcgccttgaatctgcttgtgaccgggaagatcgtggaccacggtaacggcacattctctgtgcactttcaacataacgcgacaggacaggggaacatatccatttctctcgtcccaccctctaaggcggtggagtttcaccaggagcaacagatcttcattgaagcaaaggctagcaaaatcttcaattgtagaatggaatgggagaaggtcgagaggggacggaggacctccctatgtacccacgaccccgcaaaaatctgctctagggatcacgcacagtccagtgccacttggagttgtagccaaccgtttaaagtcgtctgtgtgtatattgccttctattcaacagactacagattagtgcagaaagtgtgccctgattacaactatcacagcgacaccccatactacccctccggctag

SEQ ID NO: 10500 - DNA, 555 bp, synthetic construct
  misc_feature 1..555: note = source = /note="Description of Artificial Sequence: Synthetic coding sequence"
  source 1..555: mol_type = other DNA
atgaagattctggttgcctttctggtggtgctgacaatttttggcatccagagtcacggatatgaagtatttaacataattagcccttctaataatggcggtaacgtccaggaaacggtgaccatcgataatgagaaaaatactgcgatcattaacatccatgccggatcttgctcctctacgaccatctttgattacaaacacggctatatcgcctctcgggtgctttcccgcagggcttgcttcattctgaagatggatcaccagaacattccgcctctcaacaatcttcaatggtacatttacgaaaagcaggctctggacaacatgttttcctctaaatatacttgggtgaagtacaatcctctcgagagcctcattaaagatgtcgactggtttctcctgggctctcccattgagaaactatgtaagcatatacctctgtataaaggagaagtcgttgagaacacccacaacgtaggcgcagggggatgcgcaaaggcgggactgctaggtatactcggtatatctatttgcgccgatattcacgtctag

SEQ ID NO: 10501 - DNA, 651 bp, synthetic construct
  misc_feature 1..651: note = source = /note="Description of Artificial Sequence: Synthetic coding sequence"
  source 1..651: mol_type = other DNA
atgggcgcagtcatgggtacctttagctctctgcaaacaaaacagagaaggcctagtaaagataagattgaggacgagttggaaatgacaatggtgtgtcataggcctgagggtctggagcaactggaggctcagacgaactttactaagcgggaactccaggtgctctacagaggctttaaaaatgagtgtccttccggggtggttaacgaggacacatttaagcagatctatgcccagttctttcctcacggagacgccagtacgtatgcacactatctgtttaatgcttttgatactacccagactgggtccgtcaagttcgaggattttgttacagccttatctatcctcctgcgaggcacggtgcacgagaagctgagatggactttcaacctatatgatatcaacaaagatggatacatcaacaaagaagagatgatggatatcgttaaggcgatatatgacatgatgggcaaatacacttacccagtcctcaaggaggacactccaaggcaacatgtggatgtgttcttccagaaaatggataagaacaaagatggcattgtgacactagatgaatttctggaaagctgccaggaagacgataatatcatgaggagcctgcagctgtttcaaaacgtcatgtag

SEQ ID NO: 10502 - DNA, 2736 bp, synthetic construct
  misc_feature 1..2736: note = source = /note="Description of Artificial Sequence: Synthetic coding sequence"
  source 1..2736: mol_type = other DNA
atggcgcagttgtttcttccactcctggctgcgctcgttctggctcaggcaccagcagccctggctgacgtactggagggcgactcttcagaggaccgggcattcagagtaagaatcgcaggggatgccccattgcagggggtcctgggcggtgcactcactattccatgtcacgtccactatctgcgccctcctccaagtaggagggccgtgttaggatcccccagagtgaagtggaccttcctgtcaagaggaagagaggccgaggtactggttgcgagaggagttagggttaaggtgaacgaggcatacaggttccgggtggccctgccagcataccctgcttccttgactgatgtgtcccttgccctgtctgaactgcgcccaaatgacagcggtatctaccggtgcgaagttcagcacggtatcgacgactcatctgatgccgtagaggtgaaggtcaagggtgtcgtatttctgtacagagagggcagcgccaggtatgccttcagtttctccggcgctcaggaagcctgcgccagaataggcgcacatatagctacacccgagcaactgtatgctgcttacctcggcggatacgagcaatgtgacgcgggttggctgagcgatcagactgtgcgatatcccattcagactcctcgggaagcttgctatggtgatatggatggattccccggtgtaaggaactacggcgtagtcgatcctgatgacctttacgatgtgtattgttatgcagaagatctcaatggggagctgtttcttggtgatcccccagagaagctgacgctggaggaggccagggcctattgtcaagaaaggggcgctgagatcgcaaccactggacagttgtatgccgcttgggacggcggactcgatcactgtagccctggctggctagccgatgggagcgtaaggtacccaatcgtaacgccttctcagaggtgtggcggtggactgccaggagtcaaaactctgttcttgttcccgaaccaaactggattccctaacaagcattcacgctttaacgtgtactgttttcgggacagcgctcagcccagcgctatccctgaggcctcaaacccagccagcaatccggcaagcgatggcctggaagccattgtgacagtcacggaaacattagaggaattacagctcccacaggaagcaaccgagtctgaatcaagaggtgccatatattcgattccaatcatggaggatggaggcggaggatcctcaactcctgaggatcctgctgaggcacctcgaacgcttctagagtttgagacgcagtccatggtgccccctacgggtttctctgaggaagaagggaaggctctggaggaggaagagaagtacgaagacgaggaggaaaaagaggaggaagaggaagaggaagaggttgaagacgaggcgctgtgggcatggccctccgagctcagcagccccggaccagaggcctctctgcccactgagcctgctgcacaagaagagtccctctctcaagctccagccagggcagtgttgcaacccggagcctcaccacttcctgacggagaatccgaagcctcccgcccacccagggttcatggccctcccaccgagacccttccaacccccagagagaggaatctggcgtcaccttctcctagcacgttggtcgaagcgagagaagtgggcgaagccactgggggacccgaattgtctggtgtgccgagaggtgaaagcgaggaaaccgggtcgtccgagggagccccatccttactccctgcgacccgagcacctgaaggcactcgcgagctagaagccccaagcgaggataactccggaaggacagcccctgctggaacctcggtgcaggcacagcccgtgctgcccacggactcggctagtagaggtggagtcgcagttgtccccgcttcaggtgattgcgtaccctccccttgccacaacggcggaacgtgcttagaggaagaggagggagtgaggtgtctctgcctgcctggatacgggggagacctgtgtgatgttgggctgcggttctgcaatcctggctgggatgcctttcaaggcgcttgttacaagcatttcagtacccgccgtagttgggaggaggctgagacgcagtgccgaatgtatggagcgcacttagcttcaatctctacacccgaggaacaggactttatcaacaacaggtatcgcgagtatcagtggatcggactgaacgataggacaatcgaaggcgactttctctggtcagacggcgtgcccctgctgtacgagaattggaaccccggacagcccgattcctacttcctatcaggggagaactgcgtcgtcatggtgtggcatgaccagggccagtggtcagacgtcccttgtaattaccacctgtcctatacttgcaaaatggggcttgtgtcctgtggacccccaccagaactgccactggctcaggtattcggacgtcctcgcctgcgttatgaggtggacactgtcctgcgttatagatgccgggaaggactggcccagcgaaatcttccgctcattagatgccaggaaaatggcagatgggaagctcctcaaattagttgcgttcccaggcggccagcgcgtgctcttcaccccgaggaggatcctgagggccgacagggcagactactgggacggtggaaggccctgctcattcctccctcctctcccatgccgggaccatag

SEQ ID NO: 10503 - DNA, 852 bp, synthetic construct
  misc_feature 1..852: note = source = /note="Description of Artificial Sequence: Synthetic coding sequence"
  source 1..852: mol_type = other DNA
atgggccttggcctgcgcggttggggacggcctctgctcactgtggctaccgcactgatgctcccagttaaacctcccgctggcagctggggagctcagattatcggaggacatgaggtgacacctcattcacgcccttatatggctagcgtgcgcttcggcggtcagcatcactgtggagggttcttgcttcgagcacgttgggttgtctccgcagcccattgcttcagccatagagacctacgcacgggattggtggttctgggagcccacgttttgtccacagcagaaccaactcaacaggttttcggtatcgatgcgttgacaacacatcccgattaccaccctatgacccacgcgaacgatatctgcctcctgaggttaaatggcagcgcagtgctcggccctgcagtgggcctcctccggccacccggtaggcgggcaaggccgccaacagctggcaccagatgccgtgtcgcaggttggggctttgtgagtgactttgaagaacttcctcctgggcttatggaggcaaaagtgagagttctggacccagacgtttgtaactcatcctggaaaggacatttgactctgaccatgctatgcaccagatcaggcgattcccataggcgcggtttctgtagcgcagactccgggggtcccctagtgtgccggaatagagcccacgggctggtgagtttttcaggattgtggtgcggagaccccaaaacccctgacgtttacactcaggtcagcgccttcgtcgcgtggatatgggacgtcgtacgtagatcctcaccacagccaggtccgcttcctgggaccacacggcctccaggggaggctgcttag

SEQ ID NO: 10504 - DNA, 1209 bp, synthetic construct
  misc_feature 1..1209: note = source = /note="Description of Artificial Sequence: Synthetic coding sequence"
  source 1..1209: mol_type = other DNA
atgatggtggccctgaggggcgcatctgccctcttggtcttgttcctcgccgcattcctcccaccccctcagtgcacccaggacccagctatggtccattacatataccagcgttttcgcgtgctcgaacagggcctcgagaagtgtactcaggccacccgtgcatacatacaagaattccaggagttttcaaaaaatattagcgtgatgctgggccgatgccagacctatacttccgagtacaaaagcgccgtggggaacctggcgctccgcgtggagcgcgctcagagggagatcgactacattcagtacttacgcgaggcagacgaatgcattgaaagcgaggataagactctggccgagatgctgctccaggaggccgaagaggaaaagaagattcggacactgttgaacgcgagctgcgataacatgttgatgggcatcaagagtctgaaaattgtcaagaagatgatggatacgcatggatcctggatgaaagacgccgtgtacaactcccccaaagtttacctgctcatcggtagcaggaataacaccgtttgggaattcgctaacatccgggcttttatggaagataataccaagccagctccccgtaagcagattcttaccctgagctggcagggtacagggcaggtgatctacaaggggttcttgtttttccacaatcaggcaacgagcaatgagattattaagtataatctccaaaagaggacggtagaagaccgaatgctgcttccaggcggtgttggtcgggcactggtgtatcagcatagcccttccacatatatcgatttggcagtcgatgaacatggactttgggctattcacagcggaccgggtacacatagtcacctggtgctcacaaagatcgagcctggaaccctcggggtagaacactcttgggatacgccctgccgttctcaggatgccgaggcgagtttcctgctctgtggtgttttgtatgtggtgtattctacagggggacaaggtccccatagaatcacctgtatctacgaccctctgggcacaataagcgaggaagatcttcctaacctctttttcccaaaacggcctcggtcacatagcatgattcattacaacccccgagacaagcagctgtatgcctggaacgaggggaaccagatcatctataagctccagaccaagagaaaactgccgttaaaatag

SEQ ID NO: 10505 - DNA, 1221 bp, synthetic construct
  misc_feature 1..1221: note = source = /note="Description of Artificial Sequence: Synthetic coding sequence"
  source 1..1221: mol_type = other DNA
atgcagctctttctccttctgtgcctcgtcttactctccccccaaggcgcttctctccatcggcaccaccccagagaaatgaaaaagagggtggaggatctgcatgtgggcgctactgtagcgccttcctcgaggcgagattttacctttgacttatacagagcacttgcatctgcggcacccagccagagtatcttcttcagcccagtgtcaatctcaatgagtttggctatgctcagcctgggagccggttcaagtaccaagatgcagattctggaagggttgggccttaacctgcagaagagtagtgaaaaggaacttcatcggggtttccagcagctgttacaagagctcaaccagcccagggacggctttcagttgtccctggggaacgccctctttacggatttggttgtggatctccaggataccttcgtctcggccatgaaaactctctatctggcagatacattccctaccaacttccgggattctgctggagcaatgaagcagataaatgattatgtggccaagcagaccaaaggcaagatcgtagatctccttaagaatctggacagtaatgccgtagtgatcatggtgaactacattttctttaaagccaagtgggaaacgtcttttaaccataagggcactcaagagcaggatttttacgttacatctgaaaccgtcgtccgggtccctatgatgtctcgcgaagaccagtaccactatctgctcgacaggaacctgagctgcagagtcgtcggggtgccttaccaaggtaacgccaccgctctctttatcctgccaagtgaggggaagatgcaacaggttgaaaacggtctgagtgaaaagactcttcggaaatggcttaaaatgtttaagaagcgtcaactggagttatacctgccaaagtttagtattgagggttcttatcagctcgagaaagtactgcccagcctgggaatatccaacgtgttcacttcccatgcagacctgtcaggaatatccaatcacagcaacatccaggtctctgaaatggtccacaaggcagtagtggaagtggatgagagcggaacccgcgcagccgctgccacaggtacgattttcacgtttcgatccgcgaggctgaacagccagcgactcgtgtttaacaggcctttcctgatgtttattgtggataacaatattctgttcctggggaaagttaacaggccctag

SEQ ID NO: 10506 - DNA, 1626 bp, synthetic construct
  misc_feature 1..1626: note = source = /note="Description of Artificial Sequence: Synthetic coding sequence"
  source 1..1626: mol_type = other DNA
atgcggctgtcgccgtttcatctgcagcttgaattccacatgaaggaaaagagggaggaccttcaaattagctggagcttcatcagcgttcctgagatggcagtcaacatccagcctaaagctctgggcgaggatcaggtggccgagactagcgctatgagtgacgtgctcaaggacattctgaagcatctggccggaagcgctagcccgtcagtggtgcttatcacgaagcccactacagtcaaggaagcccagaatctccaatgcgccgctagcacagctcaggaaagctgtccacctaaaccgcctcgagcacatgaactgaagctactcgtgcgcaatatacatgtgctgctgctcagcgagcctggggctagcggacatatcaatgccgtgtgcgtcgtacagttgaatgatcccgttcaaaggtttagctccacccttaccaagaacacgcccgacctgatgtgggaggaggaatttactttcgagttgaacgccaaaagtaaggaactgcatctgcagatttctgaagcaggacgatcatcagagggtttgctggccaccgcgacggtacccctggacctgttcaaaaaacagccatccgggcctcagtcctttaccctaacgtcaggcagtgcttgtggtagtagcgtactagggtctgtgactgccgagttctcatatatggaaccaggagagctgaaatcctggcccattcccccaccggttcctgccgcaaaaattgaaaaagacagaactgtcatgccctgtggcaccgtagttacaaccgtgactgcagtcaaaaccaaacctcgcgttgacgtgggaagggccagccccctgtcgtcagatagccctgtgaaaacccccatcaaagtgaaagtgattgaaaaggatatctccgtacaggcgatcgcatgccggtcggccccagtaagtaaaacgctcagcagctccgacaccgagctcttggtccttaacgggtccgatccagtggcagaggttgcaatccgtcagcttagcgagtcaagtaagctgaaattaaagtcacctcgcaaaaaatcaactattataatctcaggcatttccaagacttccctgtcccaggaccatgacgctgccctgatgcagggatatacagccagcgtagactctacacatcaagaagacgctcctagtcaccccgagagggccgctgcgagcgccccacctgaggaagctgaatcagcccaggcttcgctcgcccctaagccacaggaggacgaacttgacagctgggatttagaaaaggagcctcaggccgctgcttggtcttcccaagtgctgcttgatccagatggcgatgaactgtctgaatctagcatgtcggttctggaaccaggcacggctaagaagcataaaggcggaatcttgcggaaaggcgctaaactgttctttcgaagaagacatcaacagaaagacccgggtatgtcgcagagtcacaatgacctagtgtttctagagcagcctgaagggtcacgtcgaaagggaattactctcacccggatcctgaataagaagcttctatcccgacatcgtaataagaatactatgaacggcgctcctgtagaaccctgcacttag

SEQ ID NO: 10507 - DNA, 993 bp, synthetic construct
  misc_feature 1..993: note = source = /note="Description of Artificial Sequence: Synthetic coding sequence"
  source 1..993: mol_type = other DNA
atggcttttctcccgagttgggtttgtgttttagtgggaagcttcagtgcctctttggcgggaactagcaacctgagcgaaactgaaccacccctttggaaagaatctcccggtcaactttctgactaccgagttgaaaatagcatgtatatcatcaatccttgggtctatctcgaaagaatgggaatgtacaagatcattttgaatcagacagcacgctatttcgcaaagtttgcaccagacaatgagcagaacatcttgtggggtctgccactgcagtatggatggcagtataggactgggagactagcggaccccacccggcgaaccaactgcggatatgaatccggggaccatatgtgcatatccgtagacagttggtgggccgacctcaattattttttgagttccttaccatttctggcggcagtggatagcggcgtgatggggatatccagtgaccaggtgcgcctactgccccctccaaagaatgagcgaaagttttgctacgacgtgtcgagctgcaggtcgtcctttcccgaaacaatgaataagtggaatacattctaccagtatcttcagtctcccttttccaagttcgacgatctactgaagtatctgtgggcggctcatacttcgactctcgctgataatataaagagcttcgaagatagatatgattattacagcaaggcagaagcacacttcgagcggtcttgggtgttggcagtcgatcacctggcagccgttctgtttcccaccaccttaattagaagctataagttccagaagggcatgccgccacgcatcttactgaacaccgatgtcgcacccttcatttccgatttcactgcctttcagaacgtcgtactggtgctgctgaatatgcttgataacgtggacaagtctataggatatctatgcactgagaagagtaatgtgtaccgagatcatagcgaatcttcatccagaagctatgggaacaactcctag

SEQ ID NO: 10508 - DNA, 813 bp, synthetic construct
  misc_feature 1..813: note = source = /note="Description of Artificial Sequence: Synthetic coding sequence"
  source 1..813: mol_type = other DNA
atggatagcctggagtggaattgggccctcgtgtacgagctatcaggtgaacaccatgatgaggagtggagcgtgaaaacataccaggaggtggctcagaagttcgtagaaacccaccctgagttcattggtatcaagatcatctactcggaccatagatcaaaggacgtagctgttattgccgagtcaattagaatggctatgggcctccgtataaagttccccacagtggtcgccggttttgatcttgtaggccatgaagacaccggacattctctgcacgattataaggaagcattaatgattccagctaaggacggagtgaagctgccttacttcttccacgcaggggaaacagattggcagggcacaagtatcgatcggaacatcctcgacgctctgatgctgaataccaccagaattggtcatgggtttgcgctgagcaaacatcccgctgttcgcacctactcctggaaaaaggatatcccaatcgaagtgtgcccaatatccaaccaggtgttaaagctggtctcagaccttagaaaccacccagtggccactctgatggcaacagggcacccaatggtgatctcctctgatgacccagctatgttcggcgctaaaggccttagctacgacttctacgaggtgttcatgggcatcggaggaatgaaggcagacctccgcaccctcaagcagcttgccatgaactccatcaagtatagcacactgctcgagagcgaaaaaaatacatttatggagatatggaagaagaggtgggataaattcatcgctgatgtagctaccaaatag

SEQ ID NO: 10509 - DNA, 939 bp, synthetic construct
  misc_feature 1..939: note = source = /note="Description of Artificial Sequence: Synthetic coding sequence"
  source 1..939: mol_type = other DNA
atgggtgtcatggcgatgctgatgctgccacttttattactgggaatctccggcctactttttatttatcaggaggtgtctcggctgtggtccaaatccgctgttcagaataaagtggtggttatcacagacgccatttcaggtttgggcaaagagtgtgccagggtgttccatacaggaggagccaggctggttttgtgtggaaagaattgggaacggctcgaaaatctgtacgacgcgcttatctccgttgctgacccatcaaaacagaccttcacacctaagttagttctgttggatttaagcgacatcagctgcgtgcctgatgtagccaaggaagtgctcgactgttatgggtgtgttgacatactgatcaataacgcttccgtgaaggtcaaagggccagctcacaagattagcctggagctggacaagaaaattatggatgccaactatttcggacctatcactctgacaaaggccttgttacctaacatgatctctaggagaaccggccagatcgtgttggtcaataatatccaaggcaagttcggcatcccatttaggaccacctacgcagccagtaaacatgcagctctgggctttttcgattgcctccgcgcagaggtggaggagtatgatgtagtgatctctacagtgtctccaaccttcattcgatcttaccacgtctatccagagcaggggaattgggaggcttcaatctggaagtttttctttagaaagctaacttacggagtgcaccccgtagaggttgccgaggaggtgatgagaacggtgcggcgtaagaaacaggaagtgttcatggcgaatccgatcccgaaagccgctgtttacgtgaggacatttttccctgagttcttttttgccgtggtggcttgtggagtcaaagaaaagctcaatgtgcctgaagagggctag

SEQ ID NO: 10510 - DNA, 738 bp, synthetic construct
  misc_feature 1..738: note = source = /note="Description of Artificial Sequence: Synthetic coding sequence"
  source 1..738: mol_type = other DNA
atggcatcaacagcccttctcgccttgtgcagcactggagcttttagcgggctagcagtggaagctggagctggggtctgtcatgccacgcccatttatgccggtcatagctggcaccaggcaacattcaggctgaacgtcgccggaagtacactttcccgatacctgcgggatctcttggttgctgctaatcccgacttactgcaacaggctctgccaaggaaggctattacacatctcaagaaacggtcctgctatgtctccctagatttcgaaggagatctgagagaccccgcacggcaccatccagcttcattctcagtcgggaatggatgctgcgtatgcttaagctccgagaggtttcggtgccccgaaccgatcttccagccagggctgttgggtcaggccgaacagggcctgcctgccctcgcgttccgtgccctgcagaagatgcccaagaccctacgaacaagactggctgatactgtggtcctagctggaggttccaccctgtttcctggctttgctgaaagactcgataaagagctggaagcgcagtgcaggcgtcatggttacgccgctcttcgcccacaccttgttgccaaacacggaagagggatggcagtgtggaccggtggctccatggtggcgtccttacactcattccagcgtcggtggattactagagctatgtaccaagagtgcggcagcaggctattgtatgatgtgtttaattag

SEQ ID NO: 10511 - DNA, 909 bp, synthetic construct
  misc_feature 1..909: note = source = /note="Description of Artificial Sequence: Synthetic coding sequence"
  source 1..909: mol_type = other DNA
atgcggagatgggcatgggccgcagtggtggtcctcctggggccacagctcgtcttgctgggaggagtgggagcacgcagagaggcccagaggacccagcagccaggtcagcgagccgaccctccaaatgccaccgcctctgcaagctctcgcgagggtctaccggaggcacccaaaccctctcaggcctccggccctgagtttagtgacgcgcacatgacatggctgaatttcgtgaggcgtcccgatgatggagcattgcgaaagagatgcggctcacgcgataagaagcctcgggatttattcggcccaccaggtccgcctggcgcagaagtcaccgccgagaccttgctccatgaatttcaagagctgctgaaagaagcaactgaaagacgctttagcgggctgttggaccctcttctccctcaaggggcaggcctccgcctagtgggcgaagccttccactgccgcttgcaggggcctagaagagttgataagcgcaccctggtcgagctgcacggatttcaggctcccgcagcacagggggcatttctgcggggatcaggactctctttggcatccggccgtttcaccgcccctgttagcggaattttccagttcagcgcctccctccatgtggatcactcggaactccagggcaaagctagactgcgggctagagacgtcgtgtgcgtcctaatctgcatcgagtctctgtgtcagcgccacacatgtttggaggctgtctccgggctcgagtccaactctagagtgtttactctccaagtccagggactgctgcaattgcaggcgggacaatatgcaagtgttttcgtagacaacggcagtggcgcagtgttaacaattcaagccggttctagttttagcgggctgctgctgggaacatag

SEQ ID NO: 10512 - DNA, 1416 bp, synthetic construct
  misc_feature 1..1416: note = source = /note="Description of Artificial Sequence: Synthetic coding sequence"
  source 1..1416: mol_type = other DNA
atggattctgcccctctgttcccgaggccccatctgttccaaaacttattattgttcctgtgggccctgctgaactgcggcctcggcgtatccgcccagggccctggagagtggaccccttgggtgagctggacaagatgttcatctagttgtgggagaggcgtgagtgtgagatcacgtcgctgcttaagactgccgggagaagagccctgttggggcgattcacacgagtatcgcttgtgtcagctgcccgattgcccaccaggcgctgtcccatttagagacctccagtgtgccctctacaacggaagacccgtgctcggaactcagaaaacataccagtgggttccctttcatggcgctcccaatcagtgtgatctgaactgcctggcagagggacatgccttttaccattcttttggtcgggtgctggacggaaccgcatgctcaccgggtgcccaaggtgtgtgtgtcgcagggaggtgcctcagtgcagggtgcgacgggctcttagggagtggggctcttgaggatcgatgcggaaggtgcgggggagccaatgatagctgtttgtttgtccagcgggtgttcagagacgctggtgctttcgccggttattggaacgtgacactgatccctgagggcgcaagacatattcgggtggaacaccgttctcgaaatcacttggcactcatgggaggggatggcagatacgtgctgaacggccattgggtcgtctccccaccaggcacatacgaggctgctggcacccatgttgtgtatacacgggatactgggccacaggaaaccctccaggccgctggtcccacttcccacgacctcctgctgcaggtgctgctgcaggaacccaatccaggcatcgagttcgaattctggttgcccagagagagatattcaccttttcaggcaagggtgcaggccctgggctggccccttcgacagccccagcccagaggcgtggagccacagccgccagccgcacctgccgtgactccagcacagacacccacactagcccctgacccatgccctccctgcccggacacccgcggtcgcgcacaccggcttttacactattgcgggtccgactttgtctttcaggcacgcgtcctagggcatcatcatcaggctcaggagacacggtacgaagtccgcatacagctcgtttacaaaaaccgaagtccattgcgagctagagagtatgtgtgggctccaggccactgtccctgtcccatgctggctccccaccgtgattatctcatggcagtgcagaggctcgtgtctcctgacgggacacaggaccaattgctgctcccccatgccggatatgcccgtccttggtcccccgctgaagattcacgcatacgtcttacagccagacgctgccccggttag

SEQ ID NO: 10513 - DNA, 222 bp, synthetic construct
  misc_feature 1..222: note = source = /note="Description of Artificial Sequence: Synthetic coding sequence"
  source 1..222: mol_type = other DNA
atggctccacagaccctgcttctcgtgctggtcctgtgcgtcctactgctccaggctcagggcggatatagggacaaaatgcggatgcagaggatcaaagtctgcgagaagaggccaagtatagatctatgtatccaccactgcagttacttccaaaaatgcgagactaacaaaatttgttgttctgctttctgtggcaatatctgtatgtcaattctatag

SEQ ID NO: 10514 - DNA, 2349 bp, synthetic construct
  misc_feature 1..2349: note = source = /note="Description of Artificial Sequence: Synthetic coding sequence"
  source 1..2349: mol_type = other DNA
atggcgagagcccgtgccggagccctgctagccttatgggtgctaggcgctgccgctcaccctcagtgtctggactttcggcctcccttcagacccacccagcctcttcggctttgtgcacaatacagcgatttcggatgttgcgatgagggcagggacgccgagctgacccgcaggttttgggctctggcttctcgggtggatgccgctgagtgggccgcttgcgccggatacgcccgagatctcctctgtcaggaatgtagcccttacgcagcccatctttatgacgctgaggacccatttacgcctcttcgaacagtaccaggcctttgccaggattactgtctcgatatgtggcacaagtgcagaggcctgttccggcacttgagtactgatcaagaactgtgggccctcgaaggtaatctggccagattctgtaggtacttatctcttgatgacacagattactgcttcccttatctgctagtcaacaaaaatttgaactccaacctgggacatgtggtcgccgatgctaagggctgcctgcagctctgcctggaagaagtggctaacgggttgcgcaatccagttgccatggtccacgcacgcgatggaacacacagattctttgttgcggaacaggttggtctggtgtgggcttacctgcctgaccggtctcgcctgggaaaaccattccttaatatctccagagtagtgctgacctcaccgtgggagggcgatgagcgaggcttcctgggcatagccttccacccttccttccaacacaatcggagattatatgtgtactactcagtcgggattcgttcatccgaatggatccggatcagtgaatttcgagtctctgaggacgacgaaaacgccgttgaccattccagtgaacggatcatcctggaggtgaaggagcccgcatccaatcacaacggaggccagctgctcttcggagatgatggttacttgtatattttcacgggcgatgggggtatggccggtgatcctttcggtacatttgggaatgcccagaacaagagtgccttgctcgggaaagttctgcgaattgacgtggacaggaaggagcgaggattaccttacgggattccaccggacaatccatttgtgggggatccagccgcacagcctgaagtctatgccctgggcgtaaggaacatgtggcgctgctcattcgatcgtggggacccttcgtcggggactggacggggacggcttttctgtggagatgttgggcaaaacaaattcgaggaggttgacgttgtcgagcgaggcggtaactacggatggagggctagggagggatttgaatgttacgataggagtctatgtgctaacacaagcctcaacgatctcctgcccattttcgcctatccccacacggtaggaaagagcgttaccgggggttatgtctacagggggtgtgagtaccccaatctgaatggactgtacatctttggggatttcatgagcggaaggctcatgagtctgcaggaaaatcctggaaccggacaatggcagtactcggagatctgtatgggacacggacagacctgcgaatttccaggtctcattaataactactacccttatataatttctttcggtgaagacgaagctggcgaactctattttatgtccaccggcgaacccagtgcaaccgcacccaggggagtggtctacaaaattatcgatgctagcagacgcgcacctccagggaagtgtcaaattcagcccgctcaggtgaaaattcgatccagactaattccttttgtgccaaaagagaagtttattcctaagaccagatctacgcctcgacccactgccagggcccctactagggcgcctcggagaggtcgcccaacggctgctcccccagcccctacgcctcggccagcccgtcccacccagcagcccggttccaggcggggaggcggtagacgcaggggaagactgaattccgcctcacgcgcttttagggatggggaagtgagactggtgaggccagccggactctccagtggctctggcagagtcgaggtattcgtgggtgggcgatggggaaccgtgtgcgacgacagctggaatattagtggagctgccgttgtatgcagacaacttggcttcgcctatgcggtgagggctgtgaaacgggctgagttcggtcagggcggtagtctgcccatcttacttgacgacgtgcgatgtgccggatgggagagaaacttgctggagtgtcagcacaacggtgttggcacacacaactgtgaacatgatgaggatgcgggagtggtgtgctcacatcagaatccggacttgtag

SEQ ID NO: 10515 - DNA, 1317 bp, synthetic construct
  misc_feature 1..1317: note = source = /note="Description of Artificial Sequence: Synthetic coding sequence"
  source 1..1317: mol_type = other DNA
atgcacccattacccggttattggtcttgctactgcctcctgttactgtttagcttgggcgtgcagggcagcctgggagccccaagtgccgcacccgagcaggtccacctttcttaccctggagagccaggttctatgacggttacatggacgacctgggtgccgacgcgatctgaagtgcagttcggtcttcaacctagcggtccactgccacttcgggcacaaggcacctttgttccttttgtggacggcggtattctacgtcgcaaactctacattcacagggtaacccttcggaaacttttgcctggagtacagtatgtgtaccggtgtggatcagcccaaggatggtctcgcagatttcggtttagggctctgaagaatggcgcacattggtcccctcgcctagctgtcttcggggacctgggagccgacaacccaaaagccgtgcctcgcttaaggcgagacacacagcagggtatgtacgatgccgtcttacatgttggcgattttgcctataacctcgaccaagacaacgccagagtcggtgaccggttcatgcgcttgattgagcccgtcgccgcaagtctcccctacatgacctgtccgggtaaccacgaagaacgttacaatttttccaactataaagccaggttttctatgcccggagataatgagggtttgtggtactcttgggatttaggacctgcccacatcatttcattttccacagaggtctatttcttcctacactacgggaggcatctggttcaaaggcagttcaggtggttggaatcagacctgcaaaaggccaataagaatagagcagccagaccatggattattactatggggcaccgtcccatgtattgcagtaatgctgatctggatgactgcactcggcacgagagcaaagtgcgaaaaggcctccagggaaagctatacggtctggaagatttattctataaatatggagtggatctgcagctttgggcccacgaacattcttatgagagactgtggcctatttacaattaccaggtttttaacggaagccgcgagatgccctataccaatccgagaggcccagttcatattattacggggagtgccggatgtgaagagcggctgactccatttgctgtcttcccacgcccatggagtgcagtgcgggttaaagaatatggctatactcggctccacatccttaacggaactcacatacacattcagcaggtatctgacgatcaggatggcaaaatcgtcgacgacgtctgggtggtgagacccctgtttgggaggcggatgtacctgtag

SEQ ID NO: 10516 - DNA, 411 bp, synthetic construct
  misc_feature 1..411: note = source = /note="Description of Artificial Sequence: Synthetic coding sequence"
  source 1..411: mol_type = other DNA
atggctcgcacaaaacagacagcgagaaagtccaccgggggaaaggctcctcggaaacaactggcgaccaaggcagcacggaaatccgccccagctacaggaggcgtcaagaagcctcaccgctaccgccctgggaccgtggcgctgcgcgaaatcagacggtatcaaaaatcaacagaactcctgatacgaaaactcccattccaacggcttgtccgcgaaatcgcccaggattttaaaaccgacctgcgatttcagtcctccgccgtcatggctctacaagaggcatcagaggcttacctggtgggtctgttcgaggatacaaatctgtgtgcaattcacgccaagcgagtcactattatgccgaaagacattcagctggccagaaggatccgcggagagcgcgcatag

SEQ ID NO: 10517 - DNA, 1209 bp, synthetic construct
  misc_feature 1..1209: note = source = /note="Description of Artificial Sequence: Synthetic coding sequence"
  source 1..1209: mol_type = other DNA
atggctgccagaccagggccactctggttactgggactgacgctgtgcgcgctcgggggtggtggcccagggctgcgccctcctccgggttgccctcagcggaggctcggcgcacgagagcgcagggacgtccagcgcgaaattttagctgtgctgggtctccccggacgcccaaggcccagagctcctccagccgcatctcgtctcccagcaagtgctcccctatttatgctggacttgtatcacgcaatggccggtgatgacgatgaagacggagcccctgcagaacaaagactgggtagagcagatctagtaatgtcatttgttaacatggtagaaagggacagggctctcggccatcaggagccgcattggaaggagttcaggttcgatttgacccagattccagccggtgaggccgtgactgcagccgagttccggatctataaggtcccatcaatccaccttctgaacaggactctgcacgtatccatgttccaggtggtccaggagcaatcaaatcgagagtctgatctgtttttcctggatttgcagacccttcgggctggagatgagggatggctcgttttggatgtcacagcggcatctgactgctggctgctaaagcggcataaggatctagggttgcggttgtatgtcgaaaccgaggatggtcatagcgtggaccctgggctcgcaggcctcttgggacagcgcgctcccagatctcaacagcccttcgtggtcactttctttcgtgcgtcaccaagcccaattcggacaccacgcgcagtgcgacctctccgcagaaggcagcccaagaaatctaacgagctgccacaagccaatcgtctgccaggtatttttgacgacgttcggggaagtcacggtcgccaggtctgtagacgccacgagctgtatgtgtcctttcaagatcttggctggttggactgggtgatcgcgcctcagggctattccgcgtactattgcgaaggggaatgcagttttccattagattcctgtatgaatgccacaaatcacgccattttgcagtccttggtccatcttatgaaacccaatgccgtccctaaggcctgttgcgctcccactaagctatcagccacgtccgttctctattacgactcatcaaataacgtgatactccgtaaacaccggaacatggtggtgaaagcttgtggctgtcattag

SEQ ID NO: 10518 - DNA, 957 bp, synthetic construct
  misc_feature 1..957: note = source = /note="Description of Artificial Sequence: Synthetic coding sequence"
  source 1..957: mol_type = other DNA
atggccgctgctgctctccctccacgtccactcctgctgctccccctggtacttctgctttcaggacgccctacacgcgctgactcgaaggttttcggagatcttgaccaagtgaggatgacatcagaaggctcagattgccggtgcaaatgtattatgaggcccctgagtaaggacgcgtgttctcgcgtaaggagcggacgtgctcgggttgaggatttctacacggtcgagaccgtctcatctggcaccgattgccgatgcagttgcacagccccaccgagtagtttaaacccatgcgaaaatgaatggaagatggaaaagttgaagaaacaggccccagaactactcaagtccattaaggcaaatttaagcagggagaacgaggtcgtgaaagatagtgtcaggcacctcagcgagcaactgagacactacgagaaccacagcgcaattatgctgggtatcaagaaggaactctcacggttaggcctccagttgctgcagaaagatgccgctgccgcaccagccaccccagccactgggacgggatctaaggcccaggacactgccaggggtaaaggcaaagacatcagtaagtatggcagcgttcagaagagctttgccgaccgcggactgcctaagcctcctaaagagaaactactgcaggtggaaaagctgcggaaggaaagtggtaaaggctcattcctgcaaccgacagctaagccgcgagctctcgcacagcagcaggcggtcattcgcggattcacctattacaaagccggtaagcaggaagtcaccgaggcggtggctgacaatacactacaaggcacctcgtggctagagcaactgccccctaaggtggaagggaggtctaactccgcggagcctaactccgctgagcaggacgaggcagagccaagatcctcagaacgggtggacctcgcaagtggcacttag

SEQ ID NO: 10519 - DNA, 402 bp, synthetic construct
  misc_feature 1..402: note = source = /note="Description of Artificial Sequence: Synthetic coding sequence"
  source 1..402: mol_type = other DNA
atggctctcggagtcccaatatcagtataccttctctttaacgctatgaccgctctcaccgaggaggccgctgtcaccgtaactccacccatcactgcacagcaggccgacaatattgaaggcccaatcgccttgaagttctcgcatctttgcctggaggaccacaattcttactgcatcaatggggcatgcgccttccaccatgagttggagaaggctatctgcaggtgttttacaggctacactggagaacggtgtgagcatttgacactgaccagctatgccgttgactcatacgaaaaatacatcgccattgggattggcgttggtctcctgctttcagggtttcttgtcatcttctactgttacatccgtaaacgttatgagaaggataagatatag

SEQ ID NO: 10520 - DNA, 651 bp, synthetic construct
  misc_feature 1..651: note = source = /note="Description of Artificial Sequence: Synthetic coding sequence"
  source 1..651: mol_type = other DNA
atgagcagtgaggcagagacacagcagcccccagctgctcctcctgcagccccagcccttagcgcagccgataccaaaccaggaaccaccggcagtggcgcagggagtggaggtcccggagggctgacaagtgccgctcccgctgggggtgataagaaggtgatcgccacaaaggtgctgggaacggtgaaatggtttaacgtccggaacgggtatgggtttattaatcgaaacgatactaaggaagatgtgttcgtccaccagggcgcagaggctgctaacgtcacaggaccaggaggggtgcccgtgcagggcagcaaatatgcggctgaccgcaatcattaccggaggtacccacgaagacgtggaccaccgcgtaactaccaacagaactaccagaactcagaatccggagaaaagaacgaaggatctgaatccgctccagaagggcaggctcaacaacggagaccgtacaggaggcgtcgatttccgccatactatatgcggagaccttatggcagacgaccacagtattccaacccacccgttcagggtgaggtcatggagggggcagacaatcagggtgccggagagcagggacgacctgtacgccagaacatgtacaggggctaccgtcctagattccgatag

SEQ ID NO: 10521 - DNA, 756 bp, synthetic construct
  misc_feature 1..756: note = source = /note="Description of Artificial Sequence: Synthetic coding sequence"
  source 1..756: mol_type = other DNA
aacgattggtctgcggaccagctttaccttgagactacagggaagagtcgcactctgcagtcggggctggccttactctatggcttcttacccgatttcgattggaagaaaatatatttcagacatcagccatccgccctgttctgcagcggaagttgttactgcccagtccggaaccagtaccttgaaaaggagcagaggcgccagtacctcctaaggctgaagaatagtcagctggagaagacgtacggcgagatggcgaagattgtcgatgttccaacaaagcagctgcgggctgcaaatcccatcgactcaatgctctgccacttctgtcataatgtgtccttcccgtgcactagaaacgggtgtgtagatatggaacactttaaagttataaagacacaccagatcgaagatgagagagaacggcgtgagaagaaactgtactttggttactccttattgggagcacacccgatcttgaatcagaccataggtcggatgcagcgagcaacagagggtaggaaagaggagttgttcgccctttattccgctcacgacgtcactctaagcccggtcttgagtgcactgggtctaagcgaagcacggtttccaagattcgcagcgagggtgaacattccatccgggtttttcacgatggccagcatgagtcactctaccccccttagcgccaaaacaaccacctctgtcctgccctccccctgcgcacggctgaagacatggtccgctctttag

SEQ ID NO: 10522 - DNA, 576 bp, synthetic construct
  misc_feature 1..576: note = source = /note="Description of Artificial Sequence: Synthetic coding sequence"
  source 1..576: mol_type = other DNA
atggccgcaccacggggacgggctgcaccctggacaacagccctgctgttacttctagccagccaggtcttaagtccaggctcttgcgccgatgaggaggaagttccagaggaatgggtgctccttcatgtagtacagggccagataggcgcaggaaactatagttatcttaggctgaaccacgaaggaaaaatcgtgctgagaatgagaagtcttaaaggtgatgctgacctgtatgtttctgcaagctccttacacccctctttcgacgactacgagctgcagagcgctacgtgcggcccagatgctgtcagcatccctgctcattttcggagacctgtcggaatcggtgtttatgggcatccctctcacttggaatccgagtttgaaatgaaggtgtactacgacggcaccgtggagcaacaccccttcggagaggcggcttacccagccgatggtgccgacgctgggcagaaacatgctggcgctccagaggacgcatctcaggaagaagaaagcgtgctgtggaccatcctgataagcatcctcaagctggtactggaaattctattctag

SEQ ID NO: 10523 - DNA, 2301 bp, synthetic construct
  misc_feature 1..2301: note = source = /note="Description of Artificial Sequence: Synthetic coding sequence"
  source 1..2301: mol_type = other DNA
atggggcgacgaagactcctggtgtggctgtgcgctgttgcagccttgctgtccggggcacaggcccgaggtacccccctgctggctaggccagccccacccggtgcatctaggtattccctgtataccactggatggcgcccaaggctcagacctggaccgcacaaagctctctgcgcctacgtggtgcaccgtaacgtcacatgtatactccaggagggggcagagagctatgtcaaagccgagtacagacagtgtcgttgggggccaaaatgcccaggcacagtgacttatcgtacagttctgcggccaaagtataaggtggggtacaagactgttacggacctcgcttggcgatgttgcccagggttcaccggcaagcgatgccctgagcacctgaccgatcacggcgctgccagcccccagcttgagcccgaaccgcagatcccaagcggacagttagatccaggtccaagaccgccttcctacagcagagccgctccgagtccccatggcagaaagggccctggattgtttggggagcgcctggagcgattggagggcgacgttcaaagacttgcccagacatacggtacactgtctgggctggtagcctctcacgaagatccgaaccgtatgactggcggacccagagcaccggcagtcccagtagggttcggtgtgatccccgaagggttagtgggacccggagatcgagcgagagggcctctaacaccgccactggacgagattctgtctaaagtgaccgaggtttccaacaccttacagacgaaggtgcagctgctggataaggtgcacggtctcgcactggggcacgaggcccacctgcaaagactgcgagaggcaccccctagcccgctaacgtctctggcccttcttgaggaatatgttgaccggaggttgcaccgactgtggggttcacttctggacgggttcgagcaaaaacttcagggtgtgcagtccgaatgcgatctcagagtacaggaggttcgcagacagtgtgaagaggggcaagctgcttccaggcgattgcatcaatcgctagatggacgcgagctagcactccgacaggaactgagccagttggggtcacagctccaaggactatctgtgtcaggtagaggcagttgctgcggccagctggccctgatcaacgcaagaatggacgggttagagagagccctacaggccgtgacggagactcagcgcggacccggagcccctgccggagacgagcttaccagactttccgcagcaatgttagaaggaggggttgacggactgctggagggcctggaaactctgaatggcacagagggcggagctcgcggttgttgcctgcgtctcgatatgggaggctggggggtggggggatttggaaccatgcttgaggaacgagtccagagcctggaagagaggctggcaaccctggctggagagctgtcgcacgatagcgcctcgcctggcagaagtgcgagaccactcgtgcaaacggaactcgcggttcttgagcaacgcttagtgagcttggagacctcatgtacacctagcacaacttccgcaatccttgattccttagtggccgaggttaaggcatggcagagccgcagcgaggccctgcttagacaggttgcttctcatgcggctctgctgcagcagctcaacggcaccgtcgcggaagtacaaggtcaactggctgagggtactggtagcagtctccagggggaaataaccctcctcaaagtcaatctgaatagtgtgtctaagagtcttaccgggttgtctgattctgtctctcaatactccgatgcattccttgccgctaatacaagtttggacgaacgggagagaaaggtggaggcagaggttcaggccatccaggaacaggttagctcacaggggagccgcttgcaggccggtcatcgccaggtgctaaacctccggggtgaactagagcagctgaaggcaggcgtggccaaggtagcctctggattgagtaggtgtcaagacaccgcacagaagctccagcatacagtcggccactttgatcagcgagtagctcaagtggagggcgcttgtcgaaggctggggctcctggccgcaggactggacagcctgccaactgagcctctgagaccacgggaagggttgtggagccatgtcgaccaacttaatagaacccttgctcagcatacccaagacatcgcacgcctcagggacgatttgttagactgccaggcacaactcgctgagcaggtgcggccaggccaggctaactag

SEQ ID NO: 10524 - DNA, 1251 bp, synthetic construct
  misc_feature 1..1251: note = source = /note="Description of Artificial Sequence: Synthetic coding sequence"
  source 1..1251: mol_type = other DNA
atgtaccggcatggcataagtagtcaaaggagttggcctctttggacaaccatttttatcttcctgggagtagccgctatactcggagtcacaattggccttcttgtgcacttcctcgcggtcgagaagacctattactatcagggtgactttcacattagtggcgtcacctacaatgacaactgcgagaacgccgcatcacaggcttctaccaacctgtccaaagatatcgagaccaaaatgcttaacgctttccagaattcttcgatttataaggagtacgtaaagtccgaggtcatcaagctgctcccaaatgccaatggatcaaacgttcagttgcagctgaaattcaagtttcctccagctgaaggcgtttcgatgcggaccaagatcaaggcaaaactgcatcagatgcttaaaaacaacatggctagttggaacgcagtgcccgcaagcatcaagctgatggaaataagtaaagcagctagtgaaatgctaaccaacaattgttgcggtagacaagtcgcaaattccattatcacgggcaataaaatcgtgaacgggaaatcctctctggagggagcctggccatggcaggctagcatgcagtggaagggcagacactactgcggggctagtttgattagtagtcgctggttgctcagcgccgcacactgttttgctaagaaaaacaactccaaagactggacagtaaacttcggaatcgttgtaaataagccatatatgaccagaaaggtccagaacattatttttcacgaaaactactcttcccctggactgcatgacgatatagccctggtacagctggcagaggaggtgagctttaccgaatacataaggaaaatctgtctgccagaagcgaagatgaagctgtcagagaatgataacgtggtggtgaccggatggggtactctttacatgaacgggtcttttcctgtcatactccaggaagattttcttaaaattatcgataacaagatttgtaatgcttcatacgcgtactcaggctttgtaacagacactatgctttgtgctggcttcatgtccggagaagctgacgcttgtcaaaatgattccggcggtccattggcctacccagatagtcgaaatatctggcatctggtaggaattgtgagctggggggacggttgcggtaaaaaaaacaagccgggagtctatacccgcgttaccagctatagaaactggatcacttcaaagacagggctgtag

SEQ ID NO: 10525 - DNA, 639 bp, synthetic construct
  misc_feature 1..639: note = source = /note="Description of Artificial Sequence: Synthetic coding sequence"
  source 1..639: mol_type = other DNA
atgctaagctcagtggttttttggggccttattgcactcatcggcacctctcgcggaagctatccgttttctcattccatgaagccccacctgcatcccagactttaccacggctgttatggtgacatcatgacaatgaagacctccggagccacatgcgatgccaactctgtgatgaattgcggaatacgcggatctgaaatgttcgccgagatggacctgcgagccattaaaccttaccaaactctgataaaagaagtgggtcagagacactgcgtggatcccgctgtgatcgccgcaatcatcagccgagaatcacatggcggatccgtgctccaagacggatgggaccatcggggtctgaagtttggactcatgcaactcgacaagcagacatatcacccggttggcgcatgggattctaaggagcatctatcccaggccacgggcatcctcacagaaagaataaaagccatacagaaaaagttccccacatggagtgtggcacagcaccttaaagggggtctatcggccttcaaaagcggaattgaggcgatagcgaccccctctgatattgacaacgattttgttaacgacatcatcgcacgagccaagttctacaagagacagtctttttag

SEQ ID NO: 10526 - DNA, 378 bp, synthetic construct
  misc_feature 1..378: note = source = /note="Description of Artificial Sequence: Synthetic coding sequence"
  source 1..378: mol_type = other DNA
atggcccgaagtgccaccctggccgctgctgcgctggcactgtgcctgctgcttgcccctcccggactcgcctggtataaaccagctgctgggcattcatcctactcagtcggcagagcggcaggactgctctccggactgcggaggagtccgtacgccagaaggtcccagccctatcgcggagccgaacctccgggtggtgccggagcgtcgcctgagctgcaactacatccaagattacggtctctcgccgtgtgcgtgcaggacgtcgccccaaatctccagaggtgcgaacggctgccggacggccgaggcacctatcagtgcaaggccaacgtctttctgtctctccgggcagctgactgtctggctgcatag

SEQ ID NO: 10527 - DNA, 867 bp, synthetic construct
  misc_feature 1..867: note = source = /note="Description of Artificial Sequence: Synthetic coding sequence"
  source 1..867: mol_type = other DNA
atgaataatctgtcattcagcgagctatgttgcctgttttgttgtcctccatgccctggcaagatcgccagcaaactcgcattccttccacctgaccctacctacactttgatgtgtgacgagagcgggagccgttggaccctgcatctaagcgagagggccgattggcaatactcctctcgggagaaggatgccattgaatgttttatgaccagaaccagtaaaggcaataggatagcttgcatgtttgtgcgatgttcaccaaacgccaaatacacattgctctttagtcatgggaatgccgtcgaccttggacagatgtctagcttttacattggtctgggatctcggattaattgtaacatctttagctatgattattctgggtacggggctagctctggcaagcctaccgagaaaaatctgtacgccgacatcgaggctgcttggcttgctcttagaactcgatacggaatacggccagagaatgtcattatatatggccagtccatcggtaccgtcccttcagtggatctcgccgctagatacgaatccgccgctgtaatcttgcattccccactgacctcaggaatgagagtggccttccctgacacaaaaaaaacttactgttttgatgccttccccaatatcgataaaatttccaaaatcacatccccagtgcttatcatacatggtaccgaagatgaggtgatcgacttctcacacggactcgccctattcgaaagatgtcagagacctgttgaacctctatgggtcgaaggagccggtcataatgatgtggagttgtacggtcagtatttggagaggctgaaacagtttgtgtcacaggagctggtgaatctctag

SEQ ID NO: 10528 - DNA, 417 bp, synthetic construct
  misc_feature 1..417: note = source = /note="Description of Artificial Sequence: Synthetic coding sequence"
  source 1..417: mol_type = other DNA
atggtggctccagcagccagggttttcttgagggctgtaagggcagcattaacgtccacggtacccgacctgctctgtctccttgcgcgaggtagtccccgaggtttagcaagtggcaggttgcccctggcagtccattcagctcagcacggcccagggagcggtgccccttggctccgcatcgctagaagggctttacgattcgtactgtcaaagcactggggagacgattgttatctgactaacaggctctggcaggatcttaagcccccaagtcatgtggagaacggtcaagagctacgcttggcgccacctgttcagtgggccttgcaggtgcagggtaaccagctacagactgcagttctgtgtctaaggatggccccacccgagccagcaggctctcgacagcggatctag

SEQ ID NO: 10529 - DNA, 1332 bp, synthetic construct
  misc_feature 1..1332: note = source = /note="Description of Artificial Sequence: Synthetic coding sequence"
  source 1..1332: mol_type = other DNA
atgggcggaccaagagcatgggccctcctctgccttggattactcctgcccggaggaggggctgcatggtccatcggggctgctccattcagtgggagacggaactggtgcagttacgtggtcacgagaaccatttcgtgccatgtgcaaaatgggacgtacctccaacgggtgctacagaactgcccctggccaatgagctgccccggttctagctatcgaacggttgtcagacctacctataaagtcatgtataagatcgtgacagccagggaatggcgctgctgcccaggccactctggcgtatcatgtgaggaggtcgctgcatcatcggcttccttagaacctatgtggtcgggatcaactatgagacgtatggcgctgcggccaaccgcattctccggatgtttgaactgcagcaaggtgagtgaactcactgaacggctcaaagtgctcgaagcaaaaatgacaatgctcactgtaattgaacagccggtccctccgacacctgccactccagaagaccctgcaccgctgtggggccctccccctgcccagggatctcctggcgacggcggtctccaggaccaggtgggcgcttgggggctgcctggccctacaggtcctaagggggacgcaggctcaagaggccctatgggtatgcgcggacctcccggtcctcaggggccaccaggctctcctggccgtgcaggcgctgtgggaacccccggagagagagggcctccgggtccaccaggccctcctggtccgcctggcccacctgcacctgtgggtccgccacatgctaggatcagccagcacggggatccactcctctccaacacctttactgaaaccaacaaccattggcctcagggcccaaccggacctcctggaccccctggacctatgggtccacctggccctccaggtccaaccggggtgcccggatccccaggccacatcggcccacctgggcctacagggcctaagggaataagtgggcatcccggtgaaaagggcgaaagagggctgcgtggggagcccggtccccaggggagcgcgggacagagaggcgaaccgggacctaagggcgaccctggcgaaaagagccactggggcgagggccttcaccagctcagggaagcacttaagattctggctgagcgcgtgttaatactcgaaactatgattggcctctatgaaccggaattaggatcaggtgccggtcctgctggtaccggcacaccttcattgctgcgtggaaaacgagggggacatgccacaaactataggatcgtcgcccctaggtcacgagacgaacgcggatag

SEQ ID NO: 10530 - DNA, 717 bp, synthetic construct
  misc_feature 1..717: note = source = /note="Description of Artificial Sequence: Synthetic coding sequence"
  source 1..717: mol_type = other DNA
atggtcctgctgctgctggtcgccatacctttgttagtgcattcttcccggggacccgctcactacgagatgttgggccgatgtcgtatggtgtgtgatccccacggcccacgcggacccggtccggacggtgcgccagcatctgtcccccctttccctccgggagcaaagggagaggtcggaaggcggggaaaggccggactaaggggcccaccaggacccccaggcccaaggggcccacccggagaaccgggacggccagggcctccaggacctccaggacccggtcccggaggggttgcccctgccgctggttacgtgccaagaattgctttttacgcgggactccggaggccgcatgaggggtacgaggtgctgagatttgacgatgtggtcaccaatgttggcaacgcctatgaagccgcatccggaaaattcacatgccctatgcctggtgtgtattttttcgcttatcacgtactgatgagaggtggtgatgggacctccatgtgggctgacctgatgaaaaatggtcaagtacgtgcaagcgcaatcgcgcaagatgcggaccaaaattacgattacgcttccaactccgtcatcctgcacctcgatgtaggagatgaggtctttataaaactggacggagggaaagtccacggcggaaatacgaacaagtactctacattcagcgggtttattatctatccagactag

SEQ ID NO: 10531 - DNA, 282 bp, synthetic construct
  misc_feature 1..282: note = source = /note="Description of Artificial Sequence: Synthetic coding sequence"
  source 1..282: mol_type = other DNA
atgaagttattcctggtgctgattatccttctgttcgaagttctcaccgacggcgcaaggctcaagaaatgtttcaataaggtgacgggttattgcagaaagaagtgtaaggtgggtgaacgctacgagataggttgtctctccggaaaactgtgttgtgcgaatgacgaagaggaaaaaaaacatgtgtcatttaaaaaaccccatcagcattcaggagagaagttgagtgtattgcaggattatatcatcctgccgaccattactatctttaccgtgtag

SEQ ID NO: 10532 - DNA, 609 bp, synthetic construct
  misc_feature 1..609: note = source = /note="Description of Artificial Sequence: Synthetic coding sequence"
  source 1..609: mol_type = other DNA
atggtccgcatctggaccaccattatgattgtgttgatcctgctgcttagaatcggacctaataagcccagtctcagtgggcgtcaagccccagcccaggcccagacttcagacctggtcccttccctgtttcctcttggtttatgggcccctggtttttgcacctggtcatctcccgacgaggataaagtctggcgtccagcatgggagcaggggcctaaaggagagcctgatcctagaggtttaaggccaaggaagccggtgcccggaacaggaaaccgggactctggcactcggaggcgcctccaagatgccactgagcaggaccctcgccctggcaatgatgtcgcttcagcggaaacggctggtcctccgtccccttccggaatccgcgcacaggaccgggcaccaaggcaccgaagagccccacccgcacgcatgcccgtggctcccgcaccctccgccgacggcgaacccctgcaggaacagggaggcggtctctttcatagaacccggagcgtgtacaacggtttggagttgaacacgtggatgaaggtcgagagactgttcgtagagaaatttcatcagagcttttctcttgataactag

SEQ ID NO: 10533 - DNA, 342 bp, synthetic construct
  misc_feature 1..342: note = source = /note="Description of Artificial Sequence: Synthetic coding sequence"
  source 1..342: mol_type = other DNA
atgctgccctgcttggccttgttactactgatggagctctccgtctgtacagtggctggcgacgggggagaggagcagacgctgtctaccgaggccgaaacttgggtgatcgtagctctggaggagggcgcaggccctagcatccaacttcaattgcaggaggtgaagacgggcaaggcatcgcagttcttcggactcatgggtaaacgtgtgggcggaagacctttgatacagcccaggcgcaaaaaggcctatcaactggagcacacatttcagggattgctcggcaagcgctccctctttacagagggtcgagaggacgaggcccaggggtcagagtag

SEQ ID NO: 10534 - DNA, 1269 bp, synthetic construct
  misc_feature 1..1269: note = source = /note="Description of Artificial Sequence: Synthetic coding sequence"
  source 1..1269: mol_type = other DNA
atgggcccagcttggttatggttgttaggcacaggtattctagcgtcagtgcattgccaacccctgctcgcccacggggataagagtctgcagggccctcaacctccacgccaccagctttctgagcccgcacccgcttaccatcgcattacacccacaattactaactttgcccttagactgtacaaggagctggcagctgatgccccaggcaacatttttttcagtcctgtttccatctcaacaactctagcgctgttgtcattaggagctcaggccaacacctcagcactgattctggagggcctggggttcaacctgactgagacccctgaggcagacatacatcagggtttcagatcgctgctgcacactctggcccttccttctcccaaactggaactgaaggttggcaatagcctgttcctggacaaaagactgaagcctcggcagcattatctggactccatcaaggaactgtacggagcctttgcattttcagccaacttcaccgatagcgtgaccaccggtagacaaataaacgactacctgcggcgacagacttacggccaggtcgttgattgtctccctgagtttagtcaggataccttcatggtgctcgcaaattatatcttctttaaggcaaagtggaagcacccattctctcggtaccagacccagaagcaggaaagcttcttcgtcgatgaacggacatccttgcaggtgcctatgatgcatcagaaggaaatgcaccggtttctttacgatcaggacctagcatgtaccgtgctgcagatcgaataccggggtaacgcactggcactcctcgtgcttccggaccctgggaagatgaagcaagtcgaggccgcacttcagccgcagacgctccggaagtggggtcagttgttgctcccttccctcctcgacctgcacctgccacggttttccatctcgggaacttataatttggaggatattctgcctcaaattgggttgacaaacatcctcaaccttgaggcagacttttccggcgtgacaggccagttaaacaaaactatatctaaggtcagtcataaagcaatggttgacatgagcgagaaaggaaccgaggctggggctgcgtccgggctgctgagtcagccaccatccctcaatacgatgagcgatccacatgcccatttcaaccgcccatttctgttgttgctgtgggaagtgacaacacagtcactcttgtttttggggaaggtcgtgaaccccgtggccggatag

SEQ ID NO: 10535 - DNA, 237 bp, synthetic construct
  misc_feature 1..237: note = source = /note="Description of Artificial Sequence: Synthetic coding sequence"
  source 1..237: mol_type = other DNA
atggccctgattagaaagacgttttactttctgtttgccatgttctttatcctcgtgcagttacccagtggttgtcaggctggtttggatttttcacaaccctttccgtctggagaattcgcagtatgtgaatcatgtaagcttggcaggggcaagtgtagaaaagaatgccttgaaaacgagaagcctgatggaaactgccggctcaatttcctgtgttgcagacagcggatctag

SEQ ID NO: 10536 - DNA, 2139 bp, synthetic construct
  misc_feature 1..2139: note = source = /note="Description of Artificial Sequence: Synthetic coding sequence"
  source 1..2139: mol_type = other DNA
atggcagccgctgggcttgtggctgtcgcagcagcagccgagtactccggaactgtcgcatcgggtggtaacttacctggggtccactgcggcccttccagtggtgctggtccgggttttggccctgggtcatggagcagaagtctggatcgcgcattggaggaggcagccgtgaccggtgtgctgtcactgagcggtagaaaactgcgggaattccctcggggagcagcgaatcatgatctgaccgacactacccgggcagatttgagccggaaccgcctgtccgagattcctatcgaggcgtgtcacttcgtcagcctggaaaacctgaacctgtatcagaattgcatccggtatatcccagaggccatactgaacctgcaggccctgacatttttaaacatttccaggaaccagctctcaacactccctgttcacctctgcaatctccccttgaaggtactgatcgcttccaacaacaagctggtgtctctgcccgaagagatcgggcacctgaggcatctcatggagctggatgtgtcatgcaatgagattcagaccatccccagccagataggtaatcttgaagcattgcgggatctcaatgtgagacgcaaccatctcgttcacctgccagaggagttggctgaattgccactgattaggttagactttagctgcaacaagattacgacaattcccgtctgctatagaaatctacggcaccttcaaaccataactcttgacaacaacccactacagtcacctcctgcccagatctgcattaagggaaaggttcatatctttaagtatctgaacatccaggcctgtaaaatcgcccctgacctcccggattatgatcgacgacctttggggtttggaagttgccacgaggagctttactcatcacgaccctacggagctttagactcagggttcaattctgtggattctggggacaagagatggagtgggaatgagccgacagatgagttttcggaccttcccctgcgggtggcagaaataacaaaagagcagagactgcgtagggagtcacaatatcaggaaaatcgcggatccctggtagtgaccaacgggggagtagagcatgatctcgaccagatagactacattgatagctgcacagccgaagaagaagaggctgaagtccgtcagccgaaggggccagatcccgatagcctaagttcccagtttatggcctacatcgaacagcggcgaatttcacatgaagggtcccctgtcaaacctgtagccatccgggagttccagaaaacggaggatatgcgacggtaccttcaccagaaccgggtgcctgctgaacccagttctctgctgagtttgagtgcatcgcacaaccagctgagccacaccgatctcgaactgcatcaaaggcgcgaacaactggttgaacggacccggagagaggcacagctcgcggcactgcagtatgaggaggagaagatcaggaccaaacaaattcagcgtgacgcggtgctggactttgtcaaacaaaaagccagccagtcaccccaaaaacagcaccccctgctggatggcgttgatggggaatgcccattcccctctcgtagaagtcagcacaccgacgactctgccctgtgcatgagcctgtccggtctgaatcaggtggggtgtgcagcaaccttgccccactcttccgcatttacccccctgaaatccgatgatcggcctaacgccctgctaagtagtccagctaccgaaacagtgcaccattcaccagcatattcctttcctgccgctattcagcgcaatcaaccccagcgccctgagtctttcttattcagagccggagtgagagccgagactaacaagggacatgcctctcctctgccacctagcgctgcacctactacagattccaccgactcgatcacaggccagaattcacgccagagggaagaagagttggaattgatcgaccaactgagaaagcacattgagtatcgattgaaggtcagcctaccctgtgacctgggtgccgctttaacggacggcgtcgttctttgtcatctggcaaaccacgttcggccacgcagtgtgccaagtattcatgttccatctcctgctgtagtgtcttag

SEQ ID NO: 10537 - DNA, 213 bp, synthetic construct
  misc_feature 1..213: note = source = /note="Description of Artificial Sequence: Synthetic coding sequence"
  source 1..213: mol_type = other DNA
atgagagtcttgttttttgtcttcggggtcttgtctttaatgttcaccgtgcccccagccagatctttcatttccaatgacgaatgtccatccgagtattaccactgcagacttaaatgtaatgctgacgaacatgctatacggtactgtgccgatttttccatatgttgcaagctgaaaattatcgagatcgatggccagaagaagtggtag

SEQ ID NO: 10538 - DNA, 789 bp, synthetic construct
  misc_feature 1..789: note = source = /note="Description of Artificial Sequence: Synthetic coding sequence"
  source 1..789: mol_type = other DNA
atggcagccgcatccgctggagccactaggcttctgttactgcttctgatggccgtcgctgccccatccagagccagaggaagcggttgcagagcaggtacgggtgccagaggggctggcgcagagggcagagagggcgaggcttgcggaaccgtgggtctgcttctcgagcactcattcgagattgatgacagtgcgaacttcagaaagcggggatcgttgttgtggaatcagcaggacgggactctcagcctgagccagcggcaattgtctgaagaagaacgaggccgactgcgtgatgtggcagcactgaacgggctatatagagtgcgaatccccagaagaccaggagcccttgacggactcgaggctgggggttacgtgtccagcttcgttcctgcctgttcactagtggaatcacacctgtcagatcagttgacactgcacgtcgatgtggctggcaacgtcgttggagtgagcgtcgtcacccatcccggtggctgcagaggacatgaggttgaagacgttgacctggaactctttaatacctcggtccaattgcagccaccaacgacagcccctggcccagagacagcagcatttattgagagactggagatggaacaggctcagaaggcaaagaatccacaggagcagaaatcattctttgccaagtactggatgtatataatccccgtagtgctgtttttaatgatgagcggagcaccagacactggagggcaaggcggagggggaggcggaggtggcggtggtgggtccggcagatag

SEQ ID NO: 10539 - DNA, 150 bp, synthetic construct
  misc_feature 1..150: note = source = /note="Description of Artificial Sequence: Synthetic coding sequence"
  source 1..150: mol_type = other DNA
atggattcaagtcgggagcccacactgggccgtctggacgcagcaggattttggcaggtctggcagagattcgacgcagatggccacggccacgagtccaagtttgcccagggcgagacagctgtgtacgactacccgcgttgtctgtag

SEQ ID NO: 10540 - DNA, 213 bp, synthetic construct
  misc_feature 1..213: note = source = /note="Description of Artificial Sequence: Synthetic coding sequence"
  source 1..213: mol_type = other DNA
atgcccggagcgatgaagatctttgttttcattctggctgctttgattttgttagcccagattttccaggcacgaaccgctatccatcgcgctctcattagtaagcgcatggagggccactgcgaagctgagtgccttacgttcgaagtgaaaataggaggatgtagggcagagctcgcgccattttgctgcaagaatagaaaaaagcattag

SEQ ID NO: 10541 - DNA, 711 bp, synthetic construct
  misc_feature 1..711: note = source = /note="Description of Artificial Sequence: Synthetic coding sequence"
  source 1..711: mol_type = other DNA
atgatgcccgcagagcggagactgcccctgagcttcgtgctggatgttttagaaggccgagctcagcacccgggtgtcctgtacgtgcagaaacagtgcagcaaccttcccagcgagctcccacaattacttcccgacctggaaagtcacgtgccttgggccagtgaggcacttggtaaaatgcccgatgctgtcaacttctggctgggggaggcagctgccgtgacctccctgcataaggatcactatgagaatttatactgcgtggtgtcaggggagaaacacttcctcttccatcctccttccgatcgcccatttatcccatatggtttgcgcgtccccggttgtcttcagtttccccatacgctgttgccatgggcccctgagctctacacacctgcaacgtaccagctcactgaggagggcacattcaaagtcgtggatgaagaagcaatggaaaaggtgccttggataccattagaccctttggctcctgatcttgcgaggtatccctcctactcccaggcacaggccctcaggtgtacggttcgagccggagaaatgctatacttgcccgctttgtggttccatcacgtccagcaatctcagggttgtatcgccgttaacttttggtatgatatggagtacgacttgaaatattcttattttcaattactcgactccctgacaaaggcctcaggcttagactag

SEQ ID NO: 10542 - DNA, 1098 bp, synthetic construct
  misc_feature 1..1098: note = source = /note="Description of Artificial Sequence: Synthetic coding sequence"
  source 1..1098: mol_type = other DNA
atggctcccaagcttataacagtgctgtgtttggggttttgtctgaaccagaagatatgccctcacgccggtgctcaagacaagttttcgctctctgcgtggccaagtcctgtggtgcctctggggggaagggtgacgctctcatgccacagtcacctgagatttgtaatttggacaatttttcagacgacaggaactagatcgcacgagctgcataccggcctgagtaataacattacgatctccccagtcactccggagcatgcaggtacataccggtgtgtcggtatctacaagcatgccagcaagtggtccgccgaaagtaattctctgaagattatcgtgacaggacttttcacgaaaccatctataagcgcccatcccagctctctggtacacgccggtgcacgtgtgagcctgcggtgtcattcagaactcgctttcgatgagtttatcctgtataaagaaggacatatccagcattcacaacagttggaccagggaatggaggccggtattcactacgtcgaggctgtgttcagcatgggtcccgtcaccccggcacacgccggtgcatatcggtgttgcggttgcttttctcacagccgctacgagtggtccgctccctctgaccctctagatatcgtcattaccggaaaatataagaagccgtccctgtcgactcaagttgatcctatgatgcgtctgggcgagaagctaaccctcttttgcagttccgagatatcctttgaccaatatcatctttttcgccatggcgtcgcccatggacagtggttatctggcggacagagacatagggaggcatttcaggcaaactttagcgtggggcgtgctacgccggtgcctggaggcacttaccgctgctacggatcattcaatgattctccgtataagccacctgtgactaggtgtaacttcacccctcaggaaacccttcgcgtgctgctgtgccattcgcagaacccacctcttaatctcactccaccttggcagacccagagccccaggaaggccaacggacgaatgaagagatcccttcagcaaaagagacacagacgttcttacatgcctagttag

SEQ ID NO: 10543 - DNA, 198 bp, synthetic construct
  misc_feature 1..198: note = source = /note="Description of Artificial Sequence: Synthetic coding sequence"
  source 1..198: mol_type = other DNA
atgagaaccttcctcttcctctttgctgtgctcttcttccttacccccgcaaaaaacgctttcttcgatgagaaatgcaataagctcaagggaacctgcaaaaacaattgcggtaaaaatgaggaactcatcgccctgtgtcagaaaagtctgaagtgttgtcggaccatccaaccctgtggctccatcatcgattag

SEQ ID NO: 10544 - DNA, 198 bp, synthetic construct
  misc_feature 1..198: note = source = /note="Description of Artificial Sequence: Synthetic coding sequence"
  source 1..198: mol_type = other DNA
atgagaacgttcttatttctgtttgccgtgttgttttttctgactcccgcaaaaaacgccttttttgacgaaaagtgtaacaaattgaaagggacctgcaagaataactgcggtaagaacgaggaactgattgcgctctgccagaagagcctcaaatgctgccgtactatccaaccctgcggatccataatagactag

SEQ ID NO: 10545 - DNA, 237 bp, synthetic construct
  misc_feature 1..237: note = source = /note="Description of Artificial Sequence: Synthetic coding sequence"
  source 1..237: mol_type = other DNA
atggcgctcattaggaaaacgttctacttcctgtttgccatgttttttatcttggtccagctgccatccgggtgccaggcaggtctggatttttcgcagccctttccgtctggcgaattcgctgtctgtgagagttgtaagcttggccgtggtaagtgtcgaaaggaatgcctcgagaatgagaaaccagatgggaactgcaggcttaacttcctctgctgtaggcaaaggatctag

SEQ ID NO: 10546 - DNA, 2868 bp, synthetic construct
  misc_feature 1..2868: note = source = /note="Description of Artificial Sequence: Synthetic coding sequence"
  source 1..2868: mol_type = other DNA
atgtgggctgggctgctgcttagagctgcatgtgtcgccctgcttcttccaggagcccctgcaagggggtacaccggcagaaaacctcccggacatttcgccgctgaaagacggaggctcggccctcatgtgtgcctatctggtttcggaagtggttgttgtccgggttgggctccatcaatgggaggcggacactgcactctcccactttgttctttcggatgtgggagcggaatttgcatagctccaaatgtatgttcctgtcaggatggggagcagggtgccacttgcccggaaacccacggcccttgcggtgagtatggttgtgacctgacttgcaaccatgggggatgccaggaagtggctagagtttgcccagtcggtttttccatgaccgagacagccgtagggattagatgcaccgacatcgacgaatgtgtaacgtctagttgtgagggacactgtgtgaacactgaaggagggtttgtctgcgaatgtggccctggaatgcagctctccgctgaccggcattcttgccaggacaccgacgagtgcctgggtacaccttgtcagcaacgatgcaaaaactctattggaagctataagtgctcatgtagaacagggtttcatctccatggaaatcggcattcatgcgttgacgtgaacgagtgcaggagacccctcgagagaagggtgtgtcaccattcctgccataatactgtaggctctttcctgtgcacttgtcgcccagggttccgcctacgcgctgacagagtttcctgtgaagccttcccaaaggctgtgcttgcaccatcagccattctacagccacgacagcatccttcaaaaatgctgctcttgctccctgaagcgggtaggcccgcactgtcaccaggccactctcctcccagtggagcaccgggacccccagccggagttcgcaccacccggctgccgtccccaactcccaggctgccgacgagctccccctctgcacctgtatggctcctgagcacccttttagctaccccggtacccacggcttccctcctggggaatcttaggccaccaagtttattgcagggggaggtgatgggcaccccttcctcccctcgcggacccgaaagcccacgcttggccgcaggcccatcgccttgctggcatctgggtgccatgcatgaatcccggagccgctggaccgaaccgggatgctcccagtgctggtgcgaggacggaaaggtgacttgcgagaaagttagatgtgaagccgcatgcagccatccgattccctcaagagatggcggttgctgcccatcctgtacagggtgttttcatagtggtgtagttagagccgaaggcgatgtgttttcaccccctaacgaaaattgtactgtttgcgtctgcctcgctggaaacgtctcatgcatctctcctgaatgtccctccggcccatgccagacaccccctcagacggactgctgtacttgtgtgcccgtgcgctgctatttccacggacgatggtatgcagatggggcagtcttttctggcggaggcgatgaatgcaccacctgcgtatgccagaacggcgaggtcgagtgttcattcatgccatgccccgagctagcatgccctagggaggaatggcggctcggaccaggccagtgttgtttcacttgccaggagcctactccaagcacaggatgttctctggacgacaacggcgtagagtttccaattggccagatctggtctccgggagatccatgtgaactgtgcatatgtcaggcagatggttcagtgagctgcaagagaacagactgcgtagactcatgcccacatccaatccggatccccggacagtgctgtcccgactgttccgccggatgtacttataccggtagaattttctataataacgaaactttccccagtgtattagatccttgcttatcctgtatttgcctgctcgggtccgtggcttgctcacccgttgactgccccattacgtgcacataccccttccaccccgacggtgagtgctgtcccgtttgccgcgactgcaactacgaagggagaaaggtggcaaacgggcaggtttttaccctcgatgacgagccctgtacccggtgtacatgtcaacttggagaggtgtcgtgcgaaaaggtgccatgccagcgcgcatgcgcagacccagccctgcttcccggagactgttgttcgagctgccctgactccctgtctcctctcgaagaaaagcagggattatcacctcacggcaatgtcgctttttccaaagcgggacgctcattgcacggtgacacagaggccccagtaaattgctcatcgtgtccgggaccccctacagcaagcccctcgcgtcccgttctccacctcctgcagctgctcctccgcacaaatctcatgaagacccagaccctgcctacttctcctgccggtgcgcacggtccccattccctggcactgggactcaccgcaactttccccggtgagcctggcgcttccccacgcctgtccccgggaccttccacaccacctggggctccgaccctgcccctcgcctcacctggcgctccacagccgccacccgtgactccagagcgatccttcagtgcgagtggtgcccagattgtgtcacggtggcctcctctgccagggacccttctaacagaggcgtccgcgctgtcaatgatggacccgagccctagtaagacaccaataacgctgttagggccacgggtcttatctcctaccacttctagactgtcaactgcactggcggcaacaacccatcccggaccacagcagcccccagtgggagcttctcgcggagaagagtcaacaatgtag

SEQ ID NO: 10547 - DNA, 270 bp, synthetic construct
  misc_feature 1..270: note = source = /note="Description of Artificial Sequence: Synthetic coding sequence"
  source 1..270: mol_type = other DNA
atggtgagctgcgaaagacgcgcatcgaaatcagtggggcagattctcctctgggactttggttacacttgcagactgtctcatcgacgccgaaactctaccgaaatactttcacgtaatctgcccgctttgtatacgggcatcaaggtgtgcgagaagcgccctagcatagatctatgtatacaccactgctcctactttcagaagtgtgaaactaacaaaatctgctgctccgcattttgcggaaatatatgtatgtcgatcttgtag

SEQ ID NO: 10548 - DNA, 600 bp, synthetic construct
  misc_feature 1..600: note = source = /note="Description of Artificial Sequence: Synthetic coding sequence"
  source 1..600: mol_type = other DNA
atggagacatttcccctgctcctgctatccctcggccttgtgcttgccgaggccagcgagtctaccatgaagatcattaaggaagagtttacagacgaggaaatgcagtacgacatggctaaaagtggccaggagaagcagactattgagattctgatgaaccccattctcctagtgaagaacaccagtttatcaatgagtaaagacgacatgtcctccacactgctcactttcaggtccttgcactataacgaccccaaggggaacagtagtggtaatgataaagagtgctgcaacgacatgacggtatggcgcaaggtttcggaggcaaacgggtcctgtaagtggtcaaacaactttatccgttcgagcactgaggtcatgagaagggtccacagagctccctcttgtaagtttgtgcagaatcccggaattagctgctgcgagagtctggagctcgagaacactgtctgtcagtttacaactggaaagcagtttccacggtgccagtaccactcggttacctccctggaaaagattttaactgtcttaacaggccactccctcatgagctggctggtatgcggctctaaactgtag

SEQ ID NO: 10549 - DNA, 729 bp, synthetic construct
  misc_feature 1..729: note = source = /note="Description of Artificial Sequence: Synthetic coding sequence"
  source 1..729: mol_type = other DNA
atggctgcagctacaaggggctgccgcccttgggggtccttgctcggcctcctcggactcgtgagcgccgctgccgcagcctgggatcttgcttccctccggtgcacgctcggcgctttctgtgaatgtgattttcgtccagatctccccggactcgagtgtgacctggcccagcacctggctggccagcaccttgccaaagcgctggtggtgaaggcccttaaggcattcgtgcgcgatccagcccctaccaagcctctggttctgagcctgcatggctggactgggacagggaagagctatgtcagctccctgctagcccactatttatttcagggaggattgcggagtccgagggtgcatcacttcagccccgtgttgcatttcccccatcccagtcatatcgagcgatacaaaaaagacttgaaatcttgggtccagggaaacctcacagcctgcggacgaagcttgtttctctttgatgagatggataagatgccaccagggcttatggaagtacttaggcccttcctcggttcctcatgggtagtctatggcaccaattaccgtaaagctatatttatattcattcgctggctgcttaaactgggtcatcatggtagggcccctccgcgtaggagcggagccttgccacctgctcctgcagctccccgaccagcactgcgcgcacaacgggcagggccagctgggcctggcgcaaagggctag

SEQ ID NO: 10550 - DNA, 627 bp, synthetic construct
  misc_feature 1..627: note = source = /note="Description of Artificial Sequence: Synthetic coding sequence"
  source 1..627: mol_type = other DNA
atgttagggctgttggtggccttacttgcattgggtctcgcggtattcgccctgctggacgtttggtatctggtaaggcttccgtgtgccgttttgagagcacgtcttctccaacccagagttagggacctgctggccgagcagagattccccggacgagtgctacccagtgatctggacctgctactgcacatgaataatgcgaggtacctcagagaggccgacttcgcgagggtagcccacctcacgaggtgcggcgtcctcggggctctacgcgaattaagggcccacaccgtgctggccgctagctgcgcccgacaccggagatccctgaggctgctcgaacccttcgaggtccgcacaaggctcctgggctgggatgatcgggcattctacctcgaggcccgattcgtctccctgcgggatgggttcgtttgcgctctgcttcgttttagacagcacctcttagggacctcccctgagcgtgtcgtccaacacctgtgtcagcgcagagttgaaccaccagaactgcctgcagatctgcagcattggatcagttacaacgaagcctcttctcaacttctgcgaatggagtctggtttatctgacgtgacgaaggatcagtag

SEQ ID NO: 10551 - DNA, 423 bp, synthetic construct
  misc_feature 1..423: note = source = /note="Description of Artificial Sequence: Synthetic coding sequence"
  source 1..423: mol_type = other DNA
atgctggtcaaattgaacagccaagctaggttgtcatctatggtgaagaaggtgaggttaccgtctcgttgtgagcctcccggaacaacatgcacagttagcgggtggggcactaccacgtcgcctgatgtcacgtttccttcggatctaatgtgcgtcgatgtgaagttaatctccccccaagactgtaccaaggtctataaggatcttctggagaattccatgctgtgtgctgggattccagattcaaagaagaatgcatgcaatggagattcaggtggcccactggtctgccggggtaccctccaaggtttggtgtcatggggcactttcccttgcggccagcctaacgacccaggtgtgtacactcaggtttgcaaatttacgaagtggataaatgatacgatgaagaagcatcgctag

SEQ ID NO: 10552 - DNA, 354 bp, synthetic construct
  misc_feature 1..354: note = source = /note="Description of Artificial Sequence: Synthetic coding sequence"
  source 1..354: mol_type = other DNA
atgctgtccaaggctcacggctgtaagacagccctcagcctggggagatgccctaaaatccgggaagagtgcgagtttcaagagcgcgacgtgtgtaccaaggataggcagtgccaagataacaagaaatgctgtgtattcagctgcgggaagaagtgtctggatctaaagcaggacgtttgcgaaatgccaaaggagaccggcccttgtctcgcctattttctgcattggtggtatgataaaaaggataatacgtgcagtatgtttgtgtatggaggctgccaggggaacaataataattttcagtctaaggcaaattgtctgaacacgtgtaagaataagcgattcccatag

SEQ ID NO: 10553 - DNA, 2328 bp, synthetic construct
  misc_feature 1..2328: note = source = /note="Description of Artificial Sequence: Synthetic coding sequence"
  source 1..2328: mol_type = other DNA
atgcacccgggaccagaggaggcaggctcgggcagatatgggcctcgctatataaccgatatgggtgccggagaggacgacgaaggctttgaggatgacttggatctcgatatcagcttcgaggaagtgaagcccctgccagctacaaagggcggaaacaagaagttcctcgtggagagcaaaaagatgtcaatctccaatccgaagaccatttctcgactgataccgcctacctctgcatccttacccgtgacaacagtagccccacaacctatccccattcagcgaaaggggaaaaacggtgtcgcaattatgagtcgactatttgatatgccctgtgatgaaacactgtgttccgctgactctttttgtgtcaacgactatacgtggggcggatcccgatgccaatgtaccctagggaaaggaggtgagtcttgctcagaggatattgtgattcagtacccccagttcttcggacacagctatgtgaccttcgaacccctgaaaaactcttatcaggcctttcagatcacgctggagtttcgagcagaagccgaagatggactgctgctgtactgcggggagaacgaacacggcagaggcgatttcatgagcctggctataattaggcggtctctgcaattcagattcaactgtggaactggggtggccataatcgtgtcggaaactaagatcaaactgggtggatggcacactgttatgctgtatcgggacggtcttaacggcctgctgcagctcaataacggcacacccgtgacaggtcagagtcagggccagtacagtaagatcacgttccgcacacccttataccttggaggcgcaccctccgcatactggctggttcgggctacaggtacgaaccgcggattccagggatgtgtgcagtcacttgctgtcaatggacgtcgcattgacatgcggccatggcctctgggcaaagctctgtctggagccgatgtgggcgaatgctctagcgggatctgcgacgaagctagctgtatccacggaggaacatgcactgctatcaaagccgactcttacatctgcttgtgtcctctgggttttaaaggtcgtcattgtgaggacgcattcaccctcacgatcccccagtttcgagagtccttgcgtagttacgccgcaacaccttggcccctggaaccacagcactatctttctttcatggagtttgagattacttttagaccagacagcggggacggggtgctgctttactcctacgacactggatcgaaggacttcctttccattaacctagctggtggccatgtcgaattcaggtttgactgcggcagcggcactggggtgctgaggagtgaggatcctctaaccctgggcaattggcacgaactgcgggtctcacgaactgctaagaacggaattttacaagtggataaacaaaagattgttgagggcatggccgaaggaggttttactcagattaagtgtaacacagatatcttcattgggggagtgccaaattatgatgacgtcaaaaagaactccggagtgctcaaacctttcagcggtagtatccagaagattattttaaacgacaggaccattcacgtgaagcacgatttcacttcaggtgtcaacgtcgaaaatgccgctcacccatgcgtgcgcgctccgtgtgcccatggtgggagttgtcgccctaggaaggagggctacgactgcgattgtccactgggcttcgagggcctgcactgtcagaaagcaattatcgaagccatagaaattcctcagtttatcggccgtagttaccttacttatgataatcccgacatcctgaagcgagtttccggatcaaggtctaatgtgttcatgcgcttcaagacaactgcaaaagacggccttttactgtggcgaggcgacagcccaatgaggcctaacagcgacttcatcagtctgggactccgggacggcgctctggttttttcatataatttggggtcaggggtcgcaagcataatggtgaacggaagctttaatgacggacgatggcaccgcgtcaaagcagtacgggatggccagtctggcaagatcaccgtcgatgactacggagccagaactggcaaaagccctggtatgatgagacagctaaatatcaacggcgcattgtacgttggcggtatgaaagaaattgccctccacactaatcgacagtacatgcggggtctggtcgggtgtattagccactttactctgtctacggattaccatattagtttagtggaagatgccgtagatggaaaaaatatcaatacatgcggcgcaaaatag

SEQ ID NO: 10554 - DNA, 1257 bp, synthetic construct
  misc_feature 1..1257: note = source = /note="Description of Artificial Sequence: Synthetic coding sequence"
  source 1..1257: mol_type = other DNA
atgcgtacactattcaacctgctgtggctggccctcgcctgcagcccagtccataccaccctcagtaagtccgacgcgaagaaggccgcttcaaaaacactgctggaaaaagtgaaattctgcagttgttgccccggttggtcagccatggcacggtcgtggctaacagccacctctgctacccagagtcaattcagcgacaaacctgtccaggatcgtggcttggtggtgacagacctgaaggccgaatcagttgtgctggagcatcgaagttactgcagtgctaaggccagagacagacactttgccggagatgttctgggctacgtgaccccctggaactcccacggatacgacgtgacaaaggtttttggcagcaagtttacgcaaatttctcccgtgtggttgcaattgaaacggaggggtagagagatgttcgaggtcacgggactgcatgacgtggaccaggggtggatgcgcgcagttcgaaaacatgccaagggcctccatatcgtccccagactgctgtttgaggactggacatatgacgatttcagaaatgtgctggacagcgaagatgagatcgaagaattgtctaagaccgttgtgcaggtcgctaagaaccaacactttgacggatttgtcgtggaggtctggaatcagttactaagtcagaagagggtggggctgatccacatgcttacacacttagccgaggccttgcaccaggccagactcttagccctgctggtcatacctccagccattacccctggcacagaccaactaggaatgtttactcataaggaattcgagcagcttgcacccgtccttgatggcttctcattgatgacctatgactactctaccgctcaccaaccagggcctaatgctccgctatcatgggtcagagcctgcgtgcaggtcctagaccctaaaagcaagtggcggtcaaagatactattgggactcaacttttatggcatggattacgcaacatcaaaggacgccagggagcctgtagtaggcgctcgatatatccaaaccctgaaagaccacaggcccagaatggtatgggatagtcaggccagcgagcactttttcgagtataagaagagcagatctggacgccacgtcgtgttctaccccactctcaaaagcttacaagtgcgactcgagcttgccagagaactgggcgtaggggtgtcgatctgggaactgggccagggtttggattacttctacgatctgctttag

SEQ ID NO: 10555 - DNA, 813 bp, synthetic construct
  misc_feature 1..813: note = source = /note="Description of Artificial Sequence: Synthetic coding sequence"
  source 1..813: mol_type = other DNA
atgatgctccgactgctctcgagccttttgttggttgcagtcgcctccgggtatgggcctccctcttcgaggcccagctctagggttgtgaatggagaagatgcagtcccttattcctggccatggcaggtttccctacagtacgaaaaaagtggctccttctaccacacttgcggcggaagcctcattgcccctgactgggtggtgaccgcaggacattgcattagcagttcccgaacataccaggttgtcctcggcgagtatgatagggcagttaaggagggcccagagcaggtgattcctattaatagcggcgatctattcgtacaccccctgtggaacagatcttgcgtggcctgcggaaatgacatcgcactcattaaactcagccggtctgcccagcttggcgatgcagtgcagcttgcatctctgcccccagcaggcgatatcctgccaaacgagactccttgctatattacaggatggggccgactgtatacaaacggccctcttccggacaaactgcaggaggccctactgcctgtagttgactatgaacattgtagtagatggaactggtggggttcgagtgtaaagaagacaatggtatgtgcaggcggtgacattagaagcggatgtaacggggactcaggtggacccctgaactgtcctactgaagatggaggatggcaggtgcacggagtgacatctttcgtatccgcattcgggtgcaacacacgcaggaagcctacagtttttacgcgcgtgtcggcatttatcgactggatagaggagactatcgcctcccactag

SEQ ID NO: 10556 - DNA, 585 bp, synthetic construct
  misc_feature 1..585: note = source = /note="Description of Artificial Sequence: Synthetic coding sequence"
  source 1..585: mol_type = other DNA
atgactatgcggcacaactggacgcctgatctgtcacccttgtgggttctgctgttgtgcgcacatgttgtgaccctgttggtcagggccacaccagttagtcagacaaccacagcagctactgcgtcagtaaggtccaccaaggacccctgccccagccagcctcctgtgtttcctgctgctaagcaatgtccggctctagaagtcacatggcccgaagttgaagttccgcttaatgggacactctccctgtcctgtgtcgcctgttctcgcttcccaaattttagcatcctctactggctcgggaacggctcgtttattgaacaccttcctggacgtctgtgggagggctcgacatcccgcgagagaggttcaacagggacgcaactgtgcaaggctttggtgctggagcagctgactcccgctctgcacagcaccaacttctcttgcgtgctggtggatccagagcaggtggtgcaacggcatgtggtcctggcacagctctgggccggacttagagcaaccctgcccccaacccaggaggccctgccttcatcgcatagctcccctcagcagcagggttag

SEQ ID NO: 10557 - DNA, 1308 bp, synthetic construct
  misc_feature 1..1308: note = source = /note="Description of Artificial Sequence: Synthetic coding sequence"
  source 1..1308: mol_type = other DNA
atgcagggacagggcaggcgcagagggacctgcaaggatattttctgcagtaagatggcgtcatatctttacggagtgttgttcgcagtgggattgtgcgcccctatctattgcgtctcacccgcaaacgctccatctgcctatcccagaccctcctcaaccaagagtactccagcgtcccaagtgtactccctcaatactgatttcgcctttagactctacagaagattggttttagagactccttcccagaatatctttttcagcccagttagcgtctccacctccctcgccatgctgtcactcggcgctcattctgtgactaaaacgcagattctccagggcctggggttcaacctgacacacacacccgagtctgctattcatcaggggtttcagcatctggtccattctctgactgtgccttcaaaagatctcaccctcaagatgggatcagctcttttcgttaagaaggaactgcaactgcaggccaatttccttggaaatgttaagagactgtacgaagccgaggtgtttagtaccgattttagtaacccaagtatagcccaggctcgcattaatagtcacgtgaaaaaaaaaactcaaggcaaagtggtcgacattatccaaggccttgatctgcttacagccatggtgctcgtgaaccacatcttttttaaggcgaagtgggagaaaccatttcatccagagtacacaaggaagaattttccttttcttgtcggggagcaggtaactgtgcacgtcccgatgatgcatcagaaggagcagttcgcattcggggtcgacaccgagctcaactgtttcgtgcttcaaatggattataaaggggacgccgtggctttttttgttctcccaagcaaaggcaaaatgagacagttggagcaggccctgtcagccagaaccttgcgaaaatggagtcattctcttcagaagagatggatcgaggtcttcattcccagattcagtatttctgcatcctataacctggagaccattctccccaaaatgggaatccaaaacgtgtttgacaagaatgctgacttcagcggaattgccaagcgggactccctgcaagtaagcaaagccacccataaggccgtgctggatgttagcgaggaaggtactgaggccaccgctgctaccacaaccaaatttatcgtgcgctccaaggacgggccttcttacttcacagtcagtttcaacaggacctttctgatgatgattacaaataaggccacagatggtatcctatttcttggcaaagttgaaaaccctacaaaatcctag

SEQ ID NO: 10558 - DNA, 393 bp, synthetic construct
  misc_feature 1..393: note = source = /note="Description of Artificial Sequence: Synthetic coding sequence"
  source 1..393: mol_type = other DNA
atggcgagtgacctgataaggacaatattggccgtagccctgatcagtaaactcggcaccgcagtcgatgctgagttgatgccttccggcgcaattttgcagaataagcgcgagaacctgccccgagtgtgccacgcccttgccttcctgggaatggccagatgccaggatctgtttctcgtaagacttcaggggtggaagctcggcacacgcttccaagatggccctaggagcacaccccaagaggaggggggaagccctcagcggaagcgcggaatgccggtgcagatacactttttattgaagtcattcctgagctcccccatcacattcgcgttcattagtctggctcgtacggtgagtctggcaacagccatttgtaaaattgtgtag

SEQ ID NO: 10559 - DNA, 837 bp, synthetic construct
  misc_feature 1..837: note = source = /note="Description of Artificial Sequence: Synthetic coding sequence"
  source 1..837: mol_type = other DNA
atgcagtggttgcgggtgagggagtcccctggcgaggcaacggggcacagggtgaccatgggcaccgcagcactgggaccagtatgggccgctctgctcttgttcctgctcatgtgtgagattccaatggtggagctgacctttgatagagccgtggcgtcgggctgccaacgctgttgcgactccgaggacccactggacccagctcatgtctcgtcagcctcaagttccggtagaccacacgcactcccagagatcaggccctatatcaatattacaattctgaaaggcgacaagggagaccctgggcctatgggcctgcccggatacatgggccgagaaggtccccagggggaacctggcccacaaggctccaagggagataagggagagatggggagtcctggcgctccatgccagaaacgtttcttcgcattcagcgtgggaagaaaaaccgccctgcacagcggtgaagattttcagactctcctcttcgagagggtgttcgttaatttggacggatgttttgacatggccaccggtcagtttgctgccccactcagggggatttatttcttttctttaaatgtccactcctggaattacaaagaaacctacgtccatataatgcacaaccagaaggaggcagtcattctttacgcacagccatccgagcggagcataatgcaatctcaatccgtgatgctggaccttgcctatggtgatcgcgtgtgggtgcgactcttcaaacgtcagagagagaatgcaatatattcaaatgattttgacacttacattaccttttcggggcacctgattaaggcagaggatgactag

SEQ ID NO: 10560 - DNA, 1635 bp, synthetic construct
  misc_feature 1..1635: note = source = /note="Description of Artificial Sequence: Synthetic coding sequence"
  source 1..1635: mol_type = other DNA
atgtgcactgtagtagatccaaggatcgtaaggagatacttactgagacgtcagcttggccaaggcgcttatggtattgtgtggaaagcagtggatcgcaggaccggtgaggtagtggctatcaagaagatcttcgatgccttcagggacaagaccgatgcccagaggacatttagggagataaccctgctgcaggaattcggtgatcaccctaacattatcagcctgcttgacgtgattcgggctgaaaacgatcgagacatctatttagtctttgagtttatggatactgatctaaacgcagtgatccgaaagggcggactactgcaagatgtgcacgtccggtcaattttctaccagctgctgcgcgctaccagatttctgcacagcggccacgtggtgcaccgggatcagaagccctctaacgttttgctcgacgctaactgcacagttaagctttgcgattttggacttgcccgatctctcggggatctgcccgaagggccagaggaccaggcagtgaccgaatacgtcgcgacacgctggtatcgggcaccggaggttctcctgtcatcccataggtataccctcggtgtcgatatgtggagcctcggatgtattcttggggagatgctgcggggacgccctttgtttcctggtacaagtactttacaccagttagagctgattttggaaacaatacctccaccctccgaagaagacttgctggccctgggctccggctgtcgcgctagtgtactgcatcaactgggcagcagaccacgccaaacattggacgctttgttgccccctgataccagccccgaggccctcgatctcctgagacgactgctggtgtttgcaccagacaagcgactgagcgcaactcaggccctgcagcatccgtatgtacagcggttccattgcccctccgatgagtgggccagggaagcggacgtgcgccctagggcccacgagggggtccagctgtcagtgccagagtatcgctctagagtctaccagatgatccttgagtgcgggggttcctcgggaacttctcgggaaaaggggcctgaaggagttagtccttcccaggctcatctgcataagccaagagccgacccccaattaccctctaggacaccagtgcagggcccacgaccaaggccccagtcctcccccggtcatgatcctgcggagcacgaatctcccagggcggctaagaatgtgccaaggcagaattctgcgccactcctccagacagcactgttgggaaatggtgaacgcccaccaggagcaaaggaggcgcctccgttaactctgtcgttggtgaaaccctctggcaggggcgcagccccttcattaacgtctcaggccgcagcacaggtagcgaatcaggcactgataagaggcgattggaatcgcggagggggagtgagagttgcttccgtccagcaggttcctcctcgtctgccccctgaagctcgccctggcaggcgcatgtttagcacatctgcgttacagggtgcacaagggggtgccagagcactgctggggggttactcccaggcatatggaaccgtatgccacagcgccctggggcacctaccacttctagagggacatcacgtatag

SEQ ID NO: 10561 - DNA, 399 bp, synthetic construct
  misc_feature 1..399: note = source = /note="Description of Artificial Sequence: Synthetic coding sequence"
  source 1..399: mol_type = other DNA
atgaagtcttccgggctgttcccattcctggtgttgctggccctgggaaccctggccccatgggccgtggaggggagtggcaaaagctttaaggcaggagtgtgtcctcctaaaaaaagcgcccagtgtctgcggtataaaaaaccagagtgccagtcagactggcaatgtcccggaaaaaaaaggtgctgccctgatacttgcgggattaagtgcttagaccccgtcgatacacctaatcccacccggagaaaacccggaaagtgtcccgtgacctatggacaatgtcttatgctgaatcctccaaatttctgcgaaatggatggccagtgtaaaagagacctgaagtgttgtatgggcatgtgcggcaaatcctgcgtctctcctgtaaaagcttag

SEQ ID NO: 10562 - DNA, 1401 bp, synthetic construct
  misc_feature 1..1401: note = source = /note="Description of Artificial Sequence: Synthetic coding sequence"
  source 1..1401: mol_type = other DNA
atgaagcccccacttttagtgtttatcgtctgtctgctgtggctgaaggattcccactgtgctccaacttggaaggacaagactgccatttctgaaaatctaaagtccttttcggaggttggtgaaatagatgccgacgaagaagtgaagaaggctctgacaggcatcaagcaaatgaagataatgatggagcgcaaggagaaagagcacaccaatcttatgtcaacattgaagaagtgcagggaggagaagcaagaggccctgaaactcctaaacgaggtgcaggaacatctagaagaggaggagaggctatgccgcgagagtctggccgactcatggggggaatgtcggagctgtctcgaaaacaattgtatgcgcatatacactacatgccagccgagctggagctctgtcaagaacaaaattgaacgcttttttcgcaaaatctatcagtttctcttccctttccatgaagacaatgagaaggacctcccaatctccgaaaagttaatcgaagaggatgctcagctcacgcaaatggaggacgtcttcagccagctgactgtggatgtgaacagcctgtttaatcggtctttcaatgtgtttcgccagatgcaacaggagttcgaccagactttccagtctcattttatatcagatactgatttaacagaaccttatttcttccctgctttctctaaagaacccatgaccaaagccgacttagagcaatgttgggatatccctaacttttttcagctgttctgcaactttagtgtcagcatttatgaaagcgtttccgagactattaccaagatgcttaaagccatcgaggatctcccaaaacaggataaagccccagatcacggcggactgatcagcaaaatgctccctggccaagatagaggactctgcggcgaactcgaccagaatttgtccagatgcttcaaattccatgaaaagtgccagaagtgccaggctcacctctctgaggattgtccagacgttcctgcactgcacacagagctggacgaggcgattcggttggtcaatgtgagcaaccagcaatatggacaaatactccagatgacaaggaaacatctggaggatactgcatacctcgtagagaagatgcgtggccagttcggttgggtatccgaactcgccaaccaggcaccagaaacggagatcatattcaatagcattcaggtagtgcctaggattcatgaggggaacatatctaagcaggatgaaaccatgatgactgatctctcaatccttccatccagtaacttcacattaaaaatccccctggaggagtccgcggagtcttcaaatttcattggctacgtcgtggcaaaagcgttgcagcacttcaaagagcattttaaaacttggtag

SEQ ID NO: 10563 - DNA, 522 bp, synthetic construct
  misc_feature 1..522: note = source = /note="Description of Artificial Sequence: Synthetic coding sequence"
  source 1..522: mol_type = other DNA
atgcactggaagatgttactcctgctcctcctttactacaacgccgaagcctccatgtgccaccgctggagccgagcggtgctttttcctgcggctcaccgtccaaaaagatcgagtagccttcctctgaacccggtgttgcaaacctcactggaagaggtcgaacttctctacgaattccttctggcagaacttgaaatctcgccagatctgcagatctccatcaaggacgaggagcttgccagcttacgaaaagctagtgacttcaggacagtgtgtaacaatgttattcccaagagtatcccagatatccgtcggctctcagcatcactgagttcacatcccggaattctgaagaaagaagatttcgaacggactgtcctgactttggcctatacagcctatcggaccgcgcttagccacggccatcagaaggatatatgggcccaatccctagtgtcactattccaagccctgcgacatgacttgatgcgctcatcgcagcccggtgtccccccttag

SEQ ID NO: 10564 - DNA, 1473 bp, synthetic construct
  misc_feature 1..1473: note = source = /note="Description of Artificial Sequence: Synthetic coding sequence"
  source 1..1473: mol_type = other DNA
atggaagattccgactctgctgccaagcagctgggtctcgccgaggctgcagcagtcgctgcagcggcagctgttgccgctgccgcagccgctgctgccggtggtgaagccgaagaaccggtgctttcacgtgacgaagactcggaggaggatgctgactcagaggccgaacgtgagactcccagagtgactgcagtggccgtcatggccgctgagccaggccacatggatatgggcgcagaggcattgcctggcccagatgaagcagccgctgctgcagcgttcgccgaggtaacaaccgttacagtcgccaacgtaggtgccgctgcagacaacgtgttcaccacaagtgtggccaacgccgcttctatttccgggcacgtgctcagtgggaggaccgcactgcagatcggtgatagtctgaacaccgaaaaggcgacactgattgtggtgcacacagacggctccatcgtagagactacagggctcaaaggcccagctgcaccattgacccctgggcctcagagcccccctacacctctggcgcctggccaagaaaaggggggaacaaagtacaattgggatccgagtgtctatgattctgagctgccagtgaggtgcaggaacataagtggtactctgtacaagaatcggctgggctctgggtgggacctgaagcctagccgctgcctgctacacttatgctgtctgcttagaagacacgatttgattacagtgacccctagcggccaaatcactacatccggggctctgacttttgatcgcgcatcaactgtggaagcgacagcggtcatttctgagagccccgcacagggcgacgtgtttgccggtgcaacagtgcaggaggccagcgtccagccaccttgtcgggctagtcatcctgagccccactacccaggatatcaagacagttgccaaatagcaccattccctgaggccgcactacctactagccatccaaagattgtgctgactagtctcccagccctggctgtacctcctcccactccgactaaggccgcaccccctgccctggtcaatggcctggagctctcagaacctcgctcctggctttatctggaggaaatggtcaattccctgcttaacacagcacagcagttaaaaactctgtttgaacaagccaagcacgccagtacgtatagagaagctgccacaaatcaggccaaaattcatgccgatgccgaacgaaaagaggttattcaccctcctcgattacccaaggtactgggcctccagcagtcctgcgttaattgcggaagggaagcgatgagcgagtgcaccgggtgccacaaagtgaactactgctctaccttttgtcagaggaaggactggaaagatcaccagcatatctgcgggcagagtgcagctgtgacagtccaagcggatgaggtacacgtagcggaatccgttatggagaaagttaccgtatag

SEQ ID NO: 10565 - DNA, 1476 bp, synthetic construct
  misc_feature 1..1476: note = source = /note="Description of Artificial Sequence: Synthetic coding sequence"
  source 1..1476: mol_type = other DNA
atgcctagcaccgtcctgcctagcaccgtgttgccaagtctgctcccaaccgctggcgcaggctggtccatgcgctggatcctgtgttggtcgcttacgctttgtctaatggcacagaccgccctgggcgcactgcacaccaagagacctcaagtggttactaaatacggtacactacaagggaagcagatgcacgttggaaagacgcctatccaggtattccttggtgtacccttttcccgacctcctctgggaatattgcgattcgctcccccagaaccacccgaaccctggaagggcatccgagacgcaactacgtatccacctgggtgtctccaagaatcctggggtcagttggcttccatgtacgtcagtacacgagagcgttacaaatggttacgtttctcagaagattgtctgtacctcaacgtatatgcccctgcaagagcacctggcgatccccagttgcctgtgatggtttggttcccgggtggagctttcattgtcggggctgcatcctcgtacgagggatcagatctcgccgctcgggaaaaggtcgtgttggtgttcctgcagcatcgtctggggatcttcgggtttctgagcactgacgactctcacgcaagaggtaactggggcctccttgatcagatggctgctcttcggtgggtccaggaaaatattgccgcattcggaggggatcctggaaacgttactcttttcggtcagtcagcaggagccatgtctatttcaggcctgatgatgtcccctttggcctctgggctgtttcaccgggctattagccagagcggaaccgcgcttttcaggcttttcatcaccagtaatccgttgaaggtcgcgaaaaaggtcgcgcacctggcgggttgcaaccataattccacccagatcctggtcaactgcctgcgcgctctttccggtaccaaagtgatgagagtatccaacaagatgagattccttcaactgaactttcagcgagatcctgaggaaatcatctggtcaatgtcacctgttgtagacggggtggtgatcccagacgatcccttggttcttctgacccagggaaaggtttcctcggtaccttatctgctcggtgtgaacaacctggaatttaattggctgcttccctatattatgaagtttcctctgaaccgccaggcaatgcgaaaggaaactataactaagatgttgtggagtactaggacacttttgaatatcaccaaggaacaagttcccctagtagtcgaggagtatctggataatgttaacgagcacgactggaaaatgctccgcaacaggatgatggatatagtccaagacgccacatttgtgtatgcaactctccagactgcccactaccacagagagactcctatgatggggatttgcccagcaggacatgcaactactagaatgaagtccacctgctcctggatccttccccaggagtgggcgtag

SEQ ID NO: 10566 - DNA, 753 bp, synthetic construct
  misc_feature 1..753: note = source = /note="Description of Artificial Sequence: Synthetic coding sequence"
  source 1..753: mol_type = other DNA
atgccagcttctagcccttttctgctggccccaaaagggccaccaggcaacatgggcggtcccgtgagagaacctgccctgagcgtggctctgtggctgagttggggagctgcacttggcgctgttgcatgcgccatggctttgctgacccagcagaccgaacttcaatccctgaggagagaggtgtcacgactccagggcaccggcggaccttcccagaatggggaagggtacccatggcagagtcttccagagcagagctcggacgcccttgaggcctgggaaaatggagagcggtccagaaaaagaagggcagtgctgacccagaagcagaagaagcaacactccgtgttgcatctggttcccatcaacgcaacctcaaaagatgacagcgatgtgacagaggtgatgtggcaacccgctctgcgtcggggtcgagggctgcaggcccagggatacggagtgcggattcaggatgccggagtgtaccttctttactcccaggtactgttccaggacgtcacattcactatgggacaggtcgtctctagagaggggcaaggccgtcaagaaaccctttttagatgcatacgatccatgcctagtcatccagatagagcctacaattcctgctattccgccggtgtattccatctgcatcaaggtgacatcctgtccgtgataatccccagagccagggcaaagctcaacctcagccctcacggaacgtttctcgggttcgtaaaactttag

SEQ ID NO: 10567 - DNA, 1437 bp, synthetic construct
  misc_feature 1..1437: note = source = /note="Description of Artificial Sequence: Synthetic coding sequence"
  source 1..1437: mol_type = other DNA
atgtcccctccgcttctgaagctgggggcagttctatcaactatggccatgatctccaattggatgagtcagacactgccctccctcgtgggcctgaacaccacacgcctcagcaccccggatacgctgacccagatctcaccgaaagagggatggcaggtatactcctcagcccaggacccagatggcaggtgtatttgcacagtagtggcgccagagcagaatttgtgtagcagagatgcaaagagcagacagctgcggcagctcctggagaaagtgcagaacatgagtcaaagcatcgaggtgctgaatctccggacccaacgagatttccagtatgtgctgaaaatggagactcagatgaagggattaaaagcaaaattccggcagattgaagacgatcggaagacactaatgacaaagcatttccaagaactgaaggaaaagatggatgaattgctgccactgattcccgtgctcgagcagtacaagactgacgcaaaactgatcactcagttcaaagaagaaatccgaaacttatccgccgtcttaacaggcatccaggaggaaattggggcttatgactacgaagagctacatcagagggtgctgtcgctagaaacaaggctccgggattgcatgaagaagttgacatgcggaaaactgatgaaaattacaggtcccgtgacagtcaagacctctggcacgcggtttggcgcatggatgaccgatccgctggcatccgagaagaacaacagggtatggtacatggatagctacaccaacaacaagatcgtccgcgagtacaaatccatagccgatttcgtctccggggctgaaagtcggacttacaatctccctttcaaatgggccggaaccaatcacgtggtgtacaacggctccttatacttcaataaatatcagtccaacatcatcattaaatactcatttgacatgggaagggtccttgcccagaggagcttggaatacgcaggatttcacaacgtttacccttacacctggggcggattctccgatatcgatctgatggctgacgaaattgggctgtgggcggtgtacgccacgaaccagaacgccggaaatattgtcatttcccaattgaaccaggacactctagaggttatgaaaagttggagtacaggatacccaaagcggtcagcgggtgaatctttcatgatctgtggcacactgtacgtgactaattctcatctaacaggtgccaaagtttattattcttattcaactaaaacatccacatatgaatatacagatataccttttcacaatcaatacttccatattagcatgctggactacaacgcacgggacagggccttgtacgcctggaacaacggacaccaggtgctgttcaacgtgacactcttccatattataaaaacagaggacgatacctag

SEQ ID NO: 10568 - DNA, 1101 bp, synthetic construct
  misc_feature 1..1101: note = source = /note="Description of Artificial Sequence: Synthetic coding sequence"
  source 1..1101: mol_type = other DNA
atggcaagagagcggcctcctgggcgaggctgcggagtgctcagacgttgtctgctgggagcggtgcttctgttcggactacgactctgcgctgaactcaggcgggctggtccaggcagcccaacaaggtctgctccacctggacctgcatggcgcccacccggtcctcacttgccgcctgctccgggtcagcctagaggagcatctcggaggcaggtgacgtacgtccggtctggcagacgtgcaccgccaggagggggaggaagtggaacccccgagcctggatgttgcgcccctcgtgggagaccgaggcgaaaggggcctaggtggcacattgatctgcagccatgggccggatctgcccaatcacttgatgaggaggcatggagattcctgcgttacatcagcaccactcaaattgcctgtaaccacatgaatactgattccttagccacagatagttcccctacacacaagccttggtcggtgtgtctagacgacaggttcaaccttgcccaccaaattcggaataaacagtgcagactatactccctgggactgggatccgacgacacccattttgaggtgagcatggcaaacaatggatgtgaggttcataggttcgacccctcagtgaagagtgcccacatcctggagagccagcacctgtggtatcacagactgtcaatcgactggagggatccccatccagccgtggcggcacagaagccacacagcaatacacggaaactgggaagcatcctcaatgagtttggccatcacaaaatcgatgtattgaaggcggacctggagtccgccgagtggaaggtactcgaaaatcttattctggaagatgtcctcgaacagattggacagctcatcttcgagatccaccttcattggccaggatttgaggtaagcggcagcgattcctcagtggtgcgattttggtattcattactgaaggagctggaacaaaaggatttccgcctgttccatagctataaagatctcagcaaaccgcagctttttctgaagaaggatatttttaacgcctcttcttgttatacgctctcctgggtcaatactcgctggaagtag

SEQ ID NO: 10569 - DNA, 300 bp, synthetic construct
  misc_feature 1..300: note = source = /note="Description of Artificial Sequence: Synthetic coding sequence"
  source 1..300: mol_type = other DNA
atgaagattccagtgctccctgccgtggtgttgctgagcctgctcgtgctgcattctgcccagggcgctacgctgggcggacccgaagaagaaagcactatcgagaactacgcaagtagacctgaggctttcaataccccattcctgaatatcgataaacttcggtccgcgtttaaagctgatgaatttttgaattggcatgctcttttcgagtccattaagcgcaaactaccctttctcaattgggatgctttccccaagctgaagggactgagaagcgctactcctgacgctcagtag

SEQ ID NO: 10570 - DNA, 618 bp, synthetic construct
  misc_feature 1..618: note = source = /note="Description of Artificial Sequence: Synthetic coding sequence"
  source 1..618: mol_type = other DNA
atgatgagaaccttaatcactactcacccactccctttgctactgctcccacagcagctcctgcaactagtgcagtttcaagaggtcgacacagactttgactttcccgaggaggataaaaaagaggaatttgaggagtgcctggagaagttcttctcgacaggcccagccaggcctccaaccaaggagaaagtaaagagacgtgtcctcatcgagccagggatgccactgaatcacattgaatactgcaatcacgagataatgggtaagaacgtgtattataagcaccgatgggttgctgagcactactttctgctgatgcagtacgacgaattgcaaaagatttgttataatcggtttgtcccgtgcaagaatgggattcggaagtgcaaccgtagtaaggggctggtagagggggtgtactgcaacctaactgaggcattcgaaatccccgcttgcaagtacgagtctctgtaccgtaagggatacgttctgattacttgttcctggcagaacgaaatgcagaagcgtatcccccacactatcaacgatctcgtcgagcctcccgagcaccgctcattccttagcgaggacggggtgttcgtcatctccccctag

SEQ ID NO: 10571 - DNA, 402 bp, synthetic construct
  misc_feature 1..402: note = source = /note="Description of Artificial Sequence: Synthetic coding sequence"
  source 1..402: mol_type = other DNA
atgctggactggcggctagcatcggctcactttatcctcgcggtaacactcacactgtggtcatctggcaaggtcctgtcagtcgatgtgacaacaaccgaagcatttgattctggggtaatcgacgtgcagtctactcctactgtgagggaggaaaagagcgccaccgatctaacggcaaagctgctgcttctcgacgagctggtcagtctcgaaaatgacgtgatcgaaaccaagaagaaaagatccttctctggctttgggagtcccttggacaggcttagtgccggttccgtagaccataaaggtaaacaaagaaaggtggtggaccaccctaaacgcaggttcgggatccccatggaccggattggaagaaatcggctctcaaactcaagggggtag

SEQ ID NO: 10572 - DNA, 846 bp, synthetic construct
  misc_feature 1..846: note = source = /note="Description of Artificial Sequence: Synthetic coding sequence"
  source 1..846: mol_type = other DNA
atgggtagccgcggacagggcctgttacttgcttattgtttgctgctggcattcgcctccggtctggtgctgagtcgcgtgccccatgtgcagggcgagcaacaagagtgggaaggcactgaagaactgcctagtcccccagatcacgcggagcgcgctgaggaacagcacgaaaagtaccggccaagccaagatcagggactccctgcatccagatgtctcaggtgctgcgatcctgggacatcaatgtacccagccactgccgtaccacagattaacatcactatcttgaaaggcgaaaaaggcgacagaggcgataggggattacagggaaaatatggcaagaccggcagcgcaggcgctcgcggacacactggtccgaaaggacagaaagggtcaatgggcgcaccaggggagcgctgcaaaagccattatgcagcttttagtgtgggtaggaagaagcccatgcatagcaaccattactatcagacggtgatattcgacactgaattcgtcaacctgtatgaccacttcaatatgtttaccggtaagttttattgctacgtgcctgggctttacttcttcagtcttaacgtgcacacgtggaatcaaaaggagacctacctgcacattatgaaaaatgaggaggaagtggtcatcctgttcgcccaggttggagatagaagcatcatgcagtcccaatccctaatgctcgaacttagagagcaagaccaggtttgggtgcgcttatataagggtgaacgggagaacgcgatcttttctgaagagcttgatacctatatcaccttctccgggtacctcgtgaagcacgctacagaaccctag

SEQ ID NO: 10573 - DNA, 132 bp, synthetic construct
  misc_feature 1..132: note = source = /note="Description of Artificial Sequence: Synthetic coding sequence"
  source 1..132: mol_type = other DNA
atgaaactcctgtatttattcctggccattctgttggctatcgaagaaccggtaatttctgccctggtgcgaaccgtggggtgttgcctggacacagcccgacagacaccccacccctccatgcatggctag

SEQ ID NO: 10574 - DNA, 861 bp, synthetic construct
  misc_feature 1..861: note = source = /note="Description of Artificial Sequence: Synthetic coding sequence"
  source 1..861: mol_type = other DNA
atgaaggtgctcctgctaaccggtctgggagctctgttctttgcctactattgggacgataatttcgatcctgcatcactccagggcgcaagagtcctgctgacaggcgcaaacgctggcgttggagaggagcttgcgtatcactatgcacggcttgggtctcatttggtgttgacagctcatactgaggcacttctgcagaaagtggtcggcaactgccgtaagttgggagcaccgaaagtcttctatatcgctgcggatatggcaagcccggaggcccctgagtccgttgtccaatttgctctggacaaattggggggattggactatctcgtccttaaccacatagggggagcgcctgccggtactagggccagaagcccccaagccacgagatggctcatgcaggtaaacttcgtctcctacgtgcagctcacttctcgcgctcttccgtccctcacggatagtaaagggagccttgtcgtcgtgtcctctctgttgggcagagtgccgacttcattctcaaccccatacagcgctgctaaatttgcgctcgacgggttttttggctcactcagacgcgagcttgacgttcaggatgtcaacgtagcaatcactatgtgcgtcttgggcctcagggatcgggcttccgccgcagaggccgtccgcggagtcacaagggtgaaagctgcccctggtccaaaggcagctcttgctgtaatccgaggtggagctacaagggcagccggagttttctacccatggcgctttaggctgctgtgcctgctgagacgatggctgcctcgccctagagcctggttcatcaggcaggagctaaatgttactgctgccgctgcttag

SEQ ID NO: 10575 - DNA, 1326 bp, synthetic construct
  misc_feature 1..1326: note = source = /note="Description of Artificial Sequence: Synthetic coding sequence"
  source 1..1326: mol_type = other DNA
atgcgagtggtgacaatcgtgatcttgctgtgcttctgtaaggccgcagaactccggaaagcctctccaggatctgtcaggagcagagtgaatcacggcagggccggagggggaaggaggggcagcaatcccgtcaaaagatacgctcccggactaccttgtgacgtgtatacctacctgcacgaaaagtaccttgactgtcaggaaaggaagctggtgtatgtcctgcccggatggcctcaagacctgctccacatgctcctcgcgagaaataagatcaggacattgaagaataacatgtttagcaagtttaaaaagctgaaatcgctggacctgcagcagaacgaaatctcaaaaatcgaatcggaggcctttttcggtcttaataagctgacaacactgttattgcagcacaaccagataaaagtactcaccgaggaagtcttcatctacacacctctcttgtcctacttgagactttacgataatccctggcattgcacctgcgagatagagacacttatttcaatgctgcaaatccctcggaaccggaacctcggtaactacgcgaagtgcgaaagtccccaggagcagaagaataagaagctccgtcagatcaagagcgaacaactgtgtaacgaggaagagaaggagcagctggatcccaaaccccaggtctcagggagacctccagttataaagccagaggtagacagtactttttgccataattatgtttttcctatccagaccctggactgtaaacggaaggagttgaaaaaggtacctaacaacattccccctgacattgttaaactggacctcagctataacaagattaaccaactgagaccaaaggaattcgaggatgtgcatgaactgaaaaagctgaacctgtcctccaatggcatcgaatttatcgatcccgctgcttttcttggtttaacacatctcgaggaactggacctgagcaacaactctctccaaaactttgactacggcgtgcttgaggacctgtacttcctaaagctcctgtggcttagagataacccgtggcgctgtgactataatatccactacctttactattggctgaaacatcattataatgtgcacttcaacggcctggaatgtaaaactcccgaagaatacaaggggtggagtgtgggaaagtatattagatcctactacgaggagtgccccaaggataaactgccagcatacccagagagctttgaccaggataccgaggatgacgagtgggagaaaaaacatcgggaccatactgcaaagaagcagagcgtgatcatcaccattgtcggttag

SEQ ID NO: 10576 - DNA, 1539 bp, synthetic construct
  misc_feature 1..1539: note = source = /note="Description of Artificial Sequence: Synthetic coding sequence"
  source 1..1539: mol_type = other DNA
atggcagagtcaggattagctatgtggccgagcctgctcctgttgttgttgctcccaggtccacctccagtggccggactagaagatgctgcatttccacatctgggcgagagcttgcagccactcccacgtgcgtgtcccctgcggtgctcttgccctagagtcgacacagtcgattgtgacgggctggacctcagagtgttcccagacaatataactagggcagcccagcatctttcactgcaaaataatcaattgcaggaactgccctacaacgagttaagccgccttagtggtctgcgcactctgaatctgcacaataacctgatctcatctgaaggtttaccagatgaagccttcgagagtctgacgcagctgcaacacctctgtgtcgcacacaataaactgagtgtggctcctcagttccttcccagatcgctacgcgtcgccgatctcgccgcaaatcaggtgatggagatatttcccctcactttcggcgagaaacccgctctccgatccgtctatctccataacaatcaactatccaacgctggactgccacccgacgcttttagaggatcagaagctattgccactctgagtctgtcgaataatcaactgtcgtacctgccgcctagcctgccgccttctcttgagaggctgcacctgcagaataacctaatatctaaggtccctaggggagccctgtcaagacagacgcagctcagggagttgtatttacagcacaaccagctcaccgacagtggtctggacgccactacctttagcaagctgcacagtcttgaatatctcgatctctcacacaatcaattaaccactgtgccagcaggacttccacgcacactcgctatattacaccttggccgaaaccggattcgtcaggtcgaggctgctaggctgcacggcgcaagggggcttcgctacttgctcctccagcacaatcagctggggtccagtgggctgcccgcaggagcattacggccacttaggggccttcacactctccacttatacggcaatggcctcgacagggtgccacccgctttgccccgaagactgagggcactggtgctgccacataatcatgtggccgctctgggagccagagatctggtggcgacacctggactgactgagctcaacctggcctataacagactggcatcagccagggttcaccaccgggctttcagacgcctgagggcgcttcggagcttggacttggcgggtaatcagttgacccggctaccaatggggctgccaaccggcctccgaacacttcagctacagcgtaatcagctgagaatgctggagcccgaacctttggccggtctggaccagctccgggagctgtccctcgctcataatcgcttgagggtgggtgacatcgggcctgggacgtggcacgagctgcaggccctgcaggtacgccatcgtttggtgtcacacaccgtgcctagagctcctccctctccatgcctgccgtgccacgttcccaatatcctcgtgagctggtag

SEQ ID NO: 10577 - DNA, 2328 bp, synthetic construct
  misc_feature 1..2328: note = source = /note="Description of Artificial Sequence: Synthetic coding sequence"
  source 1..2328: mol_type = other DNA
atgaaggaaggcccagaagaagctggctctggcagatatggacctcgttacatcaccgatatgggcgcaggagaggacgatgaaggttttgaggatgatctggacttggacatctcttttgaagaggtaaaaccactcccagcgacaaaaggcggtaacaagaagttcctggtcgagagtaagaagatgtcaattagcaaccccaagactatcagtcggctcatccctcccacctcagcatcactcccagtgacgaccgtagcgccacagcccatacctatccaacggaagggaaaaaacggggtggcaataatgtcacgcctgtttgacatgccttgcgacgagaccctgtgctcagccgactccttctgtgtaaatgattacacttggggaggcagcagatgccaatgcactttaggcaaaggcggagagagttgttcggaggacattgtgatccagtatccccagttttttggccacagctacgtcacctttgagccactgaaaaatagctatcaagcattccaaataacactggagttccgagccgaggctgaagacgggcttcttctctactgcggggagaatgagcacggcaggggagatttcatgtcccttgctatcattcgcaggtccctccagttcaggttcaattgcggcaccggagtagccattatcgtgtcagaaacaaagattaaactgggtggatggcacaccgtgatgttgtacagggatggtctgaatgggcttcttcagctgaataacgggacccccgtgactgggcagagccaaggccagtattccaaaataaccttccgaacaccattgtatcttgggggtgccccatctgcatattggctcgtgcgagcaaccggaaccaatcggggattccaaggttgcgttcaatcacttgcggtgaacggaagacgcattgacatgcgcccttggcccctgggaaaggctctatccggggctgatgtaggagagtgcagcagtggaatttgtgacgaggcaagttgcattcatggcggaacatgtaccgcaattaaagccgacagctacatatgtctatgcccccttgggtttaaaggcagacattgcgaggatgccttcacattgacaattccccagttccgtgaatccctcaggtcctatgcagccacaccatggcccttagaaccccagcactatctcagcttcatggagtttgagatcacctttcgtcccgatagcggggatggcgtgttgctgtattcatacgacacaggatccaaagatttcctgtctataaaccttgctggagggcacgtggaatttcgattcgactgtggctctggcactggcgtactacgatctgaggaccctctcaccctcggcaattggcatgagctgagggtgagccgaactgctaagaacgggattcttcaagttgacaagcagaagattgtggaaggaatggccgagggaggtttcacccagatcaaatgtaacacggacattttcattgggggagttcctaactatgatgatgtgaaaaaaaatagcggggtgcttaagccctttagcggctccatccagaaaatcattctaaatgatcgtactattcatgtaaagcacgactttaccagcggggtaaatgtggagaacgccgcacacccctgcgtgcgggcaccctgcgcccatggcggatcttgcagacccagaaaggaggggtacgactgcgactgccccctgggctttgagggcctgcactgccaaaaggcgattatcgaggctattgagattccccagttcattggacgaagctacctgacttatgataaccctgatattctaaaacgcgtgtcaggctccagaagtaatgtctttatgagattcaagactacggctaaggatggactcctgctgtggcgaggagatagtcctatgcgcccaaacagcgattttatttccctggggctccgggacggcgctctggtattctcatataatctgggcagcggtgtggcttctattatggtgaatggctcatttaatgacgggagatggcatagggtcaaggccgtgagggatggccaaagtggcaagattaccgtggatgactatggggcaagaacgggtaaaagccccggtatgatgagacagcttaacattaatggggcactctacgtcggcggtatgaaagaaatagctctgcacactaacagacagtacatgcgcggtcttgttggttgcataagccatttcaccttgagtacagactaccatatcagcctggttgaagacgccgtggatgggaaaaacatcaatacgtgcggtgccaagtag

SEQ ID NO: 10578 - DNA, 1431 bp, synthetic construct
  misc_feature 1..1431: note = source = /note="Description of Artificial Sequence: Synthetic coding sequence"
  source 1..1431: mol_type = other DNA
atgaaatttcaggggcctctggcttgcctgctactggctctgtgcctgggctccggagaagcaggtccacttcagagtggtgaggaatctaccggaaccaatatcggtgaggccctgggtcacgggctgggggatgccttgagtgagggtgttggtaaagcgatcggaaaagaagccggaggagccgctggcagtaaggtcagcgaagcacttggtcaagggacccgtgaggccgttggtacgggagtgcggcaggtacccggttttggggtcgcagacgctttgggaaatcgcgtcggtgaagccgctcatgccttgggtaacactggccacgagattggtaggcaggccgaagacgttattcgccacggcgctgacgcagtcagaggctcttggcagggtgttcccggtcacaatggggcttgggagacctctggaggccacggaatattcgggtcccaggggggactgggcggtcaagggcagggtaatccgggtggattgggtaccccttgggtccatgggtaccccggtaacagcgcaggtagttttggcatgaatccacagggcgcaccatggggccaaggcggtaacggcggtcctcccaatttcgggaccaatactcagggggcagtggcccagcctgggtatgggagtgtccgcgcatccaaccagaatgagggttgcacgaacccccctccatcgggatccggcggaggcagtagcaattcgggaggcggatccggctctcaaagtggcagttctgggagtggtagcaatggcgacaataacaacggatcatcctcagggggatctagctcgggttctagttcgggcggttccagcggaggttcctcaggcggtagtagtggaaattcagggggtagtaggggcgactccgggtcggagagttcttggggctcctccacgggatccagctcaggaaatcatggaggaagtgggggaggaaatggacacaaacccggatgcgagaagcctggcaacgaggcacggggaagcggcgaaagcggtattcagaactctgaaacttcaccagggatgttcaacttcgatacattttggaagaattttaagtcaaaactggggtttatcaattgggatgccattaacaagaatcaggtgcctcctccgtcaacaagagccctgttgtattttagtcggttgtgggaggactttaagcaaaacacaccttttctgaattggaaagccatcattgaaggagccgatgcctcaagtcttcagaaacgggctggcagagacgatcagaattacaattataaccagcacgcttaccctacagcgtatgggggaaaatactctgtcaagacccctgcaaaaggcggtgtgtccccatcatcgagcgcatcccgggtccaaccaggcttattgcagtgggtgaaattctggtag

SEQ ID NO: 10579 - DNA, 1911 bp, synthetic construct
  misc_feature 1..1911: note = source = /note="Description of Artificial Sequence: Synthetic coding sequence"
  source 1..1911: mol_type = other DNA
atgaccacctggagccttcgtagacgccctgctcgtactctcggtttgctcctcctagtggtgctgggtttcctcgtgcttcggcgtctggactggtccaccctggtgccgctacgcctgaggcacagacagcttggtctgcaggctaaggggtggaacttcatgctcgaggattcaactttctggattttcggaggcagtatacattattttagagtgcctcgtgagtactggagggatagactcctgaagatgaaagcttgtggactcaatactctcacaacatatgtcccatggaacttgcatgaaccagaaaggggtaagtttgatttctccggtaaccttgacttggaggcatttgtgctgatggctgccgaaatcggcctttgggtcatcctccggcctggcccttacatttgttcggagatggaccttggtggcctgccttcatggcttctgcaggacccgggaatgcgcctgcggactacttataagggctttacggaggcagtggacctttactttgaccatctcatgtcacgcgtagttcccctccaatataaacgtggcggtccaatcatcgcagtccaggtggaaaacgaatatggatcttacaacaaggatcctgcatacatgccctatgtgaaaaaggcactggaggaccgcggaatagtggaactgctgctgacatccgacaataaggacgggcttagcaagggaatcgtgcagggagttttggctacgattaacctgcagagtacccatgagttgcagctgctgacaacatttctcttcaatgtgcagggcacgcagcctaaaatggtcatggaatattggactggctggtttgatagctggggcggacctcacaacattctcgactcatctgaggtgctgaaaactgtgagcgcaattgtggatgccggatcctccataaacctgtacatgttccatggcggtacaaattttggcttcatgaacggagccatgcattttcatgactataaatctgacgttacatcatatgattacgacgctgtgttgacagaggcaggtgattacactgccaaatacatgaagctgcgagattttttcggatcaatttcgggtattcctcttccccctcctcccgatttactacctaagatgccttatgaacccctgactccggtcctgtatctgtcgctctgggatgcccttaaatacctgggggagcctattaaaagcgaaaagcccattaatatggagaatctgcccgtgaatgggggaaatggtcaatcgttcggctacattctttatgagaccagcattacttcctccggcattctgtcagggcacgtgcacgaccgcggtcaggtatttgtgaacaccgtgtcaattgggtttctagactataagacgaccaagatcgctgtgcctctaatacaggggtacacggtcctgagaatcctggtggaaaatagaggacgcgtaaactacggggaaaacatagacgaccagcggaagggcttaatcggaaatctctacctgaacgatagccctttgaaaaactttagaatctattccctagatatgaagaagtctttctttcagaggttcggcctcgataagtggtccagtctgccggagacccctacactgcccgcatttttcctcggatccctgtctattagctccaccccgtgtgacacattcctgaaacttgaggggtgggaaaagggtgtcgtcttcataaatggccagaatctcggtagatactggaacatcgggcctcaaaagaccctttacttaccaggaccttggttgtcaagtggcattaaccaagttatcgtgtttgaagaaactatggctggtcccgctctgcagttcacggagaccccccacttggggagaaaccaatacattaagtag

SEQ ID NO: 10580 - DNA, 672 bp, synthetic construct
  misc_feature 1..672: note = source = /note="Description of Artificial Sequence: Synthetic coding sequence"
  source 1..672: mol_type = other DNA
atgacccgatggtcgagctatctgctgggctggaccacatttctgttatacagctatgaatcctccggaggcatgcatgaggagtgtgttttccctttcacttataaaggctctgtgtattttacctgcacccacatacattccctttctccatggtgtgctacaagggctgtttataacggacagtggaaatactgtcaaagcgaggattatccaaggtgcatctttccatttatttacaggggtaaggcctataactcctgtatttcccaagggagctttctgggctccttgtggtgcagcgtgactagtgtgtttgatgaaaaacagcaatggaagttctgtgagacaaatgagtacgggggaaactccctccggaagccgtgcattttcccttcaatataccgaaacaacgtggtgtctgattgtatggaagatgagagcaacaagctctggtgtcctacgaccgagaacatggacaaggacggcaagtggagcttttgcgccgataccagaatctctgcactggtccctggcttcccctgtcactttcctttcaactataagaataaaaactacttcaactgcacaaacgagggatctaaagaaaatctggtctggtgcgctacgagctacaattacgaccaggatcacacgtgggtgtactgctag

SEQ ID NO: 10581 - DNA, 1368 bp, synthetic construct
  misc_feature 1..1368: note = source = /note="Description of Artificial Sequence: Synthetic coding sequence"
  source 1..1368: mol_type = other DNA
atgctgcaccccgagacaagcccaggcaggggccacctcttggccgtcttgctcgccctgctgggaactacatgggccgaggtttggccacctcagctgcaagagcaagccccaatggccggtgcgctgaacaggaaggagagcttcctgctgctcagtttacacaatagactgcgctcatgggttcagccgccagctgccgatatgaggagactggattggtctgacagcctagcgcagcttgcacaggcaagagccgcactctgcggaattccaacgccctccctagcgagcggcctctggcgtacgctgcaagtcggctggaacatgcaactgttaccggctggcctcgccagtttcgtggaggtcgttagcttatggtttgcagaaggccagagatattcccacgctgccggagaatgcgctagaaacgctacctgtacgcactatacccagctcgtgtgggcaacctctagccagcttggttgcggcaggcatttatgttccgccggacaaaccgccattgaggcctttgtgtgtgcctactcccctgggggaaattgggaagtgaatggcaaaacgatcatcccatacaaaaagggcgcatggtgctcactgtgtaccgctagcgtgtcagggtgttttaaggcttgggatcatgccggaggcctgtgtgaagtccccagaaacccctgccgaatgtcttgccagaatcacggacggctgaatatttccacatgccactgccattgccctccgggatacacaggcagatactgccaagttcggtgcagtctccagtgcgtccacgggaggtttagagaggaagagtgtagctgtgtttgcgacattggatacgggggtgcccagtgtgcaactaaggtccactttcccttccacacctgcgatctgcgtatcgacggagactgcttcatggtgagctcagaggcagacacttactacagagcccgaatgaagtgtcagagaaagggtggggtgctggcgcagatcaagagccagaaagtacaggacattttggcattctatcttggcagactcgagacaacaaacgaggtcatcgattcagattttgagaccaggaatttttggattgggcttacttataaaaccgccaaggacagctttagatgggcgacaggcgagcatcaggcgttcaccagtttcgcatttgggcaacccgacaatcatggcctggtgtggttaagcgccgcaatgggctttggcaattgcgtcgagcttcaggccagtgcagcttttaactggaatgaccaacgttgtaaaacccgcaataggtacatttgccaattcgcgcaggagcacataagtcgctgggggcctggcagttag

SEQ ID NO: 10582 - DNA, 1425 bp, synthetic construct
  misc_feature 1..1425: note = source = /note="Description of Artificial Sequence: Synthetic coding sequence"
  source 1..1425: mol_type = other DNA
atggcggacatgcagaatcttgtagagcggctggaacgcgctgtgggaagacttgaggcggtttctcacacgtctgacatgcaccgaggctatgcagatagtccatccaagggtgccgctccgtatgtccaagccttcgacagccttctagcgggacctgtggctgaatatctcaaaattagcaaagagatagggggagacgtgcagaagcatgccgagatggtgcatactggtctgaaactggagcgcgctctgctggtcaccgcctcgcagtgtcaacagcctgctgaaaacaagttgtccgacctcctggcacccatcagcgagcagatcaaagaggtgattaccttccgggagaaaaacaggggctccaaattgtttaaccacctgtctgccgtgtccgaaagcatccaggctcttgggtgggtggccatggctccaaaacctggcccttacgtgaaggagatgaatgacgctgcgatgttctatacaaaccgtgtgctgaaggagtataaagatgtagataagaagcatgttgactgggttaaggcatacttatcaatttggacggaactgcaggcctatattaaggaattccacacaacgggcctggcatggagcaaaactggtcccgttgctaaggaacttagtggcctgccctccggaccaagcgctggctcatgccctccccctccacccccatgcccaccgccaccgcctgtgtctacaatatcatgcagttatgaatctgcaagccgtagctcgctgttcgctcagatcaaccagggggaatccatcactcacgccctgaaacatgtgagcgacgacatgaagacccacaagaaccccgctctgaaggcacagtccggccctgtgagaagtgggccaaaacctttttcagctcccaagccccagaccagtccatcccctaagcgagcgaccaagaaagaacccgctgtgctagaattagagggcaaaaagtggcgagtggagaaccaggaaaatgtttccaatctagtgattgaagacaccgaactaaagcaggtggcctatatctataagtgcgttaatactaccttgcagatcaaagggaagatcaattccatcactgtcgataactgtaagaagctcggcctggtattcgacgatgtggtgggaattgtggaaatcattaattccaaagacgtgaaagtacaggtgatgggaaaggtgccgaccatctccattaacaaaacagatggatgccatgcctatttatcgaaaaacagcctggattgtgagatcgtctccgcaaagagttccgagatgaacgtcttaattccaaccgagggaggagattttaatgaattcccggtgccagagcagttcaagacgctgtggaacggacaaaaactcgtgacaactgtgactgagattgctgggtag

SEQ ID NO: 10583 - DNA, 360 bp, synthetic construct
  misc_feature 1..360: note = source = /note="Description of Artificial Sequence: Synthetic coding sequence"
  source 1..360: mol_type = other DNA
atgaataagatcctgtcatctaccgtgtgcttcggactcctcacattgttgagtgtcctttcttttctccagtctgtacatggacgaccctatctcacgcagggcaacgaaatcttccccgataagaaatacaccaaccgggaggaattactgctggccttgctgaataagaacttcgattttcaaaggcctttcaatactgacttggcgctgccgaataagctggaggaactcaatcagttagaaaagctgaaagaacaactggtcgaggagaaggattcggagactagttatgcggtggatggcctgttctctagtcacccatcaaagcgggcttgcttttggaaatattgtgtgtag

SEQ ID NO: 10584 - DNA, 3756 bp, synthetic construct
  misc_feature 1..3756: note = source = /note="Description of Artificial Sequence: Synthetic coding sequence"
  source 1..3756: mol_type = other DNA
atgcgcttgctgctgctggtccctctgttgctggccccagcacccggatcctcggcccctaaagtacgcagacagtccgacacatggggaccatggagccagtggtccccttgctctagaacctgtggcggaggggtcagtttccgcgagaggccttgttatagtcagagacgagacggaggctctagctgcgtgggaccagcacgcagccaccgatcatgcaggacagagagttgtcccgacggggctagggattttcgggcagaacagtgtgcggaattcgatggagcagagtttcaagggcgtcgttaccggtggcttccatattattctgccccaaacaagtgtgaattaaactgtattcctaaaggcgaaaacttttattacaaacatcgagaggctgtggtcgacggaaccccttgtgagcccggtaagcgggatgtttgcgtggacgggtcctgcagagtcgtcggctgcgatcacgagctggattctagcaagcaggaagacaaatgcctacgctgcggcggagatggcacaacctgttatcccgtagcgggtaccttcgatgcaaacgatctgagtagagcagtgaaaaacgtccgcggagaatactacctgaatggtcattggactattgaggccgctagggcacttccagcggcatctaccattctgcattacgagagaggagcggaaggggatctggctccagagcggctgcatgctcgcggtcccacgagtgaaccactggttattgaactcatcagccaggagcccaaccccggagtgcactatgaatatcacctgccactgaggagacccagtcccggttttagttggagccatgggtcttggagcgattgtagtgcagaatgcggtggcggtcaccagtcgagacttgtgttctgcaccatcgatcatgaagcgtatcctgaccacatgtgtcagcggcaaccgaggccagccgataggcggagctgtaatttgcatccctgtcctgagaccaagcgctggaaggccggaccttgggcgccatgttcggcaagctgcggaggcggttcgcagtctagatccgtgtattgtatatccagcgatggagcaggcatccaagaagctgttgaggaggcagagtgtgcgggactgcctggcaaacccccagcaattcaggcatgcaacctgcagcggtgtgcggcatggagtccagagccatggggggaatgctcagtgtcctgtggtgtaggcgtccggaagagatcagtgacctgccggggtgaaagaggttccctccttcacacggccgcatgttcattggaggaccggcctcctcttactgagccatgcgtgcatgaggactgcccgctgctatccgaccaggcttggcatgttggaacctggggcctttgtagtaagtcctgctcttcagggactaggcggagacaagtgatctgcgctattgggcctcccagtcattgtggctctctgcagcacagcaaacccgtcgacgtggaaccgtgcaacacccagccttgccacttgccccaagaggtgccctcaatgcaagatgtgcatacgcccgcttccaatccatggatgcctctgggccctcaggaatctcctgcgtctgactctaggggacagtggtgggcagctcaagagcaccctagcgcccgtggggaccatcggggtgaaaggggagatcccaggggagaccaaggtacccatctttccgctctgggaccagccccatctcttcagcagcccccttaccagcaacctctccgaagcggcagtggaccacacgattgcaggcacagcccgcacgggtgttgcccagatggacacaccgcctcgttgggccctcaatggcagggttgccccggagcaccctgccaacagtctcggtacggttgctgtcccgatcgagtgagtgtggcagaagggcctcaccacgccggatgcactaagtcctacggcggagactcaacagggggaatgccgcgttctagagccgtcgccagcaccgtccataacacacatcagccccaggctcaacaaaacgaaccttctgaatgtagaggttcacagtttggatgctgctatgataacgtggccacagccgctggcccactcggcgaagggtgtgtcggtcagcctagtcacgcataccccgtgcggtgtctcctaccgagcgcccatggatcatgtgcggattgggccgctagatggtattttgttgcaagcgtgggccagtgtaacaggttttggtacggtgggtgtcatggcaacgccaataactttgccagtgaacaagagtgcatgagcagctgtcaaggtagcctgcacggtcccagaaggccacagcctggcgctagcggcagatcgactcacacagatggcggaggctcgagcccagccggagagcaggaaccctcacaacatcgaacgggggctgctgtccagcgtaaaccctggccaagcggcggattatggcgccaagaccagcaacccggtccgggtgaggcccctcacacccaggctttcggcgagtggccatgggggcaggaacttgggtccagggcccctggcttaggtggcgatgcgggtagcccagcacccccttttcacagcagcagttaccgaatctccctggcgggagtggaacccagcctggtccaggccgctctcggacaactggtgagactgtcatgttccgatgacactgcacccgagtcgcaagcagcatggcagaaggacggccaaccaatttcttccgataggcacaggctgcaatttgacgggagcctgattatccatccactgcaggcagaagatgcaggaacttatagctgtggtagcacacggcctgggagagattctcagaagatccagctgcgcatcatcggaggagatatggccgtgctgtcagaagccgaactgtctaggttccctcaaccacgtgaccctgcccaggattttggccaagccggtgctgcaggacccttgggcgcaatcccatcatctcaccctcagccagccaatagactgcgtctggaccagaaccaacctcgcgtcgtagacgcctctcccggtcagagaatcaggatgacttgtcgcgcagagggatttcccccaccagctattgaatggcagagggacggacagcctgttagctctcccagacaccagctgcaacccgatggctccctggtgattagcagagtcgccgtggaagacggcggattttacacatgcgtcgctttcaatgggcaggaccgggaccagcgttgggtacagcttcgggtgctgggcgagctgactatcagcgggctgccccctaccgtgaccgtgcctgagggggacactgcacggcttctttgcgtggtggccggagagagcgtcaatatcagatggtcaagaaatggtctccctgtacaggctgacggacaccgtgtacaccagtccccagatggcaccctgttgatttataatctgcgcgcacgggatgagggcagttacacgtgctctgcatatcaggggagccaagctgttagcagaagtaccgaggtaaaagtcgtttcgcccgcacccaccgcccaaccccgagatcctgggcgtgattgcgtggaccagcccgagctcgctaactgcgatctgattctccaggcccagctgtgtggtaatgagtactatagctcattctgttgtgcctcatgctctaggttccaaccccacgcccagccaatatggcagtag

SEQ ID NO: 10585 - DNA, 1731 bp, synthetic construct
  misc_feature 1..1731: note = source = /note="Description of Artificial Sequence: Synthetic coding sequence"
  source 1..1731: mol_type = other DNA
atggctcagggagtcctctggatcttactcggtctgctcctctggagcgaccccggtactgcttccctccccctgttgatggactctgtaatccaagctttggccgaactggagcaaaaggttcctgccgctaaaacaagacacactgcgagtgcttggttaatgtccgctccaaactcaggtcctcacaatcgtttataccacttcttactgggggcttggtcattgaatgcaacagaattagacccctgtccactgagccccgagctgctgggcctgacgaaggaggttgcacgccatgatgttagggagggtaaggaatacggagtcgtgctggcccctgatggctctacagtcgccgtcgaacccctgctcgccggactggaagcgggattacagggccgtagggtgatcaacttgccactcgactcaatggcagccccatgggagaccggggacacgtttccagacgtcgtggctatcgcgcctgacgtgcgagctacctccagcccagggttacgggatggcagtccagatgttaccacggctgacattggggctaacacacctgacgccacgaaggggtgtcctgacgttcaggcgagtctccctgacgcgaaagctaagagtccacctacgatggtcgattctctcctagctgtcacattggctggtaacctgggacttactttcttaagaggatcccaaacccaaagccacccagatctgggcaccgaagggtgctgggaccaactcagcgcccctaggaccttcactctactcgatccgaaagcgtccctgctaactatggccttcctcaacggcgcactagatggcgtcattctcggtgattatttgagccggacacctgagcctcgaccctccctcagccacttgcttagccagtactacggagctggggtcgcccgagatcccggttttcggagcaattttcgaagacagaatggggctgctctgacctctgcctcgattttggcacagcaagtttggggcaccctggtgctgctgcagagactggaacctgtgcatctccagctacagtgcatgtcccaggaacagttggcgcaagtagcggctaatgctacaaaggagtttactgaggccttcctaggctgtcctgccatccatcctcgatgtcgttggggcgcagcaccctatcgagggaggcccaagcttctgcagctgccgctgggctttctctacgtacaccacacttatgtccctgcaccaccctgtacagacttcacccgctgtgcagctaacatgcggagcatgcaacgttaccaccaggacacacaggggtggggggatattggttactccttcgttgtgggttctgacggatacgtgtacgaggggcgaggttggcactgggtaggggctcatactcttggacataatagcagaggctttggcgtagccattgtggggaactacaccgcagccttgcccacagaggcggctcttcggacagtccgcgacaccctaccctcctgtgccgttagggccggactgttgcggcctgattacgccctgcttggccacagacaacttgtgcggactgactgccccggagacgctctgttcgacctgttgagaacgtggccccatttcacagctaccgttaagccaaggccggcacgctcagttagtaaacggagccgtcgggaacctcctccaaggaccctgcctgccacagacctgcagtag

SEQ ID NO: 10586 - DNA, 846 bp, synthetic construct
  misc_feature 1..846: note = source = /note="Description of Artificial Sequence: Synthetic coding sequence"
  source 1..846: mol_type = other DNA
atgttgcctaaaagtagaagagcgctgaccatccaagaaatagccgcattggccaggtctagcctgcatggaatctcacaggtggttaaagaccatgtgaccaaacctactgcaatggcccagggccgtgttgctcacctgattgagtggaaagggtggagcaagcccagtgattctcccgcagctcttgagtccgcattcagctcgtacagcgacctgtccgagggagaacaggaggctaggttcgccgcaggagtcgcagaacagtttgccattgcagaggctaagctgagagcatggagctctgtggacggcgaggattcaaccgatgattcttacgatgaagactttgcaggcggaatggacactgacatggccggtcagctgcctctcgggcctcaccttcaggatctgttcacagggcacagattcagtcggccagttcgacaggggtcagttgaacccgagagtgactgttctcaaacagtgagtccagatacattgtgcagtagcctgtgctccctggaagatgggttgctgggaagcccggcacgcctggcgagtcagcttcttggcgacgagctactgctcgcaaaacttcctcctagccgggagtcagcgttccgatccttaggcccactggaggcacaagatagcctttataattcccctctgacagagagctgtcttagtcctgcagaggaggaacctgctccctgcaaagattgccaaccactctgccccccattgactggatcttgggaacgacaacgtcaggcaagcgacctggcttcttctggggtggtgtctcttgacgaggacgaggccgagccggaagagcaatag

SEQ ID NO: 10587 - DNA, 2619 bp, synthetic construct
  misc_feature 1..2619: note = source = /note="Description of Artificial Sequence: Synthetic coding sequence"
  source 1..2619: mol_type = other DNA
atgggaatcgtgtggatcttgatgagcgtgttgccttggtggggaagatgcgcagatctcgcgatagcctccacgcagctggttccctcaacggcctctgctagaatggctctgagtagccagctcatgggtaggacagtgtggacccctatgagcgcttcagcactacaggaacctgcataccctgcacttgctaggactagcagggctcccagcgcggctagtgtcccattagcttcccggtgtcgagtaacgacggccctgatttcaacatctgcccagagatccccaacgtctgcgtctctggcaccggtcccaacagcactgggggctagttctgcaagcgctcatctcgccctgtcctccctcacaatggggaccgtggccctcacccacggaagagtctctgctagcccagtgctgcggctgggcagcgcccgttgtccaaaactgtccacccctccaaggcctgctgcagccgctgtacgagggctgggcagagccggagagaccccagccaactgcgtgcctaggcgtgcagttccagggcctgatgattctcgcgaggacgtcaacgagtgcgcggagaaccccggtgtgtgcacaaacggtgtatgtgtcaatacggacggcagcttcagatgtgagtgtccgttcggctattccctggacttcaccggcataaattgcgttgacacggacgaatgctcagtcgggcacccttgcgggcaggggacctgcactaacgtgattggaggcttcgagtgcgcctgcgctgatggtttcgagcctggactgatgatgacctgcgaagacattgacgagtgctccctcaatccactgttgtgcgcgttccggtgccataatactgaggggtcctacctctgcacctgccccgctgggtatacccttagggaagacggcgcaatgtgcagggacgtggacgagtgcgctgacggacagcaggactgtcacgcacgaggcatggaatgtaagaacctcatcggaacattcgcatgcgtttgccctcccggaatgaggcctttgccgggtagtggagagggctgcaccgacgataacgaatgccatgctcaaccggacctttgtgttaacggtcggtgtgttaacaccgcaggtagcttccggtgcgattgtgacgaaggattccagccttctccaaccctcaccgagtgtcacgacatcagacagggcccatgcttcgccgaggtgctgcagacaatgtgccgaagtttgtcgtcctcatctgaggcagtgacgagagccgaatgttgctgcggcggtgggaggggctgggggcctaggtgcgagctctgccccctgcctggcacgtctgcctaccgcaagctctgcccgcatggctcaggatataccgccgagggcagggatgtggacgaatgccggatgctggcccacctatgcgcacacggcgagtgtatcaattcactgggtagcttcagatgccactgccaggccggttatactcccgatgcgaccgcaaccacgtgtctggacatggacgaatgctcacaggtgccgaagccatgtacgtttctctgcaagaataccaagggttctttcctgtgttcctgtcccagaggctatctgctggaggaggatggaagaacatgcaaagatttggatgagtgtaccagtcgccagcacaattgtcagtttctgtgtgttaatacagttggggcatttacttgccggtgcccccctggattcacacaacatcatcaagcgtgtttcgacgtcaacgaatgtgacggtcctcatagatgccagcatggttgtcagaatcagctgggcggttatagatgcagctgtcctcaggggttcacccagcactcacagtgggcacaatgcgttgatgagaacgagtgtgccctaagccctccaacgtgcggatccgcaagctgtcgcaatacgcttggcggatttcggtgcgtgtgtccttctggctttgatttcgaccaggccctaggcggatgccaggaagtggatgagtgcgccggacgaaggggcccttgttcatactcgtgtgccaataccccaggcggtttcctgtgcggttgtccacagggttatttccgggcagggcagggtcattgcgtttccggactcggcttttctcccggaccacaggatacgcctgataaggaggagctgctgtcctcagaagcctgttacgagtgcaagatcaatggcctgagtccacgcgaccggcctcgtaggagcgctcacagagaccatcaggtgaacttggcgaccctcgattcagaagccctgcttacactaggactaaatctgtcccacttaggacgggctgagaggatattggagttgcgacccgctctggaggggctagagggcaggatccgatacgttatcgtcagaggcaacgagcagggattcttccgtatgcatcacctccggggagtgagttctctgcagctgggcaggagaagacccggaccaggaacctaccgtctggaggtagtaagccacatggcaggcccttggggggttcaaccagagggccaaccaggaccctggggccaggccttgcggctgaaagtgcagctgcagctcctttag

SEQ ID NO: 10588 - DNA, 1368 bp, synthetic construct
  misc_feature 1..1368: note = source = /note="Description of Artificial Sequence: Synthetic coding sequence"
  source 1..1368: mol_type = other DNA
atggctaggaaggcactcaaactcgcctcttggacaagcatggctctggccgcttctggtatctatttttatagcaacaagtatttagacccgaatgattttggagccgtccgtgttggccgtgccgtcgccaccacggctgtaatcagctacgattatctgacatcactcaagtctgtgccatacgggtctgaagagtacctccagctgcggtccaagatccatgacttgttccaatcatttgacgacacaccgctaggcaccgcatctctggcacaggtgcataaggccgttctgcacgacggcagaaccgttgccgtcaaagtccagcatcccaaagtccgcgcacaaagctccaaagacattctccttatggaggtgctggtgctggccgtgaaacagttgttccccgaattcgagtttatgtggctggttgatgaagctaagaaaaacttacccttagagttagatttccttaatgaggggagaaacgcagagaaagttagtcagatgttgcggcattttgattttctgaaagtgcctagaatccactgggacctgagcacggaacgtgtccttctgatggaatttgtggatggaggacaagttaatgacagggattatatggagcggaataaaatcgacgtgaatgagatatccaggcacctggggaaaatgtatagcgagatgatttttgtgaacggcttcgtgcactgtgatccacaccctggtaatgtcttagtgcgcaagcatcctgggactggcaaagctgagatcgtgttactcgatcatggactgtatcagatgctcacagaagagtttcggttgaactactgtcacctttggcaatccctgatttggacggacatgaagcgcgtgaaggaatacagtcagcgcctgggcgcaggtgacctgtacccactgttcgcgtgcatgttgactgcacgaagctgggattctgttaataggggcattagtcaggcccctgtgaccgccacagaagatttggagatacggaacaacgccgcaaattacctcccccaaataagccacctgttgaatcatgtgccacgacagatgcttttaattctgaaaacgaacgatcttctccggggtattgaggcggcactgggtacgcgcgcatctgctagctccttcctgaatatgtcgaggtgctgtatacgagccctcgcggaacataaaaagaagaacacttgttcattctttcggcgtacccagatttcgttctcagaggcttttaacctgtggcagatcaacctgcacgagcttatcctccgggtaaaaggcttaaagctcgcggacagagttctggccctgatttgctggttgttccctgcccctctgtag

SEQ ID NO: 10589 - DNA, 1245 bp, synthetic construct
  misc_feature 1..1245: note = source = /note="Description of Artificial Sequence: Synthetic coding sequence"
  source 1..1245: mol_type = other DNA
atgaatccaaccctcggactggctatctttctggctgtgctgctgacagtgaagggtctgctcaagccatcattcagtccacggaattacaaagcgctgtccgaggtacagggctggaaacagcgaatggctgccaaggagttagccaggcagaacatggatttggggttcaagctgctgaaaaaactcgcgttctataatcctggacggaacatcttcttatctcctctgtctatctctacagctttttctatgctctgtctgggggctcaagatagcactctggacgagataaaacagggtttcaatttcaggaagatgcctgagaaagacctgcatgaagggttccactacattatccacgagctgacccagaagactcaggacctcaaactctccatcggtaacacattattcattgatcagcggctgcagccgcagcgtaaattcttagaagacgcgaaaaatttctattctgctgaaacaatccttaccaacttccaaaatttagaaatggcccagaaacaaattaacgatttcatcagccaaaagacccatggcaaaattaacaatctcattgaaaatatcgaccctggaaccgtgatgcttctggcaaactacatcttttttagagccagatggaaacacgagtttgacccaaacgtgacgaaggaggaggacttctttctggagaaaaactcgagtgtcaaagttccaatgatgttccgtagcggcatataccaggtggggtatgacgacaaattgtcatgtaccatcctcgaaatcccttatcaaaagaacattacagccatttttattttaccagatgagggcaaactcaagcacctcgaaaagggtctgcaggtggatacgttctcgagatggaaaacattgctctccaggcgggtggtcgatgtgtctgtccctcgactacacatgactggaactttcgatctgaagaaaactctcagttacatcggggtttcaaagatctttgaggaacacggcgacctgacaaagattgcccctcacagatcccttaaggtcggcgaggcagtgcataaggccgagctgaagatggacgagcgcggtaccgaaggagccgcaggaacaggtgctcagaccttaccaatggagaccccactggtggttaaaattgacaaaccctatcttctcttaatttacagcgaaaagataccgtcggtcctttttctgggcaagattgtgaacccaattgggaaatag

SEQ ID NO: 10590 - DNA, 942 bp, synthetic construct
  misc_feature 1..942: note = source = /note="Description of Artificial Sequence: Synthetic coding sequence"
  source 1..942: mol_type = other DNA
atgtctgacctcctcctcctcggacttatcgggggtttaactttgctattgctccttacactgctcgcctttgcaggctactcgggcctgcttgccggagtcgaagtgagcgctggatcaccaccgatccggaacgttacagttgcatataaatttcatatgggcctctatggggagacaggccgtctgttcactgagagctgttctataagccccaaactgcgctcaattgccgtctattacgataatccgcatatggttcctcctgataagtgccgatgtgctgtagggtcgatcctatccgaaggagaagaaagcccctcccccgaactaatcgacctttaccagaagttcggcttcaaggttttttcttttcctgcaccatcgcatgttgtcactgccacattcccatacacaaccatcctgtctatatggctggccacgcgccgagtccacccagctctcgacacatatatcaaagaacgcaagttgtgcgcctacccgaggctggagatataccaagaggatcagatacattttatgtgccctctggccagacagggcgacttctatgtgcccgaaatgaaagagacagaatggaagtggcgaggtctcgttgaagcgatcgatacccaggtggatggcacaggtgcggacacaatgagcgataccagctcagttagtctggaagtgagccctggctctcgcgagacgtccgccgctactctgtcgcctggcgctagctcaagaggctgggatgacggcgatacaagaagcgagcattcgtactcggaatccggcgcaagcggaagttccttcgaggagctggacttagaaggcgaaggcccactcggggaatctcgcctggatcccggtactgaaccactcggcaccaccaaatggctgtgggaaccgactgcccctgaaaaaggaaaagaatag

SEQ ID NO: 10591 - DNA, 603 bp, synthetic construct
  misc_feature 1..603: note = source = /note="Description of Artificial Sequence: Synthetic coding sequence"
  source 1..603: mol_type = other DNA
atggcctggggcggagtgcacacctgctgctttcatttatgttgttgttgctcttggccacagggggctgtgcccgaggagctccacaaacacccgggacagaccctgcttctacagtgccagtactcacctaaaaggggtccttaccagcctaagagctggtgtcagcaaacatctccgtctcggtgtacattactggtgaccagcagcaaaccgtggacagctgttcaaaaaagtcattataccatctgggacaaacccaacgcgggattctttaatataactatgattcaacttacccaaaacgactcgggattctactggtgcggtatctacaacgctagtgaaaacatcattactgtcctccgcaatatatctctggttgtttcacctgcccctaccaccagcccaatgtggacgctcccttggttacctacttctactgtgcttattacttctccggagggtacatctggacatccctcgatcaatggttcggagacccgtaaaagcagagcacctgcatgcctgggatctggcggacctcggtttcttgtgcttgtgctctgcggactgctgctggcgaagggcctgatgctgtag

SEQ ID NO: 10592 - DNA, 1035 bp, synthetic construct
  misc_feature 1..1035: note = source = /note="Description of Artificial Sequence: Synthetic coding sequence"
  source 1..1035: mol_type = other DNA
acaactccaagtcgagccctgccaggctggtcaaattgcagacccaggtggcgggcagggccaactccccaatcccccaccccgcagagtcgcatgaggctctcaccgggacccccttctgaatggacctggcttctgccacattttaacccctgccatcaccaccaccgccaccatcatcccaacccaactaccagtcttcttcctaccgaaccgccatcgggcccagaagtgtcttcacagggtcgcgaggcctcttgtgaagggacattgagggctgtggatcccccagtcaggcatcactcatatggcagacacgagggcgcttggatgaaggatcctgctgctagagatgataggatttacgtaactaactactactacgggaattccttggtggaatttcggaacctggagaattttaagcagggccgttggagcaatatgtacaaactcccttataattggatcggaactggccatgtagtataccaaggcgcattctactacaaccgcgcatttacgaagaatattattaagtatgatctacggcaacggttcgtggcgagttgggcactgctccccgatgtggtttacgaagacacaacaccctggaaatggagaggtcacagcgatatcgatttcgcagtggacgaatcaggcctgtgggtgatctaccctgccgtggacgaccgggatgaagcacagccagaagtgattgtcctaagtcgtctcgatcccggagatctctccgtgcatcgggagaccacatggaaaactaggctgcgccgaaactcctacggtaactgcttcctggtttgcggaattctgtacgcagtggatacatacaaccagcaggagggccaggtagcctacgctttcgatactcatactggtaccgacgcgagaccccagctgcccttcctgaacgagcacgcttacaccacccagatcgattataatcccaaagagcgggtcctctacgcttgggacaatggccatcaactgacctacactcttcacttcgttgtctag

SEQ ID NO: 10593 - DNA, 2682 bp, synthetic construct
  misc_feature 1..2682: note = source = /note="Description of Artificial Sequence: Synthetic coding sequence"
  source 1..2682: mol_type = other DNA
atggctgaggccgctctggaggcggtaagaagcgaactgcgcgaattccccgctgccgcaagagaactttgtgtccccctcgctgtaccttatctggataaaccccctacccctcttcatttctaccgggattgggtgtgccctaaccggccttgtattatcagaaacgccctgcaacactggcccgctttgcagaaatggtctttaccatattttagagctactgtggggtcaacagaggtctccgttgccgttaccccagacggctacgccgacgctgttcggggtgaccggttcatgatgcctgcagagcgcagactccctctatcgtttgtgttggatgtcttagaggggcgagcacaacacccaggcgttctctatgtgcagaagcagtgcagtaatctgcctagtgaactgccccagctgctgcccgacctcgagtcacatgtcccctgggcttccgaagctctgggaaagatgccagatgcagtgaatttctggctgggcgaagcagccgcagtgacatctttacacaaggaccactacgagaacctctattgcgtggtctctggtgaaaagcacttcttgtttcaccccccatctgaccgtccttttatcccatatgaactctatacacctgccacataccaattaaccgaagagggaacgtttaaggtagtggatgaggaagccatggagaaagccgaggtgtccaggacctgtctgttgacagtccgggtgttgcaagcacataggttgccgagtaaagacctcgttactcccagcgattgctatgtgaccctgtggttacccaccgcgtgcagccatcgtctgcaaacccgcacggtgaagaattcgtcctccccggtttggaaccagtcatttcacttcaggatccacaggcagcttaagaacgtgatggagcttaaagttttcgaccaagacctggtaaccggcgatgatcctgtgctttcggtgttatttgatgctggcactcttcgtgccggtgagtttaggagagagagcttcagcctctcccctcagggcgaggggagactggaagtcgagttccggttacagagtctggccgatcgaggagagtggctcgtgagtaatggcgtgctcgtggctagggagctgtcatgtcttcacgtacaactggaagaaactggagaccagaagagcagcgaacatagagtacaactggtagttccaggatcctgtgagggccctcaggaggcgagcgttggtacaggtacttttaggttccactgtcctgcctgttgggagcaggaactgtctatccgcctacaagatgcacctgaagagcaactcaaagcccctttgtccgcacttcccagcggccaggtggtcagactcgtattccccactagccaagagccactgatgagggtggaactcaagaaggaagctggactgcgcgagcttgcagtgcggcttggatttggtccctgtgccgaggaacaggccttcctgtcaaggcgcaagcaagtagtggccgcagcccttcgccaagctctacagctcgacggtgatttacaggaggatgagataccagtcgtggcaataatggctaccggtgggggtatacgcgctatgacctccctttatggccagcttgctgggctgaaagagctcggcctgctggactgtgtgagttacatcacaggggcatcagggtccacatgggctctggcaaacttatatgaggacccagaatggagccagaaggatctggctgggccaacggaactgctgaagactcaggttactaagaacaagctgggcgttctggctccctcccagttgcagcggtatcgccaggaattggccgaaagggctcggttgggctaccccagctgtttcactaacctttgggcgttgataaacgaggccctacttcacgatgaacctcatgaccacaaactgtcagaccaaagggaggccttgtctcatggacagaaccccctgcccatttattgtgcccttaataccaaggggcagtcattgactacattcgagtttggagagtggtgcgagttttcaccgtacgaggtgggtttcccgaagtatggcgcattcattccttccgagttgtttggcagcgagtttttcatgggccagctgatgaagcgactgccagagtcccgaatttgttttctggaaggaatttggtccaacctatacgccgctaatttacaagactccctgtactgggcatcagaacctagccagttctgggatagatgggtgagaaaccaggccaatcttgataaggagcaggtacctctcctgaagatcgaagagcctccttccaccgctggccgaatagccgagtttttcaccgatctgctgacatggagacctctcgcacaggctacacacaatttcttgcgcggactccactttcacaaggattacttccagcacccccacttttcaacatggaaggccacaacgctcgatggcctgcctaatcagctgactccttctgaaccccatctgtgcctgctggacgtggggtatctcatcaacacctcttgcctgcctttattacaacctacgcgcgacgtggatttaatcctttcgctggactacaacctgcatggtgcctttcagggcagtggaggccaccccagacgacgccagttaggcagatag

SEQ ID NO: 10594 - DNA, 354 bp, synthetic construct
  misc_feature 1..354: note = source = /note="Description of Artificial Sequence: Synthetic coding sequence"
  source 1..354: mol_type = other DNA
atgattatcgattcatcccgcatccccagtttcactcagctgcactcaactatgacaagggccccactgctattgctctgcgtggccctggttctcttagggcacgttaacggcgctacagtcagaaacgaggataagtggaagccactgaataatcctcgcaacagggacctgtttttcagaaggttgcaggcttatttcaaggggagaggcctggatcttggaacatttccgaatccgttcccaaccaatgagaaccccaggcctctctccttccagtccgaacttactgccagtgcatcggcagattatgaagaacaaaagaatagcttccacaactacttaaagggctag

SEQ ID NO: 10595 - DNA, 4143 bp, synthetic construct
  misc_feature 1..4143: note = source = /note="Description of Artificial Sequence: Synthetic coding sequence"
  source 1..4143: mol_type = other DNA
atgagacacggggtcgcatgggccctgctggttgcagccgctttaggtctgggagcccgtggcgtgcgcggtgctgttgctttggcagacttttaccccttcggtgcagagaggggagacgcagtgactccgaagcaggatgatggcggatctggtttgcgcccactgtccgttcccttcccctttttcggagccgaacacagcggactttatgtgaacaataatgggataatcagctttctcaaggaggttagtcagttcactccagtcgccttcccaattgcgaaggataggtgtgtggtggccgctttctgggctgacgtggacaatcgcagggccggagatgtctactaccgggaagctactgatcctgcgatgttgcgcagagctaccgaggatgttagacactatttcccggagctgctggattttaacgccacctgggtatttgtcgcaacttggtatcgagtcacctttttcggtggcagttcgtccagcccagtgaatacatttcagaccgtgcttataactgatggcaaactgtcctttactatcttcaattacgagtcaattgtgtggacaacaggcacccacgcatccagcggcggaaacgctacaggcctgggcggtatcgccgctcaggccggttttaatgcaggcgatggtcaacggtacttcagcatccccggtagtcggacagctgacatggcggaggtggaaacaacgaccaacgtgggggtccctggcagatgggcttttaggattgacgatgcccaggtccgcgtggggggttgtggccatactacatcagtgtgcctggcacttcggccatgcctgaatggcggaaagtgcatcgacgactgcgtgaccggaaacccctcttatacttgcagctgcctgtccggatttacaggtagacgatgtcaccttgatgtgaatgaatgtgcatctcagccatgccaaaatggcggaacttgcacacatggaatcaacagttttcgctgtcagtgtcccgcaggtttcggtgggcctacttgcgaaacagcgcagtcaccatgtgacaccaaggaatgccagcacggagggcaatgtcaggttgagaatggaagcgccgtctgcgtctgccaggccggatacaccggcgcagcatgcgagatggacgtggacgactgtagtccagatccttgtcttaacggtgggtcctgcgtggacctggtaggtaattacacatgcctgtgcgctgagcccttcaaaggactccggtgtgagacaggtgatcaccctgtgcccgatgcctgtctatcagcaccctgtcacaacggcggaacctgcgtcgacgccgatcaaggatacgtgtgtgagtgtccagaaggattcatgggcctcgactgtagggagcgtgtgccagatgattgcgaatgcaggaacggaggacgttgtcttggtgcaaataccactctgtgtcagtgtcctttaggcttttttggcctcctatgtgaattcgaaatcaccgcaatgccttgcaatatgaatactcaatgtccagacggaggctactgtatggaacatggtggatcctacctgtgcgtctgccacactgaccataacgcgtcccattctctgccgtccccctgcgacagcgatccatgctttaacggcggaagctgtgacgcacacgacgatagttatacttgtgaatgccctaggggcttccatggaaagcattgtgaaaaggctcgcccacacctatgctcctcagggccttgccgcaacgggggaacatgcaaagaagcaggcggagagtaccactgttcttgtccatacaggttcactggcaggcactgtgagatcggtaaacctgatagctgtgccagcggaccctgtcataacgggggaacctgcttccactatattggcaaatacaaatgtgactgcccccctggcttttctggcaggcactgtgagattgctccatctccgtgtttcagaagcccatgtgtgaacggcggtacctgtgaagacagggacacagactttttctgccactgtcaggctggatacatgggcagaagatgtcaagcggaggttgattgtggacccccagaggaggttaaacatgcgactctgcgctttaacggaacaagactgggcgctgtggcgttgtatgcgtgcgatcggggttactctctatctgccccatcccggatccgagtctgccagccccacggcgtttggtcggaacctccacagtgtctcgagattgacgaatgtcgctcacagccatgtttgcacgggggatcctgtcaggacagagtagcagggtacctatgcctgtgctccacgggttacgagggagcccattgcgagttggaaagggatgaatgtcgggctcacccctgccgcaatgggggtagttgtaggaatcttccaggcgcatatgtgtgtagatgcccagctggctttgtcggcgttcattgcgagacagaggtggacgcgtgcgattcctccccttgtcagcacggagggcgttgcgaaagcggagggggagcctacctctgcgtatgcccagagtctttctttggttaccactgtgaaaccgtctcggacccttgcttttcctctccatgtgggggtaggggctattgcttagcctcgaatggctcccacagctgcacctgcaaagtgggatacaccggagaagattgtgctaaggagttatttccccctactgcgttaaagatggagagggtcgaagagtctggggtgtccatcagctggaatcccccaaatggacccgctgcacggcagatgctcgacggatacgcggtgacctacgtcagtagcgatgggagctatagaagaactgatttcgtcgatcggactagatccagtcaccaactgcaggcactagcagccggtcgtgcctataacatctctgtcttctccgtcaagaggaatagcaataataagaatgacatctctcggcctgctgtgctcctcgccaggaccagaccccgtcctgtagaaggctttgaggttaccaacgtgactgctagtacaatctcagtccaatgggctcttcatcggatccgtcacgcaacagtctcaggcgtcagagtgtccattcggcaccccgaggccctgcgggatcaggccaccgatgtggatcgcagtgtggatagatttaccttccgggcacttctgccgggaaagaggtacaccatccagctcactacgttgagtggactccgtggcgaggaacatcccacggaatccctcgcaactgcaccaactcacgtgtggacacgccctctgccacctgccaaccttacggcggcaagggttacagccactagtgcacatgttgtgtgggacgctccaactccgggttcgctactggaagcttacgtgattaacgtgaccaccagccagtccactaaatcaaggtacgtccctaatgggaagcttgcttcctacaccgtgcgcgacctcctacccggtaggcggtaccaattaagcgtcatcgccgtccagtcaactgaattgggaccacaacacagtgaaccagcccacctttacattatcacttcacctagagacggcgcagacagacgctggcatcagggcggacatcacccaagggtgctgaaaaataggccccctccggctcgcctacccgagctccgcctattgaatgaccatagtgctccagagactcctacccagccacctaggttttccgaattggtcgacggacgaggacgggtcagtgcacggtttggaggatcgcccagcaaagctgcgacagtgaggtcacacgttcccggtaactgcagtgagaacccttgccaaaacggcggtacatgtgtcccaggtgcagatgcccactcctgcgactgtggcccaggttttaagggccgacgctgcgagctcgcctgtatcaaggtttcacgaccgtgcacacggttatttagcgaaactaaagcattccccgtgtgggaaggcggtgtttgccaccatgtgtacaaacgagtttatagggtgcaccaagatatctgtttcaaagagtcttgtgaatcaaccagcttgaagaagacaccaaacaggaagcagagcaaaagccagaccctcgagaagtcctag

SEQ ID NO: 10596 - DNA, 474 bp, synthetic construct
  misc_feature 1..474: note = source = /note="Description of Artificial Sequence: Synthetic coding sequence"
  source 1..474: mol_type = other DNA
atggaagccctgcgcagggcacacgaagtggcgcttagactgctgctctgtcggccatgggctagccgggcagctgctcgtcctaagccatccgcctcggaggtcctcaccagacaccttctccagcgacgtttgcctcactggacctctttctgcgtcccctatagtgccgtgcggaacgatcagttcggactctctcactttaattggcctgtgcagggcgcaaattatcacgtgcttaggacgggctgttttcccttcatcaagtaccattgtagcaaagccccttggcaggacttggctcggcagaatagattttttacagccctcaaggtagtcaacctgggaatacccacgctgctgtacgggctgggatcctggctgttcgccagagtaaccgagacggtccacacttcctatggccctatcacggtttactttcttaataaggaggacgaaggcgcaatgtattag

SEQ ID NO: 10597 - DNA, 288 bp, synthetic construct
  misc_feature 1..288: note = source = /note="Description of Artificial Sequence: Synthetic coding sequence"
  source 1..288: mol_type = other DNA
atgaaaggatcccgggcactgctgctggtggcccttactcttttttgtatctgtagaatggccaccggggaggataatgatgaattctttatggacttcctccagaccctcctggtggggaccccagaagagctgtacgagggaacactgggcaaatataatgtcaatgaagatgcaaaagcagctatgactgagcttaaaagctgcatagacggccttcagcccatgcataaggcagaactcgttaaactgctagtccaggttttgggatctcaggatggagcctag

SEQ ID NO: 10598 - DNA, 1053 bp, synthetic construct
  misc_feature 1..1053: note = source = /note="Description of Artificial Sequence: Synthetic coding sequence"
  source 1..1053: mol_type = other DNA
atgaagtgctcccttagagtgtggttcctgagcgtggcctttctgctcgtgtttatcatgtccctcctgttcacgtactcccaccattccatggccacattaccctacttggacagtggagctttggatggtactcatagagtgaaactggtcccaggttacgccggtctgcagagactttcaaaggagcgcctgtccggaaagagctgtgcttgccggcgatgcatgggggatgcaggggctagtgactggttcgattcccatttcgatggcaacatcagcccagtgtggacacgcgagaatatggacctgccacccgatgttcagcgctggtggatgatgctgcagccacagttcaaatctcacaacactaacgaggttttggagaaacttttccaaatcgtgccaggggaaaacccctatcggtttcgggatccccatcagtgccgcaggtgcgcggtggtggggaactctggcaatctgcgtggctctggttacggccaggatgttgacggccacaactttataatgcgaatgaaccaggcccctaccgtggggttcgagcaagatgtaggctctcgcactacacaccacttcatgtaccccgagtccgcaaagaacttacccgcaaatgtctccttcgtcctcgtaccctttaaagtcctcgacctactgtggatcgcctccgccctgtccactggtcagatccggtttacatacgcacccgtgaagtccttcctgagagtcgataaggagaaagtccagatttataatccagcattcttcaaatacattcacgatcggtggacagaacatcacgggagatatcctagtacaggaatgctcgtccttttctttgctctgcacgtgtgcgacgaggtgaatgtctatggcttcggggctgattcaagaggaaattggcaccactactgggaaaacaaccggtacgccggagaatttagaaagaccggcgttcacgacgcagatttcgaggcccacattatcgacatgcttgctaaagcaagcaaaatcgaggtgtatagaggcaattag

SEQ ID NO: 10599 - DNA, 600 bp, synthetic construct
  misc_feature 1..600: note = source = /note="Description of Artificial Sequence: Synthetic coding sequence"
  source 1..600: mol_type = other DNA
atggcttctcccgaagcccctgaatcagtcgttcagtttgcccttgacaaactcggcggactggattatttggtcctgaaccatataggtggagcaccagccggaacacgcgcacgctccccacaggctacaaggtggctgatgcaagtcaacttcgtgtcttacgtgcagctaaccagtcgcgcattgccttctctgacagacagtaaaggctctttagtagtggtgtcaagtctcctgggaagggtacctactagttttagtactccatactccgcagccaaatttgctcttgatggcttttttggctccttgcgaagagaactggacgtacaggacgtcaacgtggccatcacaatgtgcgtgctcgggctgcgcgatagagcctctgcagcggaggctgttcgcggagtgaccagagtgaaggctgccccagggcctaaggcggcactggcagtgatccgcggaggcgctacaagggcggctggcgtgttttacccatggcgttttcgcctcctctgcctgcttcggagatggctgcctagaccccgagcttggttcatcaggcaggagcttaacgtgactgccgctgccgcatag

SEQ ID NO: 10600 - DNA, 411 bp, synthetic construct
  misc_feature 1..411: note = source = /note="Description of Artificial Sequence: Synthetic coding sequence"
  source 1..411: mol_type = other DNA
atggtgcgtccctaccctcttatctactttttgttccttccactcggcgcttgcttccctctgctcgatcggagggagcctaccgacgcaatgggaggtctgggagctggggagagatgggcagacctcgccatgggacctaggccgcactccgtgtggggcagctcccgctggttgagggcgagccagcctcaagcactgcttgtgatcgctcgcggactgcagacgtctggccgtgaacatgcaggctgtcgctttagattcggtagacaagatgagggatcagaggcaactggcttcctgcccgctgctggagagaaaacatctggccctcttggtaacctggcagaagagctgaacgggtactcaagaaagaaaggagggttcagtttccgctttggccgaagatag

SEQ ID NO: 10601 - DNA, 663 bp, synthetic construct
  misc_feature 1..663: note = source = /note="Description of Artificial Sequence: Synthetic coding sequence"
  source 1..663: mol_type = other DNA
atgagaggacagggcaggaaagagtctctttcagatagtcgcgatctcgatggaagctacgatcagctgactgattccgtcgatgatgagttcgagctttctacagtctgccatcgacctgagggactcgagcagctacaggagcaaacaaagtttactaggaaggagctgcaggtgctttataggggctttaaaaatgagtgtccatcaggtattgtgaacgaagaaaatttcaagcagatctactctcagtttttccctcagggcgactcaagcacttacgcaacattcctgtttaacgcctttgacactaatcatgacggcagcgtgagtttcgaagatttcgtcgccggactttccgtgattttgaggggaaccgtggatgatcgattaaattgggcctttaacctttacgatcttaataaggacgggtgcattaccaaagaggaaatgctggacattatgaaaagcatttatgacatgatgggcaagtacacatacccggcactgcgggaggaggccccacgggagcatgtcgagagcttcttccagaagatggatcgtaacaaggacggagtcgtaactatcgaggaattcatcgagagttgccagaaagacgaaaatataatgaggtctatgcaacttttcgacaacgtgatttag

SEQ ID NO: 10602 - DNA, 2175 bp, synthetic construct
  misc_feature 1..2175: note = source = /note="Description of Artificial Sequence: Synthetic coding sequence"
  source 1..2175: mol_type = other DNA
atgcttaggacatcgacacccaatttatgcggcggactccactgtagagcaccgtggctgtcttccggtatcttatgcttatgcttaattttcttgcttgggcaggtcgggctactccaaggccacccacagtgcttggactacgggccacccttccaaccaccactgcacctggaattttgcagcgactacgaaagcttcgggtgctgcgatcagcacaaggatcgccgaatagccgctcgatactgggatataatggagtatttcgatctgaaacgacatgagctgtgtggcgactacatcaaagatattttgtgtcaggagtgttccccttacgctgcccacctctacgacgccgaaaacacacagacaccactgaggaatcttccaggtctctgttccgactattgcagcgccttccatagtaattgtcactccgcgattagcctgctaaccaatgacaggggactccaggagtcccacggcagggacgggacccggttctgtcacctgcttgacctgccagacaaggattactgcttccccaatgttttacgaaatgactatcttaatagacacctcggcatggtcgcccaggaccctcaggggtgtctgcagctctgtctctctgaggtcgccaacggcctaaggaaccctgtcagcatggtgcatgcaggcgacggtacacatagattctttgtcgctgaacaggtaggtgtcgtttgggtgtatttgccggacggaagccggttggaacagccctttctagacctgaagaatatcgtgctcaccaccccctggataggcgacgagcgcggatttcttggtcttgccttccatccaaagttcagacataatcggaagttttatatttactattcttgtctcgacaagaaaaaagtggagaaaatccgcatctctgaaatgaaggtgagccgggctgacccaaacaaagctgatcttaaatcagagcgggtgatcttagaaattgaagagccggcatctaaccataatggagggcaacttctattcggcctggacggttatatgtatatcttcactggggacgggggtcaggcaggagacccatttggtttgtttggaaacgcccagaacaaatcaagtctgttgggaaaggtgctgagaatagacgtaaacagggccggttcgcatggaaagcggtatcgcgtgccatctgataatcctttcgtgagcgagcccggtgcccatcctgctatttacgcttatgggattcggaatatgtggaggtgtgctgtggaccggggagaccctattacaaggcagggcagaggacggatcttctgcggagacgttggacagaataggtttgaagaagtggatctcatcctaaaagggggaaactatggatggcgggctaaggaagggttcgcgtgctacgataagaagctttgccacaacgcatcactcgatgacgtgctccccatttatgcttatgggcacgccgtgggcaagtcagtcaccggcggttacgtgtacagaggttgtgagtcccccaacttgaatggcctgtatatttttggtgattttatgagcgggaggctgatggcattacaggaagatcggaagaacaagaagtggaagaagcaggacctgtgcctgggctccactacatcctgcgcattcccaggtttgatttcgacccactccaagttcatcatttccttcgcagaggacgaagcaggagaactttacttcctggccacctcatatccgtccgcctatgcaccgcgaggcagtatttacaaattcgtcgacccaagccggagggctccccctggaaaatgtaagtacaagcccgtaccagtgaggaccaaaagtaaaaggatcccttttcgccctctggcgaaaacagtcctggatctgttgaaggagcagtcggaaaaggctgccaggaagagcagcagcgccaccttggcttcgggtcccgctcagggcttgtctgaaaaggggtcttcaaaaaagttggctagtcccacgtccagtaaaaacacacttagaggccctggcactaagaagaaggccagggtgggccctcacgtgagacagggtaagcgacgaaagtcccttaaaagccacagcggaaggatgcgcccttcagcagagcagaagagagccggacgaagtctgccctag

SEQ ID NO: 10603 - DNA, 1218 bp, synthetic construct
  misc_feature 1..1218: note = source = /note="Description of Artificial Sequence: Synthetic coding sequence"
  source 1..1218: mol_type = other DNA
atgtggtacgtgagcacaaggggggtagccccaagagtcaatttcgagggagcgctgtttagcggctacgcccctgacggtggtctctttatgcctgaagaacttccacagctcgaccggggaacactttgtcaatggagtactttgtcttatcccggtttggttaaagagttgtgcgctctttttatcggctctgaactcctaccaaaagatgagctcaatgaccttattgaccgagccttctcaaggttcagacaccgggaggttgtgcacctgagtcgcctgcggaatgggttaaatgtgctggagctctggcacggagtaacctatgccttcaaggatctatccttatcttgcacaacacaatttctgcagtatttcctagaaaagagggagaagcatgtcacggtcgtggttggcacaagcggggacacgggaagcgcagccatcgagtcagtacagggagcaaaaaacatggacatcattgtgctgctgcccaagggccactgtactaaaatccaggagctccagatgactaccgtgttaaaacagaatgtacatgtgttcggggtcgagggtaatagtgatgagctggatgaacccatcaagaccgtattcgccgacgttgcctttgtgaagaagcacaatctgatgtccctgaattctattaattggtctcgtgtgctagtgcaaatggcccatcatttttttgcttactttcagtgcaccccctccctggacacccacccactccccctggtggaggtggtcgtaccaacgggagcggctggcaatcttgctgctgggtacattgctcagaagatcggccttcccattagactcgttgttgcagtgaataggaatgacataatccaccggacagtccagcaaggtgatttcagtctaagtgaggcggtcaaatcaaccctggcaagtgcgatggatatccaagtgccatataacatggaacgcgtgttctggctcctctctggatcagattctcaggtgacgcgcgctctgatggagcagttcgaacgaacccagagcgtgaacctgcctaaggaactgcactctaagtgggagcgtcaagattacgaaaaaatggctgttatggagtgtgatggatgctgtgttgagctgtgtctggggaattgcggcccacgtcgcggttcagtgaccgatatccctggcaccgctatggtgcggggaggcggatag

SEQ ID NO: 10604 - DNA, 492 bp, synthetic construct
  misc_feature 1..492: note = source = /note="Description of Artificial Sequence: Synthetic coding sequence"
  source 1..492: mol_type = other DNA
atgactatgcggcacaactggacccctgacttgtcccccctttgggtcctcctcctgtgcgcacacgtggtgaccctcttggttcgcgctaccccagtctcccagactacaacggcggctacagcatcagttcggtctaccaaagatccttgtccctcacagcctccagtgttccctgccgcaaagcagtgcccagcgctagaggtgacctggcccgaggtggaggtccctcttaatgggacattatcactgtcgtgcgttgcctgttcaagatttcccaacttcagcatactctattggcttggaaacggctcctttattgaacatctccctggcaggctgtgggaggggagcacctctagggaacggggaagcaccgggtgggctgaaggaaatttggctccgcatcctcgatcaccagcgctgcagccacagcagtccaccgctgcaggactgaggctcagcacaggtccagctgctgcccaaccctag

SEQ ID NO: 10605 - DNA, 1590 bp, synthetic construct
  misc_feature 1..1590: note = source = /note="Description of Artificial Sequence: Synthetic coding sequence"
  source 1..1590: mol_type = other DNA
atggctccagccagaaccatggctcgagccagactggcacctgctggcataccggctgtggctctctggctgctatgtacgcttgggttgcaggggacacaagctgggccaccacccgctcctccaggccttcccgcaggagcagactgcctgaatagttttaccgctggcgtccctggttttgtcctagataccaatgcctctgtgagtaatggggcaacatttctggagtccccaacagtacgccgaggctgggactgcgtccgagcatgctgtaccactcaaaattgtaacctggctctggtggagctgcaacccgatagaggagaagacgccatagcagcctgtttcctgatcaattgcctgtacgaacaaaactttgtgtgcaagttcgccccacgggagggcttcattaactacttaacccgtgaggtgtataggtcataccgccaactccgaacacagggcttcggcggttccggtattcccaaggcctgggctggtatagaccttaaagttcagccccaggagccgctggtactgaaggacgttgaaaacaccgattggaggctgctccgaggcgatactgacgttagggttgaaaggaaggatccaaaccaggtggagttgtggggactcaaagagggcacgtatctgtttcaattgactgtcacatccagtgatcaccctgaagacactgctaacgtcaccgtcaccgtcctgtccaccaagcagaccgaggactactgcctagcaagcaacaaggtgggcaggtgtagaggctcattccccagatggtactatgaccccaccgagcagatttgcaagagtttcgtgtacggcggatgtttaggtaataagaataattatctgcgtgaggaggaatgtatcctcgcttgccgcggtgttcagggcggacccctgcgcggtagttcaggggcacaggctactttccctcaaggcccttctatggagcgacggcatccagtttgtagtggcacatgccagcccactcagttcaggtgttcaaatggttgttgcattgacagcttcctggagtgtgacgatactcctaattgcccagatgcttcggatgaggcagcctgtgaaaagtatacttcgggtttcgacgaattacagagaatccattttccttcggacaaagggcactgcgtggacctgccggacacaggactctgtaaggaatctattccacgatggtattataatcccttttccgaacattgcgccagattcacctatgggggttgctatggaaacaaaaataatttcgaagaggagcagcaatgtctcgagtcctgtagagggattagcaaaaaggacgtgttcggtcttagaagggaaatccccatcccatctactggaagtgtggagatggctgtggcagtctttctagtgatctgtatcgtcgtggtggtcgccatactgggttattgcttcttcaagaaccaacggaaggacttccacggccaccaccaccatccccctccaactcccgcaagtagcaccgtgtccacaacagaggacaccgaacacctcgtctacaatcatacaacgcgaccactatag

SEQ ID NO: 10606 - DNA, 1803 bp, synthetic construct
  misc_feature 1..1803: note = source = /note="Description of Artificial Sequence: Synthetic coding sequence"
  source 1..1803: mol_type = other DNA
atgcagggaccgttgctcttgcccggtctgtgtttcttgctgtccctgttcggggcagtaacccaaaagactaagacgtcttgcgccaagtgccccccaaacgccagttgcgtgaacaacacccactgcacttgcaaccacggatacacatctggctcgggccagaagttattcactttcccattggaaacatgcaatgacactacgtcctcgaaaaccacggaaggacggaaggagcttcagaagatcgtggataagttcgagtcactacttacaaatcaaaccttatggcgcacggagggtcggcaggagatatccagcacggcaacaactattttgcgtgacgtggagagcaaagttctcgagacagcgttgaaggaccctgaacagaaagtattgaagatccagaatgacagtgtggccatagaaactcaggccatcactgacaattgttccgaggagaggaagacattcaatctgaacgtgcagatgaattctatggatatcaggtgctcagacattatacagggggatacccaggggccaagcgctatcgcattcatttcctactcaagcctcggtaatattattaatgccaccttctttgaggagatggacaagaaagatcaggtctaccttaattcacaggtcgtaagcgctgctatcgggcctaaacgtaacgtgagcctgtccaaaagcgtcacactgaccttccagcacgtgaagatgacccccagcacaaaaaaggtgttttgcgtgtactggaagtcaaccgggcaggggagtcagtggagtcgggacggatgcttcctcattcacgtgaacaagtcgcatactatgtgtaactgtagtcacttatcaagtttcgccgtacttatggctctgaccagtcaagaggaagatcctgtgctaactgtgatcacttacgtgggcctgtctgtgtcccttctgtgtctacttttggctgccctcactttccttctgtgtaaagctattagaaatacaagtaccagcctgcatttgcagttatcactatgcctctttcttgctcacctgctttttctggtgggaatcgacagaaccgaacctaaggtcctatgtagcataatcgccggagcactgcactacctgtacctggccgcatttacctggatgctgctggaaggtgtgcatctgtttttgacagcacgcaaccttacagtggtgaactactcctccatcaatcggctgatgaagtggattatgttccctgtgggatacggcgtgccagccgtgacagtcgctatcagcgccgcttcttggccccacttgtatggcactgcagacaggtgctggcttcatttggatcagggattcatgtggtccttcctaggccctgtctgcgcgatcttctcggcgaatctggtccttttcattttagttttctggatcctgaagcgcaagttgtcctctctgaattcagaggtttccaccattcagaacaccaggatgctggcctttaaggctacagcccagctattcattctgggatgcacttggtgtctgggcctgctgcaggttggtcccgctgctcaagtgatggcttacctattcaccatcatcaatagcctccagggcttttttattttcctggtgtactgtctgttaagccaacaggtccaaaaacagtatcaaaagtggttccgcgaaattgtgaagagtaagtcagaatccgagacgtatactctgtcctcaaaaatgggtccagatagcaagccaagcgagggcgacgtgtttcctggccaagtgaagcgtaagtattag

SEQ ID NO: 10607 - DNA, 660 bp, synthetic construct
  misc_feature 1..660: note = source = /note="Description of Artificial Sequence: Synthetic coding sequence"
  source 1..660: mol_type = other DNA
atgaagttgctgctgtgggcctgtattgtgtgcgtggcgttcgctcgcaaacgaaggtttcctttcataggagaagacgacaacgacgacggccaccccctccacccgagtttgaatataccatacggaataagaaatttaccccctccactgtactaccggcctgtcaataccgtgccctcctatcctggaaatacatataccgacactggtttaccaagttacccttggatcctgacctccccaggattcccttacgtgtaccatattcgagggtttccactggcaacacaattgaacgttcccccactgccaccgagaggttttcctttcgtgcctccatcacggttcttctctgctgcagcagctccagcagcaccacctattgccgcagaacccgcagcggctgcgcctctcaccgcgactccagtggcggcagagcccgcagccggagcccctgtggccgctgagccagccgcagaagccccagttggcgcagaacctgctgctgaggcccctgtggccgcagagcctgccgctgaggcgccagtgggagtagagccggctgcagaagagccgtcacctgctgaaccggctactgcgaagcctgccgcaccagagccacatccgagtccttcactggaacaggccaaccagtag

SEQ ID NO: 10608 - DNA, 1743 bp, synthetic construct
  misc_feature 1..1743: note = source = /note="Description of Artificial Sequence: Synthetic coding sequence"
  source 1..1743: mol_type = other DNA
atgcatctgtcggccgtgttcaacgctctcctggtgtccgtgctggccgctgtgctgtggaagcacgtgcggcttcgggagcacgccgcaaccctggaggaggagcttgctttgagccggcaggccacagaaccggctccggcactccggattgactaccctaaggcattgcaaattctcatggaaggcggtacccacatggtgtgcacgggcaggactcataccgaccgcatctgtaggttcaaatggctctgttacagcaacgaagccgaagagttcattttctttcacggaaatacaagcgtaatgttacctaatcttggaagtaggaggtttcagcccgcactccttgacctgtcaacagttgaggaccacaacacccagtactttaacttcgtcgagctcccggcagccgctcttagattcatgcccaaaccagtgttcgtgccagacgtggcccttattgcaaatagattcaaccctgataatctgatgcacgtgttccacgacgacttgcttccactgttctacaccctaaggcagttccccggactcgcacacgaggcgagactctttttcatggaaggatggggagaaggggctcattttgacctttataagctcctttcacctaaacagcccctgctgcgcgcacagttgaagaccctcgggaggctgttgtgcttctcacatgccttcgtgggactttccaagattaccacctggtaccaatacgggttcgtccagccgcagggacccaaggcgaacattctagtctccgggaacgagatccggcagttcgcaagattcatgaccgagaagttgaatgtgagtcatacaggagtgcctctgggcgaggagtacatactagtctttagccgaacacagaaccggctcatcctcaatgaggcagagctcctgctcgccttggcccaggaatttcagatgaagactgttactgtgagtttggaagaccacacctttgccgatgttgtcaggctggtaagcaacgcatccatgttggtatccatgcatggcgctcagctggtgacgacgcttttcctgcctcggggagccactgttgtggaactgttcccttacgctgtgaatccggatcactacaccccctataaaactctggctatgctacccggtatggacctacagtacgtggcgtggaggaacatgatgcctgagaacactgtaacacatcctgaaaggccttgggatcagggcggaattacccatctggacagagccgaacaggcacgcatcctgcagagtcgtgaagtgccgagacatctatgttgccggaaccccgagtggctctttcgcatctaccaggatacaaaggttgatattccgagcctgattcagaccattaggagagttgtcaaaggacgcccagggcctaggaagcagaaatggactgtagggctgtatccgggtaaggtgcgggaggcacggtgtcaggcttctgtgcacggcgctagtgaggcccgtctgaccgtttcctggcagataccatggaatctcaagtatctcaaagtgcgagaagtgaaatatgaagtctggctccaggagcagggagaaaatacctacgtgccttatattctggccctgcaaaaccatacattcacggaaaatatcaagcccttcactacgtacctcgtgtgggtgaggtgtatttttaataagattctgctcggtcccttcgccgatgtcctagtgtgcaacacctag

SEQ ID NO: 10609 - DNA, 5129 bp, synthetic construct
  misc_feature 1..5129: note = source = /note="Description of Artificial Sequence: Synthetic coding sequence"
  source 1..5129: mol_type = other DNA
atgggcttcctcccaaaactcctgctgttagcctcatttttcccagccggacaggcaagttggggagtcagctcgccccaggatgtgcagggggttaaggggagctgccttttgataccatgtatattcagcttccccgcagatgtagaggtcccggacggcattactgcaatttggtactacgattactctgggcaacgacaagtggtgagccattctgcggatccgaagctggtggaggccagattccggggtcggacggaatttatgggcaaccccgagcatagagtctgtaatcttctcttgaaagaccttcaaccagaggacagcggaagttacaattttaggttcgagattagcgaggtaaaccggtggagcgatgtgaaggggacgttagtgaccgtgaccgaggagccaagagtgcctactatcgcatcccccgtggaattgctggaggggactgaggttgattttaactgcagtaccccctacgtttgtctgcaggaacaggtccggctgcaatggcagggccaggatcctgcacggtctgtgaccttcaacagtcagaaattcgagccaacgggcgtgggtcaccttgagacactgcatatggcgatgtcctggcaggaccatggtaggatactgaggtgccaattgtctgtcgccaatcatcgggcacagtctgaaatccacttgcaggtgaagtacgctccgaagggcgtgaagatcctcctaagcccatctggcagaaatatactgcctggagagctagtgactttgacctgccaggtcaattccagctatccggcagttagttcgataaaatggctaaaagacggggtgcgccttcagacgaaaacaggggtgttgcatctcccacaggcggcttggagtgatgccggagtgtacacttgtcaagcagagaatggagtcggttcactggtaagccctcctataagcttacacattttcatggctgaagtgcaggtctcaccagcaggtcccattctggagaatcaaactgtgacattggtgtgcaacacacccaacgaggctccctcagaccttcgctatagctggtataagaaccatgtgctgcttgaagatgcccattcccacacactaaggctgcatctggccacgcgcgctgacactggattctacttctgcgaagtacagaacgtgcacggaagtgagcggagtgggcctgtaagcgtggtcgtgaaccaccctcccctgacgcctgttcttacagcctttctggaaactcaggcaggacttgtgggcatccttcattgttccgtcgtgagcgagccactcgccaccttggtgttgtcccatggcggacacattctggccagcacatccggagattctgatcattcccccagattcagcggtaccagcgggccaaactccttgcggttagagatccgcgatctcgaggagacagattcaggagaatataagtgcagcgccaccaattccctcgggaatgcgacatctaccctggattttcacgctaacgcggcacggcttttgataagccctgcagctgaagtggtggaaggtcaggcagttacactgagttgcaggagtggcttatccccaacaccagacgccagattctcttggtacttgaacggcgctctgctgcatgaaggccctggctctagccttctgctgcctgcagcatcttctaccgatgcagggtcttatcactgccgggctcgcgacggacactcagcatccggcccatcctcgccagcagtgctaactgtgttatacccgcctcggcagccaacgttcactacaaggctggacttggatgcagctggtgcaggggcaggcagaagaggtctcttactgtgtcgggtggactctgaccctcccgctaggctgcagcttctgcacaaagaccgcgtggtcgcaaccagcctcccgtcaggaggtggatgcagcacttgcggcggatgctcaccccgaatgaaagtcaccaaagcacccaatttactgcgagtggagattcacaaccccttattggaagaggagggtctgtacttgtgtgaagcaagcaacgctcttggtaatgcttccacgtctgctacatttaatggccaggccacagtgctggctattgcaccctctcacacattgcaagaaggcacagaagcaaaccttacttgcaacgtctcccgcgaagccgcagggtcccccgcaaacttctcctggtttcggaatggagtgctttgggcccagggacccctggaaactgtgactctcctgcccgtggctcggacagatgcagcactgtacgcctgccgtattctcacagaagcaggtgctcagctgagcacacctgttctgttgagcgtactgtaccctcccgatcgccctaagctgagcgcattgctggatatggggcagggccacatggccctttttatttgtacagtggattcgcggcctctggcactgctggctctgttccacggagagcacctcctcgctacatccctcggacctcaagtccctagccacggtaggtttcaggcaaaggctgaggccaattcactcaagctggaagttagggagctcggtctcggcgattcaggatcgtataggtgcgaggccactaatgttttaggctcaagtaacacttccctgttctttcaggtgaggggagcatgggtacaggtaagcccctcacctgaactccaggaagggcaggccgtggtgctgtcgtgtcaggtgcacacgggcgtaccagagggcactagctataggtggtatcgtgacggccagccactgcaggaaagtacaagcgcaactctccggttcgctgccattacactgacacaggccggagcttaccattgccaggcgcaggcccctgggtctgctactaccagtctggctgctcctatttcgctgcacgtatcttatgccccacggcacgttacacttactacattgatggataccgggcctgggagactgggtctcttactctgtcgagtcgattcagacccgcctgcccagcttagactccttcatggagacaggctcgttgctagtaccttgcaaggggtcggcggaccagagggttcttcccctcggctacatgtggccgtggctcccaatacgctgcggctggaaatccacggtgctatgctggaggacgaaggagtctacatatgtgaagcctccaacacgctcggccaggcctcagcgtccgctgactttgacgctcaggcggtgaatgtccaggtgtggccaggggctacagtgcgggagggccaactggtgaacctgacctgtcttgtatggacgactcatcctgcacagcttacttatacctggtaccaggacggacagcagaggctggacgcccacagcatacctctccccaatgtaactgtccgcgatgcgacctcttatcggtgtggcgtaggtcccccaggaagggccccaaggctaagtagaccaatcactctggacgtcctgtacgccccaaggaacctgcggctgacatatttgctggaatcccacggaggccagctggcactagtgctgtgtacagtggatagtagaccgcctgcgcagctggcactgagccacgcgggaaggctattagcatcctctacagcagcctctgtcccgaatactctgcggctggagctcagaggaccgcagcccagggacgaaggcttctacagctgtagcgctaggagtccgctggggcaagcgaatacttccctggagttgaggctggaaggagtcagggtgattttagcacccgaggccgcagtgcctgaaggcgcacctattacagtaacttgtgctgaccctgccgctcacgcacctaccttatatacttggtatcacaatgggagatggcttcaggaggggccagcagctagcctgtcattcctcgtcgccacccgcgcacacgccggtgcctactcctgccaggctcaggacgcccaggggacacggtcctcaagacccgcagctttacaagtactgtacgccccacaagacgcggttctgtcgagctttcgtgactcccgtgccagatcaatggctgtcattcaatgtaccgtagacagcgagcctccagcagaacttgccctctcacacgacggcaaggtgctcgcaaccagttcgggtgtgcactctctggcatctggtaccggacacgtgcaggtcgctcgcaacgcactcaggctccaggtgcaggacgttcctgccggtgacgacacatatgtgtgcaccgctcagaatctgctgggcagcatttcaacgatcggcaggctgcaggtggagggtgccagggtcgtcgcggagcccggactggatgtgcccgaaggcgctgccttgaatttgagttgtcgcctcctggggggacctggaccagtgggaaactcaacgtttgcctggttctggaatgacaggcgcttgcacgccgagcctgtgcccaccctcgcattcacgcacgtggccagggcccaagctggtatgtaccattgtcttgctgagttgcctacgggggcagccgcatcggcacctgtaatgctgagagtactctacccgccaaagacccccaccatgatggtgtttgttgagcccgaaggtgggctaagaggcattttggactgtcgtgtcgatagtgaacctctggcatcccttaccctgcatttgggcagtaggttggttgccagctcacagccccagggggctcctgccgaaccacacatccacgtgttggcttctccaaacgccttgagggtggacatcgaggctctgcgcccttctgaccaaggtgaatacatatgtagcgcttctaacgtactcgggtccgcctccactagcacctacttcggggtgcgggctcttcatcggctgcaccagtttcagcagctcttgtgggttctcgggcttctggttggcctgcttcttctgttgttagggctgggggcttgttatacttggcggagacgaagggtgtgtaaacaatctatgggggagaacagcgtagagatggcctttcagaaggagactacccagcttattgaccccgacgccgctacttgcgagacatccacatgcgcaccaccactcggata

SEQ ID NO: 10610 - DNA, 693 bp, synthetic construct
  misc_feature 1..693: note = source = /note="Description of Artificial Sequence: Synthetic coding sequence"
  source 1..693: mol_type = other DNA
atgtgcgtgacgtatcataacgggacggggtattgtaagtgcccagagggatttctgggtgagtactgccagcaccgagatccatgcgagaagaataggtgccagaacgggggaacgtgtgtagcacaagcaatgctgggtaaggcaacgtgtcgatgcgcaagtggctttacaggtgaagactgtcagtactctacatctcatccttgctttgtatccaggccttgtttaaatggcggtacgtgccatatgctatcgcgcgatacctacgaatgcacatgtcaggttggctttaccgggaaggagtgtcagtggaccgatgcatgtctgagtcatccttgcgccaatggttcaacctgcaccaccgtggctaatcagttctcgtgcaaatgtcttactggttttaccggtcaaaaatgtgagactgatgtgaatgagtgtgacattcccggtcactgccaacacggtggcacttgcttaaacttgccaggctcgtatcagtgtcaatgtctccagggtttcacaggccaatattgtgattccctctacgttccatgtgcacccagcccgtgtgtgaacgggggaacctgcagacagacaggtgactttactttcgaatgtaattgtttacccgctacatggcccatttttccgaagttactctcgcttcaggaaaaagagtcctactgttag

SEQ ID NO: 10611 - DNA, 660 bp, synthetic construct
  misc_feature 1..660: note = source = /note="Description of Artificial Sequence: Synthetic coding sequence"
  source 1..660: mol_type = other DNA
atgttcgtatcatacctgatactgacccttctccacgtgcagactgccgtcctcgccagacctggtggcgagagcatcggatgcgatgactatttgggaagtgataaggtggttgataagtgtggcgtctgcggtggtgataataccggttgtcaggtagtcagcggggtgtttaagcacgccttaacttcacttgggtaccatagggttgtcgaaattccagagggtgccacgaagatcaacattacggaaatgtacaagtccaacaagaaaaagagccacttaaagcctgcgaccagaggatcccagttctcttcggtaaaagtttgcagcgtgcctgccgcttgtaagttgcttggtactcccggtcgcgcaaggcagcctgtgccggcacccagggaattagaacacgacaagaatagtccccattgtgcctatctttcgttatacttaacctctctcgctcagagcagctggcgggtgtttagtttattcagctatgtgctcatctatttgttttcaaagtacctggccttcaacacgctatttgcattaaaacggatggcgctgcagagagacaggaaagagaagactcgagcatggtgtatatttattaagctctgcggtagggagatccagatcttacccggacctgtgtag

SEQ ID NO: 10612 - DNA, 363 bp, synthetic construct
  misc_feature 1..363: note = source = /note="Description of Artificial Sequence: Synthetic coding sequence"
  source 1..363: mol_type = other DNA
atggacaacgtgcagcctaagataaagcaccgaccattttgtttctccgtgaagggacacgtcaaaatgctgcggcttgctctcactgtcaccagcatgacattttttattattgcacaggctcctgaaccgtacatcgtgataactggcttcgaggtaacggtgattttatttttcattctactgtacgttttgaggctagatagattgatgaagtggctcttctggcctttgcttgtctttgccctcgtgacggcagtgtgctgtctggcagatggcgctctcatctataggaaactactgttcaatccatccggaccatatcagaaaaagcccgtacacgagaagaaagaggtgctctag

SEQ ID NO: 10613 - DNA, 864 bp, synthetic construct
  misc_feature 1..864: note = source = /note="Description of Artificial Sequence: Synthetic coding sequence"
  source 1..864: mol_type = other DNA
atggctccttggtcacacccaagcgctcaactgcagccggtggggggagacgctgtgtcacctgcactcatggtgctgctctgtttgggcaatctcagcaaggcgaccctttgggctgagccaggctccgtcatctcccgtggcaattccgtgactatccggtgtcaagggacactggaggctcaggaataccgacttgtgaaggaaggctcccccgagccatgggacacccagaacccccttgaacctaaaaataaggcaagattcagtatcccatccatgacggaacatcacgctggcaggtaccggtgctattattacagccccgcaggatggagcgaaccatcagaccctttggaattggtggttactggcttctataataaacctacactgagtgcattaccgtctcctgtggtgacttctggcgagaatgtgaccctccagtgtggatctcgcctgagattcgacaggtttatcctcaccgaggagggcgaccacaaactgtcctggaccctcgactcgcaattgaccccctcggggcagtttcaggccctcttcccagttggtcctgtcacacccagccaccgctggatgctgcgctgctacggctctcgcagacacatacttcaagtctggagcgaacccagtgaccttctcgagatccctgtctcaggagcagccgacaatctcagtccaagtcagaacaaatcagacagcggtactgcatcacacttgcaggattacgcagtcgaaaacctaatacgcatgggtatggctggtttgattttagtcgtcctgggaatactgatcttccaggattggcattcccagcggtcaccccaggcagcggcaggccgttag

SEQ ID NO: 10614 - DNA, 438 bp, synthetic construct
  misc_feature 1..438: note = source = /note="Description of Artificial Sequence: Synthetic coding sequence"
  source 1..438: mol_type = other DNA
atgggaattggctgttggagaaacccactgctccttttgatcgccctggtgctgagtgccaagctggggcactttcagagatgggaggggttccagcagaagcttatgtccaagaaaaatatgaactccacactgaatttcttcatccagtcctacaataacgccagcaatgatacttatttgtacagggtgcaacgactgatcaggagccagatgcaattgaccacaggtgtcgagtatattgtgacagtcaagattggatggactaagtgcaagcggaacgatacatctaatagttcatgccctctgcagagtaagaagctgcgtaagtcactgatctgcgagagcctgatatacacaatgccttggattaactatttccagctgtggaataactcctgtctggaggcggagcacgtgggcaggaatctgcgatag

SEQ ID NO: 10615 - DNA, 1776 bp, synthetic construct
  misc_feature 1..1776: note = source = /note="Description of Artificial Sequence: Synthetic coding sequence"
  source 1..1776: mol_type = other DNA
atgcagcaggatggcctgggggtagggacgcgtaacgggtcaggcaagggtcgttccgtacaccccagttggccctggtgtgcacctcgacctctgagatacttcggacgggatgccagagccagacgtgcacaaaccgctgcaatggccctcgctattcaggtgactgttagcaatccttatcatgtggttatcctctttcagcctgtgaccttgccctgcacgtaccagatgacatccacgcccactcagcctattgtgatctggaaatataagtcattctgtcgagataggatcgcggacgccttcagtccagcctccgttgataaccagcttaatgctcaactggcagccggtaatcccggttataatccatatgtggaatgtcaggattccgtacggaccgtgagagtcgtcgcgaccaagcagggcaatgcagtcaccctgggagactactatcagggacgtcgcataacaattactggtaacgccgatctcaccttcgaccaaacagcctggggcgactccggagtgtattattgttcagttgtgtctgcgcaggatctgcaaggcaacaacgaagcctacgccgaactgattgttctgggtcgtacttctggagtggctgaactgcttcccggatttcaggccggacccattgaggactggctttttgtggtggtggtatgcctggcggctttcctcatttttcttcttttaggtatctgttggtgtcaatgctgtcctcatacgtgctgttgctacgtccgctgcccatgttgtcccgacaaatgctgctgcccagaagcactttatgcagctggaaaggccgctacctccggagtaccctcaatttatgccccatccacctacgcccacctctctcctgccaagaccccgccaccgcctgccatgattcctatgggaccagcatacaatggataccctggaggctacccaggcgacgtggacagatcctctagtgtgcgctctggatatagaatccaggcttcccagcaggacgactcaatgagagtgttatactatatggagaaggagttagccaatttcgacccctctcgtcccggtcctccctcaggtcgggtggaaagggccatgtcagaagtcaccagcctgcatgaagacgactggagaagccggccatctaggggcccagccttaactccaatcagggacgaagagtggggaggacactctcccaggtcccctaggggctgggaccaggagcctgctcgcgagcaggctggaggcggttggcgcgctcgcaggcctcgagccagaagtgtggatgccttggatgacctaacgcccccaagtaccgcagaaagtggaagtagaagtcccacatccaacgggggtagatctcgcgcttatatgccccctagaagtcgtagccgcgacgatctctacgaccaagacgacagtcgcgatttcccgagatcaagagatccccattatgacgactttagatcccgggagaggcctccagcggatcctcggagtcatcaccaccggacaagagacccacgggacaacggaagcagatcaggagacctcccatatgatggcaggctgctggaagaagccgtgaggaaaaagggctccgaggagcggaggcggccacataaggaagaggaagaagaggcctattacccgccagccccacccccttattcagagaccgacagtcaagccagtcgcgaacgacggctgaagaaaaacctcgccctgtcgagagaaagcctggtggtttag

SEQ ID NO: 10616 - DNA, 678 bp, synthetic construct
  misc_feature 1..678: note = source = /note="Description of Artificial Sequence: Synthetic coding sequence"
  source 1..678: mol_type = other DNA
atgaaccggtgccccagaaggtgccggtcccctttaggtcaagccgctcgttcactctatcagctagtaacgggctcattgagcccggatagtgtggatgacgaatttgagctgtcaactgtttgccatagaccagagggcctggagcagttgcaggaacaaacaaagtttacccgtaaagagctgcaagtactgtatcggggatttaaaaacgagtgtcctagcggaatcgttaatgaagaaaattttaaacagatttacagccagtttttcccccagggtgattcatccacctacgccaccttcttattcaatgcatttgacacaaaccacgatgggagcgttagctttgaagacttcgtcgctgggctttcagttatactccgaggcactgtggatgatcgcctcaactgggcgtttaatctctatgatttgaacaaggatgggtgtataacaaaggaggagatgctcgatatcatgaagtcaatctacgatatgatgggcaagtacacatatcctgctctgcgcgaagaggctcctagggaacatgtggagagcttcttccagaagatggaccggaataaagacggggtcgtgaccattgaggaatttattgaatcatgccagaaggatgagaacattatgcgttcgatgcaactcttcgacaatgtcatttag

SEQ ID NO: 10617 - DNA, 705 bp, synthetic construct
  misc_feature 1..705: note = source = /note="Description of Artificial Sequence: Synthetic coding sequence"
  source 1..705: mol_type = other DNA
atgcccgcatcctcacccttcttactagcacccaagggcccaccaggaaatatggggggtccagttcgtgagcccgcactcagcgtcgccttatggctgtcctggggtgcggcattgggcgcagtcgcgtgcgcgatggccttgctcacccagcagaccgagctccagagcctccgtagggaggtctcgcgcctgcaggggacagggggtccttcacagaacggggaaggttatccttggcagagcctccccgaacagagcagcgacgctcttgaggcttgggaaaatggtgaacgaagccgtaaaaggagggcggtccttactcagaagcagaaaaatgactctgatgtcacggaagttatgtggcagccagccttgcgcagaggcaggggcctgcaagcccagggctacggtgtgcgcatccaggacgctggggtatatctcctgtactcgcaggtactattccaagacgtgacattcacaatgggccaggtagtgtctagggaaggtcagggcagacaggaaaccctgttcagatgtattagatccatgccctctcatcctgatcgcgcatacaattcctgttactccgccggtgtcttccatttgcaccagggtgacatcctttctgtaatcatccctcgggcacgagcaaagcttaatctatctcctcacgggacattcctggggtttgtgaaactgtag

SEQ ID NO: 10618 - DNA, 2400 bp, synthetic construct
  misc_feature 1..2400: note = source = /note="Description of Artificial Sequence: Synthetic coding sequence"
  source 1..2400: mol_type = other DNA
atgaaacctatgcttaaggattttagcaacctgcttctggttgtcctttgcgattacgttctcggggaggcagagtatcttctgctgcgggagcccggacatgtggcactcagtaacgatacagtgtacgtggattttcagtacttcgacggtgctaacggcacgttgcgcaatgtctcggtgcttctgctagaggccaacaccaatcagaccgtgaccactaagtacttgctgactaaccagtcccagggtactctgaaatttgaatgtttctattttaaagaggccggtgactactggttcacaatgaccccagaagcaacggacaactcgactccttttccttggtgggagaagagtgccttcttgaaagtcgaatggcccgtattccacgtcgacttgaatcgatccgcaaaggctgccgaaggaactttccaggtgggactgttcactagccagcctctgtgccctttccccgttgataaacctaacatagtggtcgacgttattttcaccaactccctgcccgaagcgagaagaaatagtaggcagccactcgagattagaacctctaagcgcaccgagctggcacagggccagtgggtcgagtttggttgcgcccctctgggccctgaagcatacgtaactgtggtcctgaagctgcttgggagagattcagtgattacaagcacgggccctatcgatctggcgcaaaaattcggatataaactggtcatggtgcccgaattaacctgcgagtccggagtagaggtaaccgtcttgccacccccatgtacttttgttcagggggtggtcacagtatttaaagaagcgcctaggtaccccggtaagagaacgatccatttggctgagaattccctgcctctcggggagcggcgaacgatcttcaactgcacattgtttgatatgggaaaaaataagtattgcttcgattttggaatctcttccagatcccacttctcagcaaaagaagagtgtatgttaatccagcgaaacactgccttccagcccagttctcctagcccccttcagccccaaggacctgtaaagagtaataacatcgtcactgtgacaggtatctcactatgcttatttatcattattgcaactgtgttgatcaccctttggcggcgtttcggacgccctgcgaaatgctccaccccagcacggcacaactctatccactccccctcatttagaaaaaacagcgacgaagaaaatatttgcgagcttagtgaacagcgcggaagcttttcggacggtggggacgggccaaccgggtcccccggagacactgggataccccttacctataggaggtccggtccagttcctcctgaggacgatgcctcaggctcagagtcctttcagtcgaacgctcagaagatcattcctccgcttttctcttatcggctagcacaacaacagctgaaagaaatgaagaaaaagggcctcacagaaactaccaaggtctatcatgtgagtcaatcccctctgactgatacagccatcgatgcagcacccagcgccccacttgacctggaaagtccagaggaagccgcagcaaacaagttcaggattaagagtccttttcccgagcagcccgctgtgtccgctggtgaaagacctcctagtagattagatttaaacgtgacccaagcctcatgcgctatctctccttcccagacgctgattagaaaatctcaggcaaggcacgtagggagcagaggtggcccttctgagagatcccacgcacgaaacgctcacttcaggagaacagcttccttccatgaggctcgccaggccaggccttttcgagagaggagtatgagtaccctcacccctagacaggcacctgcctatagttctcggaccagaacgtgcgagcaagccgaggaccgcttccgtccacagagcaggggcgctcacctgtttccagagaaacttgaacatttccaggaagcaagcggaactcgcggtccgctgaatcccctgccgaagtcgtatacgctcgggcagcccctgaggaagcctgacctcggcgaccatcaggctggtctggtggccggaatagagcgcacggagccgcatcgagctcgacgcggtccaagtccgagccacaagtctgtctcccggaagcagagcagtccaatctcacctaaggataattaccagagggttagcagcctaagcccttcccagtgtcggaaagataagtgtcagagcttccccacccaccctgaatttgctttctacgacaatacttccttcggtctcacggaagctgagcagaggatgctagacctgccaggttatttcgggagcaacgaggaggacgagaccacaagcaccctctccgtagaaaagttggtcatttag

SEQ ID NO: 10619 - DNA, 927 bp, synthetic construct
  misc_feature 1..927: note = source = /note="Description of Artificial Sequence: Synthetic coding sequence"
  source 1..927: mol_type = other DNA
atgagattgctaccggagtggtttcttctgctatttgggccatggctcctgcggaaggcagtctcagcccagatcccagaatccggcagacctcagtacctcgggctgcgtccggctgccgcaggtgctggcgctcctggacagcagctgcctgagccacggtccagtgatgggctgggagttggccgtgcatggtcttgggcctggccaaccaaccacactggggctctggctagggcaggagctgcgggtgccttacctgcccagcggactaaacgtaagccctcgattaaggccgcaagggctaagaagatctttggctggggtgatttctatttccgcgttcatacattgaagttctccttgttggtgaccgggaagattgttgatcacgtgaacgggacatttagcgtatattttagacacaactcatcaagccttggaaacctgagtgtgtccattgtgcctccatcaaaaagagttgaatttgggggagtgtggctgccaggacctgtcccccacccactgcagtccaccctagctcttgaaggtgtgctaccaggcctcggcccacccttagggatggccgctgcggcagccggacctggcctggggggatcgcttgggggtgctctcgcgggtccactcggtggtgcactgggggtgcctggcgctaaggaaagtcgagcttttaattgccatgttgagtacgagaagaccaaccgcgcaagaaagcaccggccatgcctatacgatccgtcccaggtgtgctttaccgagcacacacagtcacaggcagcatggctttgtgcaaaacctttcaaggtaatatgcattttcgtttcttttctgtccttcgattacaagctcgttcagaaggtttgtccggactataacttccaatctgagcatccgtactttggctag

SEQ ID NO: 10620 - DNA, 795 bp, synthetic construct
  misc_feature 1..795: note = source = /note="Description of Artificial Sequence: Synthetic coding sequence"
  source 1..795: mol_type = other DNA
atgaaactgggatgcgttctgatggcatgggctctgtatctttctttgggcgtcctttgggttgcacagatgcttctggccgcatccttcgaaacgttgcagtgcgaggggcctgtgtgtaccgaggagtccagttgtcatacagaagatgaccttactgatgcacgggaggccggatttcaggtgaaagcttacactttctccgaaccgtttcatttaatagtctcgtacgactggttaattctgcaaggccctgctaagcctgtgtttgaaggagatctcctggtgctacggtgccaagcctggcaggactggccacttacccaggtgaccttctacagggatggaagcgcgctcgggccaccaggaccaaatagggagttctcgatcaccgtagtccagaaagccgactcagggcactatcactgcagcgggattttccagtctccgggacctggtattccagaaacagcctccgtagtagccattacagtgcagggtgcttcgagctccgccgcacctcctactctgaaccccgcaccccagaagtctgcagcaccgggtaccgctcccgaagaagcccctggccctttgccccctcctccaactcctagctccgaagatcctgggttttccagccccttaggtatgcccgacccccacctgtaccaccaaatgggactgctgcttaaacacatgcaggatgtcagggtgctcttaggacacctgttgatggaacttcgcgaattgtctgggcatagaaagcctggcacaacgaaggcgaccgccgaatag

SEQ ID NO: 10621 - DNA, 1362 bp, synthetic construct
  misc_feature 1..1362: note = source = /note="Description of Artificial Sequence: Synthetic coding sequence"
  source 1..1362: mol_type = other DNA
atgctgcggatattatgtctggctttgtgcagtcttctgactggcactcgagcagatcctggggctttgttgcggctggggatggatatcatgaaccaagttcagtccgcaatggacgaatcccatattcttgagaaaatggccgctgaggccggtaagaaacagccaggcatgaaaccaatcaagggcattacaaatttgaaggtgaaggatgtgcaactgccggtaatcactctcaacttcgtccccggagtagggatctttcagtgcgtgtccacgggcatgacagtgactggaaagtctttcatgggtgggaatatggaaattatagtagccctcaacattacagccacaaatagacttctgcgcgatgaagaaaccgggctgcctgtatttaaatccgaaggctgtgaggtgatcttagtcaatgtgaagacaaacctgccaagtaacatgttgccaaagatggtaaacaagttcttagacagcactctgcacaaagtgctccccggtctgatgtgcccggctatcgatgctgtactggtctatgtcaatcgaaagtggacgaatctctctgatccaatgccggttggacagatggggactgtaaaatacgtgctcatgagcgctcctgctactacagcatcttatattcaacttgacttttcccccgtggtccagcaacaaaagggaaagaccatcaaacttgccgacgccggagaggcgctgactttccctgaagggtatgccaaaggtagtagtcagcttctgcttcccgcaacctttctgtcggccgaactcgctcttctacagaagtcctttcatgttaatattcaagacactatgattggcgagctcccacctcagaccacgaagacactggcccgttttatcccagaagtggccgttgcatatccgaagagcaagcccttgacaacccagatcaaaatcaaaaagcctcccaaggtgaccatgaagactggcaaatcactgctgcatctgcacagcacgctggagatgttcgctgcacgatggcggtctaaggcaccgatgtcgttatttttgctcgaggttcacttcaatctgaaagtgcagtactcagtgcacgagaatcagctgcagatggcaactagcttggacaggttgctttctctgtctcgtaagtcttcttcaatcgggaacttcaacgagcgcgagctaaccggtttcatcactagttatctcgaggaagcttatattcccgttgttaatgatgtgcttcaagtgggactcccattaccagactttttagctatgaactacaacctggctgagctggatatcgtcgagaacgctctcatgctggacttaaagctgggctag

SEQ ID NO: 10622 - DNA, 1323 bp, synthetic construct
  misc_feature 1..1323: note = source = /note="Description of Artificial Sequence: Synthetic coding sequence"
  source 1..1323: mol_type = other DNA
atgagcgcacgtggcaggtgggagggcggtggaagaagggcgtgtagaggaagtctgggactggccagagcccaaggggctgaacgagtcacctcctctgaacagcgacctgcaatggccagccttgggctgctcctgctcctccttctgaccgcactgcctcctctctggtcatcttcactgcctgggctggatactgccgagagcaaagccacaattgcagatttgattctgtcagccctcgaaagagccaccgtgtttctagagcagaggctgcctgagattaatttggacggcatggttggagtgagagtgctagaggaacagctcaagtccgtgcgggagaagtgggctcaggagccactgctgcagcccttatccctccgcgtggggatgctgggagagaagttggaggccgctatacagagatcattgcattacctgaagctgtcagaccccaagtacttaagggagttccaactgacactgcagccaggtttttggaaattgcctcacgcttggattcacaccgacgcctccctggtctacccaacattcggaccacaagactctttctctgaagaacggtcagacgtgtgtctggtgcagctgttagggacaggaactgattcctccgagccgtgtggtctgtccgacttatgccgatctctgatgacgaagcccggatgctctggatactgtttgtcacaccaactcctgtttttcctgtgggccaggatgagggggtgcacacagggccctttacagcagtcccaggactacattaacctcttttgtgcgaacatgatggatctgaaccgcagggcagaggccattggttacgcatatcccacacgagatatattcatggagaacattatgttttgcggaatgggcggtttcagtgatttctacaaactccgatggctggaggccattcttagttggcagaaacaacaggaaggctgcttcggtgagcctgacgcggaagatgaagaactttccaaagcaatccaataccagcaacatttttcacggagagtcaagcgccgagaaaagcagtttcctgacagccgatcagtggctcaggcaggggtgcagtggagaaaccttggcagcctgcagcctttgcccccagggtttaagcaattctcttgtcttatattgccatcgagttgggattatcgctctgtgcccccttaccttgccaatttttacatctttctggtcgaaactggctttcatcacgtagctcacgccggactcgagctgctcatatctcgcgatccgcctactagcgggagtcaatctgttggcctctag

SEQ ID NO: 10623 - DNA, 708 bp, synthetic construct
  misc_feature 1..708: note = source = /note="Description of Artificial Sequence: Synthetic coding sequence"
  source 1..708: mol_type = other DNA
atgaagtatgtcttctatctgggcgttcttgcgggaaccttctttttcgccgatagcagtgtacagaaggaagatcccgcaccttatctcgtttacctgaagagccactttaatccttgtgtcggcgtattgataaagccgagttgggtccttgctcctgctcactgctacttacctaatctgaaagtgatgttggggaatttcaagtcacgggtgagagatgggaccgagcaaaccatcaatccaatccagatcgtccgctactggaattactcacatagcgccccacaggatgacctcatgctcatcaaactagcaaagcccgcaatgctaaatcccaaagtgcaacccttgacacttgccactaccaatgtacggccaggcaccgtttgtcttctctctggtctagattggtcccaagagaactccgggaggcatcctgacctgagacagaatcttgaagctcccgtgatgtctgaccgggaatgtcagaagacagaacagggcaagagccacagaaacagtttatgcgtgaagttcgtcaaggtgttcagcagaatttttggagaggtggcggtggccacagttatctgtaaggacaagctgcagggcattgaggttggacatttcatgggtggcgacgtggggatctatactaacgtgtataaatatgtcagttggatcgaaaacacagccaaggataagtag

SEQ ID NO: 10624 - DNA, 426 bp, synthetic construct
  misc_feature 1..426: note = source = /note="Description of Artificial Sequence: Synthetic coding sequence"
  source 1..426: mol_type = other DNA
atgttgaagaaaatctctgtcggggttgccggagacctgaataccgtcactatgaaactcgggtgtgtgctcatggcgtgggctctatatctgtctttaggagtgctttgggtggcccagatgctgttgggagcttcttcatcggctgctccaccaaccctcaaccccgctcctcagaagtcagcagcccctggcactgctccagaggaggccccaggcccattgcctcctccccctacgcctagttccgaggaccctggattcagcagccctctcggcatgccggacccccatctgtaccaccaaatgggcttgctgctgaaacatatgcaagacgtgcgagtgttgctaggccacttgctcatggaactgcgcgagctttcaggccatagaaagccaggtacaacaaaagccaccgctgagtag

SEQ ID NO: 10625 - DNA, 2886 bp, synthetic construct
  misc_feature 1..2886: note = source = /note="Description of Artificial Sequence: Synthetic coding sequence"
  source 1..2886: mol_type = other DNA
atgcttgccccaagaggagccgctgtccttttgctgcacctggtcctccaaagatggttggctgccggtgcccaggccaccccccaagtatttgacttgttaccatcaagcagtcagcgcttaaatccaggagccctgcttcccgtgctgactgatcctgctctgaatgacctgtacgtgatcagcacgttcaagttgcagaccaagagtagtgcgactatttttgggctgtatagctcaacggacaattctaaatactttgagttcaccgttatggggagactgaataaagccattttacggtaccttaagaacgatgggaaagtgcatctagtagtcttcaacaacctgcagttagctgacgggagacggcaccgcatccttctcagactatcaaatctccagcgaggcgctgggtcactggagctatatttggattgcatacaggtcgattccgtgcacaatctgcctcgcgctttcgctggaccatctcagaaaccagagacaatcgaattgcgcacattccagagaaaacctcaggatttcctggaggagctgaagctggtggtacgcggtagcctgtttcaagtggcttccctgcaggactgctttctccagcagagcgaaccactggctgcgacagggaccggcgacttcaacagacagttcttgggtcagatgacacagctcaaccaacttcttggagaagtgaaagacctgctcagacagcaggtaaaagagacctcgtttctgcggaacactattgccgaatgccaggcctgcggcccactgaagttccaaagtccaacgcccagtaccgttgtgcctcccgctcctccggcacccccaactaggccccctaggcgctgtgacagcaacccttgcttcaggggagtgcagtgtaccgacagtcgggatgggttccaatgtggtccttgtcctgagggatacactggcaatgggataacatgtatcgatgtcgatgaatgcaaatatcacccctgctaccctggggttcactgcataaacctgtctcctggctttcgttgtgacgcctgtccggtgggctttactggacccatggtgcagggagtggggatttcgtttgcgaagagcaataagcaagtgtgcacggatattgacgaatgtcgcaacggcgcttgtgtgccaaactccatatgtgtaaacacattgggttcatacaggtgcggaccctgtaaacctgggtatacaggagatcagattcgcggatgcaaagccgaaagaaattgtaggaatccggaactgaatccatgcagcgtcaacgcccaatgcatagaagaacgccagggagatgtaacctgtgtgtgcggggtggggtgggcaggtgacggctacatttgcggcaaggacgtggacatagattcatatccagacgaggagctaccatgcagcgctagaaactgcaagaaagacaattgcaagtatgtgcctaactccggacaggaggatgccgaccgggacggcattggggatgcctgcgatgaagacgccgacggtgacgggattcttaacgaacaggataattgcgttctgatccataatgtggatcaacgcaatagcgataaggacatcttcggggacgcctgtgataactgtctgtctgtcctgaataatgatcagaaagacaccgacggtgacgggcgaggggatgcctgcgatgacgatatggacggcgatgggattaagaacatactagacaactgtcccaagtttccgaaccgtgaccagagagacaaagatggcgacggcgtgggcgacgcctgcgattcatgtcctgatgtaagcaatcctaaccagtccgatgtggataatgacttggtcggggacagttgcgacacaaaccaggactctgatggcgatggacatcaagattccacagacaattgcccgacagttatcaattctgctcaacttgatacagacaaagacgggatcggcgatgagtgtgatgacgacgatgataacgatggcatccctgacctagttccaccaggaccagataactgccggctggtacccaatcccgctcaggaggactctaattctgatggcgtgggggatatctgtgagtccgattttgatcaggaccaggttatagatcgcatagatgtttgccctgagaatgccgaagtcaccttgactgacttcagagcatatcagaccgtcgtgttggaccccgagggcgacgctcaaatcgaccctaattgggtggtgctaaatcagggcatggagattgtccagaccatgaattccgatcctggtctggcggtgggatacaccgcattcaacggagtcgactttgagggaaccttccacgttaacacgcagaccgacgacgactacgccggttttattttcggataccaagacagtagctctttctacgttgtcatgtggaaacagactgagcaaacctactggcaggctactcctttcagagccgttgctgagccaggtattcagctcaaggccgtcaaatcaaaaactggcccaggcgagcatctacgaaactccctgtggcacacaggtgacactagcgaccaagtgcggttattatggaaggattcccgcaatgtgggctggaaagacaaggtgtcctataggtggttccttcagcaccggcctcaagtgggatacatccgggtccgcttctacgaaggatccgagctggttgcagactcaggggtgacaatagatactacaatgcgtggcggacggttaggggtcttctgtttttctcaggaaaatatcatctggtctaatctaaaatacaggtgtaatgatacgattcccgaggactttcaggagtttcagacccaaaattttgatcgcttcgataactag

SEQ ID NO: 10626 - DNA, 300 bp, synthetic construct
  misc_feature 1..300: note = source = /note="Description of Artificial Sequence: Synthetic coding sequence"
  source 1..300: mol_type = other DNA
atggataatgtgcagcctaaaatcaagcatcgcccattttgctttagcgtgaagggccacgtcaagatgttaaggctcgatatcatcaattcgctggtgaccaccgtctttatgctcatcgtctccgtactggccttgattcctgagaccaccactctgacagtgggcggaggggtgtttgccctagtaacggcagtatgctgcctagcagacggagctcttatatacaggaaactccttttcaacccctccggcccataccagaagaaaccagtccatgaaaagaaagaggtattatag

SEQ ID NO: 10627 - DNA, 408 bp, synthetic construct
  misc_feature 1..408: note = source = /note="Description of Artificial Sequence: Synthetic coding sequence"
  source 1..408: mol_type = other DNA
atgagtccccatctgaccgccttactgggccttgtcctgtgcctggctcagaccatccacacccaagagggcgctttgcccaggccgtccatttctgcagaacccggaacggtgatcagcccgggtagccatgtgacttttatgtgtcgcggtccagtgggtgtgcagacgttccgcctggagagagaggaccgggcaaagtacaaggactcgtacaatgtcttcagacttggccctagcgagtcagaagctcgctttcatatagacagcgtgagcgaagggaacgctgggctctatcgctgtctctactacaaacctccaggctggtcagagcattccgatttcctagaactgctggtcaaaggaaccgtgcccggaaccgaagcctccggcttcgacgccccatag

SEQ ID NO: 10628 - DNA, 231 bp, synthetic construct
  misc_feature 1..231: note = source = /note="Description of Artificial Sequence: Synthetic coding sequence"
  source 1..231: mol_type = other DNA
atgcttccatgcttggccttactgttgctcatggaattaagcgtgtgcacagtggccggtgacggcggagaagagcagactctttctaccgaagcggagacttgggagggggcaggaccctcaatccagctgcaattgcaggaagtcaagacgggaaaggcatcccagtttttcggactcatgggtaagagagtgggcggaagggaagatgaagcccagggtagcgagtag

SEQ ID NO: 10629 - DNA, 684 bp, synthetic construct
  misc_feature 1..684: note = source = /note="Description of Artificial Sequence: Synthetic coding sequence"
  source 1..684: mol_type = other DNA
atgagaggccaaggtagaaaggaatccttgtccgactcaagagatttagatggcagttacgatcagttaacagattcggtcgatgatgaattcgagctgagcaccgtttgccatcgaccagagggcctcgagcagttgcaggagcagacaaaatttacgcgcaaggaactgcaggttctgtataggggatttaagaatcctggcgcactgagcttccaggagtgcccttccggaattgtcaacgaagagaattttaagcaaatttacagtcagttttttccgcaaggggattcgtccacttatgccacgttcctgttcaacgcctttgataccaaccacgacggttccgtgagtttcgaggatttcgtggcaggcctcagcgttatactgagggggacggtagatgatagacttaactgggcgttcaacctctacgatctcaataaagacggctgcatcacgaaagaggaaatgctagatataatgaagtcaatctatgacatgatggggaagtacacctaccctgctttacgcgaggaagcaccccgagagcatgttgagagtttcttccagaaaatggatcgcaacaaggatggcgttgtgacaattgaggaatttattgaatcttgtcaaaaggacgagaatatcatgcgctccatgcagctgttcgataatgttatctag

SEQ ID NO: 10630 - DNA, 876 bp, synthetic construct
  misc_feature 1..876: note = source = /note="Description of Artificial Sequence: Synthetic coding sequence"
  source 1..876: mol_type = other DNA
atgatgtccgccacaggccctggtagaaagatgggctcaagaggtcaaggcctcctcctcgcctactgcttattactggcctttgcttccgggctcgtgctcagccgtgtacctcacgtccagggcgagcagcaagaatgggaagggacagaggagttacccagccctccagaccacgctgaacgcgcagaagagcagcatgagaaatacaggcctagtcaggaccaaggcctgccagcctctcggtgtcttcggtgctgcgaccctggtacaagcatgtacccggctacagcagtcccccagataaacatcacaatcttaaaaggagaaaagggagaccggggtgatcgtggcttacagggcaaatacgggaagacagggagcgccggtgcgagggggcatacgggacccaagggacaaaagggatccatgggcgcacccggtgagagatgtaaatctcattatgcagctttctccgtgggcagaaagaagccaatgcacagcaatcactactaccagacggtaatttttgacaccgaattcgtgaacctgtatgaccactttaacatgtttactggcaaattctattgctacgtaccagggctgtacttcttctctctcaacgttcatacatggaaccagaaagagacgtacctccatattatgaagaacgaagaggaggtggttatcctgtttgcccaagtgggggaccgttcaattatgcagtcccagtcactgatgttggaactccgagagcaggaccaagtgtgggtgagactgtacaagggcgaacgagagaatgccatattcagcgaagaattggatacatatatcacatttagtgggtacctcgtcaaacacgcgaccgagccttag

SEQ ID NO: 10631 - DNA, 213 bp, synthetic construct
  misc_feature 1..213: note = source = /note="Description of Artificial Sequence: Synthetic coding sequence"
  source 1..213: mol_type = other DNA
atggagagaggagctggcgcaaagcttctcccgcttttgctgctcctaagagccacaggtttcacttgtgcacagacagatggtagaaatgggtatacagctgttatcgaggtgaccagcgggggaccttggggggattgggcctggcccgagatgtgtcccgatggattctttgcctctggcttcagccttaaactgggcaggatggagtag

SEQ ID NO: 10632 - DNA, 402 bp, synthetic construct
  misc_feature 1..402: note = source = /note="Description of Artificial Sequence: Synthetic coding sequence"
  source 1..402: mol_type = other DNA
atgggttcctctggactgctttcgctactggtgctcttcgttctgcttgctaatgtccagggccctggactcactgattggttgttcccaagaaggtgtccaaagatacgcgaagagtgcgagttccaggaacgcgatgtgtgtactaaagatagacagtgccaggacaacaagaaatgttgtgtcttctcatgcgggaaaaaatgtttggacctcaagcaggatgtatgcgagatgcctaaggaaacaggcccttgtttggcctactttttacactggtggtacgacaagaaggacaacacatgttctatgtttgtgtacgggggatgtcaagggaataacaacaacttccagtccaaggcaaactgccttaatacgtgtaaaaataagagattcccatag

SEQ ID NO: 10633 - DNA, 771 bp, synthetic construct
  misc_feature 1..771: note = source = /note="Description of Artificial Sequence: Synthetic coding sequence"
  source 1..771: mol_type = other DNA
atgtttcaaactggaggactgatagtgttctatggcttgctagcacaaactatggctcagtttggcggactgccagtgccactagaccagacgttacctctgaatgtgaaccccgctctccctctgtcgccaacaggactggcaggctcgcttactaacgcgctttctaatgggcttttgagcggaggcctgctgggtatccttgaaaatctacctctgctggatatcctgaaacccggaggaggcacgtccggcggattgcttggagggctgctaggaaaggtgacctctgttattcccggtctgaataacattattgatataaaagtgacagatccgcagctccttgagctggggcttgtacagtctcctgatggtcatagactgtacgtgacaattccactgggaataaagttgcaggtgaatacacctcttgttggagcttcacttctgaggttggccgtaaaacttgatattactgccgaaattttagccgtccgggataagcaggaaagaattcatctggtcctgggtgactgtacccatagtccagggtctttgcagatatctctcttagacgggctcggaccccttccaatccaggggttgttggattctctgactggcatattaaataaggttttgcctgagctggtgcagggaaacgtgtgccccttggtaaacgaggtgctacgcggactggacatcacccttgtgcacgacatagtaaatatgctaatccatggcctccagtttgtcatcaaggtgtag

SEQ ID NO: 10634 - DNA, 1386 bp, synthetic construct
  misc_feature 1..1386: note = source = /note="Description of Artificial Sequence: Synthetic coding sequence"
  source 1..1386: mol_type = other DNA
atgtccttagatattcagtccctagacatccaatgcgaagaactgagcgatgccaggtgggcggagttgctccccctgcttcagcagtgccaagttgtgagactggatgattgtggattgaccgaagctagatgtaaggacatttccagcgcactgagggtgaacccagcattggcagaattaaatctgagaagcaacgagttgggggatgtgggagttcactgtgtgttgcagggcctgcagactccttcatgtaagattcagaagctgagcctacagaattgttgtttaacaggcgcaggctgtggtgtgctgtcatccaccctgcgcacattgccaacactccaggaattgcatttgtctgataacctgctcggggatgccggtctccagttattgtgtgaaggactcctggatcctcaatgccgactggagaaactccagctggaatattgctcactgagcgccgctagctgtgaaccccttgcgtcagtgcttagggcgaaacccgacttcaaggaactgactgtgagcaacaatgacatcaacgaggccggagtcagagtcctgtgccagggtttaaaggatagtccatgtcagttagaagcgctgaaactcgaatcctgtggggtgacctcggacaattgtcgagacctctgtgggatcgtggcttcaaaggctagtcttagggaacttgctcttggctcgaataagttaggagatgtcgggatggctgagttatgtccagggttactccacccctcatcacgccttcgcactctctggatatgggagtgcggtattactgcgaaaggatgtggcgatctttgtagggtgctgagagcgaaagagtctctgaaggaactctcccttgccggaaatgagctaggagacgagggcgctcgactcttgtgcgagaccttgctggaacccggatgtcaactggagtctctctgggtgaaaagttgttctttcacagctgcctgctgctcccacttttcatctgttctggcgcagaacaggtttctcctcgagctacagatctctaacaataggctagaagatgccggagttcgcgagttgtgccagggccttgggcaacccggttcagtgctgcgagtactctggctggctgactgcgacgtatctgatagctcatgctcaagtcttgcggctaccctccttgcaaaccactcccttcgcgagttggacttgagcaacaactgcctgggagatgctggaatcctgcagctcgttgaatcagtgagacagccaggatgcctgttggagcaactcgttctgtacgacatttattggagcgaggaaatggaggatcggctgcaggccctcgagaaggacaagccatctctacgagtgatcagttag

SEQ ID NO: 10635 - DNA, 534 bp, synthetic construct
  misc_feature 1..534: note = source = /note="Description of Artificial Sequence: Synthetic coding sequence"
  source 1..534: mol_type = other DNA
atgcgcctactcatactgacctgcttagttgcagttgcgttggcaagacccaagctgcctcttaggtatcctgaacggctgcaaaatccatccgaatcttctgagccgattcccctcgaatcccgcgaggagtatatgaacggtatgaacaggcagcggaacattctgcgagagaagcaaacagatgaaattaaaaactgtgtggttgcagagcctgaaaaaatggaatcgtccatctccagtagcagcgaagaaatgagtctgtccaagtgcgcagaacagttctgcagacttaatgaatacaatcagttgcagctgcaaaaaatgtctaaacaggagcagattcgtcggatgaacgagaacagccacgtgcaggtgccctttcagcagctcaaccaacttgctgcctacccctatgccgtgtggtactacccacagatcatgcagtacgtgccttttccaccgtttagcgatatcagcaaccctaccgctcatgagaattatgagaagaacaatgtgatgttgcagtggtag

SEQ ID NO: 10636 - DNA, 3054 bp, synthetic construct
  misc_feature 1..3054: note = source = /note="Description of Artificial Sequence: Synthetic coding sequence"
  source 1..3054: mol_type = other DNA
atggacctgattagaggggttcttcttaggctgttgttactcgcaagcagcttaggccctggcgctgtcagtcttagagctgctattcgcaagccaggcaaagttgggccacccctggatatcaagctgggcgcacttaactgcaccgccttttctatccagtggaaaatgccccgtcaccccggtagtccaatcctcggatacacagtgttttatagcgaagtgggcgctgacaaaagtctgcaggaacagctgcactccgtccccttaagccgggacatccctaccacggaggaagttattggagacctgaagcccggaaccgagtaccgtgtatccatcgccgcatatagtcaagcagggaaaggacgcctctcttccccccgacacgtaacaacccttagtcaggatagctgtttgcctccggcagccccacagcagccccacgtgatagtagtgagtgattccgaggtggcattgtcctggaaacctggagccagcgaggggtctgcccctattcagtattatagtgtggagtttatcaggcccgattttgataagaaatggacttccattcatgagaggattcaaatggatagcatggtcatcaagggcctggatcctgacacaaattaccagttcgccgttcgcgctatgaattctcacgggccttcccccaggagctggcccagtgatatcattcgtacactctgtcctgaagaggccggaagcggtaggtacggtccaagatacatcactgacatgggcgcaggcgaggacgacgaagggtttgaggacgacctggacctggacatatcctttgaggaggtgaagcctctaccggcaaccaagggcggaaacaagaagttcttggtggagtctaagaagatgtccatctccaatccgaagaccatctcccgcttaatccctccaacatcggccagcttgcccgtaaccacagtggccccacagccaattccaatccagagaaagggtaagaatggggtggctatcatgagcaggctatttgacatgccctgcgatgagaccctttgcagcgccgacagtttctgcgtgaacgactacacttggggcggttcccgctgccagtgtactctggggaaaggaggggagagctgtagtgaggacattgtcatacagtatccccagtttttcggacatagttacgttacttttgaaccactgaagaactcttaccaggcgtttcagattacacttgagtttcgggcagaggctgaggatgggctcttactgtattgtggtgaaaacgagcatggccgaggggactttatgagcctcgctattatacggcgtagcctgcagttccggtttaattgtgggacgggcgtggctatcatagtatccgagactaaaataaagctagggggatggcacacagtcatgctctatagggacgggctgaatgggctacttcagctgaataacgggactccggtcaccggacaatcccagggccagtattcaaagatcacattcaggacgccactgtacctaggtggcgctccatcagcatactggctggtgagagctactgggactaacagaggttttcaaggctgcgtgcagtccctggccgtgaatggccgacgcatagacatgaggccttggcccctgggcaaggcgctgtcaggggcagacgttggcgagtgttctagcggaatatgcgacgaggcttcatgcattcatggaggtacttgtacggctattaaagcggattcttacatttgcctgtgtccattaggatttaagggtaggcattgcgaagacgcctttaccctcacgatccctcaattccgggagtccctccgatcttacgcagctaccccatggcctcttgaaccacagcactatctttcatttatggagtttgagatcaccttccggcctgattcgggagatggagtgcttctctattcttacgatactgggagcaaagatttcctctccatcaatcttgccggagggcacgtggagtttcgcttcgattgcgggtccggcacaggcgtgctcagaagtgaggaccccttgactctcggcaactggcacgagctgcgggtgtctcggaccgctaaaaatggcatcctgcaggtggataagcaaaagatcgtagaagggatggctgaaggaggtttcacgcagataaaatgcaacactgatatctttattgggggtgtcccgaactatgatgatgttaagaaaaactctggagttctgaaacctttttctgggagtatccagaaaattattttgaatgaccggaccattcatgtcaaacacgatttcacctccggcgtgaacgtggaaaacgccgcacatccctgtgtgagggcgccttgcgcacacgggggatcttgccggccaagaaaggagggttatgactgtgactgtccactcggctttgagggattacactgccagaaagagtgcggcaattactgcctgaataccatcattgaggcaatagaaattcctcaatttatcggtcgctcttacctcacatatgacaaccctgatatactcaagcgagttagtggctcccgttcaaatgttttcatgcggtttaaaaccacagctaaggacggcctgctactttggagaggtgattcccctatgcgccctaactccgacttcatttcgttgggcttgagagatggcgcactcgtgttctcttataacctcggctcaggagttgcctcaattatggtgaacggctcctttaacgacggcaggtggcacagggtcaaggcagtgcgcgatggacaatcaggcaaaattaccgtagacgactatggagccaggactggaaaaagccctggtatgatgcggcagctgaatatcaacggcgctctgtatgtgggtgggatgaaagaaattgccctccacactaacaggcaatacatgcggggtcttgtcgggtgtatctcccacttcactcttagcacagattaccatataagcctggttgaagacgccgtggacgggaagaacattaacacttgtggggctaaatag

SEQ ID NO: 10637 - DNA, 1893 bp, synthetic construct
  misc_feature 1..1893: note = source = /note="Description of Artificial Sequence: Synthetic coding sequence"
  source 1..1893: mol_type = other DNA
atgcagcaggacggtctgggcgtggggactcgcaacggaagcgggaagggaaggtctgtccacccttcttggccctggtgtgcaccaagacccctgaggtactttggaagagatgccagagctcggagagcacagacagccgcaatggcactcctggctgggggattgagcaggggactcggaagtcacccagccgctgccggacgcgacgcggtggtcttcgtgtggctccttttaagcacatggtgtactgctcccgctcgcgctatccaggtgacagtgtcaaatccatatcacgtggtgatcttattccagcccgttaccttgccttgtacttaccagatgacctccacccctactcagcccatcgtgatctggaagtataagtctttttgtcgagatcgtattgcggatgcattctcccctgcctccgtcgataaccagctgaacgcccaacttgctgctgggaatcctggatataatccttatgttgagtgccaggatagcgtgaggacggtgagggtggtcgcaacaaaacagggaaacgccgtgaccttgggggactattatcaggggagacgtattaccattaccgggaacgctgacctgacatttgatcagacagcatggggggattccggcgtctattactgctcggttgttagcgcccaagacctccagggtaataacgaggcctacgctgaattgatcgtgctcgattggttgtttgtcgtagtcgtttgcctggccgcttttctaatcttcctcctgttgggtatatgttggtgccagtgttgtccccacacctgttgttgttatgtgcggtgcccttgttgtcctgataaatgttgctgtcctgaagccctgtacgctgcaggcaaagctgccacttccggagtgccttcgatctatgccccaagcacctatgcccacctgtcacccgcaaagaccccccctcccccagcaatgatacctatgggcccagcgtataacgggtatccgggaggataccctggggacgtggaccggagcagttctgccggtggccaggggagttacgttccattgctgcgggacaccgactccagtgtggcgtccgaggtcagaagcggctacagaatacaagcctcccagcaagacgacagcatgcgagtattgtattatatggaaaaagagctggctaacttcgacccctcacgtccaggaccccctagtgggagagtggagcgcgcaatgagtgaagtaacctctctacatgaggatgactggcgcagcagacctagcagaggcccagccttgaccccaatacgggatgaggagtggggaggccactcacccagatctcccagaggttgggaccaggagcccgcaagagaacaggccggaggagggtggcgcgctcggcgtccacgagctcggagtgtcgacgccctagatgatctcactccaccctctaccgccgagtcgggttcgcgcagtccgacatctaacggtggacggtcccgggcatatatgcccccaagaagccgttccagagacgacctgtacgaccaggatgactctagggatttcccacgctcccgtgaccctcattacgatgacttccgaagtcgggagcggccacctgccgatcccaggagccaccaccacaggaccagagatcctagggataacggatcgaggtcgggggacttgccttatgatgggcgacttttggaggaagcagtacgaaagaaagggagcgaagagcggcgacgtcctcataaagaggaagaagaagaggcttattatccgccagctccccctccttattcagaaactgactctcaggcctcacgagagcgacgccttaagaagaacttggccctgagtagagagtcccttgtagtgtag

SEQ ID NO: 10638 - DNA, 750 bp, synthetic construct
  misc_feature 1..750: note = source = /note="Description of Artificial Sequence: Synthetic coding sequence"
  source 1..750: mol_type = other DNA
atgctccagctctggaaactggtgcttctttgtggggttcttacagggacatctgagagcctgcttgataatctcgggaatgacctttctaatgtggtcgacaagttggagccagtgcttcatgagggccttgaaacagtagacaacacactgaaaggcatattggaaaagcttaaggtggatctcggagttctgcaaaagtcctctgcttggcagctggccaaacagaaagctcaggaagctgaaaagctcctgaacaatgtcatctctaagctcctgcctactaatacggatatcttcgggctgaaaatcagtaatagcctaatcttggatgtgaaggctgaacctattgatgacggcaaggggctgaacttaagcttcccagttaccgccaacgtaactgtggccggacccataatcggccagattatcaacctgaaggcaagcctggatcttctcaccgccgttactattgagaccgatcctcagacacatcagcctgtggccgtcctgggagagtgcgcaagcgaccccacctccatctctctgtccctcttggacaagcacagccagattatcaacaagttcgttaactccgtgatcaacactctaaaatccaccgtgtctagcctgcttcagaaggaaatttgtccccttattcgcatcttcattcactctctcgatgtgaacgtgatccagcaagtggtcgataacccccagcataagactcaattacaaaccctgatctag

SEQ ID NO: 10639 - DNA, 3057 bp, synthetic construct
  misc_feature 1..3057: note = source = /note="Description of Artificial Sequence: Synthetic coding sequence"
  source 1..3057: mol_type = other DNA
atggtgagccactttatggggagcttaagcgtgctgtgtttcctcctcttattgggcttccagtttgtatgtccacaaccctccactcagcacaggaaggtgcctcagagaatggccgctgagggcgcaccagaggatgacgggggagggggagcacctggcgtgtggggggcttgggggccatggagtgcctgtagcagaagctgttctggtggcgtgatggagcagacccgtccatgtttaccaagatcgtacaggctgagggggggtcagaggccaggggctccagccagagcttttgccgaccacgtggtgtccgcagtgcgcactagcgtgccgctgcaccgatcaagagatgagacccctgcccttgccggaaccgatgcctctcggcagggacctaccgtgctgcgcggatcccgacacccccagccacaaggcctggaggtaactggtgataggcgatcgcggacccgcggtaccattgggcctggtaaatatggctatggaaaggcgccttacattctgcctctccagaccgacactgcgcatacacctcagcgattacggcgacaaaagttgtcctctcggcatagcagaagccagggggcaagctctgcacgtcatggatatagctcccctgcccatcaggtaccgcagcacggtccgctgtaccagagcgattcagggcctaggtcggggcttcaggctgcggaagcgcctatttatcagctaccattaacccacgatcaggggtaccccgctgcttctagcctttttcacagccctgaaacctccaacaaccatggcgtgggtacgcacggagccacacagagcttcagccaacccgcacgaagtaccgcaataagctgtatcggagcctataggcagtataagctgtgcaacaccaatgtttgtccagagtcttcaaggagcatccgtgaggtgcagtgcgcatcctataataacaaacctttcatgggccgattttatgagtgggaaccatttgccgaggtgaagggcaataggaaatgcgagttgaactgccaagccatgggatacaggttctatgtcaggcaggcggagaaagtgatcgatggcactccatgcgatcagaatggaactgccatctgcgttagtggtcagtgcaagtccataggatgtgacgattatctgggtagcgacaaggtcgtagacaagtgcggagtgtgtggtggagataataccggttgtcaggttgtgtcaggagtatttaagcacgctttgactagcctcggataccatcgtgttgtcgaaatcccagaaggtgccacgaagataaatatcaccgagatgtacaagtcgaacaactatctggcactgcggagtagatcaggtcggtcaatcataaacggaaactgggcgattgaccgccctgggaaatatgaagggggtggtacaatgttcacatataaacgccctaacgagatctcgtctacagcaggagagagctttctggcggagggacccaccaatgagatccttgatgtgtacatgatccatcagcaacccaacccaggagtgcattacgaatatgtgatcatgggcacgaacgcaattagcccacaggtgccacctcatcggagacctggagagccttttaatggacagatggtaaccgaaggacggagccaggaggaaggcgagcagaagggcagaaacgaagagaaggaggacctccggggagaggctcccgaaatgttcaccagtgagagcgcccagactttccccgtcagacaccctgatcgcttcagtccacaccgccctgataatttggtccccccagcgccacaaccaccccgacggtctcgagaccacaattggaagcagctgggaactacggagtgcagcaccacctgcgggaagggaagccagtatcctattttccgatgtgtacatcgatccacgcacgaagaagctcccgagtcttattgtgatagctcaatgaagcccacaccagaagaggagccttgcaatatttttccctgcccagccttctgggacattggggagtggagcgaatgctccaagacttgcggtctaggcatgcaacacagacaggtgctgtgtcgccaggtgtatgcaaacaggagtctcaccgtgcagccctataggtgccagcacctggagaagccagaaacaacttccacgtgccagcttaaaatctgcagcgagtggcaaatcagaaccgactggacctcttgcagcgtcccatgcggagttggccagcgcacaagggatgtaaagtgcgtgagcaatatcggggacgtcgttgacgatgaggagtgtaatatgaaactccgcccaaacgacatcgagaattgtgacatgggaccttgtgcgaagtcctggtttctgacggagtggtctgagcgctgttccgccgaatgcggggctggtgtgcggactcgctcagtggtctgcatgacaaaccacgtctccagtctgccattggaagggtgtggcaacaaccgccctgcagaagcaacaccttgcgataatggaccgtgcaccggcaaagttgagtggttcgccggttcatggtctcaatgttctatagagtgtggatcgggcacccagcagcgagaagtgatatgcgtgcggaagaacgccgatacctttgaggtgctcgacccttccgagtgctcattcttagagaagcctccttctcagcagtcttgccatcttaagccgtgcggagcaaaatggttctccaccgaatggtcaatgtgttcaaaatcctgccagggtggcttccgagtgcgggaggtccgctgcctgtctgacgatatgactcttagcaatttatgcgaccctcagctaaaacccgaagaaagggagtcttgcaatcctcaggactgtgtgccggaggtagatgagaattgcaaagacaagtactacaattgtaatgtggtcgtgcaggccaggctctgcgtatacaattactacaaaacggcttgttgcgcaagctgtacccgcgttgctaataggcaaaccggcttcttgggctcccgctag

SEQ ID NO: 10640 - DNA, 1311 bp, synthetic construct
  misc_feature 1..1311: note = source = /note="Description of Artificial Sequence: Synthetic coding sequence"
  source 1..1311: mol_type = other DNA
atgcaaggaactccaggcggtgggacaaggccgggaccatcgcccgtggaccgcaggaccctgttagttttctctttcatcctggctgccgctttggggcaaatgaacttcactggcgaccaggtcttacgggttctcgcgaaagatgaaaaacaactgtccctgttaggagacctggagggcctaaaaccccagaaggtagacttttggagaggccctgcccgaccaagtctacccgtggatatgcgcgttcctttctccgagcttaaggacattaaggcctacctggaaagtcacggcctcgcatattcaattatgataaaagatatccaggtgctcctggatgaagagagacaggccatggcaaaatcccgcagattggagcggtcaactaactcgttcagctactcaagttaccacacactggaggagatttattcctggatagataattttgtgatggaacatagcgacattgtatcaaagatccaaatcggaaatagcttcgagaatcaatcaatccttgtgctgaagttctcgactggagggtcaagacacccagccatttggatcgacaccggaatccattcccgggaatggatcacccacgctactggcatctggacagctaataagattgtcagcgactacggcaaggacagagtgctcaccgacattctcaacgcaatggatatatttatcgaattggtgaccaatcctgatggcttcgcttttacacattcaatgaataggttgtggagaaaaaacaagtctattcggccaggaatcttttgcatcggggtggatctgaataggaattggaaaagtggcttcggcggtaatgggtccaacagtaacccctgtagcgaaacctatcacggtcccagcccgcagtcagaacctgaagtcgctgccatcgtgaacttcataacagcccacggcaatttcaaggccctcatcagcatacatagctatagtcagatgctgatgtacccttacgggcgtctcctagagccagtcagcaaccagagagagctgtacgatctggctaaggacgctgtggaggctctttataaagtgcacggcatcgagtatatattcggttctattagtactaccctgtacgtcgcgtctgggatcacggtggactgggcgtacgatagtgggatcaaatacgccttctcctttgaactccgagataccggccagtacggattcttgctgcccgcaactcaaataattcccacagcacaagagacttggatggcattaagaaccattatggagcacaccctgaatcatccatactag

SEQ ID NO: 10641 - DNA, 492 bp, synthetic construct
  misc_feature 1..492: note = source = /note="Description of Artificial Sequence: Synthetic coding sequence"
  source 1..492: mol_type = other DNA
atgttccaaggcctgctgctgttgctcctgctctctatgggcggaacgtgggctagcaaagaaccactgagacccaggtgccgccctattaacgcaacactggcagtagaaaaggagggttgcccagtgtgtatcactgtgaacaccacaatttgtgcagggtattgtcctaccatgactcgcgtgctgcaaggcgtgcttcctgccctcccacaggtggtttgtaattatagagatgtgagattcgagtcaatacgactgccaggttgcccgcgaggcgtgaaccccgtcgtatcttacgcagtcgcactatcctgtcagtgcgccctgtgccgcagatcgactacggactgcggaggacctaaggaccaccctctgacctgcgatgaccctagattccaagattccagctccagcaaagcaccgcctccttcactgccctcgccaagcagattgcctggcccttccgatacgccaatactgcctcaatag

SEQ ID NO: 10642 - DNA, 213 bp, synthetic construct
  misc_feature 1..213: note = source = /note="Description of Artificial Sequence: Synthetic coding sequence"
  source 1..213: mol_type = other DNA
atgccaggagccatgaagatcttcgtttttattctggccgctctcatactgcttgctcagatcttccaggccagaacggcaatccacagggccctgattagtaagcggatggaaggacactgtgaagcagaatgcctcacctttgaagtaaagatagggggatgtcgagcagagctggctcctttctgctgtaaaaacaggaagaagcattag

SEQ ID NO: 10643 - DNA, 1098 bp, synthetic construct
  misc_feature 1..1098: note = source = /note="Description of Artificial Sequence: Synthetic coding sequence"
  source 1..1098: mol_type = other DNA
atgtggttgcttctcacgatggcctcgcttatcagtgtgctggggacaacacacggtctgtttgggaaacttcacccaggatccccggaggtgaccatgaacatctcacaaatgatcacttactggggctatccaaacgaggaatacgaagtggttaccgaggacggttatattttagaggttaaccgcatcccatacgggaagaagaatagcgggaataccgatgcaggatatgacgtgtggttgggcaactctcgcggtaatacctgggcgcgacggaacctttattacagcccagatagcgtggagttttgggctttcagctttgacgagatggccaaatacgacctgccggctaccattgacttcattgtcaagaaaacaggtcagaaacagctgcattacgtgggccactcccagggcacaaccatcggcttcattgcatttagcacaaacccatctctggctaaaaggatcaagaccttctatgctcttgccccagtcgcaacagttaagtatacaaagtcccttatcaataaactgaggtttgtaccgcaaagcctctttaagtttatttttggagacaaaattttctacccccataatttctttgatcagttcttggcgacagaggtgtgctccagagagatgctgaacctgctttgctccaacgcgttgtttattatctgtggcttcgattcgaagaacttcaacacatcacggctcgacgtataccttagccacaaccccgcagggacaagcgtgcagaacatgtttcactggacacaggcggtgaaaagcggaaagttccaggcatacgactggggctcgcctgtacagaataggatgcattatgatcagtcccagcccccatactacaacgttaccgccatgaatgtccctatcgccgtgtggaatggtgggaaggatctgctcgctgatccacaagacgtgggactcctgttacccaaacttcctaacctgatttaccacaaggagatccccttttacaaccacctggatttcatatgggcaatggatgctccacaagaggtgtacaacgatatcgtgtccatgatctctgaggataagaaatag

SEQ ID NO: 10644 - DNA, 2535 bp, synthetic construct
  misc_feature 1..2535: note = source = /note="Description of Artificial Sequence: Synthetic coding sequence"
  source 1..2535: mol_type = other DNA
atgggccctggcgcaccctttgccagggtgggttggcctctgcccttattagtggttatggccgcaggtgtggcacctgtatgggcatctcactcaccacatctcccgagaccccattctcgggttcctccacacccctctagcgagagacgcgcagtgtatatcggagctctttttcctatgtccgggggttggcccggaggccaggcctgtcaaccggctgtggaaatggccttggaggacgttaacagccgcagagacatattaccagactacgagctaaaactgattcatcacgactctaaatgcgaccctggtcaggcaacgaaatatttatacgagctgttgtacaatgacccaatcaagataatactgatgccgggatgcagcagcgtaagcaccttggtagctgaagctgcaaggatgtggaacctgatcgtgctgagctacggtagtagcagtccagctttaagcaatcggcagaggttccccacattctttagaactcacccaagtgctacgcttcacaatccaacaagggttaaattgttcgaaaaatggggatggaaaaagatagctaccatacaacagactacagaggtatttaccagcaccctggatgacctggaagaaagagttaaagaagccggaattgagataactttcaggcagagttttttttccgatcctgctgtccccgttaaaaacttgaagagacaggatgctcgcatcatcgtagggttgttctatgagacagaggcccgaaaggtattttgcgaagtttataaagagaggctatttgggaaaaagtacgtttggttcttgattgggtggtatgccgataactggttcaagatctatgacccttccataaactgtacggtcgacgaaatgaccgaggcagttgagggacacatcacaacagaaatcgtgatgcttaatcccgctaatacccgttcgatcagtaatatgacctcacaggagttcgtcgaaaagctcacaaagagactgaaacgacatccagaagagaccggcggatttcaagaggcacccctagcatacgatgccatttgggcccttgctctggctctgaacaagacatctggtggtggaggcaggagcggcgtccgactggaggacttcaattataacaatcagaccatcaccgaccagatttatagagcaatgaattcttctagcttcgagggggtcagcgggcacgtggtcttcgacgcctcagggagccggatggcttggacattgattgaacagcttcaagggggatcttataagaagatcggatactatgactccactaaggacgatctgtcctggagcaaaaccgacaagtggataggcggtagcccccctgctgaccaaacactcgtcataaaaacgttcaggttcttatcacaaaaactgttcatctctgtgtccgtgctctcctccctcgggattgtgttggccgtcgtttgcctttctttcaacatctataactcacacgttcgctatatccagaactcccagcccaacctcaacaacctcacggcggtggggtgttccctcgcgctagccgctgtgtttcctctggggctggacggctatcacatcggtcgcaaccaatttcctttcgtatgtcaggccaggctctggctgctgggtctgggcttttctttaggatacgggtcgatgtttacaaaaatctggtgggtgcataccgtgttcacgaagaaggaggaaaagaaagaatggcgcaagactctcgagccatggaagctttacgctactgttggactgcttgttgggatggatgttcttaccctggccatctggcagattgttgaccctctgcatcggaccattgaaacttttgcaaaagaagaaccgaaagaggatattgacgtatctatcctgccgcagctggagcactgtagtagccgaaaaatgaatacctggctaggaatcttttatgggtataaaggtctgctgttactcctcgggatattcctggcatatgaaaccaaaagtgtctctacggagaagattaacgaccatagggctgtgggcatggccatttacaacgtggcagtcctgtgtcttatcactgcgcctgtgacgatgatcctgtctagccagcaagatgctgccttcgctttcgcgtccctggccatcgtcttctcatcatatattaccctggtggttcttttcgtgccgaagatgagaagactgattactcggggagaatggcagagcgaggctcaagacacaatgaagaccggttctagtacgaacaacaacgaggaagaaaaaagtaggctgctggagaaagagaaccgggaactagagaagatcatcgctgagaaggaagaacgcgtgtccgagttaagacaccagctgcagagcagacagcagctgcgaagcagaagacacccaccaactcccccagaacctagcggtgggcttcccaggggacctcctgaacctccagataggctctcgtgcgacggcagtagggtccacctgctctataagtag

SEQ ID NO: 10645 - DNA, 1020 bp, synthetic construct
  misc_feature 1..1020: note = source = /note="Description of Artificial Sequence: Synthetic coding sequence"
  source 1..1020: mol_type = other DNA
atggtgtccaaaagcaggtggaagctgttggcaatgttggctctcgtgctcgtagttatggtctggtatagcatctccagagaggataggtatatcgaactcttctattttcccattcctgaaaaaaaggagccctgtctgcagggagaggcagagtccaaggccagcaaacttttcgggaaactgtcccctctgtgctcctactcaagggaccaaccaatatttctccgactggaagactacttctgggtcaaaacacccagcgcttatgagctgccatatggtactaagggctccgaggatctgttgcttagggttcttgcaatcacatcttcctcaatccccaagaacatacagtcactaaggtgcagacggtgtgttgtagtggggaacggacaccgcttgcgcaacagcagtctgggggatgccatcaataaatacgacgtcgttattcgcctgaataatgcccctgttgcaggatatgagggtgatgtggggtcaaagactactatgaggctcttttatcctgagtcagcgcattttgaccctaaagttgagaacaatcctgatacgcttcttgtcttggttgctttcaaagcaatggatttccattggatcgaaaccatactgagtgataaaaaaagagtccgcaagggtttctggaaacagcctccattgatctgggatgttaatcctaaacagatacgaattctaaaccccttcttcatggaaatagctgctgacaaactgctaagtctgcccatgcagcagcctcgcaagattaaacagaaaccaacgaccgggctcttggctattaccctcgctcttcatctgtgtgatctggtgcacattgcagggtttggataccccgatgcctacaacaagaagcagaccatacactattatgaacagatcaccttaaagagcatggcgggatctggacacaacgtttctcaggaagctcttgccattaaacgtatgctggaaatgggagctattaagaacctgacctcattttag

SEQ ID NO: 10646 - DNA, 1386 bp, synthetic construct
  misc_feature 1..1386: note = source = /note="Description of Artificial Sequence: Synthetic coding sequence"
  source 1..1386: mol_type = other DNA
atgtctctggatatacaatctctcgacattcagtgcgaggagttgagtgatgcaagatgggccgagttgctgccccttctgcagcagtgtcaggtggtgaggctggatgattgtggcctgactgaggctcgatgtaaagatatcagctctgcgcttagggtcaacccggctctcgccgagctgaatttacgcagcaatgaactaggcgacgtgggggtgcattgcgtccttcagggcctgcagacccccagttgcaaaatccagaagttgagcctgcagaactgctgtttgaccggggctgggtgtggcgtgttgtcttctacgttacgcacgcttccgactttgcaagagttgcatctgtccgacaaccttctgggtgatgcaggcctgcaactcctgtgcgaagggctccttgatcctcaatgcaggctggaaaaactgcagttagaatattgcagcttgtcagcagcctcctgtgagccactggcaagcgttctccgtgcgaaacctgactttaaggaactgactgttagtaataatgacatcaacgaagccggtgtgagggttctatgtcagggacttaaagacagcccctgtcagctggaagcgctaaaactggagagttgtggagtgacatcagacaactgccgcgacttatgtggcatcgtggcctcaaaagcctccctgcgggaacttgcgctgggatccaacaaactgggagatgttggcatggctgagctctgtccaggactgttgcacccaagcagcaggttgaggacactgtggatctgggagtgcgggatcactgccaaaggctgcggggacttgtgccgggtgttgcgcgcaaaggagtccctgaaggagctctccctagcaggcaatgaattaggcgacgagggagcgaggctgctgtgcgagacccttttagagccagggtgccagctcgagtctctgtgggttaaaagctgctcctttactgctgcctgctgcagccacttcagttccgtattagcgcagaaccggttcctgctggagctgcaaatttcaaacaaccgccttgaggacgcaggggtacgtgagctttgtcagggcctgggccagcccggttccgtcttgcgcgtgctttggttggcagactgcgatgtctctgattccagctgctcatcgttggctgctaccttgcttgccaatcatagtcttcgcgaactggacctgagtaacaactgtctaggggacgccggaatcctacagttagtggagagtgtgcgacagccagggtgtctgctcgagcagctggttctctatgacatatattggtcagaggagatggaggatcgactccaagccctggagaaggataaaccctccctgagggtaattagctag

SEQ ID NO: 10647 - DNA, 1695 bp, synthetic construct
  misc_feature 1..1695: note = source = /note="Description of Artificial Sequence: Synthetic coding sequence"
  source 1..1695: mol_type = other DNA
atggcccctaaaaaattatcatgcctccggagcttactgctgcccctgagcctcacgctgcttttacctcaggcagataccagatcttttgtggttgaccggggacacgacaggttcctcctggacggcgctcctttccgctatgtgtccggttccttgcactatttcagggtgcctcgagtgctgtgggcggataggcttctaaaaatgagatggtccgggctgaatgctattcagttctatgtgccttggaattaccacgagccacagcctggcgtctataacttcaacggcagccgtgatcttattgcttttctgaatgaggcggctctggcgaatctgctggtcattctgagaccaggtccctacatctgtgctgaatgggaaatgggcggacttccctcctggctccttagaaagcccgagattcatttaagaacatcagatccagcagataacatgactaagattttcactctgctcagaaaatacgagccccacggaccactggtgaacagcgaatactacaccggctggctcgactactgggggcagaaccactccactaggagcgtgtccgccgtcaccaagggcttggagaacatgttgaagctgggggcatcagtgaacatgtatatgtttcacggcggaacaaatttcggctattggaatggggcagacaaaaaaggcagattccttccaataaccacaagttatgattatgacgcgccaatcagcgaggccggtgacccaacccctaagctgttcgccctgcgagatgtgatctctaagttccaggaggttcccctcggtcccttacctccaccatccccgaagatgatgctcggccctgttactctgcacctcgtgggtcaccttctcgcattcctagatttgctgtgtcctagaggacctattcactccattctgccaatgacgttcgaagccgtgaaacaggatcacggatttatgctgtacagaacctacatgactcatacaatctttgagcctacgccattttgggtgccaaacaacggcgtgcatgatagagcgtatgtcatggtggacggcgtgttccagggagtggtggagaggaacatgcgcgacaagctgttcctcaccggaaaacttggctctaaattagacatcctagtggaaaacatgggtagactgtcttttggtagtaattcttccgactttaaaggattactgaaaccccctatactaggacaaacgatcctgacgcagtggatgatgttccccctgaagatagataatcttgtgaagtggtggttcccactccagctgcccaaatggccctatcctcaagctccatctgggccaaccttctattccaaaacctttcctatcttgggctcggtgggagatacgttcctctatctgcctggctggaccaaagggcaggtttggatcaacgggttcaatctggggagatactggacgaaacagggtccacagcagacattgtacgtgcctagattcctgctttttccgaggggcgcactcaacaaaattaccctattagagctagaggatgtcccactccaacctcaagtacagtttctggataagcccatcctgaattctacaagcacgctgcataggacccacatcaactctctgtccgcagacacgttaagcgcttccgaaccaatggaactgtccggtcactag

SEQ ID NO: 10648 - DNA, 1317 bp, synthetic construct
  misc_feature 1..1317: note = source = /note="Description of Artificial Sequence: Synthetic coding sequence"
  source 1..1317: mol_type = other DNA
atgatgtacgccccagtggagttctctgaagcagagttttcgcgcgcagaatatcagaggaaacagcagttttgggacagtgtgcgtttggccctgttcactctagccatcgtagcaatcatcggtatcgcaatcggaatcgtcacccattttgtcgttgaggatgacaagtcgttctactacctggcatccttcaaggtgaccaatattaaatacaaggagaactacggcattcgctcttctcgggaattcattgagcgtagtcatcagattgagagaatgatgtcccggatttttcggcatagctccgtgggaggaagatttatcaagagtcatgtgatcaaactgagcccagatgaacagggggtagatatattaattgtcctgatcttccgctatcccagtactgacagtgcggagcagatcaagaaaaagattgagaaggctctgtatcagagcttaaaaacaaagcagctcagtttgacaatcaacaagcccagctttcgtttgacaccgatcgactcaaagaagatgcggaaccttcttaatagtcggtgcggaataaggatgacgagctctaatatgccccttccagcctcctcatccacccagcgtattgtgcaagggagagaaaccgcaatggaaggcgagtggccatggcaggcctcgcttcaactgataggaagtggacaccagtgcggcgcaagtttgatcagcaatacctggctgctgaccgccgctcactgtttttggaaaaataaggacccaacccagtggattgccacatttggcgctactatcactccaccagctgtcaagcgcaatgtgagaaagatcattcttcatgaaaattaccatagggagacaaatgagaacgatatagccctcgtccagttaagtaccggcgttgagttctcgaatattgtgcagagagtatgtctacccgatagcagcatcaagctgccgccaaagacgagcgtgtttgtgaccggtttcggtagcatcgttgatgacggcccaattcagaacacattacggcaggctagggtggagacaatttcgaccgatgtctgcaatcggaaggatgtttacgacggcttgatcactcccggaatgctgtgtgccggattcatggaggggaaaattgatgcatgcaagggagattctggcggacccttagtttacgataatcacgatatctggtatatcgtgggcattgtttcatggggccagtcttgtgcactgcccaagaaacccggtgtgtacaccagggtgacaaagtatcgtgactggatcgcttccaaaactggtatgtag

SEQ ID NO: 10649 - DNA, 4392 bp, synthetic construct
  misc_feature 1..4392: note = source = /note="Description of Artificial Sequence: Synthetic coding sequence"
  source 1..4392: mol_type = other DNA
atggaacccagactcttctgttggactacactcttcctgctggccggatggtgtctcccaggactgccctgccctagtcgatgcttgtgctttaaatccacggttaggtgtatgcacctgatgttggaccacataccccaggtgccccagcagacgacagtgctcgatctgcgatttaataggatacgagagattcctgggtccgcttttaaaaagttgaagaacctaaatactctgctgcttaacaacaatcacatcagaaaaatcagtagaaacgcctttgaggggctggaaaatttactctacctttacctctacaagaatgagatccacgcactggacaaacagaccttcaaaggactcatctctctggaacatctgtacattcattttaaccagcttgagatgctccagcccgagacattcggcgacttgttgagactcgaacgcctgtttcttcataacaataagctgtctaaaatacctgccggtagctttagcaacctggattcactgaagaggctcaggctcgactctaacgctctcgtttgcgattgtgatctgatgtggctaggggagttgttgcaggggttcgctcaacatgggcacactcaagctgccgctacatgcgaatatcccaggaggctgcatgggagggccgtagcttctgtcactgtggaggagtttaactgccagtcccctcgtatcacgttcgagccccaggatgtagaggtaccctccggcaacaccgtctactttacgtgtcgggctgagggcaatcccaaacccgagatcatatggatccataacaatcatagtctcgacctggaagacgacaccaggctgaacgtgttcgacgatgggactctcatgattcgcaacacgagagagtcagaccagggagtctatcaatgtatggctaggaattctgcaggagaggctaaaacccagtccgcaatgttgcgctactcatcccttccagccaagccctcttttgtcattcagcctcaggacaccgaagtacttattgggacctctacaaccctcgaatgcatggccacagggcatcctcatcccttaatcacatggactcgggacaacggcctggaattggacggatccagacacgttgctacaagttccggcctgtacttacaaaacattacgcagagggaccacggcaggttcacttgccacgctaacaatagtcacggaacagttcaggcggcagctaacattattgtgcaagccccaccgcagttcaccgtgacaccaaaagaccaagttgtactcgaggaacacgccgtggagtggctttgtgaagcagatgggaatccgcctcctgttatcgtttggactaagaccggagggcagctccccgtcgagggtcagcacaccgtactctcatcaggtaccttgaggatcgatagggccgctcagcatgatcagggacaatacgagtgccaggcggtgtccagtctcggcgttaaaaaagtctccgtccagttaacggtgaaacccaaggcattggcagtgtttacccagctgcctcaagatacttctgttgaggtgggaaagaatatcaatatcagctgtcacgcccaaggggaaccgcagcctatcatcacttggaacaaggagggagtccagatcactgaaagcggcaagttccacgtcgacgatgaagggacattgaccatctatgatgccggtttccctgaccaaggccgttacgaatgcgtggctcgaaattcattcgggctggccgttacaaacatgtttctcacagtgacagccattcagggaaggcaggctggagacgactttgtggaatctagtatattagacgcggtccagcgtgtggattctgctattaactccactaggaggcatctgttctcccagaagccacacactagctcagacctgttggcccaatttcactatcctagggatcccctgatcgttgagatggccagggccggagagatatttgagcacactctgcagctgattcgcgagcgggttaagcaaggactaactgtggatctggaaggcaaagagtttcggtacaacgatttagtctccccccgaagcctcagccttatagccaatctctccggatgcaccgccagacgccctctgcccaattgttccaatcgctgcttccacgcaaagtacagagcacatgatggcacctgcaacaacttgcagcagcctacctggggggctgcgctgactgccttcgccaggctgttgcagccagcataccgggacgggatcagagccccacgcggactggggctgccagttggtagccgacagccgttaccccctcccaggctggtcgccaccgtctgggctagagcagcagcagtgacccccgatcacagctacacgaggatgttaatgcactggggatggtttttagagcatgatctggatcacactgtccccgcactatccaccgctagattctctgatggcagaccttgttcatccgtgtgcaccaacgatccaccctgctttccgatgaacacgcggcacgcggatcccagaggtacccatgcaccctgtatgcttttcgctagatcttcgccagcgtgtgccagtggtcggccatcagccactgtagactcagtctacgcccgagagcagattaatcagcagacggcttacatcgacgggtccaacgtttatggctccagcgaacgggaatcccaggcgctgcgggacccttccgttccacggggactccttaaaacagggttcccctggccaccttcggggaagcccttacttccatttagtacgggtccaccaacggagtgcgcacgacaggagcaggaatctccctgcttcctagctggtgaccacagagctaatgaacacctggcgctggctgcaatgcacaccttgtggttccgggagcacaaccggatggcaactgaattgtccgccctgaacccccattgggagggtaacaccgtttatcaggaagctcgtaaaatcgtaggtgcggaattgcagcatattacctactcacactggcttcctaaagttctcggggacccagggacgaggatgttacggggttacagggggtacaacccaaacgttaatgcaggcattataaacagctttgccaccgcagccttcaggtttggtcacaccttgatcaaccctattctatacagattgaacgcaactctgggcgaaatttctgaaggccacctgcctttccacaaggccctgttcagccctagtcgaatcatcaaggagggtggtatcgaccctgtgctgcggggtctgtttggagtggctgccaagtggcgggcaccctcttatctgctctcgcctgagctgactcagagactatttagtgcagcctactctgcagccgtcgattccgccgctactatcatccaacgtgggagggatcacggcatccccccatatgtagattttcgggtgttctgcaatttgacatctgtgaaaaactttgaggatttacagaacgagatcaaggacagtgaaatccggcagaaacttcgtaagctctacggaagccctggcgacattgatctgtggcctgccctaatggtagaggatctaatccctggtacccgggtcggtcccacgctgatgtgcctatttgttactcagtttcagagactccgggacggcgatagattctggtacgaaaacccaggagtttttacaccagcacagctgacccagctgaaacaagcttcactttcccgggtgttatgcgataacggtgatagcatacaacaggtgcaggccgatgtctttgtaaaggccgagtatcctcaagactatctgaattgctccgagattcctaaggtcgacttgcgcgtatggcaggattgttgcgcagactgcaggtcccgaggacagtttagggcggttacgcaggagtcccagaaaaaacgttctgcccagtattcttatccagtcgacaaggacatggagttatcgcacctgaggtccagacagcaggataaaatctatgtcggagaggacgcccgtaacgtgactgtcctcgcaaagaccaaattcagtcaggatttttctacgttcgcagctgagatccaggagaccattacagccctgcgtgagcagatcaataaactggaggcaaggcttagacaagccggatgcactgatgtgcgaggggtcccaagaaaagcggaggagaggtggatgaaagaagactgtacacattgtatttgcgagagtgggcaggtgacgtgtgtagttgagatctgcccacctgcaccatgcccatcccccgaactggtcaaaggcacttgctgccctgtgtgtcgcgatcgcggtatgcccagtgattctccggagaagaggtag

SEQ ID NO: 10650 - DNA, 1206 bp, synthetic construct
  misc_feature 1..1206: note = source = /note="Description of Artificial Sequence: Synthetic coding sequence"
  source 1..1206: mol_type = other DNA
atgggccttaaggcactctgtctgggactgctgtgcgtacttttcgtaagccatttctatactcctatgcctgataatatagaggagagctggaaaatcatggccctggacgctatagctaaaacttgtacatttacagcaatgtgttttgaaaatatgaggatcatgcggtatgaggaatttataagcatgatttttcggctagactatacacagcccttatcagatgaatacattaccgtgacggacactacttttgtagacataccagtgcgactgtatttgccgaaaagaaaatctgaaaccagacggcgtgctgtgatctacttccatgggggtggcttttgtttcggcagttctaaacagagagctttcgattttttaaaccgctggactgctaatacccttgacgccgtcgttgtgggtgttgattaccgcctggcccctcagcaccactttcccgctcagttcgaggatggtctggctgccgtcaagttcttcttgcttgagaagattctaacgaagtatggagtcgatcccaccagaatatgtattgccggagactcatcaggcggtaacctcgcgactgctgtcacacagcaggtgcagaatgatgctgagattaagcacaagattaaaatgcaggtactcttgtatcccggtcttcagatcaccgattcttatctcccatctcatcgtgaaaatgaacatggtatcgtgctcactcgtgatgtcgcgattaaattggtcagcttgtacttcacgaaagacgaagcccttccctgggccatgagacgtaaccagcatatgcccttggaatcaagacacctatttaagtttgtgaactggtcgatactattgccagaaaaatacaggaaggattatgtatacaccgagccaattctaggcggtttgtcttacagtcttccgggtttgacagacagcagggcactgcctctactggccaacgactctcaacttcagaaccttcccctcacatacattctcacctgccagcacgacctgctaagggacgacggcttgatgtatgtgacaagactgagaaacgtgggcgttcaggtggtccacgagcacattgaggatggcattcatggagcactctccttcatgactagccccttctatttgcggcttgggttaagaattagggatatgtacgtcagctggcttgataaaaatctttag

SEQ ID NO: 10651 - DNA, 264 bp, synthetic construct
  misc_feature 1..264: note = source = /note="Description of Artificial Sequence: Synthetic coding sequence"
  source 1..264: mol_type = other DNA
atggtgagtttgatgaaattatggattccaatgctgatgacatttttctgtaccgtgcttctctcggtgctaggtgaaatgcggaagaaacgatacgacaggaaggaactgcttctggaggagtgctggggcaaaccaaatgtgaaagagtgtactaacaagtgctcaaaggcattccgctgcaaagacaaaaattacacctgttgctggacttactgcggcaacatctgttggatcaatgtggagacaagcggagactattag

SEQ ID NO: 10652 - DNA, 813 bp, synthetic construct
  misc_feature 1..813: note = source = /note="Description of Artificial Sequence: Synthetic coding sequence"
  source 1..813: mol_type = other DNA
atgagaggccagggacgcaaggagtctttgtcagactcccgggacctggatgggagctatgatcaactgaccggtcacccccctggtcctaccaaaaaagctcttaagcagcgattcctcaaactcctcccctgttgtggaccgcaggccctgcctagcgtgtcggaaacattggctgcccctgcatcattgcggccacaccggccacggctgctggaccctgacagcgtcgacgatgagtttgagttaagcaccgtttgccacagacctgaaggactcgagcaattacaggagcaaaccaaattcactagaaaagaattgcaagtgctctaccggggatttaagaacgagtgcccatctggaatcgtgaacgaggagaattttaaacaaatttacagccagtttttccctcagggagactcttcgacatacgccacctttctgtttaacgcattcgacaccaaccacgatggttctgttagtttcgaggacttcgtcgccggtttgagcgtcatcctgagaggtacagtcgacgaccgactcaattgggcattcaatctgtacgacctgaataaagatgggtgtatcaccaaggaggagatgctggatatcatgaaaagtatctacgacatgatggggaaatacacatacccggctttgcgtgaggaggccccacgggagcatgttgaaagctttttccagaagatggatcgaaataaggatggggtggttactattgaagagtttatcgaatcttgtcaaaaggacgagaacatcatgcgctccatgcagctgttcgacaacgtaatctag

SEQ ID NO: 10653 - DNA, 819 bp, synthetic construct
  misc_feature 1..819: note = source = /note="Description of Artificial Sequence: Synthetic coding sequence"
  source 1..819: mol_type = other DNA
atgcacctgcggctaataagctggctcttcatcatattaaacttcatggagtatattggatcacagaacgcgtcccgcggtaggcgacagaggagaatgcaccccaacgtatctcagggctgccagggtggctgcgccacttgttctgactacaacggctgtctgagctgtaaacccagactgttcttcgcccttgagcggattggtatgaagcagataggcgtgtgtctgagcagctgccccagcgggtactatggaacgcggtatccagacattaacaagtgtaccaagtgtaaggccgattgcgatacgtgtttcaacaaaaatttctgtacaaagtgcaaaagtggtttctatttgcatctgggtaaatgcttagataattgccccgaaggcctggaggcgaataatcataccatggaatgcgtgagtatagtccattgcgaggtctctgagtggaatccttggagcccatgtacgaaaaaaggcaaaacgtgtggctttaagcgcggtacggagactcgagtgcgggagatcattcaacaccccagcgccaaagggaacctatgcccaccaaccaacgagactcgcaaatgtaccgtgcagaggaagaagtgccagaagggcgaaagaggtaaaaaggggagagagaggaagcggaagaaacccaataaaggagaatccaaggaagccatacctgactctaagagtctcgaaagctcaaaagaaatccctgaacagcgtgaaaacaaacaacaacagaagaaacgaaaggtgcaagacaagcagaagagtgtgagcgtgtcaaccgtgcactag

SEQ ID NO: 10654 - DNA, 294 bp, synthetic construct
  misc_feature 1..294: note = source = /note="Description of Artificial Sequence: Synthetic coding sequence"
  source 1..294: mol_type = other DNA
atggcgaagagtttccccgtgttcagcctgctctcctttatcttgatccaccttgtactctcttctgtgagtggccctagacattggtggccaccacggggaatcatcaaagtgaaatgtccctatgaaaaagtgaatctgtcctggtataatggcactgtcaacccctgtcctgggctgtaccagcccatctgtggaactaactttatcacctacgataacccctgcattctgtgcgtagagtccctaaaaagccatgggagaattagattttaccacgacggaaagtgctag

SEQ ID NO: 10655 - DNA, 726 bp, synthetic construct
  misc_feature 1..726: note = source = /note="Description of Artificial Sequence: Synthetic coding sequence"
  source 1..726: mol_type = other DNA
atgtggaccgtgagaactgaggggggtcacttccctctgcatagcccaacatttagttggcggaatgtagcttttctgttgctcctctcgctagccctcgagtggacttcagcaatgctgaccaagaaaattaagcacaaacccggtctgtgccccaaggagaggctgacctgcacaaccgagctacccgattcatgtaatacagacttcgattgcaaagaatatcagaaatgttgcttcttcgcgtgccagaaaaagtgtatggatccgtttcaagaaccatgcatgctgcccgtgcgacacgggaactgcaatcatgaagcccagcgatggcactttgattttaagaactatcgctgtaccccctttaaataccggggatgtgagggaaacgccaacaacttcctgaacgaagacgcttgtcggaccgcctgcatgctgattgtgaaggatggtcagtgccccctctttccatttactgaacggaaagagtgcccaccatcgtgtcacagcgacatagactgtccccagaccgacaagtgttgcgagagtcggtgtggttttgtctgtgcacgagcctggacagttaagaagggcttttgccctaggaaacccctgttgtgtacaaagatcgacaaacctaaatgtctgcaggacgaggaatgtcctttagtggagaaatgttgcagccactgtggactcaagtgtatggaccccagaagatag

SEQ ID NO: 10656 - DNA, 1827 bp, synthetic construct
  misc_feature 1..1827: note = source = /note="Description of Artificial Sequence: Synthetic coding sequence"
  source 1..1827: mol_type = other DNA
atggctagagcgagagctggcgcattgctggcactctgggttttaggggcagctgcccacccacagtgcctcgacttcagacccccattccgccctacccagccactgcggctttgcgctcagtactccgattttggctgctgcgatgagggcagagatgctgagcttacgagaaggttctgggccctcgcttctcgcgtcgacgccgctgaatgggctgcctgtgctgggtacgctcgcgatctgctgtgtcaggaatgtagcccctacgccgctcatctgtacgatgctgaggatccattcactccactgaggactgtgcccggactctgtcaggactactgtctcgatatgtggcataagtgccggggactgtttcgtcacctgagtacagatcaggaactctgggccttggaggggaatctcgcacgcttctgccgctacctcagcctcgatgataccgactactgcttcccctacctgctggtcaacaagaatttaaactccaatcttgggcacgtcgtggcggacgctaaaggctgcctgcagctatgcttggaggaggttgctaatggcctgcgtaatcccgtagctatggtgcacgccagagatgggactcaccggttcttcgtggctgaacaggtgggactcgtatgggcttacctgccggaccgatctcgactgggtaagccgttcctgaatattagtagggtggtcctgacttccccgtgggaaggcgatgagcgagggtttctggggatagcctttcacccttcattccagcacaacagaagactctatgtgtactacagcgtgggcatcagaagtagcgagtggatccggatatccgagtttagagtgtcagaggatgacgagaacgccgtcgatcattcaagcgagaggattattctggaagttaaagaacccgcatcaaatcataacgggggacagctcctattcggcgacgacggatatctgtacattttcaccggagatggaggcatggccggagacccctttggaacattcgggaatgcacagaataagtctgccctgctgggaaaagtgctgcgcatcgacgtggacagaaaggaacgcggactaccttacggaatccccccagataacccattcgtgggcgaccccgctgcacaacctgaagtgtatgctctgggtgtcaggaacatgtggagatgcagctttgatagaggggatccatcatccggcacaggaagaggacgacttttctgtggcgacgtgggacagaataagttcgaggaggtggacgtagtcgaaaggggaggtaattacggatggagagcacgcgaaggatttgagtgttacgaccgatcgctgtgcgctaacacctctttgaatgatctcttgcctattttcgcctacccacacacagtcgggaaaagtgtgactggaggctacgtgtaccgtggatgtgagtaccccaatctgaacggcctgtacattttcggggattttatgtcaggacggctgatgagcctacaggagaatcctggaaccggtcaatggcaatactccgaaatctgcatgggacatggccaaacatgcgaatttcctgggctcattaataattattacccttacatcatcagcttcggggaggatgaggccggtgaattgtattttatgtccactggtgaaccttctgccaccgcccctcggggtgttgtgtacaagatcatagacgcatcctcctgcaaggccagatcggccatgcccggatacgtgcctgcgcctagcgtatgctcctctttgacctctcagccatttatactacaatggtggaagtag

SEQ ID NO: 10657 - DNA, 351 bp, synthetic construct
  misc_feature 1..351: note = source = /note="Description of Artificial Sequence: Synthetic coding sequence"
  source 1..351: mol_type = other DNA
atggcccctccaagcgtaccactggtacttttactagtattgctgctcagcttggctgagacccctgcttcagcaccagctcacaggggtagaggcggttggacccttaattcagccggttacctactgggccctgtgctgcacctcccacagatgggggaccaggatgggaagcgtgagaccgctctagaaatcctggatctctggaaagcaatcgatgggctgccatactctcatcccccacaaccctctaagcgcaatgtgatggagactttcgctaagccagagataggagatctgggaatgctaagtatgaaaatcccgaaagaggaggacgtcctcaagtcctag

SEQ ID NO: 10658 - DNA, 3618 bp, synthetic construct
  misc_feature 1..3618: note = source = /note="Description of Artificial Sequence: Synthetic coding sequence"
  source 1..3618: mol_type = other DNA
atgaggaagccgagaaggaagtcccggcagaacgccgagggacgccgatccccgtccccctatagcctcaagtgctctcccactcgggagacattgacctacgctcaagcgcaacgcatcgtcgaagtggacattgatggtcggctgcaccgcatttcgatctacgaccccttgaaaatcatcaccgaggatgaactcaccgcacaagatattacggagtgtaatagtaataaagaaaattccgagcagccacagtttcctggcaaatctaaaaagccgagcagcaaggggaagaagaaagagagctgttccaagcacgcctctggcacaagcttccacctgccgcagccaagctttagaatggttgactccggcatccagccagaggctcctcccctgcctgctgcatactatcggtacattgagaaaccccctgaggatctcgatgccgaagtcgagtacgatatggatgaggaggacctggcatggctggacatggtcaacgagaagaggagagtggacggccattccctcgtctccgccgatacatttgagctgctcgtggaccgccttgaaaaagaatcttacctggagagtcgctccagcggagcccagcagagcctgatcgacgaagatgccttttgctgcgtgtgcctggatgatgagtgtcacaacagcaacgtgattctcttttgtgacatctgcaacctggccgtgcaccaggaatgttacggggtcccatacatcccagaaggccagtggctctgccgctgctgcctgcaatccccatcacgacctgtggactgcattttgtgccctaacaaagggggagctttcaaacagaccagtgacggccattgggcccacgttgtctgtgccatctggatccccgaggtctgcttcgctaacactgtctttctcgagcctatcgaaggcatcgacaacatcccacccgctcgctggaagctgacatgctatatctgtaagcagaaggggcttggtgccgcaattcagtgccacaaagttaattgctacactgccttccatgtgacctgtgcgcaacgcgcaggcctcttcatgaagatagagccaatgcgggagacgtctctgaacggaactatcttcactgtgcgcaagacggcctactgtgaggctcatagcccgcctggggcagccaccgccagaaggaagggagactcaccgaggtcaatctctgaaactggtgacgaggagggcttaaaggaaggagacggggaagaagaggaggaggaagaagtcgaggaagaagaacaagaagcgcagggaggtgtgtccggctctctgaagggtgtgccaaaaaagtctaaaatgtcgttgaaacagaagatcaagaaggagcccgaggaagccggacaggacactccatctacccttcctatgcttgcagtgccacagattccatcttatagacttaacaaaatatgtagcggactgtccttccagagaaagaaccaattcatgcaacgcttgcacaactactggctcctgaaaagacaagccaggaatggcgtccctctcatccggcgtcttcattcacatctgcagagccagagaaatgcggaacagagagagcaagacgagaaaacctccgctgtaaaagaagaactgaagtattggcagaagctgcgccatgacctagagcgtgcccgattgctgatcgagttgatcagaaagcgcgaaaagctgaaacgcgagcaggttaaggtgcaacaagcagccatggagctcgagctgatgccttttaacgtcttgctgcgcactactctggacctgttgcaagaaaaggatcctgcgcacatctttgccgaaccagtcaatctgtctgaggtgcctgactatctcgagttcatctccaaacccatggatttcagcaccatgagacgcaaactagaaagtcacctctaccgaaccctggaagagttcgaagaagatttcaacctcatcgtcactaattgcatgaagtacaatgctaaggacactatttttcacagagcagccgtgcgcctgcgtgacttaggtggagccatcttgaggcatgccaggagacaagcggaaaacattgggtacgatccagagcggggtacccacttgcccgagagccccaagctcgaagatttttacaggttctcctgggaggatgtggataatattctcattccagagaatagagcccatctgagtcctgaggtccagcttaaggagctgctcgagaaactcgatttggttagcgctatgaggtcatccggcgctagaacaagaagagttcggttgctgcgcagggagataaacgccctcaggcagaaactggctcagccgcctccaccacaacccccttccctaaataaaaccgttagtaacggcgaactgcccgcagggccacagggcgacgccgcagttctggagcaggctctccaggaggaaccagaagacgacggcgatcgcgatgatagcaagctgccaccccctcctaccctagagcccactggtcctgcgccatcactgagtgaacaggagtcgccccctgaaccgccaactcttaagccgattaatgactccaagcctccaagccggttccttaaaccaagaaaagtcgaagaagacgagctgctggagaaatcccctctccagctcgggaacgaaccactacagaggctgttgagcgacaatggcataaacaggttgtcactgatggcccctgacacccccgctgggacccctttgtccggcgtggggaggcgaaccagtgtgctgttcaaaaaagccaagaacggtgtcaaacttcagcgcagccccgatagggtactcgaaaacggagaggatcacggcgttgctggttcacccgcaagccctgctagtatcgaagaagagcgtcacagcagaaaacgtccgcgttcacgcagctgttcagagtctgagggggagcggagcccccagcaagaagaggaaaccgggatgactaacgggttcggaaagcatacagagtcaggcagtgattctgagtgttcactgggcctttccggcggacttgctttcgaggcatgctccggcttgacgcccccaaagaggtctcgcggaaaaccagccctaagccgggtccctttcctggaaggcgttaacggtgactcagactataatggctctgggcgttccttactgttaccttttgaggaccgcggagacctcgaacccctagaactcgtgtgggccaaatgccggggttatccctcttaccccgcattgataatcgatcctaagatgccacgtgaaggcctgctccataacggagtgccaataccagtccctcctctagatgttttaaagctaggtgagcagaaacaggctgaagctggcgaaaaactgtttctggttctgttctttgataacaagaggacgtggcagtggctgccgagagataaggtgctcccgcttggcgtggaagatactgtggataaactcaagatgctggagggcagaaagaccagcattcgaaagagcgttcaggtggcgtatgatagagctatgattcatcttagccgcgtcaggggccctcattccttcgttacctcttcctacctgtag

SEQ ID NO: 10659 - DNA, 1977 bp, synthetic construct
  misc_feature 1..1977: note = source = /note="Description of Artificial Sequence: Synthetic coding sequence"
  source 1..1977: mol_type = other DNA
atgttcgttagctatctgatcctaacgctgctacatgttcagaccgctgttttggcacggccagggggagaaagtatcggctgtgacgactaccttggttccgataaagttgtggacaagtgtggagtgtgcggaggcgacaacaccggttgccaagttgtctccggtgtgtttaaacacgccttgacctcgctcggctatcatagagtcgtcgaaattccagaaggtgctaccaagataaatattaccgagatgtataagtcgaacaattacctcgctttgaggtcccgtagtgggagatccatcattaatggcaactgggcgattgaccggccaggtaagtatgaaggagggggaaccatgtttacatataagcggcctaatgaaataagttctactgcgggagagtcctttcttgccgaggggccaaccaacgagatcctggacgtatacatgatacaccaacagcccaatcctggcgtgcactacgagtacgttatcatgggcactaacgccatctcacctcaggtgccccctcacaggcggccaggagagccgtttaacggccagatggtcacggagggcaggagtcaggaggaaggcgaacaaaagggaaggaatgaagagaaagaagacctcagaggggaagcccctgaaatgttcacatctgaatccgcgcagacattcccagtgagacaccccgatcggttctcccctcatcgtccggataacttggtgccacctgctccacagcctccacgcagaagtcgagaccataactggaagcagcttggtaccacagagtgttcaactacgtgcgggaaggggtcacagtaccccatcttcagatgtgttcatagatcaacccatgaggaggccccagagtcttattgtgactcctccatgaagcctactccggaggaggagccttgtaacatcttcccttgtcccgctttctgggacattggggagtggtccgagtgtagcaagacctgtggtcttggcatgcaacaccggcaagtgctatgtcggcaggtgtacgcaaatcggtcactgactgtgcagccttacaggtgtcaacacttggaaaagcccgagaccacctccacctgccagctcaaaatctgttccgagtggcaaattagaaccgactggacttcatgctctgtgccttgcggagtgggacagcgaactagagacgttaaatgtgtctcgaacataggcgacgtagtcgatgacgaggagtgtaacatgaagcttcgacctaacgacatagagaattgcgatatgggcccttgtgccaaatcatggttccttactgagtggtctgaacgatgttcggccgaatgcggcgcaggggtgcgaaccagatctgttgtctgtatgacaaaccacgtaagcagccttccgctggaggggtgtgggaataataggcccgctgaagccacaccttgtgacaacggtccttgtactggcaaggttgaatggtttgctggatcctggagtcagtgttcaattgaatgcgggtcaggcacccagcaacgggaagtgatttgcgtgagaaaaaacgccgatactttcgaggtgttagatccgtcagagtgctcctttctggagaagccgccatcccagcaatcgtgccatttgaaaccctgtggcgctaagtggttctccaccgagtggtcaatgtgttcaaagagctgccagggtggctttagggtgcgggaagtacgctgtttgagtgacgatatgacacttagtaacctgtgcgatccccagctaaaaccggaagaaagagaatcgtgcaacccgcaggactgcgtgcctgaggtcgatgaaaattgtaaggataagtactacaactgcaacgtggttgtccaggcaaggctctgcgtatataactattacaagaccgcatgttgcgcctcttgtacccgggtcgctaacagacagaccggattcctgggttcccggtag

SEQ ID NO: 10660 - DNA, 708 bp, synthetic construct
  misc_feature 1..708: note = source = /note="Description of Artificial Sequence: Synthetic coding sequence"
  source 1..708: mol_type = other DNA
atgcggcctcttgccggtggcttgttgaaggtcgtgtttgtcgtgttcgccagcctgtgtgcttggtactctggatacctgttggcggagttaatcccagatgcacccttgtcctccgccgcttacagtatcaggagtataggcgaacgacccgtgctgaaggccccagtgcccaaaagacagaagtgcgaccactggacgccctgcccttccgacacctacgcatataggctgttgtcgggcggaggtcggagtaagtacgctaagatttgtttcgaagataaccttctgatgggcgagcagctgggcaatgtcgctagagggatcaacattgccattgtgaactatgtgacagggaacgtcaccgctaccagatgcttcgatatgtacgagggagataacagcgggcctatgaccaagtttatccaatcagctgctccaaaaagcttgctgttcatggttacctacgatgatgggtccacgaggcttaacaatgatgctaagaacgctattgaggcacttgggagcaaagagatcagaaatatgaaattccgctccagctgggtgtttattgccgctaagggcctggagctcccatccgagatccaaagggagaagatcaatcactctgatgccaagaataacagatacagcggatggcccgctgaaattcaaattgagggctgcatccccaaggagcgctcttag

SEQ ID NO: 10661 - DNA, 759 bp, synthetic construct
  misc_feature 1..759: note = source = /note="Description of Artificial Sequence: Synthetic coding sequence"
  source 1..759: mol_type = other DNA
atgagggggcaaggcagaaaagaaagcctcagcgatagcagggacctggatggcagctatgatcagctcacagggcatcccccaggtccgactaaaaaagctttaaaacagcggttcttaaagcttcttccatgctgcggcccacaggctctgccgtccgtgtccgaaaactcagtcgacgacgagtttgaactctcaaccgtgtgtcaccgcccagaaggcctcgagcagttgcaagaacagacaaaatttacccggaaggagctgcaggttttgtacagaggattcaagaacgagtgtccctcaggcatcgtgaatgaggagaactttaagcagatatacagccagttcttcccacagggtgattctagcacctacgcgacattcctatttaatgctttcgacacaaaccatgacggtagcgtgtcgttcgaagatttcgtggccggtctctcggtgatccttcggggtaccgttgacgaccggctgaattgggcatttaacctgtatgacctgaataaagatggttgcatcacaaaggaggagatgcttgacataatgaaaagcatttatgatatgatggggaaatacacctaccccgcactgagggaagaggcacctcgcgaacatgttgagtcctttttccagaaaatggataggaataaagatggcgtggtgacgatcgaagagttcatcgaatcctgtcagaaagatgaaaacatcatgcggtccatgcagttgttcgacaatgtgatttag

SEQ ID NO: 10662 - DNA, 312 bp, synthetic construct
  misc_feature 1..312: note = source = /note="Description of Artificial Sequence: Synthetic coding sequence"
  source 1..312: mol_type = other DNA
atgtccggcaggggcaagggcggaaaaggcctgggaaaggggggagctaaacgccaccgcaaggtgctacgggataacattcaggggatcactaaacccgctatccggaggcttgcgaggcgagggggtgtgaaacggatttccggtctgatctatgaggaaactcggggtgtcctgaaagtgtttctggagaacgtaatcagagacgctgttacttataccgagcacgccaaacggaaaactgtcacagctatggacgtggtgtacgcacttaagagacaaggtcgtacactgtatggttttggaggctag

SEQ ID NO: 10663 - DNA, 3120 bp, synthetic construct
  misc_feature 1..3120: note = source = /note="Description of Artificial Sequence: Synthetic coding sequence"
  source 1..3120: mol_type = other DNA
atggaggtgactgccgtggcgacacagggtggatatggtagcagcgattgggttacgagttacctgttgatgttctctgatggagggaggaattggaagcagtacagacgcgaagagagtatttgggggttccccggaaataccaacgcggactccgtggtgcattaccggctccagccccctttcgaagcccgatttctgagattcctccctctggcctggaatcctcggggacgaatcggcatgcgaattgaagtgtacggttgtgcctacaagagtgaagtagtgtacttcgacggccaatccgcgcttttataccggctcgacaagaagcccctcaagccgattagagatgtgatcagccttaagttcaaggccatgcaaagcaacggcatcctgttgcacagggaagggcagcatggcaatcatatcaccctcgagctcatcaaaggtaaattggtcttctttctgaactccggcaatgcaaaactaccgagtactatcgctcctgttactctcaccctgggttctctgctggacgatcaacattggcacagcgtactgattgagctactggatacacaagtcaacttcacagtagacaagcacactcaccactttcaggcgaaaggggattccagttatcttgatctgaattttgaaatctctttcgggggtatcccgactcctggtaggagtcgggcattccgcagaaagtcattccacggctgcctggagaacctgtattataacggtgtggatgtcacggagctcgccaagaagcataagcctcagattttaatgatgggcaatgtttcgttttcgtgtccgcagcctcagacagtccctgtgacatttctttccagcaggtcttacttggctcttcccggaaattcaggagaggacaaggtcagcgtgactttccagttccgcacttggaacagggcgggacacctgctctttggtgagctgcgaaggggcagcggctcatttgtgctgtttctgaaagatggaaagcttaaactgagcctgttccagcctgggcaaagcccgcgaaacgttaccgccggtgccggactgaatgacggccaatggcactctgtaagtttttcagccaaatggagccatatgaatgtcgtggtggacgacgatactgctgtgcagcccctggttgctgtgcttatcgacagcggcgacacttactacttcgggggatgtcttgacaactccagcggctctggctgcaagtcacccctgggaggctttcaagggtgccttagactgattaccatcggggacaaggcagtggatccaatactggtgcaacagggcgcattagggtcctttcgggatcttcagatagactcttgtggtataaccgaccgatgcctcccttcctattgtgaacatggcggagagtgcagccagtcctgggacactttttcatgcgattgtctgggcacaggctataccggagagacatgccacagctccctttacgagcagtcttgcgaggcacacaaacacagggggaatccctccggcctttactatatcgatgcggatggcagtggaccactgggcccattcctagtgtattgcaatatgacagcagatgccgcatggaccgtcgtgcagcacggagggccagatgctgtgacactccgaggcgctccttccggccatccaagaagcgcggtgtcctttgcctacgccgctggggcaggccagttaaggtcagcggttaatctcgctgagcgctgcgaacaaagactggcgctgcgctgtgggacggcccgacggccagacagccgagacggcacgcctctatcttggtgggtggggcgtaccaatgaaacccacacttcctggggaggatctctgcctgatgctcaaaagtgcacctgtggcctggaaggaaattgcatcgactcccaatattattgcaactgcgatgccggtcggaacgagtggactagcgacactattgtccttagccagaaagaacacctccccgtcacacagatcgttatgactgatgccggaaggccacacagcgaagctgcttacactttaggaccactgctgtgccgaggcgatcaatcattctggaacagcgccagctttaataccgagacaagctatctccatttccctgcatttcacggagagctgactgcagatgtgtgcttcttttttaagaccacggtgtctagtggagtctttatggaaaacttggggataactgacttcattcggatagagctgagggcccctaccgaggtgacctttagcttcgatgtcgggaatggaccttgtgaggtcactgtccagtctcctacccctttcaacgacaatcagtggcaccacgtgcgggcagagcggaatgtcaaaggcgcatccctgcaagtggaccagttgcctcagaaaatgcagcctgcacccgctgacgggcacgttcggttacagttgaacagccagctgttcatcggtggtacagctactagacaaagaggttttcttggctgtattagatccctgcaacttaacggggtcgctctagatctagaggaacgggcaaccgtgacccccggagtggagcctgggtgtgcaggacactgttccacctacgggcacctgtgcaggaacgggggacgctgcagagagaaacggagaggggtaacctgcgactgcgcattctccgcctacgacggacccttctgctccaatgagatcagtgcatattttgccactggcagttccatgacttaccatttccaagaacactatacgctgtccgagaacagctcctctctggtgtcttctcttcatcgcgacgttacgctgactcgtgaaatgatcaccttgtcctttcggacaactcgcacaccctcactcttgctgtacgttagctctttctatgaggagtatctcagcgtgatcttggcgaacaatgggagtctgcagatacgatacaagcttgaccggcatcagaaccccgacgccttcacattcgactttaagaacatggccgacggccaactgcaccaggtgaagatcaacagggaggaagcggtggttatggtcgaagtgatccctcagatgcaaaagtcaaattag

SEQ ID NO: 10664 - DNA, 1257 bp, synthetic construct
  misc_feature 1..1257: note = source = /note="Description of Artificial Sequence: Synthetic coding sequence"
  source 1..1257: mol_type = other DNA
atgaggtccctcctgctcctctctgcgttttgtctgttggaggctgccttagccgcagaagtcaagaagcctgccgctgctgctgcgcctgggaccgcagaaaaactatcccccaaggcagcgactcttgctgagcggtcagcaggcctggctttcagtctgtaccaggcaatggccaaggatcaagccgtagaaaacatcctagtctccccggttgtcgtcgcaagctccctcggccttgtgtctctgggtggcaaggctaccactgccagccaagctaaggcagtgctttctgccgagcagttgagagatgaggaagtacacgcgggacttggtgagctgttgcgttctctgtcaaattcgactgctcggaacgtgacatggaagctggggtctcggttgtacggaccgagctccgtttcctttgcggatgacttcgttagaagctctaagcagcactacaactgcgaacatagcaagattaattttcgagataagagatccgccctccagtcaatcaatgaatgggctgcacagaccaccgacggaaagcttcccgaggtgacaaaagacgtggagcggaccgatggagctctgctcgtcaatgctatgtttttcaaaccacactgggacgagaaattccatcataaaatggtggataatagagggttcatggttacgaggagctacacagttggagttatgatgatgcatagaacgggactatacaactattacgacgatgaaaaggagaaactacagatcgtagagatgcctctggcccataagctttccagcctgattattttgatgcctcatcacgtcgaacccctggaaagactggaaaagcttctgacaaaggaacagctaaaaatttggatgggaaagatgcaaaaaaaggccgtggccattagcttgccaaaaggggtggttgaggtcacacacgacctccagaagcacctcgctgggttaggactcacagaagcaatcgataagaataaggctgacctctctcgtatgtcaggcaagaaggacctgtacttggcatcggtgttccacgcaacagctttcgagctggatacagacggcaatcccttcgaccaggatatttatggaagagaggagctgaggagtccaaaactgttttatgccgatcacccttttatattcctggtccgggatacccagtccgggtctctgttgtttatcgggaggctggtgaggccaaaaggagacaagatgcgcgacgaactgtag

SEQ ID NO: 10665 - DNA, 378 bp, synthetic construct
  misc_feature 1..378: note = source = /note="Description of Artificial Sequence: Synthetic coding sequence"
  source 1..378: mol_type = other DNA
atgcagctcctgaaagcactgtgggctctagccggtgcggcactgtgctgttttctggtgttggtgatccacgctcaattcctcaaggagggacaattagcagcaggcacgtgcgagattgtgaccttggaccgcgattcctctcagcccagaaggactatcgcacggcagacagctagatgcgcctgccgtaaggggcagatagccggtaccacacgcgctcgcccagcttgtgtggatgcaaggattatcaagacgaaacagtggtgcgatatgctgccttgcctggaaggcgaggggtgtgatctgctcattaatcgcagcgggtggacttgcactcagccgggtggccgtatcaaaactacaactgtatcttag

SEQ ID NO: 10666 - DNA, 5858 bp, synthetic construct
  misc_feature 1..5858: note = source = /note="Description of Artificial Sequence: Synthetic coding sequence"
  source 1..5858: mol_type = other DNA
atgcccgcactggggccagctctgctgcaggcgctctgggccggatgggtcttgaccctgcagccactgccgccaaccgctttcacacctaacggcacctacctgcagcatctggcacgtgatcccaccagtggaacgctttacctgggcgcaacaaattttctgtttcaacttagccccggtctgcagttagaggctacagtgagcactggccctgtactggattctagggattgtttgcctcccgtgatgcccgacgagtgcccacaggctcagcccacaaacaaccctaatcaactcttgttggtttcccccggtgcactggtggtctgtggcagcgtgcaccaaggagtgtgtgaacaaagaaggttgggacagctggagcaactactgctgcgaccagagaggcccggtgacacacagtatgtggctgcaaacgaccctgccgttagtactgtggggctggtggctcagggactggcgggagagcccttgctctttgtgggccgtggctacacatctcggggtgtaggaggtggaatccccccaattaccacccgcgctctctggccccctgacccgcaggcagctttctcctatgaggagaccgcaaagctggccgttggtcgcctctctgaatactcccatcacttcgttagcgcattcgcccgaggcgcaagtgcttatttcctgtttttacggcgagacctgcaggctcagagtcgggctttccgtgcatatgtgagccgtgtgtgtctacgggatcagcattactacagttatgtggaactgccacttgcttgcgaaggagggagatatggcctcattcaagccgcagctgttgctactagcagagaagtcgcccacggagaagtcctgttcgcagccttttcctccgccgcacctccaactgtcggaaggccaccatctgccgctgccggtgcctccggagcgtccgcactgtgcgctttccccctggacgaagttgacagactggcaaatcggacccgggatgcatgctacacccgcgagggacgagcggaggatggaacagaggttgcctacattgaatacgatgtcaatagcgactgtgcccagctgccagtagatacattagacgcttacccttgcggctccgaccacactcctagcccaatggcatctcgagtgcctctggaagcaactcccattctcgagtggcctggtattcaactaacggccgtggcagtcactatggaagatggacatactattgcctttctgggggattcacagggacaacttcatcgcgtctatctgggcccaggcagcgatgggcacccgtacagcactcagagtattcagcagggcagcgccgtgtccagagacttgactttcgatggcaccttcgaacatctgtacgttatgacacagtccactctccttaaggtcccggtggcctcttgcgcacagcacctggactgcgcaagctgtttggctcaccgagacccctattgtgggtggtgtgtactgctgggcaggtgctccagacgtagcgagtgtagccgaggacagggacccgagcagtggttgtggtcttttcaaccagagttagggtgcctgcaagttgcagccatgtcccccgcaaatatcagccgggaggaaacccgagaggttttcctaagcgttcccgatctcccgcctttgtggcccggagaatcttactcatgtcactttggcgagcaccagagtcccgctttgctcacaggttctggtgtgatgtgtccatcccccgatcccagtgaagcaccagttcttcccaggggagccgattatgtgtccgtcagtgtggagctccggtttggtgccgtagtcatcgcaaagacgtctttgagcttctacgactgtgttgcggtgacggaactgcggccatcagcccagtgtcaggcctgtgtttcaagccggtggggttgtaattggtgtgtctggcaacacctgtgtacccataaagccagctgtgatgccggaccgatggtggccagtcatcaatcccccttggtttcgcccgacccccctgccaggggggacggggattctgctgagctggagggacctcccgcaccgttgattcttccgtcttcactggactaccaatacgatacacctggcttgtgggagctggaggaggctaccctgggcgcatccagttgtccatgtgttgagagcgtgcagggcagtaccctgatgccagtgcatgtcgaacgggagattcgcctgctcggacgaaacctgcatctcttccaggatggacctggagataatgagtgcgtgatggaactcgaggggcttgaagtcgttgttgaagctcgcgttgagtgcgagccgcctccagatacgcaatgccacgtcacatgtcagcagcatcagctttcgtatgaagctttacagcctgaacttcgcgtgggcctgttcttgaggcgggcaggaaggctgcgagtggattccgctgagggactgcatgtagtgctctacgattgcagtgtgggacacggcgactgcagtcgctgccaaaccgccatgcctcagtatgggtgcgtgtggtgtgaaggtgaaagacccaggtgcgtgacacgcgaggcctgtggggaagcggaagccgtcgccactcagtgccccgcacctctaattcatagcgttgagcccctaacaggcccagtcgatgggggaaccagagtgactatacggggtagcaacctgggccagcatgtgcaggatgtactgggcatggtgactgtggccggagttccctgcgccgtggacgcccaggagtacgaagtgtctagttcgttggtgtgcatcaccggcgctagcggagaggaggttgcaggcgctacagccgttgaggtacccggtagaggcagaggtgtgtctgaacatgacttcgcctatcaggaccctaaagtgcactctatatttccagcgagaggccctcgtgcaggcggtacacgactgactctgaacggatcaaagttgctgactgggagactggaagatatcagggtggtggtgggtgaccaaccttgccacctgcttccagagcagcagagcgagcaattgcggtgcgagacttcccccagacccacaccagctaccctgcccgtggccgtgtggttcggggctactgagcggagacttcagaggggccaatttaagtataccttggaccccaacatcacctctgccggacccactaagtcatttctgagcggtggacgtgagatctgtgtaagaggacagaatctggacgtggtccaaacccccagaattagagtgaccgttgttagtcggatgctgcagcccagccagggcctgggccgacggagacgcgtggtccccgaaaccgcgtgctccctgggtccatcttgtagcagtcagcagtttgaagagccttgccacgtgaacagttcgcaactgattacatgcagaactcccgcactacccggactccccgaggatccttgggtccgggtcgaatttattcttgacaacctggtcttcgatttcgccacccttaacccaacacccttctcatatgaggccgaccctactctgcaacctctaaaccctgaggaccctactatgccattcaggcacaagccagggtccgtattctccgtggagggcgagaacttagatctggcaatgtcgaaggaggaggtggttgctatgattggagatggcccatgtgtggtcaaaactctcacgcggcatcacttgtactgtgaaccaccagtcgagcagccgttgcccagacatcacgcgcttagagaggctccagactcacttccggagttcacagtgcaaatgggaaacttaaggttttctctgggtcacgtgcaatatgacggggaatcgccgggtgctttccccgttgctgcccaagtcggtctgggcgtgggcacatctctcctggccctcggagttattattatcgtgctcatgtaccggagaaaatccaagcaggcccttagagattataaaaaagtacagattcaactggagaatcttgaaagctctgtaagagataggtgcaaaaaggagttcacagatcttatgactgagatgactgatctgacttcggacctgctggggtccggcatccctttcctggattataaagtctatgcagaaagaatcttttttcctggccatagagagtcccccctacacagggaccttggtgtgccagaaagtcggaggcctaccgtagaacagggactgggccagttatccaacctgctcaattcaaagttgtttctgacaaagtttatccacaccttggagtctcagagaaccttttcggctagagacagggcatacgtcgcctcgcttctcactgttgctctgcatgggaagctggaatattttaccgatatccttcgcacccttctgagtgacctggtggcgcagtatgttgccaagaatcctaagctcatgctccggaggaccgaaactgtggtcgaaaaactgttaacgaactggatgtccatctgtctgtatacatttgtgagagactctgtcggtgaacctctttacatgctttttagggggattaagcaccaggtcgacaagggaccagttgatagcgttactggaaaagccaaatatacactgaatgacaatcgtcttctgagagaagacgttgaatacagacccctgaccctgaacgctcttctggctgttggccctggagccggtgaggcccagggagtgcccgtaaaagtcctcgactgtgacactatttctcaggcaaaagagaagatgttggatcagttatacaaaggagtgccactgactcagcgtccagaccctcgcactcttgatgtagagtggcgaagtggggtggctggacacctcatcctgtcagacgaagatgttacatccgaggtccaggggctgtggcgccgactgaacacactacaacactataaagtgccggatggcgcaactgtggcactcgtcccttgtctgaccaaacacgtgctacgcgaaaatcaggattacgtacccggagagcggaccccaatgctcgaagatgtggacgagggaggaattagaccgtggcatctggtcaagcccagcgacgagcctgagccgcctcggcctagaaggggctctctgcggggaggtgagcgggagagggctaaagcaattcccgagatctacttgacccggctgctatccatgaaaggaacgcttcagaaattcgtggacgacttgtttcaggtcattctcagtacctctcgacctgtacctctggcagtgaaatatttcttcgacctgcttgacgagcaggcgcagcagcacggcatctctgaccaggacactatccacatttggaagactaatagtctgcccctgcgcttttggattaatatcataaagaatccacagttcgtgttcgatgtgcagactagcgataacatggatgccgtgctcctcgtgattgcccagaccttcatggatgcctgcaccttggccgatcacaaactgggacgcgactctcctataaataaactgttgtatgcgagagacattcccaggtacaagcgtatggtcgagcggtactatgcggacattcgccagacggtgccagcatcagatcaggagatgaactccgtactggccgaactttcttggaattactccggcgacctgggcgctcgagtcgctttgcacgaattatataagtacatcaataagtattacgaccagattattaccgctctggaggaggatgggactgctcaaaaaatgcagttgggctacaggctgcagcaaatcgccgcagcagtggaaaacaaagtgacagacctcta

SEQ ID NO: 10667 - DNA, 342 bp, synthetic construct
  misc_feature 1..342: note = source = /note="Description of Artificial Sequence: Synthetic coding sequence"
  source 1..342: mol_type = other DNA
atgcttgtactcttcctgctggggaccgtgtttcttttgtgtccctattggggagagctccatgacccgataaaggcaactgagatcatgtgttatgaatgtaagaagtaccatttgggcctgtgctatggggtcatgacgtcttgctcactgaagcacaagcagtcttgcgccgtggagaatttctacatcctcacccgcaaggggcagtcgatgtatcactattcaaagcttagctgtatgactagctgtgaggatatcaatttcctggggtttactaagcgtgtcgaacttatttgctgtgatcactccaactactgcaatctaccagaaggggtgtag

SEQ ID NO: 10668 - DNA, 6408 bp, synthetic construct
  misc_feature 1..6408: note = source = /note="Description of Artificial Sequence: Synthetic coding sequence"
  source 1..6408: mol_type = other DNA
atgcctgcgttgggccctgccctcctccaggccctgtgggccggatgggtattgacgctgcagcccttacctccgacggccttcacccccaatgggacttatctgcaacacctcgcaagagatcccacaagtgggactttgtatctcggagcaacaaactttctctttcagctgagccctggcctgcagttggaggccacagtgtctactggcccagtgcttgactcgagggactgcctcccacccgttatgccagatgagtgcccgcaggcccagccaaccaacaaccccaaccagctgctgctcgtgtcccccggagccctggtagtgtgcgggagcgttcatcagggcgtgtgcgaacagaggcgactaggccagctcgaacagctgcttcttcgtcctgagcgccctggcgacacccagtacgtcgccgcaaatgacccggcagtgtctaccgtgggtctcgtggcacaggggctagcgggagaacccctactctttgttggacgaggctatacttcccgcggagttggcggaggtatccctcccattactacgcgggcactgtggccaccagacccacaagccgcattttcttatgaggaaaccgccaaattggcagtgggaaggttaagcgagtatagccaccacttcgtgagtgcttttgctagaggagcatctgcctacttccttttcctgagaagggatctccaggctcagtctagagcttttagagcttacgtcagccgagtgtgtttgcgagaccagcactactattcctacgtggaattgcctctcgcatgcgagggtggaagatacggccttatccaggcagccgcagtcgcgacttctagggaagtcgcccacggcgaagtgctgttcgcggctttctcctccgctgcccctcccacagtggggcgacctccatcggctgctgccggagcctccggtgcctctgcgctgtgcgccttcccattagacgaggtggatagattagccaacagaacaagagacgcttgttacacacgcgaaggtagagccgaggacggaactgaggtggcatacatagagtacgacgtgaattccgactgcgcacagctccccgtggacactcttgatgcatatccatgtggctctgaccacacgcccagtcctatggctagtcgggtgccgctggaggccacccccatactggagtggcctggaatacagcttaccgccgtggccgtgaccatggaggacggccacacgattgccttcctaggggactcgcagggtcaactgcaccgtgtttatttaggacctggaagcgatggacatccctactctacacagtctattcagcagggtagcgccgtttcaagagatttaaccttcgatgggactttcgagcatctgtacgtcatgactcagtctactttgcttaaagtgccagtcgccagttgtgcccaacatttagactgcgctagctgtttagcccatcgcgacccatactgtgggtggtgcgtgctgctgggacggtgttcccgcaggagcgaatgctcaagaggccaaggccctgaacagtggctttggtccttccagcctgaactggggtgtttacaggtagcagcaatgagccccgcaaatatcagccgcgaagagacacgggaggtctttctgtcagtgcctgatctgccccctctatggcccggtgagtcctacagctgtcatttcggggaacaccaatccccagcactgcttaccggatcaggagtgatgtgtcctagcccagacccatcggaggccccagtccttccacgcggtgccgactatgtctctgtcagcgtggagctgaggtttggcgctgtggttatcgctaaaacgtccctgtctttctacgattgtgtggccgtgacggaactccggccttcagcgcagtgccaagcgtgcgtgtccagtcgctggggatgcaattggtgcgtgtggcaacatctctgcacacataaagcgagctgtgatgccggacctatggtggcctctcatcagtcccctttagtctctcctgacccccctgccagaggaggtccctcacccagcccacccaccgctcccaaagcccttgcaaccccagcgcctgacacactacctgtggagccaggagcaccctccacagcaactgccagcgatattagcccgggtgcttccccttcactgctatccccttgggggccatgggctgggtccggatccatctcgtctcctggatctaccgggtctcctctccacgaggaaccaagtccaccgtcaccccagaatggacctggtacagccgtaccagcaccaaccgattttcgcccatcagcaactcccgaggatttactggcttcgcctcttagcccttccgaggttgccgctgtgccacctgccgatccaggacctgaagccttgcaccctaccgttcccctcgaccttccaccagctaccgttccagcaaccacttttcccggagcgatggggtccgttaaacctgccttggactggttgacgcgcgaaggaggcgagttgcccgaggcggatgaatggaccggtggcgacgccccagccttcagcacatccactctcctgtcaggggatggggacagcgccgagctggaaggtccccctgctcctctgatcctcccgtcatcactggactatcaatacgacacacctggcctgtgggaacttgaggaggccacattgggcgcttcttcatgtccgtgcgtggaatctgtgcaaggtagtacactgatgcctgtccatgtcgagcgcgagatacgtctgctgggcagaaatttgcacctatttcaggacggcccaggagataatgaatgcgtgatggaattggagggtctggaggtcgtggtggaagccagagtggagtgtgagccacccccagatacccagtgtcacgtgacctgccagcagcaccagctctcttacgaagccctacagcccgaattgagggtcgggctgttcttgcgacgggctgggcgacttagagttgattctgcagagggcctccatgttgtgctttatgactgcagtgtgggccatggtgattgttcaagatgccagactgccatgccacagtatggctgtgtgtggtgtgagggcgagcggccacgctgtgtgacccgcgaagcttgcggcgaggcagaggctgtagcaactcagtgtcccgcacccctcatccactccgtcgagccccttaccggtccagtggacggcggtacccgagttacaattcgtggttcaaatttgggacagcatgtgcaggacgtacttggaatggttactgtggcaggggttccctgcgcagttgatgcccaggaatatgaggtaagttcatccctggtttgcattacgggagctagcggggaagaagtcgcaggggcaaccgctgtggaagttcctggccgaggaagaggagttagtgaacatgacttcgcataccaagaccccaaagtccactccatattccccgctaggggccctagagcaggaggaacccggttgacgctgaacggctccaaactactgacaggacgactggaggacattagggtggtcgtaggtgatcaaccttgtcatctgctgcctgagcagcagagcgaacagctgcgctgtgaaacgtcccctaggccaacgccagccactctgccagtggccgtgtggtttggggctactgaaaggagactgcagcggggacagtttaagtataccctcgatccaaacatcacatctgcaggtcctacaaaatcttttctgagcggagggagagagatttgtgtgcggggtcagaacctcgatgtggtgcaaactcctcggattagagtgactgtggtgagccgaatgttacaaccaagccaggggctcggaaggcgacgtcgagtggtgccggagacagcgtgctctctggggcctagttgcagctcccagcagttcgaagagccatgccatgttaactccagccagctgattacttgccgtactcctgcgttgcctggacttcctgaagacccttgggtcagagtagaatttatcctcgacaacctggtttttgattttgctactctaaaccctactcccttttcctatgaggcggacccaacgctgcaacctctgaatcccgaagatcctacgatgccattccgacataagcccggtagcgtctttagtgtagagggggagaacctggacttggccatgtcaaaggaggaagtggtcgcgatgattggcgacgggccttgcgtcgtgaagaccttaacacggcaccacttatattgcgaacccccagtggaacagcccttaccaagacatcacgctctgcgagaagcccctgattccctgcccgagttcaccgtgcagatgggcaacctccggttcagcctaggccacgtccaatacgacggcgaaagccctggagcattccctgtcgccgctcaggtaggtctcggcgtcggtacaagtctgctcgcgctcggcgtcattatcatagtgctgatgtaccggaggaagtccaaacaggcactgcgggactacaagaaagtccagatacagctggagaatctggagagctccgtgcgcgatcgatgcaaaaaagaattcacggaccttatgacagaaatgaccgacctcaccagtgacctgctgggcagcggcattcccttccttgactataaggtgtacgccgagagaattttcttccctggccatcgcgaatcccctcttcaccgagacctcggtgttcccgagagcaggcgtcctaccgtggagcaagggctggggcaactgtccaatttgcttaattcaaaactctttctgaccaagtttatccacacactggagagtcagagaacattttccgctcgggacagggcctatgtggcttcactccttacggtggcgctgcatggaaaactcgagtactttacagatatcctgcgtacactgttgtcagaccttgtcgcccagtacgtcgcaaagaaccctaaactcatgttaaggcgaactgagaccgtcgtggagaagctgctgactaattggatgtctatatgcctgtacaccttcgtgagagatagcgtgggggaacccctgtacatgttgttccggggtattaagcaccaggtggataaagggccagtggattcggttacaggcaaggcaaaatatacactgaatgacaaccgtctcctgcgagaggacgtcgagtacagaccacttacactcaacgcccttctggccgttgggccaggggctggagaggcccagggagttccagttaaagtgctggattgtgatactatttctcaagccaaagaaaaaatgctggaccagctgtataagggggtcccgctgactcagcgccctgaccccagaacgcttgatgtggaatggagatccggtgtcgcagggcacctcattctgagtgacgaggatgtcaccagcgaggtgcaaggtttgtggcgaagacttaacaccctgcagcactacaaagttccagatggagcaacagtcgcccttgtcccgtgccttacgaagcatgtgctgcgagagaatcaggattatgttcccggagaacgaacaccgatgctggaagacgtggacgaggggggaatccgcccttggcatctggttaaaccgtcggatgaacctgaaccccctcggccaaggagaggatctttgcgcggtggggaaagggagcgagccaaggctattcctgagatatatttaactagattgctgagcatgaaaggcaccctgcagaaattcgtagacgacctgtttcaggtgatcctctccacaagccgcccagttccgcttgcggtaaagtacttctttgatttgttagacgagcaggctcagcagcatggaatttctgaccaagacacaattcacatttggaaaacaaatagcctcccactgcggttttggatcaacatcatcaagaacccccagtttgtctttgatgtgcaaacctctgacaacatggatgcggtgctgctcgtgatagctcagacctttatggacgcatgtacccttgctgatcacaagctcggcagagattctccaattaacaagctcctttatgccagggatatacccagatacaaaagaatggtggaacggtactacgctgacattcgtcagaccgtccctgctagcgaccaagaaatgaatagcgtcctggccgaactctcatggaactacagcggggacctcggtgcacgagtggcgcttcatgagctgtacaagtacattaataagtactacgatcagattatcactgccctggaagaagacggcaccgcccagaaaatgcagctcggataccgcttgcagcaaatcgccgctgctgttgagaacaaggtaaccgatctgtac

SEQ ID NO: 10669 - DNA, 390 bp, synthetic construct
  misc_feature 1..390: note = source = /note="Description of Artificial Sequence: Synthetic coding sequence"
  source 1..390: mol_type = other DNA
atgcggccactgaaacctggggctcccctgcctgctctctttctgctggctctggcgctgagtccccatggagcccacgggaggcctcggggtcggagaggggcaagggtgaccgataaagaacccaaacccttactgtttttaccggcagcaggtgctgggagaacaccatcagggagtagaagtgctgagatctttccacgggacagcaacctgaaagacaagtttatcaaacacttcaccggcccagtcaccttctcacccgaatgcagcaagcattttcataggctttactacaacaccagagaatgcagcacacccgcttattacaaaaggtgtgccaggcttctgaccagattagctgtaagtcccctgtgctcacaaacttag

SEQ ID NO: 10670 - DNA, 252 bp, synthetic construct
  misc_feature 1..252: note = source = /note="Description of Artificial Sequence: Synthetic coding sequence"
  source 1..252: mol_type = other DNA
atgcgcctgagcgtttgcctgttgatggtttccctcgccttgtgctgctaccaggcccatgccctggtttgccccgcagttgcatccgagattaccgtctttttgttcttgtcagatgcggctgtgaacctgcaggtggccaaacttaatccgccacctgaagccctggcggctaaactagaggtcaagcactgcacagaccaaattagcttcaaaaagcggctctccctgaagaagagttggtggaaatag

SEQ ID NO: 10671 - DNA, 1455 bp, synthetic construct
  misc_feature 1..1455: note = source = /note="Description of Artificial Sequence: Synthetic coding sequence"
  source 1..1455: mol_type = other DNA
atgtggtacgttagcactagaggagtggcacctagagtgaatttcgaaggcgctttgttttctggatatgcaccggacggcggtttgtttatgcctgaggagcttccccaattggatagagggactctgtgccaatggtcaaccttaagctaccctggcctggtgaaggagctgtgtgcactgttcatcggcagcgagcttttaccaaaagacgagttgaatgacctcatagatagagctttcagcagatttcggcacagagaagtcgtacacttgagcagattgaggaatgggctgaacgtgctggagctgtggcatggggtcacttacgccttcaaggatctgagtctgtcttgcacgacacaattcctgcagtactttttggagaagagagaaaaacacgttacagtggtagtcggcacatccggtgacactgggtctgccgctattgaaagcgttcaaggggctaagaacatggacatcattgtgctgctgcctaagggacattgcacaaagattcaggagctgcagatgaccacggtgctaaagcaaaacgtgcacgttttcggcgttgaagggaattcagacgaactcgacgaacctatcaagaccgtctttgccgatgttgcctttgtgaagaaacacaacctgatgtcactcaattcaataaactggagcagggtgctggtgcagatggcacaccatttcttcgcttactttcaatgtacaccaagtctggacactcaccctctgccactagttgaggtcgttgtccccacgggagccgcagggaaccttgccgcaggctacatcgcacaaaaaatcggcctgccaatcaggctggtcgtggccgtgaatagaaacgatattattcaccgcactgtgcagcaaggggacttctccctgtccgaggccgtgaagagcactctggcttccgctatggacattcaggttccctacaatatggagagagtcttctggttgctatctggcagcgatagtcaagtgacgcgagcccttatggaacaatttgagagaacccagagtgtgaatctcccgaaagaactccacagcaaactctcggaggcggttacctccgtgagtgtgagcgatgaagctatcacccagaccatgggtcgctgctgggatgagaatcagtacctcctgtgtccccacagtgcagtggccgtgaactaccactaccaacagattgaccgtcaacaaccaagtactcctcgatgctgtctggctcccgctagtgcagcaaagttcccagaagcagtcctggccgctgggctgactccagagactcccgctgaaatcgtggctttagaacataaggagacacggtgcaccctgatgcgccgtggagacaactggatgctgatgctgagggacacaatcgaggatctttccaggcaatggcgcagtcatgcacttaataccagtcagtag

SEQ ID NO: 10672 - DNA, 159 bp, synthetic construct
  misc_feature 1..159: note = source = /note="Description of Artificial Sequence: Synthetic coding sequence"
  source 1..159: mol_type = other DNA
atgaagctgtgcgttacagtcctctctttattggtgctggtcgccgcattttgttcactggcacttagtgccccatccaataagcccctcgaggcctctaagtccgcgttaacaccagtatcacctggatcgaggtcaacctgtatgacctggaattag

SEQ ID NO: 10673 - DNA, 675 bp, synthetic construct
  misc_feature 1..675: note = source = /note="Description of Artificial Sequence: Synthetic coding sequence"
  source 1..675: mol_type = other DNA
atgcgagtcagcggtgtgttaaggttactggcactcatcttcgcgattgtcaccacctggatgtttattcgctcttatatgagctttagcatgaagaccataaggctgcctaggtggcttgctgcgtcgcctacaaaagaaatacaggtgaaaaaatacaaatgtggcttgataaaaccctgtccagccaactacttcgctttcaagatttgttccggcgctgctaacgtggtcggccctactatgtgttttgaggaccggatgatcatgagtccagttaaaaacaatgttgggagaggcttaaacatagcgttagtgaatgggactactggcgctgtgttagggcaaaaggcatttgatatgtactctggagatgtgatgcatctcgtgaagtttttgaaagagatcccaggtggggcactcgtcctggtggcctcctatgacgaccctgggaccaaaatgaatgatgaaagtcggaaactcttttccgatctaggctcctcttacgcgaaacagctggggtttagggattcatgggttttcatcggggcaaaggatctccggggtaagagtccatttgagcagttcctcaaaaacagtcctgataccaataagtatgaaggctggcctgaattactagaaatggaggggtgcatgccacccaagcctttctag

SEQ ID NO: 10674 - DNA, 1404 bp, synthetic construct
  misc_feature 1..1404: note = source = /note="Description of Artificial Sequence: Synthetic coding sequence"
  source 1..1404: mol_type = other DNA
atgttaattttttggaccatcacactctttctgttgggtgctgccaagggcaaggaagtctgttacgaggatctgggctgcttttcagacactgagccatggggaggtactgctataaggcctctcaagatccttccttggtctcctgagaagatcggaactaggtttctgctctacaccaacgagaatcccaacaacttccagatattgctgctatcggatcctagtacaatcgaagcctctaacttccagatggaccggaagacccgtttcatcatccatggatttatagacaagggggatgagagttgggtgaccgacatgtgcaagaaactgttcgaggtagaggaagtgaattgcatctgcgttgactggaaaaagggcagccaagcgacatacacacaagctgctaataatgtgcgagttgtgggagcccaggtggcgcaaatgctggatatcctgttaactgagtactcctatcctccctctaaagtacacctcatcgggcactcactgggggcacatgttgccggtgaagccggaagcaaaacccctggtctgtctagaatcaccgggctggaccccgtggaggcctcgtttgagtcaacacccgaagaggttcgcttagacccatccgatgcggattttgtcgacgtgatccacaccgatgcagcccctctgatccccttccttggatttggtactaaccagcagatgggtcacttagactttttccctaatggcggagagagcatgcctggctgcaaaaagaacgcgctgtctcaaatagtggatctggacggcatttgggctggcactagagattttgtcgcgtgcaaccatcttaggagctacaaatactacctggagtctatcctgaacccggacggctttgcggcttatccctgtaccagctacaagtccttcgagtcggacaaatgctttccctgtccagaccaaggatgtccacaaatgggtcattacgcagacaagttcgctggacgtacaagcgaggaacagcaaaagttcttcctcaacaccggcgaggccagtaacttcgccaggtggcgatacggcgtgtccattacactgtctggaagaaccgcaacaggccagatcaaggtggccctgtttgggaataagggcaatacccaccagtactcaatttttcgagggatcttaaagccaggatcaacacattcatacgaattcgacgccaaactggacgtagggacaatcgagaaggtgaaattcctctggaataataacgtcattaaccctactctgcctaaggttggcgctactaaaattaccgtccagaagggcgaggagaagaccgtgtacaatttttgcagtgaggatacagtgagagaggatactctactcacactgaccccatgctag

SEQ ID NO: 10675 - DNA, 237 bp, synthetic construct
  misc_feature 1..237: note = source = /note="Description of Artificial Sequence: Synthetic coding sequence"
  source 1..237: mol_type = other DNA
atgggatcaggattaccactcgtgctgcttttgacactcctgggatcctcccatggcaccggcccaggtatgaccctccagttgaagctgaaggagtctttcctgacaaactcctcctatgagtccagctttctggagcttctggagaagctgtgcctcttgcttcatctgccatcggggacttcagtgacgctgcaccacgcgaggtctcagcaccacgtagtctgcaatacgtag

SEQ ID NO: 10676 - DNA, 291 bp, synthetic construct
  misc_feature 1..291: note = source = /note="Description of Artificial Sequence: Synthetic coding sequence"
  source 1..291: mol_type = other DNA
atggagcataaggaagtggtgctgttgcttctcttatttctcaagagtggacagggagagcctctcgacgactatgttaacacgcagggaccgtcactgttcagcgtcaccaaaaaacagctgggagctgggtccagggaggaatgtgctgccaagtgtgaggaagacaaggagtttacttgcagagccttccagtaccatagtaaagaacaacagtgtgtaatcatggccgagaatcgtaaaagcagtatcatcattaggatgcgcgatgctgtgctcttcgagaagtag

SEQ ID NO: 10677 - DNA, 1083 bp, synthetic construct
  misc_feature 1..1083: note = source = /note="Description of Artificial Sequence: Synthetic coding sequence"
  source 1..1083: mol_type = other DNA
atggggctgctgctcttggtgcccctgctcttgctccccggatcatacggcttacccttctacaacggcttctactattcaaactctgcaaatgatcagaacttaggaaatgggcacggcaaggacctcctaaatggggttaagctggtcgtcgaaacacctgaggagacactctttacctaccagggagctagcgtgattctcccttgcaggtaccgatatgaacctgccttagtgagtccgagacgggttcgcgtgaagtggtggaaactgtcggagaacggtgccccagaaaaagatgtgctagtggcaatcggcctgagacaccggtccttcggggattaccagggtagggtccacctccggcaggataaggaacacgacgtgtcactcgagatccaagatcttagacttgaggattatgggaggtacaggtgcgaggtgatcgatggcctggaagacgaatctggcctggtggagctggagctacgcggtgtcgtgtttccatatcagtcaccaaacggcagatatcagtttaattttcacgagggtcagcaggtctgtgccgaacaagccgctgtggttgcatcatttgagcagttgttccgcgcttgggaggagggtctggattggtgtaacgcgggatggctgcaggacgcaacagtccagtatcccataatgctgccgcgacaaccttgcggcggacccggactggccccaggggtgcgttcctacggcccacggcaccgcaggttgcatcgatatgatgtcttctgttttgccactgctctgaaaggaagagtatactacctcgagcaccccgagaagctgacccttactgaggcgagagaagcatgtcaggaggatgacgctactatagccaaagttggtcagctgttcgcggcatggaagttccatggattggaccgctgcgacgctggctggcttgccgacggatcagtgcggtatcccgtggtgcatccacatccaaactgtggacctccagaacccggagtccgctcctttgggtttcccgaccctcagagtcggttatatggtgtgtactgctacaggcagcattag

SEQ ID NO: 10678 - DNA, 810 bp, synthetic construct
  misc_feature 1..810: note = source = /note="Description of Artificial Sequence: Synthetic coding sequence"
  source 1..810: mol_type = other DNA
atgattagaacactgctgttatcaaccctggtagcgggtgctctctcttgtggcgaccctacatacccaccttatgttactcgagtggtcggaggcgaggaagccagacctaactcatggccatggcaggtgtctctgcagtatagttctaacggtaagtggtaccatacttgcggaggatcactgattgcgaactcctgggtgctgactgccgctcattgcatctcaagttccagaacgtatcgcgtggggcttggaagacacaatctgtacgtggcggagtccgggtcactagccgtgagtgtaagcaaaatagtggtgcacaaagattggaactccaatcagattagcaagggtaacgacattgctctgctgaagctggcgaatcccgtgtcattgactgataagattcagctcgcttgtctgcctcctgccggtaccatacttcccaataattacccttgttacgtaaccggttggggcaggctgcagaccaacggggcagtccccgatgtgctccagcaggggcgactgttggtggtagactacgccacatgctcctctagcgcctggtggggttcctccgtgaagacttccatgatctgcgctggcggtgatggagtgatctcttcatgtaacggcgacagcggaggtcccctgaattgtcaggcatccgacggcaggtggcaggtacacggaattgtttcattcggcagtcgcctgggatgcaattactatcataagccgtccgtgttcacccgagtgtcaaactatattgactggatcaattccgttatagccaataattag

SEQ ID NO: 10679 - DNA, 1122 bp, synthetic construct
  misc_feature 1..1122: note = source = /note="Description of Artificial Sequence: Synthetic coding sequence"
  source 1..1122: mol_type = other DNA
atgctcccctggctcttagtattttcagcattgggtatccaagcgtggggtgattcctcctggaacaaaacccaggctaaacaggtttccgaaggtctgcaatatcttttcgaaaacatcagccagttgaccgaaaagggtttgccaaccgacgtgagtactaccgtctcaagaaaagcttggggtgctgaagccgtaggatgctcaatccagctgacgacccccgtaaatgttctggtgatccatcatgtgcccggtctggaatgtcatgatcaaacggtgtgttcacagcgcctgagggaactccaggcccaccacgtacataacaatagtggatgtgatgtggcctataactttctggtgggtgatgacggcagggtgtatgaaggcgttggctggaatatccagggtgttcatactcagggatataacaacatctctttaggtttcgccttcttcggtacaaaaaaaggacactctcccagcccggctgcactgtccgctatggaaaatctaattacatacgccgtccagaagggccatttgagtagctcgtatgtgcagccactcctaggcaagggcgaaaactgcctcgcaccacgccagaaaaccagcctgaaaaaagcctgccccggagttgtcccacggtcagtttggggcgcacgggagactcactgtccacggatgacgctccccgctaaatacgggatcatcatccacaccgctggacgcacatgtaacatttctgacgaatgccgtctgttagtacgggacatccagagcttttatattgatcgcttgaaatcgtgcgacatcgggtacaactttttagttgggcaggacggggcaatatacgagggagtcggctggaatgtccagggttcatccactcccggatacgacgatatcgccctgggaattacatttatgggcacattcaccggaatccccccaaacgctgctgcactggaagcagcccaggacctgatccaatgcgcgatggtcaagggctatctgactccaaattatctgctcgtaggccacagtgacgtggcacgcaccctaagcccaggtcaagccctgtacaatatcatctccacctggccacatttcaaacattag

SEQ ID NO: 10680 - DNA, 327 bp, synthetic construct
  misc_feature 1..327: note = source = /note="Description of Artificial Sequence: Synthetic coding sequence"
  source 1..327: mol_type = other DNA
atgaggcagcggctgcttccatcggtgacctctctgctgttggtggccttgctgtttcctggttcgtctcaagcaagacatgtgaaccacagcgctacagaggccctgggcgaacttagagagcgcgctcccggacagggcactaacggattccagctcttgagacatgccgttaaacgcgatttgctgccacctaggaccccaccctaccaaggtgatgtgccccctggcatccgaaatactatctgccatatgcaacagggcatttgtcgccttttcttctgtcattccggcaccggacagcagcacagacagcgatgcgggtag

SEQ ID NO: 10681 - DNA, 708 bp, synthetic construct
  misc_feature 1..708: note = source = /note="Description of Artificial Sequence: Synthetic coding sequence"
  source 1..708: mol_type = other DNA
atgagcccacccctgctgaaattaggcgctgtgcttagtaccatggccatgatttcaaattggatgtcacagacactgccaagcctggtcgggcttaacaccacccgactgtcgacgccggacacccttacgcagatcagccccaaggagggttggcaggtatactctagcgcacaggatccggatgggagatgcatctgcaccgtggtcgcccctgagcaaaatctatgtagcagagacgctaagtcaagacagctccggcagctgctcgaaaaggtgcaaaatatgtctcagtccatcgaggtcctgaacctgcgaacccagagagacttccagtacgtgttgaagatggagacacagatgaaggggcttaaggccaagttccggcagatcgaggatgacagaaagacacttatgacaaaacatttccaggagctcaaagagaagatggacgagctgttgccccttatcccggtcctcgagcagtacaagacagacgccaaactcattactcagtttaaggaggaaatcagaaacctgagcgctgtgcttaccgggatccaggaagagatcggagcgtacgattacgaagagcttcaccaacgggttctgtcccttgagacccggttgcgcgactgcatgaagaagctgattgacctgaaaaagcggaaggaagaggagaagcggcaacagaaaggcgaggcttag

SEQ ID NO: 10682 - DNA, 606 bp, synthetic construct
  misc_feature 1..606: note = source = /note="Description of Artificial Sequence: Synthetic coding sequence"
  source 1..606: mol_type = other DNA
atgaacctgaattgcccaccttgcgtaaccggcttaagagtctggtcaagttgccgctctaagccaaattctagggctcgaagctgtcgtagctgcacaggggctagtcgcaccctgccttctcaccatatgagccacgtggaatgtcctagcggcattgtgaacgaagaaaattttaagcaaatttacagccagtttttcccacagggagacagcagtacctacgctaccttcctgtttaatgcctttgataccaaccatgacgggtcagtgtcattcgaggactttgtggccggactcagtgtgatcctgcgcggaacagtggatgaccggctgaattgggccttcaatctctatgacttaaacaaggacggctgtatcaccaaggaagagatgctggacatcatgaagagtatctacgatatgatggggaaatatacatatccggctctgagggaggaagcccctagagaacatgtggaatcgttctttcagaagatggatagaaacaaggatggggtagtgacaatagaagaattcatcgagtcttgtcagaaggatgaaaacatcatgcgcagtatgcagctctttgacaacgttatctag

SEQ ID NO: 10683 - DNA, 693 bp, synthetic construct
  misc_feature 1..693: note = source = /note="Description of Artificial Sequence: Synthetic coding sequence"
  source 1..693: mol_type = other DNA
atgagattagctggcccactgagaatcgttgttctggtggttagcgtcggagtcacgtggatcgtcgtgtcaatcttgctgggtggcccaggctctgggttcccacgcattcagcagctgttcacaagccccgagtcaagcgtgaccgccgctccaagggccagaaagtacaagtgtggcctgccccagccgtgccccgaggagcacttagccttccgggtggtgtctggtgcagctaacgtgattggccctaagatctgtctggaggataagatgctcatgagcagcgtgaaggataatgtgggaagaggcttgaacatagctctggtcaatggggtgtccggggagctgatcgaggcaagggcctttgacatgtgggcaggagacgttaacgatctcctgaagttcatcagaccattgcatgaaggaacccttgtgttcgtagccagttacgacgaccccgctaccaaaatgaacgaggaaacgcgcaagttgttcagtgagctggggagccgcaacgccaaagagctcgctttccgcgactcatgggtctttgtaggcgctaaaggtgtccaaaacaagtctcctttcgaacagcacgtcaaaaacagcaaacattccaataagtatgaaggctggcccgaagctctagagatggagggctgtattcctcgccgaagtactgcatcatag

SEQ ID NO: 10684 - DNA, 684 bp, synthetic construct
  misc_feature 1..684: note = source = /note="Description of Artificial Sequence: Synthetic coding sequence"
  source 1..684: mol_type = other DNA
atgcgtgtagcaggcgctgccaaacttgtggtggctgtggctgttttcctcctcaccttctacgtgatcagccaagtatttgagattaaaatggacgctagtctggggaatttatttgcgcgttccgcattggacactgccgctaggtcaaccaaaccaccgagatacaagtgcggcatctcaaaagcctgtcccgaaaagcacttcgccttcaagatggccagtggagccgcaaatgtggtgggacctaagatttgcttggaggataacgtcctgatgtcaggcgtcaagaacaacgtcggtcggggtattaacgtagccttagcaaacggaaagactggagaggtgctggacactaagtactttgatatgtggggtggcgacgtggcacccttcattgaattcctgaaggccattcaggatggcaccattgtactgatgggaacctacgacgacggcgcaaccaaactcaacgatgaagctagacgtctaatagcagacctgggctctacaagtatcacgaacctcggcttcagggacaactgggtgttctgcggcggaaaaggcattaagaccaagtctcctttcgagcaacacataaagaacaacaaggatactaataagtacgaagggtggcccgaagtggtggagatggaggggtgtattccgcagaagcaggactag

SEQ ID NO: 10685 - DNA, 1656 bp, synthetic construct
  misc_feature 1..1656: note = source = /note="Description of Artificial Sequence: Synthetic coding sequence"
  source 1..1656: mol_type = other DNA
atggaagattctgatagcgccgctaaacagctcgggttagccgaagctgcggcagcagggggagaagccgaagagcccgtgctgagtcgtgacgaagattccgaagaagatgccgactctgaggccgaacgcgaaacgcccagagttactgcagtggccgtgatggcggctgagcccggacacatggatatgggggctgaggcactccctggaccagacgaagctgcagcggctgcagcctttgccgaggtcaccacagtaacagtcgctaacgtgggggctgcagctgacaacgtgttcacaacgagtgtggctaacgcagccagtatcagtggtcatgtgctgtcgggcagaaccgccctccagataggtgactcactcaacaccgagaaagcaacattgatcgtagtccacactgatgggtccattgtggagaccactgggctgaagggaccagctgctccattgacccccggaccccagtcccctcctacacccttggctcccggacaggagaagggaggtactaagtacaactgggatccttctgtgtacgattctgagttgcctgtgaggtgccggaatattagcggcactctgtataaaaacagactgggatccggcggacggggaagatgcatcaaacaaggagagaactggtatagccccacagagtttgaggccatggctggcagagccagtagtaaggactggaaaagatctattcgttatgccggacgcccactgcagtgtctgatccaagatggaattttgaatccacacgcagcaagttgcacttgtgccgcttgctgtgacgatatgacactcagtggaccagtgcggctcttcgtgccgtataagaggcgaaaaaaggagaatgaactgcccaccactcctgtgaagaaagactcgcctaaaaacattacattgctgccagcaacagccgctactactttcaccgtgacccccagcggccagataaccacatcgggtgcacttacctttgatcgggcaagcactgtcgaggccactgctgtaatatctgagtcacccgctcagggagatgtttttgccggagcaaccgtccaggaagctagtgtgcagcctccctgccgtgcatctcaccccgaaccacattacccagggtaccaggatagttgccaaattgcacccttcccagaggcagcactgccaacctctcatcctaagattgttttgacttctctccccgcactcgctgtaccacctccaactccgactaaggctgcgccaccagcccttgtcaatggtctcgaactctcggagccaagaagctggctgtacctggaagagatggtgaatagcctgctgaacacagctcagcagctgaaaaccctatttgaacaggcaaaacatgctagcacttatcgagaggctgcgacaaaccaggctaaaatccatgctgacgcggagaggaaggaacaatcatgcgtcaactgcggcagagaagcgatgtcagagtgtacagggtgtcacaaggtcaattactgttccacattttgtcagcgaaaggactggaaagaccatcagcatatctgcggtcagagtgctgccgtgactgttcaggcagacgaagtgcacgtcgctgagtctgttatggagaaggtgactgtgtag

SEQ ID NO: 10686 - DNA, 2022 bp, synthetic construct
  misc_feature 1..2022: note = source = /note="Description of Artificial Sequence: Synthetic coding sequence"
  source 1..2022: mol_type = other DNA
atgaaacctggcggattttggctgcatctgactctgctgggggctagtttacccgctgccttagggtggatggatcctggtacatcccggggtcctgacgttggtgtgggcgagtctcaggcggaggaacccaggtcgtttgaagttacaaggcgtgaaggtctaagttctcacaacgagctgctggccagttgtgggaagaagttctgtagccgcggatcccggtgtgtactctccctggctcctgaggaccgggtgtccgtgaccactgttaccgtggggctgtccactgttctcacctgtgcggtgcatggagatctcaggccccctattatctggaagcgcaatggccttacactgaactttctggatctggaagacatcaatgactttggcgaagatgattcactctatatcacgaaagtgacgacaatccacatgggcaactatacatgccatgcttccggccacgagcagctgttccaaacacatgtactgcaggtcaacgtcccccctgtgataagagtttacccagagagccaggcgcaggaacccggtgtggccgcttctctgcgttgccacgccgaagggattcccatgcctcggataacttggctgaaaaacggagtagacgtgtccacccagatgtccaagcaactatctctgctcgcaaacggtagcgagctacacatctcgtccgttcgatatgaggatacaggtgcctatacttgtatcgctaagaacgaggttggagtcgacgaggacatcagcagtctttttattgaagatagtgcaagaaagaccctcgcgaacatcctttggagggaagagggcctgtccgtcgggaacatgttttacgtattttccgacgatggcataatagtgatccaccctgtggactgcgaaatccagcggcatcttaagcccaccgaaaagatctttatgtcctacgaggagatttgcccccagcgggagaaaaatgcaacccagccttgccagtgggtcagcgctgtgaacgtgcggaaccgatatatttacgtcgcccagccagcactatcccgcgtgctggtggtggacatccaggcacagaaggtcttgcagagtattggagttgatccgctcccagctaagttgagttacgacaagtcccacgaccaagtatgggtgcttagttggggagacgtacataagtctagaccttctctccaggtgatcacagaggcaagtacaggccagtcacaacatctcataaggaccccgttcgcaggcgtagatgactttttcattcctcctaccaatttgatcattaaccacattcgatttggcttcatcttcaacaagtctgaccccgctgtgcacaaggtggatctcgaaaccatgatgcctcttaagacgattgggctgcaccatcacggttgcgtacctcaggccatggctcacacccatctaggtggatatttttttatacaatgccggcaagacagccccgcatccgcggctagacagctcctggtcgacagcgtgactgatagcgtcttggggcctaatggcgatgtgacaggtaccccccacacgagcccggatggcagattcatcgtcagcgcagcggcagattctccttggttgcacgtgcaggagataactgtcaggggagagatccagacactctacgacctccagatcaacagcggtatcagtgaccttgcctttcagcgtagcttcaccgaaagcaatcagtacaatatctatgcagccctccataccgagcccgacctgctattcttagagctgagcacaggtaaagtgggtatgctgaagaatttgaaggagcctcctgctggccctgcacagccttggggtggaacccacaggataatgcgggatagcgggctttttggccagtatctattaacccctgccagagagagtttattcctcattaacggacgccaaaatactctgcggtgtgaagtcagtggcattaagggcggaactaccgtggtttgggtgggcgaggtctag

SEQ ID NO: 10687 - DNA, 2007 bp, synthetic construct
  misc_feature 1..2007: note = source = /note="Description of Artificial Sequence: Synthetic coding sequence"
  source 1..2007: mol_type = other DNA
atggacctggtcctgaaacgatgtctgttgcacttagcggtcattggagccctcctggccgtcggtgctactaaggtccctcggaatcaggactggctcggcgtttcacgacagcttcggaccaaggcatggaatcgacaactataccctgagtggacggaggcacagcgcctggactgctggaggggcggacaagttagcctcaaggtgtccaacgacggcccaacgttgattggcgctaatgctagctttagtatcgctctgaatttcccaggctcccaaaaggtgcttcccgacggacaggtgatttgggttaataatacaatcatcaacggcgatcaggtttggggagggcaacccgtgtatcctcaagagacagacgacgcctgtatcttccccgacggtggaccctgcccatctgggtcttggtctcaaaaaaggagcttcgtttacgtctggaaaacgtggggtcagtactggcaagtgctcggcggacctgtcagcggcctaagtattggtaccggcagggcgatgctcgggacacatacaatggaagtgacggtgtaccatagacggggaagccgaagctatgtgccgctggctcactcctcttcagcgtttaccattactgaccaggttcctttttcagtgtccgtctctcagctacgtgcactggatggcggaaataagcattttttacgcaatcagcccctgactttcgccctccagctacatgacccgtctgggtatctcgcagaggcggacttgtcctatacctgggactttggggattcgtcaggaacattaatctcacgagccttagtcgtgactcatacttaccttgagccgggacccgtgaccgcgcaggtcgtgctgcaagctgctatccctctgacctcatgtggttcctcgccagtgcccggtaccactgacggccaccgtcctacagccgaagccccaaacaccactgctgggcaggtgccgacaacagaggtggtgggcacaacccccggacaggccccaaccgccgagccctctgggaccaccagcgtgcaagttccaacaaccgaagtcattagcacagccccagtgcagatgcccacagccgaatccaccggtatgacaccagaaaaagttccggtgtcagaagtgatggggactactctggcggaaatgtccaccccggaggcaactggtatgactcctgctgaggtatccattgtagtgttgagcggaactaccgctgcccaggtcactaccactgagtgggttgaaactactgctagagagctaccaattcccgaacctgaggggcctgatgcgagctccatcatgagtaccgagtccattaccgggtcgcttggccctctgctggacgggaccgcaaccctccgcttagttaagcggcaagtcccactggattgcgtgctgtatagatacggtagcttcagcgtaacattagacatcgttcagggcatagaatcagctgaaatccttcaagccgtaccgtctggagagggggacgcttttgaactgactgtttcctgtcagggcggtctccccaaggaagcatgtatggaaatttcatcacccggttgtcaaccaccagctcaaagactgtgtcagccagtcctcccttctcccgcatgccagcttgtccttcaccagatcctgaaaggaggcagtggaacctattgcctcaatgtttctcttgctgataccaattctctggcagtcgtatcaacccagctgatcatgcccgtgccgggaatcctgttgactggacaggaggcaggactggggcaagttccacttattgtcgggatcctcctggtgctgatggctgtggtgctcgcatctctgatatatagaaggcgcctcatgaaacaggacttttccgtcccacagttgcctcactcgtcttcacattggttaaggctccctagaatattctgctcgtgccctatcggcgagaatagcccactgctgagtgggcaacaggtgtag

SEQ ID NO: 10688 - DNA, 1746 bp, synthetic construct
  misc_feature 1..1746: note = source = /note="Description of Artificial Sequence: Synthetic coding sequence"
  source 1..1746: mol_type = other DNA
atgcagcaagacggcttgggagtcggtacacggaacggatccggcaagggacggtccgtgcacccatcttggccttggtgtgcacctagaccactgcgctatttcggccgagatgcccgtgcgaggagggcacagacagctgcaatggccttactcgcgggtggccttagcagagggctgggtagtcatccagcagctgcgggacgcgacgcagtcgtgtttgtctggctcctcctcagcacgtggtgcacggccccagcgagagccattcaggtgaccgtgagtaatccatatcacgttgtcattctattccaaccagtgactctcccctgcacgtaccagatgaccagcacaccaacacaaccaattgtcatctggaagtataaaagcttttgccgggatagaatcgctgacgctttcagccctgcttcagtggacaaccaactcaacgcacaactcgctgctggaaaccccggatacaacccctatgtcgaatgtcaggactctgtccggaccgttcgggtagtcgccaccaagcaaggaaacgcagttacgctcggagattactaccagggccgtaggatcactattacggggaatgcagacctaacctttgaccaaacggcttggggcgactccggcgtctattactgcagtgtggtctccgcacaggaccttcaaggaaacaatgaagcctatgcagagcttatagtcctggtgtacgcagcaggcaaagccgctacatctggcgttccttcgatttatgcaccctccacctatgcccatctttcacccgcaaagacaccgccaccacccgctatgatcccaatgggtcccgcatataacggctaccccggaggatatccaggagacgttgaccggagctccagcgcaggagggcaggggagctacgtgccacttttacgcgatactgactcatccgtagcttcagaggtgcgatccgggtaccgaattcaggcttcacaacaagacgactccatgcgagtgctgtattatatggaaaaggagctggccaattttgatccttcgagaccgggtcccccatccgggagagtggagagagctatgtccgaggtcacctccttacatgaggatgattggaggagtaggccatctcgcggtcctgctcttacccccatacgagacgaggagtggggcggtcacagccccaggtctccaagaggatgggatcaggaacccgcaagagaacaagctggcggaggatggagggctaggaggccacgtgctcgttctgtcgacgccctggatgacctcactcccccaagcaccgccgagtccggttcacggagcccgaccagcaacggtggccgtagtcgggcatacatgcccccacggtcaaggagcagggacgatttgtacgaccaggatgactcacgcgactttccacgatcacgcgacccccattacgacgattttaggagccgcgagaggcccccagcagatcctcgatcgcaccaccatagaacccgtgatccaagggacaatggcagcagaagcggagatctgccatacgacggcaggctgctggaggaggcggtgcggaagaagggatcggaagaacgtcgcagaccccacaaagaggaggaggaagaggcttactacccccctgcaccacctccctactcagaaactgattcccaggcatctcgggaaaggaggctgaagaaaaatcttgctctgtctagagagtctctggtggtgtag

SEQ ID NO: 10689 - DNA, 1959 bp, synthetic construct
  misc_feature 1..1959: note = source = /note="Description of Artificial Sequence: Synthetic coding sequence"
  source 1..1959: mol_type = other DNA
atgcctccgcctttgcctctcttacttctgaccgtcttggttgtcgctgctgcaagacccggatgcgagttcgagcggaaccctgccggagagtgccatagaccccctgccgctgacagcgcaacatgcgtggatctgcaactgaggacttgttctgatgccgcatacaatcacacaactttcccgaatctcttacagcaccggagctgggaggtggttgaggcgagcagtgaatatattcttctgtctgtgctacaccaactacttgaaggccagtgcaatcctgacttgaggttattaggatgcgccgtactggccccacgttgtgagggcggatgggtgcgtcgcccttgtcggcacatctgtgagggacttcgtgaggtgtgtcagcctgccttcgacgcaatcgacatggcatggccgtactttctggattgccatagatacttcacacgggaggacgaagggtgttatgaccccttagagaagcttcgcggtggcctcgaggcggacgaggctctgccttccgggctcccccctacctttattcgcttcagtcaccactcctatgctcaaatggtgcgggtgctaagaagaacagccagcagatgtgcacacgtggctcggacgtatagtatcgggaggtcattcgatggacgtgaactgctcgtcatcgagttctcttccaggcctggacagcatgaactaatggagcctgaggttaaactgattggaaatatacacggtaacgaagtggcaggcagagaaatgctaatctatctggcccagtacctctgcagcgaatatctactcgggaacccgaggatccagcggttgctcaacaccactcgcatacatctgctgcctagcatgaaccctgacggatatgaggttgcagccgctgaaggggcaggttataatggttggacttccggacggcagaatgcacagaatctagacttgaaccggaatttccctgacctcacctccgaatactatcgtttggctgagaccaggggggctcggtcagaccatatccctatcccacagcattattggtggggaaaagtcgcgccagagaccaaggcgatcatgaaatggatgcaaaccattccctttgtcctttccgcttcactccacggaggggacctagtggtgtcttaccctttcgactttagtaagcatccacaagaagagaagatgttttctccaacaccagacgagaagatgttcaaactgctgtcccgcgcatacgctgatgtgcacccgatgatgatggatcgctctgagaatcggtgcggaggcaattttctaaagcgtggctccattatcaatggcgcagattggtactctttcacaggcggtatgtctgatttcaattacctgcataccaactgcttcgaaataacagtggagctgggatgtgtcaaatttcccccagaagaggccctgtatattctctggcagcacaacaaggaatccctgctcaatttcgtggagactgtgcatcgcggtattaaaggtgttgtgactgataagttcggtaagcctgtgaagaacgccagaatcagtgtgaagggaatcaggcacgacatcacaaccgctccagatggcgattattggaggttgctgcccccaggcatccatatcgtgatcgctcaggcccctgggtacgctaaggtaatcaagaaggtgataatcccagctcgaatgaagcgggctggtcgagttgacttcatcctgcagcctctcggaatgggccctaagaatttcatccatgggctgagaaggactggcccacacgacccactcggaggagccagctccttgggcgaagccaccgagcctgatccacttagggcacgcaggcagccgtccgcagatggcagcaagccctggtggtggtcttactttacatccctcagtacacacagacctcgatggctgttgaagtactag

SEQ ID NO: 10690 - DNA, 279 bp, synthetic construct
  misc_feature 1..279: note = source = /note="Description of Artificial Sequence: Synthetic coding sequence"
  source 1..279: mol_type = other DNA
atgaaactgtgtgttaccgtcttaagtttactggttctcgtagccgctttctgttctctggcgctgtctgcccctatgggaagcgacccacctaccgcgtgctgtttctcctacacggcaagaaaactacccaggaattttgtggtagactattatgagacctcatctctctgttcccagcctgccgttgttggattcttgggtcggaaggggaagcaagtgtgtgcagacccgagtgagagttgggtgcaagaatatgtgtacgacttagagttgtag

SEQ ID NO: 10691 - DNA, 249 bp, synthetic construct
  misc_feature 1..249: note = source = /note="Description of Artificial Sequence: Synthetic coding sequence"
  source 1..249: mol_type = other DNA
atgcgacaacgcctgctgccatcggtgacttctctgttgctcgtggctttactctttcccggatctagtcaggctcgccacgtgaaccattccgctacagaagcactgggtgagctgcgtgaacgggcaccaggacaggggacaaacggtttccaattgctacgtcacgccgtgaagcgagatttattgccacctcgcactccgccataccagggaactggccagcagcaccgtcaaagatgtggatag

SEQ ID NO: 10692 - DNA, 411 bp, synthetic construct
  misc_feature 1..411: note = source = /note="Description of Artificial Sequence: Synthetic coding sequence"
  source 1..411: mol_type = other DNA
atggacaatgttcagccaaagattaagcaccgccctttttgtttctcagtcaagggtcacgtcaagatgctgcgcctggcactgacggtgacttctatgacgtttttcataatcgctcaagccccagaaccctacattgtaataaccggtttcgaggtcactgtgattttgttctttatcctgctgtacgtcctgaggctggaccggcttatgaagtggctgttctggccgttgctggatattattaactccctcgttacaaccgtgttcatgctaatcgtatccgtgctcgcactgattcccgaaacaacaaccttgaccgttggaggaggagtctttgccctggttacagccgtatgttgtctggcagacggcgcactgatctacaggaaattactcttcttgcgctag

SEQ ID NO: 10693 - DNA, 1068 bp, synthetic construct
  misc_feature 1..1068: note = source = /note="Description of Artificial Sequence: Synthetic coding sequence"
  source 1..1068: mol_type = other DNA
atgcagctgacaacctgcttgagagaaactctgtttaccggcgcatcacagaaaacgtctctttggtggctggggatcgcgtcttttggcgtgcccgaaaagctgggttgtgccaacctgccacttaatagcagacaaaaggagctttgcaagcgcaaaccctatttgctcccaagcatccgcgaaggggctagactgggcatacaagaatgcggcagccaatttcgacatgaacgatggaactgtatgattacagctgctgccacaacagctccaatgggtgcgagtccattatttggatacgagctgtcctctggtaccaaggaaactgccttcatctacgctgtgatggctgctggtctggtccattctgtcacacgcagttgtagcgctggtaatatgaccgaatgtagttgtgataccactctacagaatggaggatccgctagcgaaggttggcactggggtggctgttccgacgacgtgcagtatggaatgtggttcagccgtaagtttttggatttccctatcggaaatactaccggaaaggaaaacaaggtgcttttggcaatgaacttacataacaacgaggccggtaggcaagccgtggctaaactcatgagcgtcgactgccgttgtcacggggtttcggggagctgtgccgttaagacatgctggaaaactatgtcctcgttcgaaaagattggccacctgctgaaggacaaatatgagaatagtattcaaatctccgataagaccaagcgcaaaatgagaagaagggaaaaggatcagagaaagattcccattcataaagacgatttgttgtacgtgaataaaagtccaaactactgcgtggaggacaaaaaactagggattcccggtacccagggacgcgagtgtaacaggaccagtgaaggagctgatgggtgtaaccttctgtgttgcgggcgtggctataatacccacgttgtgcgtcatgtggagcgatgcgagtgcaaattcatctggtgttgctacgtacgctgcaggagatgcgagtcaatgacagacgtgcacacatgcaaatag

SEQ ID NO: 10694 - DNA, 2916 bp, synthetic construct
  misc_feature 1..2916: note = source = /note="Description of Artificial Sequence: Synthetic coding sequence"
  source 1..2916: mol_type = other DNA
atgctcaggagaccggcaccagccctggctccagccgcaaggctcttactcgccggactgctatgtggcggaggagtgtgggccgctagagtgaacaagcataaaccctggttggagccaacgtatcatggaatcgttactgaaaacgataatacggtcctgttggaccctccactgatcgctctggacaaagatgcgccactgaggttcgccggtgagatctgcggattcaaaatccacgggcaaaacgtccctttcgatgccgtcgtagtggacaagtccacaggtgaaggggtaatccggtccaaggaaaaattggattgtgaactccagaaagactactctttcactattcaggcatacgactgtggtaaaggacctgatggtactaacgttaagaaatcgcataaggctaccgtccacattcaggtgaacgacgttaacgagtatgcacctgttttcaaggaaaagagctataaggccactgtgattgagggcaagcagtacgactctatcttacgcgtggaggctgtggatgcggattgcagccctcagttcagtcaaatctgctcctacgaaatcattacacctgacgtgcctttcactgtcgataaggacggctacatcaagaataccgaaaagcttaattacggcaaagagcaccagtataaactgaccgtgactgcctatgattgcgggaagaagagagcaaccgaggacgtgttagtgaagatctcaatcaagcccacttgtactcccggatggcaaggttggaacaatcgcattgagtatgaacccggaactggtgccctagccgtcttccctaacattcacctggagacatgtgacgaaccagttgcaagcgtgcaggctaccgtggagctggaaacttctcacatcggcaaggggtgtgacagagacacatatagtgagaagtcactccatagactgtgcggagctgccgctgggaccgccgaactccttcctagtccatctggatctctcaattggaccatgggcttacccaccgacaacgggcatgatagcgaccaggtgtttgaattcaatggtacccaggcggttcgtattccagatggcgtcgtgagtgtgtctcccaaggaaccctttaccatctctgtgtggatgcgtcatggaccattcgggcgtaagaaggaaaccatcctgtgcagctccgacaaaaccgatatgaatagacatcattatagtctgtatgtgcacggctgccgcctgatctttctgtttcgccaggacccgtccgaggagaagaaataccgtcccgcagagttccactggaagctaaaccaggtttgtgatgaggagtggcaccactacgtgctcaacgtcgagttccccagtgtgaccttgtacgtcgacggcaccagccatgaaccgttcagtgtgacggaagattaccccctgcacccttctaagattgagactcagctcgttgtgggagcctgttggcaggaattttccggagtggaaaacgacaacgaaactgagccagttactgttgcttcggcaggcggagatcttcacatgacgcagttttttcggggaaatctggcaggcctaaccctaaggtcaggaaagcttgcagataaaaaggtcatcgattgtctctacacgtgtaaagaaggcctagacctgcaggtactagaagactcgggtcggggtgtccagatccaagcccacccttcgcagctggttctcacactggagggggaagatctgggcgaactggacaaagcaatgcagcatattagctatctaaactcccgacaattccccacaccagggatcaggcgattgaagataactagtaccatcaagtgcttcaacgaagctacatgcatttctgtgcccccagtcgacgggtatgtgatggtgttgcagccagaggagccaaagatctctttaagtggagtccaccacttcgcacgggcagcttccgaattcgagagcagcgagggagtgttcctcttcccagaactgaggattatctccaccatcacacgcgaagttgaacccgagggggacggtgctgaggatcccactgtccaagaatctctggtttccgaggagattgttcacgacctggacacgtgcgaggtcacagtcgagggcgaggagcttaaccacgaacaagaaagcttggaagttgatatggcgcgactgcagcagaaagggattgaggttagctctagcgagttgggaatgacctttactggcgtagatacaatggcctcatacgaagaggttttacacctgcttcggtatcggaactggcacgcacgaagtcttctggacagaaagtttaaactgatatgctccgagttaaatggacggtatatttccaatgaattcaaggtggaggtgaatgtgattcacacggccaatccaatggagcacgctaaccatatggcagcacagccccagtttgtacacccggaacacagaagtttcgtggatctgagtggacacaatttagctaacccgcacccattcgcagtagttccctctacagccacagtggtgatcgttgtatgcgtaagctttctggtgttcatgataattctcggagtctttcgcatacgtgcagcccaccggagaacaatgcgcgatcaggatacaggaaaggaaaatgaaatggactgggacgattccgccctgactattaccgttaaccctatggaaacctatgaagatcagcattcttccgaagaggaagaagaggaggaggaagaggaggagagcgaagacggcgaagaagaggacgatataacctcggcggagtctgaatcctctgaagaagaggaaggcgaacagggcgatccccagaatgccacgagacagcagcagctggagtgggacgacagcacactgtcctactag

SEQ ID NO: 10695 - DNA, 564 bp, synthetic construct
  misc_feature 1..564: note = source = /note="Description of Artificial Sequence: Synthetic coding sequence"
  source 1..564: mol_type = other DNA
atggttgccgcaaccgtagcggctgcctggctgctattgtgggctgcagcgtgcgcccagcaggaacaagatttctatgattttaaagcagtgaatatacggggaaaactggtgtcccttgaaaagtacagggggtctgtgtccttagtagttaacgtggcatccgaatgcggctttacggatcaacactatagagccttgcagcagctccagcgggacctcgggccacaccacttcaacgttctcgcctttccctgcaatcagtttggccagcaggagccagacagcaataaagagatcgagtcatttgcgagacgcacctactctgtgagctttccgatgttttcgaaaatcgcggtgaccggtacaggagcacaccctgcctttaagtatttggcacagacgagtgggaaggagcccacctggaatttttggaagtacctcgtggccccagacggcaaagtggtgggagcctgggatccaacagtgagtgtagaggaagtaaggccacagatcactgccctcgttcgaaaacttatcctcctgaaaagggaggatctgtag

SEQ ID NO: 10696 - DNA, 303 bp, synthetic construct
  misc_feature 1..303: note = source = /note="Description of Artificial Sequence: Synthetic coding sequence"
  source 1..303: mol_type = other DNA
atgtggggattcctggtactcaaggctcgctggctggtgacccctgtgaggacattagctaccgaggcaggccagaagcccagtctacgtggactgcttgacgttgggaacattcagcacagagctgcgcgagctcgtggcttgactcgaggcgtgattagagtgagtcctcaagagcggagccagcagaatcagtctgcgcctaaagggccaactcctagtaccagaccaaaaccccgtacacttggacctcaagctcactctcttgctctgcaatctgtcgacctcctttttcgaccgtag

SEQ ID NO: 10697 - DNA, 2352 bp, synthetic construct
  misc_feature 1..2352: note = source = /note="Description of Artificial Sequence: Synthetic coding sequence"
  source 1..2352: mol_type = other DNA
atgcgttggcagtgcggaacacgcttcagaggtctaagaccagcagtggccccatggacggccctgctggctctaggtcttcccggatgggtccttgccgtctctgccaccgccgcagccgtggtgccggagcagcacgctagcgtggctggccagcaccccctggactggctgttaactgaccgcggacctttccacagggcccaagaatatgcggacttcatggaaaggtaccggcagggattcactactcgctacaggatctaccgcgagttcgcacgatggaaggtaaacaacctggctcttgaaaggaaagacttcttctctcttccgttgccactggcccctgagttcatccgtaacatcaggttactggggcgaagacctaacctgcaacaagttactgagaacttgatcaagaaatatggaacccacttcctcctgagcgccacactggggggtgaagagtcgctgacgatcttcgtggataaacagaaactgggacgtaagacggaaacaaccggcggagcttcaattattggaggcagcggcaatagtactgctgtgtcgctggagacactgcaccaattggccgcaagctactttattgatagagaatccacattaaggcgactccatcacattcaaattgccaccggcgcaattaaggtgaccgagacacgtactggcccattgggctgttctaactacgacaacctcgattccgtttcatccgtcctagtacagtctcccgaaaataaagtgcaactgctgggcctccaggtgctacttccagagtacctgagagagcgatttgtagcagctgcacttagttatatcacatgcagttctgagggagagctggtgtgtaaagaaaacgattgttggtgtaagtgctctcccactttccccgaatgtaattgtcctgacgccgatatacaggctatggaggatagcctcctccaaatacaggatagttgggccacccataataggcagtttgaggagagcgaagaattccaggccctgcttaagaggttgcctgacgatagatttctcaacagcaccgcaatcagccagttttgggccatggacactagcctgcaacaccgctaccagcaactgggcgctggcctgaaggttctgttcaagaaaactcaccggatcctgcggaggttgttcaacctgtgtaaaagatgtcacagacagccacggtttaggcttcctaaggagcgatcacttagttactggtggaatagaatccagagtctgttgtactgtggagagtctacattccctggcacatttctggagcagagccacagttgtacctgtccgtatgatcaaagtagctgtcagggcccaatcccgtgcgccctgggggagggtccggcttgtgcacattgcgcccctgacaattcgacacggtgcgggtcatgcaacccgggatacgtgttggctcagggactgtgccgacctgaggtggccgaatctctggagaattttctaggtcttgagacggacctgcaggatttggaactcaaatatctgctgcagaaacaggattcacggatagaagttcactctatcttcattagcaatgatatgaggcttggctcctggtttgatcccagttggcgtaagagaatgctgctcacgcttaagagcaataaatataagcctgggctcgttcacgttatgctcgctttgtcccttcagatatgtcttactaaaaactctacgctcgaaccggtcatggccatctacgtaaacccgttcgggggtagtcactctgaatcctggttcatgcctgtgaacgagggctctttccccgattgggagaggactaacgtggatgccgcagcccaatgccagaactggacgattaccctagggaatcgttggaagacgtttttcgaaaccgtccacgtgtatttgcggtcccgaattaagtccttggacgattcttcaaacgagaccatctactatgaacctctagagatgaccgacccgagcaagaacctcggctacatgaaaattaatactttgcaagtcttcggctatagcctgccttttgatccagatgctatcagggatcttatcctccagctcgattacccttatacacagggtagtcaggatagtgctctcctgcagcttatcgagctgcgcgatcgggtaaatcagctgtcaccaccagggaaagtcaggctggatctctttagttgcttgttgcgacacagactgaagttggctaacaacgaggtcggtcgaatccagagctccctgcgggctttcaactcaaaactgccaaatcccgtggaatacgaaaccggaaagctgtgttcatag

SEQ ID NO: 10698 - DNA, 2016 bp, synthetic construct
  misc_feature 1..2016: note = source = /note="Description of Artificial Sequence: Synthetic coding sequence"
  source 1..2016: mol_type = other DNA
atggctcagctgtttctccccctgctagcagcactggtccttgcccaggctcccgcagcccttgctgatgtgctcgagggagattcctcggaggatagggcctttcgggtgcgcattgctggggatgcccctctgcagggggttcttgggggtgccctaacgatcccctgccacgtacactaccttcgcccacctcctagccgtcgggctgtgctgggatcccccagagtgaagtggaccttcctctcgcgcggacgcgaggccgaggtgttggtagccaggggcgtcagggtgaaggtgaacgaagcgtatcgcttccgtgtggcactaccggcatatcccgcttcattgacggacgtctcacttgcacttagtgagctccgcccaaacgactccggtatatatcgttgtgaagtgcagcacggcatcgacgacagctctgacgcagttgaggtgaaggttaagggcgttgtgttcctgtaccgggaaggatctgccagatacgccttctcattctcgggggcacaggaggcttgtgcaagaatcggagcccatattgcaacacccgagcaattatacgccgcttacctcgggggttacgaacagtgcgacgccggatggctatccgaccaaaccgtgcgctatccaattcagaccccgagggaggcctgttatggggatatggatggatttcccggagtcagaaactacggggtggtggaccccgatgacctttacgacgtctattgttacgctgaggatcttaatggcgaactgtttcttggcgacccgcctgaaaagttgacactggaagaagctagggcctactgccaggagcgaggcgctgagatagcaactacaggacagttgtatgctgcttgggacgggggacttgaccactgttcccccggatggctggccgatggctctgtgcgatatcccattgtgaccccgagccagaggtgtggcggagggttgccaggagtgaaaaccttattcttgttccccaaccagaccggttttcccaacaaacacagtaggttcaatgtgtactgtttccgggactcagctcagccctccgctatccctgaggcttccaacccagcctccaatcctgctagtgacggtctggaggccatcgtgaccgtgacggaaaccctggaggagttgcagttgccccaagaagccaccgaaagcgagtcacgcggagctatctacagtattccaatcatggaggacggcggtggtggctctagcactcccgaagacccggctgaggcaccacgaacgctcctcgaatttgaaacccagagcatggtccccccaacaggcttttcagaggaggagggaaaggccttggaggaggaagagaagtacgaagatgaagaggagaaggaggaggaggaagaggaagaggaggttgaagatgaagctctgtgggcctggcctagcgaactaagcagtcccggaccagaagccagcctgcccacggaacctgccgctcaggaagagagcctgtctcaggcacccgcacgcgctgtgctccaaccaggggcatctcccctgcctgatggggagtctgaagcaagccgccctccccgtgttcatggacctccgactgagaccctacctactcctcgggagcgaaaccttgcctccccctccccaagcaccctcgtggaagcgagggaagtaggcgaagcaactggtggccctgaactttccggcgtgcctcggggagaatcggaagagacgggcagcagcgagggcgctccttccctactgcccgcaacacgagcaccggaggggactagggagctggaggcgccaagcgaggacaacagcggccgaacagctccagctggcacaagcgtccaagctcagcctgtcctgccaactgactcggcttcccgcggaggtgttgccgttgtccccgcttcaggcaacagtgctcagggaagtacggccctgagtattctgctgctttttttcccattgcaactgtgggtgacctag

SEQ ID NO: 10699 - DNA, 375 bp, synthetic construct
  misc_feature 1..375: note = source = /note="Description of Artificial Sequence: Synthetic coding sequence"
  source 1..375: mol_type = other DNA
atgtataagctcgccagttgctgtctgttgtttatcggtttcctgaatcccttactgtcacttcccctgctggacagcagggagatttctttccagttgtcggcccctcacgaggacgctcggctcactccagaagaactagagagagcttcgttgctgcagatattacctgagatgcttggtgccgaaaggggcgacatcttgaggaaggccgattcttcaactaacatttttaacccacggggaaacctgcggaaattccaggacttttcaggtcaagaccctaatatattactctctcacctgctagctcgtatttggaaaccgtacaaaaagagagaaactccggactgtttttggaagtactgcgtgtag

SEQ ID NO: 10700 - DNA, 1326 bp, synthetic construct
  misc_feature 1..1326: note = source = /note="Description of Artificial Sequence: Synthetic coding sequence"
  source 1..1326: mol_type = other DNA
atggaatttgagttcgatcggctgcgcgcattccaggcaatgcaggttcactgtaataacatgcacactctgggtgctcggcttcctggtggtgtggaatgtcgattccgccgaggacccgctatggcctgggaaggcgaaccaatgcgccataacctgggaggaaatctcggcgatccgcgtgcaagggctgtatcggtccccctcgggggtcgggtggctagattcttacagtgccgattccttttcgctgggccttggctcctcttcagcgaaattagctttatcagcgacgttgtcaacaactcctctcctgccctggggggaaccttcccccctgctccctggtggcctcccggtccaccaccaacaaacttttcaagcctcgagctggaacccaggggacagcagccggtagccaaagctgaggggagccctaccgcaatcctaatcggctgccttgtggctatcatcttgctgctgctcctgataattgccctgatgctgtggaggttacactggaggcgattgttgtctaaggtgcttgaaagtcacccccgaacccggagccccggactcgtggggatccggcctacacctttgcccgtttctcctatggcactcaggtgctgcagccctattcagccaactgcgtctttctggccacttacccctgtccccttggaggcgcgtgctccgcctcaccccccaggcccaaaccctcccaccccccgtggtgtgactggtgggaacacatatgccgtccctgccttaccacccggagcggtcggcgatggccctccccgtgtagattttccaagaagtcgcttgcgcttcaaggagaaacttggtgaggggcagtttggcgaagtccacctttgtgaggtggacagcccacaggacctggtgagcctggactttcccctgaatgtaagaaagggtcaccctctgctagttgcagtgaagatcctgcggcctgacgctaccaaaaacgcacgaaatgattttctcaaagaggtgaagatcatgtcacgtcttaaagatcccaatatcatccgcctacttggtgtctgtgtgcaggacgaccctttatgtatgatcaccgactacatggagaatggtgatcttaatcagtttctttcagctcaccagctggaggacaaggctgctgagggcgcaccaggagacggtcaggctgcccagggtccgaccatctcctaccctatgctgctgcacgtggctgcccagattgcttctgggatgcgctacttagctactctaaactttgtgcacttctggggggagaggcatcgctttctgcattag

SEQ ID NO: 10701 - DNA, 1950 bp, synthetic construct
  misc_feature 1..1950: note = source = /note="Description of Artificial Sequence: Synthetic coding sequence"
  source 1..1950: mol_type = other DNA
atgcaacaggatggcctgggtgtagggaccagaaatggcagtggtaagggtcggagcgttcatccaagctggccctggtgcgcacctcgtcccctacggtacttcggacgggacgctcgagctcgacgggctcagactgccgcaatggcccttctggccggaggtttgtctcgcggtctcggttcacatccagcggctgctggacgggacgcagtggttttcgtttggctgcttttgagtacctggtgcaccgctcctgctcgggcaatccaggtcaccgtctcaaacccataccatgtggtaattctctttcagccagttaccttgccctgtacttatcaaatgacgtctactcctacacagccaatcgtgatttggaagtacaagtcattctgcagggaccgcattgccgacgcattctctcctgcctcggtggataaccagctaaacgcccagcttgccgctggaaacccaggctataacccttacgtggaatgccaagactcagtgcggacggtgagagtggtcgctactaagcagggaaacgctgttacgctgggagattactaccaggggagaaggattacaatcacaggaaacgcagatctcacattcgaccagacagcctggggggactcaggcgtctattactgttctgtggttagtgcacaagacttgcagggcaacaacgaggcatatgccgaacttatcgttttggggaggacgtctggcgtggctgagctgctgcctggattccaagccggacccatagaggattggttattcgtggtcgttgtgtgtctggccgcattcctaattttccttttgctcggcatttgttggtgccagtgctgtcctcatacttgctgctgctatgtcagatgcccatgttgcccggataaatgttgctgtccggaggctctttacgccgcagggaaagccgcaaccagcggcgtcccctctatttacgcacccagcacctatgcccaccttagccctgccaagacgccaccgcctcccgctatgatccccatgggacccgcttataacggctacccaggcggatacccaggcgatgtggaccggtcttcgagcgctggagggcagggctcatatgtcccattactccgggacaccgacagcagtgttgcctctgaagtgagaagcggctacaggatacaggcatcccagcaagacgactctatgagggtactgtactatatggagaaagaactggcaaacttcgacccatcacgtccaggtccaccctcagggagagtagaacgcgctatgtccgaggtcaccagcctgcatgaagacgattggcgctcacggcctagccgtggccctgcccttacaccaattagggatgaggagtggggaggtcacagcccgagaagtccccgagggtgggaccaagaacccgctcgggagcaggccggtggcggatggagggctagaaggccccgagccagaagtgtggatgctctggatgacctaactccaccgtccaccgctgagagcgggagccgctccccgactagcaacgggggtagaagccgggcttatatgccccctcggagccgctctagagatgacctgtacgatcaggatgattctcgagatttcccaaggagccgcgaccctcactatgacgattttcggtccagggagcggccaccagccgatcctcgctcacaccaccatcggacgcgcgatccccgtgacaatggcagtagatcgggcgatctgccgtatgatggcagactgttggaggaagctgtcaggaagaagggctccgaggagaggaggaggccacataaggaggaagaagaggaggcttattatccccctgcgcctcccccatatagtgagaccgacagccaagcatcacgggagaggcgtttaaaaaagaatctggcactgtcccgagaatctctcgttgtgtag

SEQ ID NO: 10702 - DNA, 402 bp, synthetic construct
  misc_feature 1..402: note = source = /note="Description of Artificial Sequence: Synthetic coding sequence"
  source 1..402: mol_type = other DNA
atgtcagaacgagtagagaggaactggagcactggcggttggttactggctctctgcctcgcctggctgtggacccacttgaccttggcagccctgcagccacctaccgcaactgttctagtccaacaggggacatgcgaggtgatcgcagctcaccggtgttgtaaccggaacaggatcgaagagaggtctcagactgtaaaatgttcctgctttagcggccaagtggctggtacgacccgcgctaagccttcgtgcgtggatgcgtctatcgtcctgcagcggtggtggtgccaaatggagccttgtctgcccggagaggaatgtaaggtactgcctgatttgtcagggtggtcatgcagctcaggacataaagtcaagactacaaaggtcacccggtag

SEQ ID NO: 10703 - DNA, 699 bp, synthetic construct
  misc_feature 1..699: note = source = /note="Description of Artificial Sequence: Synthetic coding sequence"
  source 1..699: mol_type = other DNA
atggtagccgcaaacacaagggccccagaagatacccgggctcctgccggacccaaaccgtcatcttgcgaatgggccgtctgctgggcacccgcacgctgtcggatcagcgcaaccgcttgtgggaattcgtgggaccgccctgcaggacggacgcaactgctgtggactccggctgcacctaccgccatggccgaagtggggccaggacacacacccgcacatcccagccaaggagctgtcccacccagtcgcgcagcagcagagccacacctgaagcctagcccctccgagctgcaaaccgctggcccagccgctacaatccccgctcggctctgtactaggaaacccaggctcgtctacacacaatgttggtatgtgaaggagcccaaacaccccgagatcgttaccccgtggggtaccgccgctcggcattcttggagacagcatcagatgctgtccgcaagcgaaagacggtgtctgcctcgggacgtggagcaaaagctgggcccagagcatactgggccttgtcttgacgaacaggggcgagaggctgagctggccaggtccggcccttcagccgctgggcctgtgcgattgaaacctggcctggtccccggactattcctgctgtcctgtacaacctcgcctagcacttgtctcccagtgggccaagaaggcgaacgaggcatgctgtag

SEQ ID NO: 10704 - DNA, 711 bp, synthetic construct
  misc_feature 1..711: note = source = /note="Description of Artificial Sequence: Synthetic coding sequence"
  source 1..711: mol_type = other DNA
atgtgtgtgacatatcacaacggtactgggtattgtaagtgcccagagggattccttggcgaatactgccaacaccgggacccatgcgaaaagaaccggtgccagaacggcggaacgtgtgtcgcacaagcaatgttaggaaaagccacttgccgatgtgcctcaggcttcacaggagaagactgccagtactcaaccagtcatccgtgtttcgtctccagaccgtgtctgaatggcggaacatgccatatgctctcgcgggacacatacgagtgcacttgccaggtgggcttcacaggcaaagagtgtcagtggactgacgcctgcctgagccacccctgcgcaaacggtagcacttgtaccaccgtggccaaccagttttcctgtaagtgccttactgggtttacagggcagaaatgcgagacagacgtgaacgagtgcgacatacctggacactgtcaacacggcggaacatgtctaaatctgcccggttcataccagtgtcagtgtttacagggcttcacaggccaatactgcgactctctttatgtaccatgcgccccttcaccatgcgtaaacggcggaacgtgccgccagactggtgactttacctttgagtgcaactgcctccccgaaactgtgaggagaggaaccgaactgtgggaacgcgaccgcgaggtgtggaatggcaaagagcacgatgagaattag

SEQ ID NO: 10705 - DNA, 204 bp, synthetic construct
  misc_feature 1..204: note = source = /note="Description of Artificial Sequence: Synthetic coding sequence"
  source 1..204: mol_type = other DNA
atggacaatgtccaacccaagattaagcatcggcctttctgcttctcagtgaaaggccatgttaagatgctgcgactcgtgtttgcactagttaccgctgtttgttgtctcgctgacggcgctttaatctatcgcaagctcttgtttaatcccagcggcccttaccagaaaaagcccgtgcacgagaagaaagaggtcctctag

SEQ ID NO: 10706 - DNA, 75 bp, synthetic construct
  misc_feature 1..75: note = source = /note="Description of Artificial Sequence: Synthetic coding sequence"
  source 1..75: mol_type = other DNA
atgctcgtggatgggccatcagagagacctgctctgtgttttctgctgctggcagttgccatgtcatttttctag

SEQ ID NO: 10707 - DNA, 3345 bp, synthetic construct
  misc_feature 1..3345: note = source = /note="Description of Artificial Sequence: Synthetic coding sequence"
  source 1..3345: mol_type = other DNA
atgctcgccagctcttctcggatcagggctgcctggacccgcgctcttttgctgccattgctcctagcgggaccagtcgggtgcctgtctagacaggagctctttccattcgggcctggccagggagatctggagctggaagatggtgatgattttgtcagcccagcactggagctttctggagccctgagattctatgacagatccgatattgacgctgtgtatgtcacaactaacggaataatagcaacgtccgaaccccctgcaaaagaaagccacccaggcctcttcccacccacttttggcgcagtggcaccattcttagctgatttagacacaacggacggactgggcaaggtgtattatagggaagatctttctccttccataacccaacgggctgccgagtgtgtgcacagaggattccccgaaatttccttccagccttcctctgccgtggttgtgacatgggaatccgtcgccccataccaggggcctagtagggacccggaccaaaaggggaagagaaacacgtttcaggcagttctggcttctagcgatagctcctcctatgctatcttcttataccctgaggatgggttgcagttccataccactttctccaagaaagagaataaccaagtcccggcagtggtggcattcagccagggatcagtgggcttcttgtggaagtctaatggtgcttacaacatctttgccaatgatagagagtctgtggagaatctggccaagtcttccaactccgggcagcagggcgtttgggtctttgagatcgggtcccccgctaccactaatggcgtagtacccgctgacgttatcctgggaacagaggacggagcagagtatgatgatgaggatgaggactacgaccttgcaacaaccagactgggcctcgaagatgtgggcaccacccccttctcctacaaagcgctccgcaggggaggtgccgacacctattctgtaccatccgtgctgtctccgcgacgcgctgcaaccgagagaccactcgggccacctaccgagcggacgaggagtttccagctcgccgttgagacctttcaccagcagcacccacaagttatcgatgttgatgaggtggaggagactggcgtggtattcagttataacacagactccaggcagacctgtgctaataatcgccatcagtgctcagtacacgcagagtgcagggattatgctacgggattctgctgcagttgtgtggctgggtatacaggaaacggcagacaatgtgtggctgaaggcagcccacaacgcgtcaatggaaaggtcaaaggtcggatattcgtggggtcttcacaggtcccaatcgtgtttgagaataccgatctgcactcttacgtagtgatgaatcatggtcgaagctatactgccattagcacaattcctgagaccgtcggctacagcctgctgcctttagcgcctgttggagggatcattggctggatgttcgctgtggagcaggatgggtttaaaaacggcttcagcattaccgggggagagtttactcgccaagcagaggtgaccttcgtgggccacccaggaaacctggtgataaagcagagattcagcggtattgatgaacacggccacctgactattgacacggaattagaggggagagtacctcagattccctttggaagttcggtgcatattgagccatatactgaactctaccactactccaccagcgtcattacatcctcctctactagggagtatacagtgacggaacccgagcgggacggcgcatcaccgtcccgtatatacacatatcaatggagacagactatcacattccaggaatgcgttcacgacgattcccggcctgcactgccttctacacaacaactcagtgtcgatagtgtgttcgttctatataaccaggaagagaagattctgcgatatgccttaagcaatagcatcggccctgttagagagggaagtcccgacgctctgcaaaacccttgctatatcgggacccacggctgtgataccaacgctgcctgtaggcccggacccagaacacaatttacttgtgagtgttcaattggatttcgtggtgatggcaggacttgttacgaggtagaaaaaacgcggtgccagcatgagcgagaacacattttgggagcagctggagccaccgacccccagcgcccaatcccaccagggttgtttgtgccagagtgcgacgcccacgggcactatgcccctactcagtgccatggttctacaggctactgttggtgcgtagacagagacggcagggaggttgagggcaccaggacaagaccaggaatgaccccaccctgtctgtccaccgtggcccctcctattcatcaggggccagctgtgccaaccgctgttatacctcttcctccaggcacgcacctcctgtttgcccaaaccggtaagatcgaacgcctcccattggaaggtaatacaatgagaaaaaccgaagctaaagctttcttacatgtacccgctaaggtcatcattggcctagccttcgactgcgtcgataagatggtgtattggacagatatcaccgagccctctattggcagagcctcattacacggcggagaacccacaacaatcatacggcaagacctgggcagtccagagggcattgcggttgatcacctcggcaggaacatattctggactgactcaaaccttgatcgcatagaggtagctaagcttgatggtacacagagacgtgtgctatttgaaaccgatcttgttaacccgaggggaatagtgactgactcagttagggggaacctgtattggaccgactggaatagagacaaccccaagatcgagaccagctacatggatgggaccaatcgacgcatcctggtccaggacgacctgggactaccaaacggacttacctttgatgccttctccagccagctttgttgggtcgacgctggcacaaacagagctgagtgccttaatccgtctcagccaagtaggcgaaaagccctggagggattgcaatatccttttgcagtgaccagctacggcaaaaatctgtattttaccgactggaaaatgaattccgttgtcgccctcgacctggcaatatctaaagagaccgacgccttccagccccacaaacagacgagactgtacgggattactactgccctgtctcagtgtccacaagggcataactactgtagtgtgaacaacggcggatgtacccatctgtgtctcgccacaccagggtcccgaacgtgtaggtgcccggataatactctgggcgtggattgcatagaacaaaaatag

SEQ ID NO: 10708 - DNA, 2172 bp, synthetic construct
  misc_feature 1..2172: note = source = /note="Description of Artificial Sequence: Synthetic coding sequence"
  source 1..2172: mol_type = other DNA
atggggtccagatgcgctctcgccctggccgtgttgtccgccctgttgtgccaagtgtggtcgtctggggtgttcgagcttaagttgcaggagttcgtgaataagaagggactcttaggaaacaggaattgttgcagggggggagctggccctccaccttgcgcctgtaggacttttttccgggtgtgtctcaaacattatcaggcatcagtatccccggagcccccttgtacttacggcagtgccgtgacacctgtgctgggagttgactctttttctctgccggatggcggtggcgcagatagtgctttctctaatcctattagattccccttcggatttacctggccaggaactttctctcttattattgaggcactacacacggattccccagacgatctcgccacggaaaatcccgagcgattaatttcccggctggcgacacagagacatctgacagtgggggaagagtggtcacaggatctgcactccagtggtcgcactgatctcaaatatagttacaggtttgtgtgcgacgaacactactatggagaaggatgtagcgttttttgccgccctagagacgacgccttcggtcatttcacctgcggtgagcggggagagaaagtttgtaatccaggttggaaaggcccttactgcaccgagcccatttgcctgcccggatgcgacgaacagcatggcttctgcgataagcctggcgagtgtaagtgccgggtgggatggcaggggcgatactgtgacgaatgcatcaggtatccaggatgtctccatgggacctgtcagcagccttggcagtgtaactgtcaggaaggctggggcggtcttttttgcaatcaggatttaaattactgtacgcaccataaaccttgcaaaaatggagccacttgtacgaacactggacaaggaagctatacgtgcagctgcagaccaggctacactggggctacctgcgaactaggaatcgacgagtgcgacccctctccctgtaagaatggtggctcctgcacagacctcgaaaactcctacagctgtacctgtccacctggattttacggcaagatttgtgagttaagtgccatgacatgtgccgatggaccgtgttttaatggaggcaggtgcagtgattcgcccgacggcggttacagctgcaggtgcccagtgggatacagcggatttaactgcgaaaagaagattgattactgtagcagcagtccatgcagcaacggcgcaaaatgtgtggatttgggcgatgcatatctgtgccgctgccaggcaggttttagcggcaggcactgtgacgacaacgtggacgactgcgcctcctccccgtgtgctaacggcggaacctgtagagacggggtcaatgacttctcatgcacctgcccccctggttatacgggacggaattgcagtgcaccagtgtcccgctgtgagcacgctccatgtcacaatggcgctacctgtcacgagagagggcataggtatgtatgtgagtgtgcgcgaggttacgggggaccgaactgccagtttctcctgcctgaactacctcccggacccgcagttgtagacctgactgagaagctcgagggtcaaggcggtcccttcccatgggtggcggtttgtgccggagtgattctcgttctgatgctgcttcttgggtgtgccgcagttgtggtatgcgtcagacttaggctgcaaaagcataggccgccagccgacccctgccgcggagaaaccgaaactatgaacaatttagcaaattgccagcgtgagaaggatattagcgtctccatcattggagcaacacagatcaaaaacaccaacaagaaggccgacttccacggagaccactccgctgacaaaaatgggttcaaagctagatacccagccgtcgattacaatttggtgcaggatttgaaaggggacgatactgcagtgcgcgatgcccactccaaaagagataccaaatgccaaccccaaggctccagcggggaggagaaggggactccaacgactttacgaggcggagaggcatccgaacggaaacgccctgacagcgggtgttccacatcaaaggataccaagtatcaaagcgtctacgttatctccgaggagaaggacgagtgcgtcatagcgacagaagtttag

SEQ ID NO: 10709 - DNA, 981 bp, synthetic construct
  misc_feature 1..981: note = source = /note="Description of Artificial Sequence: Synthetic coding sequence"
  source 1..981: mol_type = other DNA
atggctgcccctgcaagtgtcatggggcctctgggcccaagtgcgctgggcctgctgctcttactactggtcgtggccccaccacgcgttgctgccctagttcataggcagcccgagaatcaagggatctcactgactggttccgtggcatgcggaagaccctctatggaggggaagatccttggcggagtccctgccccagaaaggaaatggccatggcaggtcagtgttcactacgccggactgcatgtctgtgggggtagcatcctcaatgaatattgggtcctgtcagctgcacactgtttccaccgagacaagaacattaagatctatgatatgtatgtcggccttgtgaatctgcgagtggccggaaaccacacccagtggtatgaagttaatagagtcattctccatccaacttatgagatgtatcacccaattggcggagatgtggcactggtacagttgaagactagaattgtcttcagcgaaagtgtgctaccagtttgtctcgctacacccgaggtaaacctcaccagcgccaattgctgggctacaggatggggtctcgtatcaaagcagggagagacctcagacgagttacaggagatgcagttaccattaatcctggaaccgtggtgtcacctgctgtacggacacatgagctacatcatgccggacatgttgtgcgcaggtgacattcttaatgcaaagaccgtctgtgaaggggatagcggcggaccactcgtgtgcgaattcaacagatcatggctccagattggcattgtcagttggggtcggggatgctccaaccccctttacccaggagtctacgcctctgtgtcatatttctctaagtggatctgtgacaatattgaaattacccccacgcccgctcagccagcccctgctctgtcgccagccttgggccctacccttagcgtcctgatggccatgttggccggatggagtgttctgtag

SEQ ID NO: 10710 - DNA, 1596 bp, synthetic construct
  misc_feature 1..1596: note = source = /note="Description of Artificial Sequence: Synthetic coding sequence"
  source 1..1596: mol_type = other DNA
atgtctcttgcagcctattgtgtaatctgctgtcgccgtatcggcacaagcacatcacctcctaaatcgggaactcactggcgggatataaggaatatcatcaagttcacaggcagcttaatcctcgggggatccctgttcctgacgtatgaggtgctggccttgaaaaaagctgtgactcttgatacgcaggtcgtggagcgtgaaaagatgaagtcttatatttatgttcacactgtaagcttggacaagggagagaaccacggcattgcctggcaagccaggaaagagctgcacaaagccgtaagaaaggtcctcgcaacatcggccaaaatccttcggaatccctttgccgaccccttctctactgtcgacatcgaggatcacgaatgcgccgtttggctgctgctccggaaatcgaagagcgacgataagacgactcgtctggaggctgtgcgtgagatgtccgaaacgcatcactggcatgattaccagtaccggatcatcgcccaggcttgtgaccccaagacactaattgggcttgcccgttccgaagagagtgatctcagattcttcctgcttcccccacccttgccttcactcaaggaggactccagtaccgaggaggagctgagacagctgttggcttccctgcctcagaccgaactggacgaatgtatccagtacttcaccagcctggccctgagcgaatccagtcagagtctcgcggctcagaaaggcggattgtggtgcttcgggggaaatggcctcccctacgccgagtcttttggggaagtcccatccgcaacggttgaaatgttctgcctggaagctatcgtgaaacacagcgagatcagcacccactgcgataagatcgaggcaaatggaggtctccagttactgcagaggctgtatcgcttgcacaaagactgccccaaagtccaacggaacataatgcgcgtgatcggtaatatggcccttaacgaacatctccattccagcattgtgcgttcaggttgggtatcaataatggccgaggctatgaaatctccacacatcatggaaagttcacatgctgccagaattctggctaatcttgaccgggagacagttcaggaaaagtaccaagacggggtgtatgtgctgcatccccagtatcgtactagccaacccattaaagctgatgttttgtttattcacgggttgatgggggcagcgttcaagacttggcgccaacaggactccgaacaagccgtgatagaaaagcccatggaagatgaggacaggtataccacatgttggcctaaaacatggctcgctaaagactgccctgcgttgcgcataatctcagtggagtacgacacaagccttagtgattggcgcgctagatgccccatggaaaggcgtagtttgttatcaatcagttccggtatcgtggaggggttggagtctccactccacagcgaggcgaccaactttttggggtcatcggagctgctcgtgcttggtattggccagtggttcggttatcatatcgcctgggaagtattcctttcaaaacgctgttgctggaaacccttgcgcagccagaaatag

SEQ ID NO: 10711 - DNA, 1596 bp, synthetic construct
  misc_feature 1..1596: note = source = /note="Description of Artificial Sequence: Synthetic coding sequence"
  source 1..1596: mol_type = other DNA
atgagcctcgctgcatactgtgtgatttgctgccgccgaattggcacttctacctccccaccgaaaagcggcacccactggcgtgacataagaaacatcataaaattcacaggctctttgattctggggggttcactgtttcttacctacgaggtgctggcactgaaaaaagccgttaccctcgatactcaggtcgtcgagcgggagaagatgaaatcttatatatacgttcacacagtgagtctcgataaaggcgaaaaccacggaatcgcctggcaagctagaaaggagctacacaaagctgtgcggaaagtgctggctactagtgcaaagatactgcgaaatccgtttgccgatcctttctccaccgtcgatatcgaagatcacgagtgcgctgtctggctgctcctgcggaagagtaagagcgatgacaagactacgcggttagaggctgtgcgagaaatgagtgagacccatcattggcacgactaccagtatagaatcattgcccaagcgtgcgatccgaagacgctgattggcctggcacgcagcgaagagagcgatctgcgtttcttcctgttgccaccgcctctgccaagcctcaaggaggactcctcgactgaagaggaactgcggcagttgctagctagcctgcctcagacagaactggacgagtgcattcagtactttacgagtcttgccctgtcagagagtagtcagagccttgccgctcagaagggcggtctgtggtgcttcggaggtaatggcttgccttacgcagagagcttcggcgaagtgcctagcgctactgtggagatgttctgtctcgaagcaatcgtcaaacattctgagatatccactcactgcgataagattgaggccaacgggggactccagctgttacagcggctctacagactgcacaaggactgtcctaaagtgcaacggaacataatgagagttatcggaaatatggccctgaacgagcacctgcattctagcatcgtccggtccggatgggtttccattatggccgaagccatgaagtcgccacacataatggagtctagtcatgccgctagaattctcgctaatctcgatcgggagactgttcaggagaagtatcaggacggcgtgtatgttttgcaccctcagtaccgcacaagccagccaatcaaggccgatgtgctgtttattcacgggctgatgggtgcagcctttaagacctggcgccagcaggacagtgaacaggccgttattgagaagcccatggaggacgaggaccgctataccacgtgctggcccaagacctggctggcgaaggactgtcccgcactgaggatcattagcgtggagtatgatacatctctgtcagactggcgcgctcgctgcccaatggaacggcgtagcttgctgagcatatcatccggcattgtagaagggctggagagtccactgcattcagaggctaccaactttctcggatccagtgaacttctggtgcttggcattgggcagtggttcgggtaccacatcgcatgggaagtgttcctgagtaaacgctgctgttggaagcccctgaggtctcagaaatag

SEQ ID NO: 10712 - DNA, 1965 bp, synthetic construct
  misc_feature 1..1965: note = source = /note="Description of Artificial Sequence: Synthetic coding sequence"
  source 1..1965: mol_type = other DNA
atgtctctggctgcctactgcgtgatctgttgtaggaggatcggaaccagcacgtccccacccaaaagtgggacacactggagagacatccgaaatattatcaaattcaccggctctctcatattagggggttccctgtttctcacatatgaggtgctcgcactcaagaaggcagttacactagatacacaagttgtcgagcgggagaagatgaagtcatacatttacgtacataccgtaagtctcgacaagggcgaaaaccatggtatagcctggcaagccaggaaggagctgcacaaggcagtccggaaggtcctggccacctccgctaagattctgcggaatcctttcgcagaccctttctccactgtggacattgaagaccacgaatgcgcagtgtggctgttactaaggaagtcaaaatccgacgataagactaccaggctcgaggctgtgagagaaatgagcgaaacccatcactggcatgactatcaatatcgcattatagcccaggcctgcgatcctaagacactcatcggcctggctcgtagtgaagaatccgaccttcgcttcttcctgctgcccccacctttgccaagcttgaaggaagacagctcaaccgaggaagaactgaggcagttgttggcctctcttccccaaaccgaactggacgagtgtatccagtactttacctctctcgctctgtccgagtcctcacagagtctggcggcacagaaaggaggactctggtgttttggagggaacggcctaccatatgcggagtcctttggcgaggtgccttctgccacggtcgagatgttttgtttggaagccattgttaagcattccgaaatttctactcattgcgacaaaatcgaggccaatggtggcctgcaattgctacaaaggttgtaccgactgcataaggattgccccaaagttcagaggaacattatgagagtcatcgggaatatggctcttaatgagcacctgcattctagcatcgttcggagcgggtgggtgtccattatggctgaagcaatgaaaagcccacacattatggaaagttcccatgcagcccgtattctagccaatttggaccgggaaaccgtgcaggaaaagtatcaggatggggtctatgtgcttcacccccaatatcgtacatcacagccaatcaaggccgatgtactctttatacatggactgatgggagcggctttcaaaacttggcgtcagcaggattctgagcaggctgtgatcgagaagcccatggaggacgaggaccgttataccacatgttggccgaagacctggctggcgaaagattgcccagcacttagaattatcagtgttgaatacgacacttctctcagcgactggagggcccgttgccccatggaacggaaatccatagctttccggagcaacgagctactgcgcaaattgcgtgccgcaggtgttggggaccgcccagtggtctggatttctcactcaatgggcggactgctcgtgaagaaaatgctgctggaggccagcaccaaacccgagatgagcaccgtcattaataatactcggggaatcattttttattcagtaccgcatcatggaagtcgcctggccgagtactcggtaaatattcgatacctgctattcccatccctggaagtcaaggagttgagcaaagattcaccggctctcaagaccctacaggatgacttcctggagtttgctaaggacaaaaactttcaagttcttaattttgtggagaccctgcccacatacatcggctccatgattaagctacacgtagtgcctgtcgaaagcgctgatcttggcatcggtgatcttatcccagtggatgtaaatcacttgaatatttgtaaaccgaaaaaaaaggacgcctttctgtaccagaggaccctgcaatttatacgtgaagccctggccaaggatcttgagaactag

SEQ ID NO: 10713 - DNA, 1509 bp, synthetic construct
  misc_feature 1..1509: note = source = /note="Description of Artificial Sequence: Synthetic coding sequence"
  source 1..1509: mol_type = other DNA
atggcacagagatgcgtgtgcgtgctcgctctggttgctatgctgcttctggtatttcccactgtcagcaggtccatgggacccaggtctggcgaacatcaaagagcatcaagaatccctagccaattttccaaagaagagcgtgtggcaatgaaagaagcactgaagggagccattcaaatcccaacggtgacgttctcaagcgagaaatcaaacaccactgccctagctgaattcggcaagtatattcacaaggttttccctaccgttgtgtccacttcatttatccagcacgaggtggtggaggagtactcccacctgttcactattcagggaagtgatccctccctgcagccatacctgttaatggcccactttgatgtggtccctgctccagaagaagggtgggaggtaccaccatttagtggcctcgagcgagatggcattatttacgggaggggcacccttgacgacaaaaattcggtgatggcattgttgcaggccctggagttattactgattagaaaatatatccctaggcggagcttctttatctccctcggacatgatgaggagtcctctgggacgggggctcagaggatttcggcactcctgcagtcacgcggagtccagctcgcattcattgttgatgaaggaggcttcatcttagacgacttcatcccaaatttcaaaaagcccattgctctgatcgctgtgagtgagaaaggctccatgaacctgatgttgcaggtgaatatgacttcaggtcactcttctgcccctcccaaagagacctccatcgggatcctagccgctgcggtctctagactggagcagacacccatgcccataattttcggatcggggacagtagtcaccgtgttgcaacaactcgctaatgagttcccattccccgttaatattattttaagcaatccgtggttgtttgagcccctcatttctcggttcatggagcgcaatcctttaacgaatgcaatcattcgaaccactaccgctctgaccattttcaaggccggagtgaagtttaacgttatcccccctgtagcccaggccacagttaatttccgcatacacccgggacagaccgtccaagaggttctggagctcaccaaaaacatcgtggccgacaacagagttcaatttcatgtcttaagcgcattcgatcctttgccggtgtccccctcggacgacaaggccctgggatatcagctcttgcgccagacggtgcaatccgtctttccggaagttaacatcactgctcctgtgacgagtatcggcaacactgactcccgcttcttcacaaacctgacgactggaatatataggttttaccctatatacatacagcccgaagactttaagcggattcatggcgttaacgagaaaatctccgttcaggcctacgaaacccaggtcaagttcatcttcgaattaatacaaaatgccgacacagaccaagaacccgtgagccacttgcacaaactctag

SEQ ID NO: 10714 - DNA, 999 bp, synthetic construct
  misc_feature 1..999: note = source = /note="Description of Artificial Sequence: Synthetic coding sequence"
  source 1..999: mol_type = other DNA
atgagattgctggcgttcctcagcctccttgccctcgttctgcaggaaacaggaacagcctctctccccaggaaagagaggaaaagacgggaagagcagatgcctcgtgaaggagactccttcgaggttttgcccctgaggaacgacgtactaaacccagacaactacggtgaagtcatcgatttatctaattatgaagagctcacagactatggagaccagctgcccgaagtcaaagttacttcgctggctcctgctactagcataagccctgccaagagtactacagctcccggaactccgtcaagtaaccccacaatgacgcggcctacaacagctggcctgctactgtctagccagcctaaccacgggctccccacctgtcttgtgtgcgtgtgcctcggatctagtgtctactgtgacgatattgaccttgaagacatcccaccattacccagacgaacggcctacctgtacgcccgattcaacagaatctccagaattcgtgccgaagatttcaagggtctgactaaactgaaacgcatagaccttagcaacaacctgatcagtagtatcgataatgacgcgtttcggttactgcacgctctgcaggatttgatactgcctgaaaatcaactcgaagcacttcctgtgctcccatccgggatcgaattcctggacgtccgtttgaaccggcttcagagcagcggcattcagcccgcagcgttcagggcaatggagaagctccaattcttatacctgtcggataacctcctggattccatcccaggcccactcccattgtccttgaggagcgttcacctccagaacaatttgatagagacaatgcagagggacgtgttctgtgatccagaggagcacaagcacacacgccgacagctggaggacatcagacttgacggcaaccccatcaatctaagtctgttcccttccgcttacttttgcctgcccagactgcccatcggccgattcacctag

SEQ ID NO: 10715 - DNA, 1401 bp, synthetic construct
  misc_feature 1..1401: note = source = /note="Description of Artificial Sequence: Synthetic coding sequence"
  source 1..1401: mol_type = other DNA
atggttcgcagcgtggcctgggccggattcatggttttgcttatgattccatggggttctgcagcaaaactggtgtgttattttactaattgggcacagtatcgccagggtgaggctcgctttctgccaaaggacttagaccccagtctatgtacccatcttatttatgcttttgcaggcatgacaaatcatcaacttagcaccaccgagtggaacgacgaaactctctatcaagaattcaatggcctgaagaagatgaatccgaagttaaaaaccctgctggcaatcggaggatggaactttggaactcagaagtttactgatatggtggctacagctaataatagacagacgttcgttaactctgccatccggttcctgcgtaaatacagtttcgacggactggaccttgactgggagtaccctggcagccaaggaagccctgccgtcgataaggaacggttcacaactctcgtgcaggacctcgctaatgctttccagcaagaagctcagacaagtgggaaagagaggctgttgctgagcgcggctgtccccgctggacagacttacgtggacgctgggtatgaggtagacaagattgcccagaacttggacttcgttaacctcatggcttacgactttcacgggtcatgggaaaaggtcactggtcacaactctccactctataagagacaggaagaatcaggagctgccgcatctctgaatgtggatgccgcagtgcaacagtggctgcagaaaggcacacctgcctcaaagctgattctcggcatgccaacatacggtagatctttcactctagcctctagttccgatactcgcgtcggcgcaccagcaaccggatcgggtacacctggtcccttcacgaaggaaggcggtatgttggcatattacgaggtttgctcatggaaaggcgcaaccaaacaaagaattcaggatcaaaaagttccttacatattccgcgacaaccagtgggtgggttttgatgacgtggaatctttcaaaactaaagtttcctatctgaagcaaaaagggctcggaggtgccatggtctgggccctcgatctcgatgatttcgccggattttcctgcaatcagggtagatatccgttaatccagaccttgagacaggaattaagtctcccttacctgcctagtgggacacccgagttggaagtgccgaagccaggacaaccgagcgaacccgaacatggtcctagccctggccaggacaccttctgccaggggaaggccgatgggttgtacccgaaccctcgggaacgctcctctttctattcttgcgccgctgggaggttatttcaacagtcatgccccaccggactggtcttcagtaattcttgtaagtgttgcacctggaactag

SEQ ID NO: 10716 - DNA, 1596 bp, synthetic construct
  misc_feature 1..1596: note = source = /note="Description of Artificial Sequence: Synthetic coding sequence"
  source 1..1596: mol_type = other DNA
atgaggctctgcctgggcagaccgcatcccagaggccacagccgggtgggcaagagtgagagaggccgtggcgctcggggactagcaaggcagaggactcttgaagatgaggaggaacaggagcgcgaaagacgcaggcggcaccgtaacctgtctagtactaccgatgatgaggccccaaggctgtctcagaacggcgatagacaggcctctgcatcggagaggcttccctccgttgaagaggcagaagtgccgaaacctctgccccctgcatcaaaagacgaagacgaagacattcagtctattctgagaacaaggcaggagagacggcagcggaggcaagtggtagaggccgcacaagcccctattcaggagagactggaggcagaggagggccgaaactccctgagccccgtccaggcaacccaaaagccactggtctctaagaaggaacttgagatcccacctcggaggaggctgtcaagagagcagagaggaccttgggccctggaagaagaaagcttggtgggacgcgagcctgaagagaggaaaaagggcgtgccagagaaatcccccgtgctcgaaaaaagtagtatgccaaagaagacagctcccgagaagtcacttgtgtccgacaaaactagcattagcgagaaagtactggcatccgaaaaaacctccttgtctgagaagatagctgttagtgagaagaggaacagctcggagaaaaagagtgtgctcgagaagaccagcgtttccgagaagagtttggcacctggaatggccttaggctccggacggagactggtgtccgagaaggcatccatttttgaaaaggcgcttgcatctgaaaaaagccccaccgctgatgctaaacctgctcccaaaagggcgacagcttctgaacagcctctggcccaggagccccctgcaagtggagggtcgcccgctacaactaaggagcaacgtggaagagccctgcctggcaaaaaccttccaagtcttgccaagcaaggcgctagcgatcctccaacagtagcaagtcgcctcccacctgtgactctccaggtcaaaattccatcgaaggaagaagaagccgacatgtcgagccccacacagagaacttattcaagcagcctcaagcgctcatcacccagaacaatctcctttaggatgaaacctaagaaggagaattcggagacaacactgacaaggtcagcaagtatgaagctgcctgataatactgtgaagcttggcgaaaagctggaaaggtaccatacagcaattcgtcggagcgagtctgtaaagtctcggggtctcccatgtaccgagttatttgtcgcccctgtgggtgttgccagcaagaggcacctgttcgagaaggaactggcagggcaatcaagggccgagcctgcctcttcaagaaaggaaaatctgagactgagcggggtagtcacctcaaggcttaatctgtggatatcccgaacacaggagagtggggatcaagatcctcaggaggctcagaaagcctcgtccgccaccgaaagaacccagtggggccagaagtctgactctagtctggacgccgaagtgtag

SEQ ID NO: 10717 - DNA, 1782 bp, synthetic construct
  misc_feature 1..1782: note = source = /note="Description of Artificial Sequence: Synthetic coding sequence"
  source 1..1782: mol_type = other DNA
atgaaggccgatcttaagcagcatcaccatcactggagcatatttagctatattcggctccgactcccatcaatgcttcttctgttttctgtgattctgatttcatgggtcagcactgtaggtggagaagggacattgtgcgactttcccaagatccaccacgggttcctgtacgacgaagaggattacaaccctttttcacaagtgccaactggggaagtgttttactattcttgcgagtacaactttgtgagcccgtctaaaagtttttggacacgaattacctgtacagaggaagggtggtctcctactccaaaatgtctgcgaatgtgtagtttccccttcgtcaagaacgggcacagcgagagctccggcctaattcacctagaaggagacacggtgcagataatctgcaatacaggatatagccttcagaataatgagaagaatatttcatgcgtggaaagaggctggagtaccccaccgatatgcagcttcacaaaaggcgagtgccacgtccctatactggaggctaatgttgacgcccaacccaagaaagagtcctataaagtgggagatgtgctgaaatttagctgtcggaaaaacctgattcgtgtcggctccgactccgtgcagtgctatcagtttgggtggtcccccaactttcccacctgtaaaggacaggtaaggagctgcgggcctcctcctcagctgtcgaatggggaggtgaaggaaataaggaaagaagagtacggccacaacgaagtcgttgaatacgactgtaaccctaatttcatcattaatggccctaagaaaattcagtgcgtggacggtgaatggacaactcttccaacctgcgtagagcaggtaaagacttgcggatatattcccgagctggagtatggctacgtgcagccaagcgttcctccctaccagcacggcgttagtgttgaggtgaactgcagaaacgagtatgccatgatcggaaataacatgattacatgtattaacggaatctggacagaactgcctatgtgtgtggccacccaccaactcaagcgctgcaagatcgccggagtcaacattaaaacattgcttaagctttctggtaaagaatttaatcacaattcgcgtatacggtatagatgcagcgatatttttcggtatcggcactccgtgtgtatcaatggaaagtggaatcccgaagtcgattgcaccgaaaagagggaacagttctgtccgccaccccctcaaattccaaacgcccagaacatgacgaccaccgtgaactaccaggatggagagaaggtggcagtgctgtgcaaggaaaattacctgctgcccgaagccaaggagatagtgtgtaaggatggtcgatggcagtcactccccaggtgcgtcgaaagtactgcatattgcggccctcctccaagcattaacaatggggataccacgagttttcccctgagtgtgtacccaccgggttcgacagtgacatataggtgtcaaagtttctataaactacagggcagtgtaaccgtgacctgtcggaacaaacagtggtccgaaccaccgcgatgtctggatccctgtgtagtgtccgaggagaatatgaataaaaataatatacaacttaaatggaggaacgatggcaagctctatgccaagacgggcgacgccgtggagtttcagtgtaagttcccccacaaggcaatgatcagctcccctccgttccgagctatctgccaagaagggaagttcgagtatcccatctgtgagtag

SEQ ID NO: 10718 - DNA, 2301 bp, synthetic construct
  misc_feature 1..2301: note = source = /note="Description of Artificial Sequence: Synthetic coding sequence"
  source 1..2301: mol_type = other DNA
atgatttggagaagccgggctggagccgaactttttagtttgatggccctatgggagtggatcgccctgtcattgcattgctgggtcctggccgtcgcggctgtttccgaccagcacgctaccagtccttttgactggctgctaagcgacaaaggcccatttcatcgttctcaggaatatacggactttgttgaccgttcgcggcagggattctccacccgctacaaaatttatagggaatttggtcgttggaaggtgaataatctggccgtagagaggaggaacttcctcggcagtccgctgccgctggcacctgagtttttccgtaatatacgactgctgggcagacggccaacactgcagcaaataacagaaaacctcataaagaaatatggcacgcactttctgctgtccgcaactcttggcggagaggagagcctcacaatctttgtggataagaggaaactcagtaagcgcgcagagggcagcgactccaccaccaactcttctagcgtgacccttgagaccctgcatcagctagcagcgagttattttattgatagggacagtacgctacgtcgacttcatcatatacagatcgcttccacggccatcaaagtgacagagacccggactgggccacttggctgcagtaattacgacaacttagactccgtctctagtgtcctagttcaatctcctgaaaataaaattcagctgcaagggctgcaagtgctcctccccgattatttacaggagcgcttcgtccaggctgcgctgtcttatatagcttgtaattcagaaggggagttcatatgcaaagaaaacgactgttggtgccactgtggacccaagtttcctgagtgtaactgccctagcatggacatccaggccatggaagagaatttgttgcgtattaccgaaacttggaaggcctataatagtgacttcgaggagtccgacgaattcaaactgtttatgaaacggttgcctatgaattacttcctaaatacctctacaattatgcatctctggaccatggactcaaatttccaacgcaggtacgagcagctggaaaattctatgaagcagctcttcctcaaagctcagaagatcgtgcacaaactgttctcgctgtctaagcggtgtcacaagcaaccactgatatcactcccccgtcagaggacatcaacatactggttgacccgcattcagtccttcctttattgcaatgagaacgggctgctgggttcttttagtgaagaaacacatagctgtacctgccccaacgaccaggttgtctgtaccgccttcctgccatgcaccgtgggggacgctagtgcttgcctgacatgcgcacccgataatagaacccggtgtgggacctgtaacaccggatatatgctgagccagggtctgtgtaagccagaggtcgctgaatctaccgatcattacattgggttcgagacggacctccaggacctcgaaatgaaatacctgctccagaagactgatcggaggatagaggtgcacgctatatttatctcgaacgatatgcggctgaattcctggttcgatccttcctggcgcaagaggatgttgctgacattgaagtccaacaagtacaaatcttctctagtgcatatgatactgggtcttagtctccagatttgcctgactaagaactccaccctcgaacccgtgctggccgtgtatgtgaatcctttcggtgggagccattctgaatcctggtttatgccggttaatgagaattccttccctgactgggaacggactaagctggacttgcctttgcaatgctataattggacccttacattaggcaacaagtggaagaccttcttcgagaccgttcatatctacttacgcagtcggattaagagcaatggaccgaatgggaatgaaagcatctactacgagcctctggagttcatagatcccagtagaaacctgggatatatgaagatcaataacattcaggtgtttggatattccatgcattttgatcccgaggcaatccgggacttgattttgcagctcgattatccatatactcagggcagccaggacagcgccctactccagctcctcgagatcagagacagagttaacaagctttctcccccaggccaaagacgactggacctattttcctgtctgctgcggcaccgtctcaagctgtccacctccgaggtggtcagaattcagagtgcactccaggcctttaatgcaaagcttcctaataccatggactatgacaccacaaagctatgcagttag

SEQ ID NO: 10719 - DNA, 1815 bp, synthetic construct
  misc_feature 1..1815: note = source = /note="Description of Artificial Sequence: Synthetic coding sequence"
  source 1..1815: mol_type = other DNA
atgcgcagatgcaactcaggctcagggcctcccccatccttgttgctgctgctgctgtggctgctggctgtgccgggagccaatgccgcaccccgtagtgctctttactcaccctccgaccccctcactctcctccaagccgatacagtgaggggggctgttctgggcagtagatcagcttgggccgtggaatttttcgcaagctggtgcggccactgcatagcattcgcacctacctggaaggcactggctgaggatgtgaaagcctggcgtcccgcattgtacttagccgcactggactgtgctgaagaaactaactctgcagtgtgcagggatttcaacattcccggattcccgactgtacggttctttaaggccttcacgaagaatggatctggggctgttttcccagtcgcgggagccgatgtccagaccctacgcgagagactcattgatgcactggagagtcaccacgatacctggccaccggcatgcccacctttggagcctgcaaagctggaagaaattgacggattttttgcgagaaacaacgaggaatatctggccttgatctttgaaaaaggcggtagctacttgggcagagaagtcgcgcttgatctgtcccagcacaagggagtggcggtaagacgcgtgcttaacaccgaggccaacgtggttaggaaattcggggtgactgactttccttcatgttatctcctttttaggaatggatctgtcagtcgggtaccagtcctcatggagagcaggagtttctatactgcctacctccagcggttgagtggtcttacaagggaggctgcacagaccaccgtggcacctaccacggctaacaagatcgccccaaccgtctggaagttagccgatagaagcaagatatatatggccgacctggagtcagcactgcactacatcctgagaatcgaggtgggccgattccccgtcctggagggccagcgactggttgcactcaagaagtttgtcgccgtccttgctaaatactttcctggacgacctctggtccaaaacttcctccactccgtcaacgaatggctcaaaagacagaaaagaaacaagatcccctattcctttttcaaaacggccttggacgatcgaaaggagggcgcagtgctcgccaagaaggtgaactggatcggatgtcagggctccgaacctcactttcgcggttttccatgttctctgtgggtcctgttccatttcctgacggtgcaggcagctcggcagaatgtggaccattctcaggaagccgcaaaagccaaggaagtgcttccagccattcggggatacgttcattatttctttggctgccgggactgtgcctcacattttgaacagatggctgctgcctccatgcatcgcgtggggtctccgaacgcagccgttctctggctgtggagcagccataaccgagtgaatgcaaggcttgccggtgctcccagcgaggatccgcaattcccaaaagtccaatggccccctagagagctctgtagcgcttgccacaatgaacggctggatgtgcctgtgtgggatgtggaagcgaccttgaactttctgaaggctcatttcagtccctctaacattatactggatttcccggcagcaggttcggccgctcggcgagacgtgcagaacgtagcggctgctcccgagcttgctatgggtgcgttggaactggagtccaggaactcaactctcgacccaggaaaaccagaaatgatgaaaagcccaacaaatacaacaccccatgtacccgcagagggcccagagttgatttag

SEQ ID NO: 10720 - DNA, 2244 bp, synthetic construct
  misc_feature 1..2244: note = source = /note="Description of Artificial Sequence: Synthetic coding sequence"
  source 1..2244: mol_type = other DNA
atgaggagatgtaatagtgggtccgggcctccgcctagtcttttgttgttacttctgtggctcttagctgtccccggagcgaatgctgctcctagaagtgcgctatattctccctcagatcccctaacccttctgcaggctgacaccgtacggggtgcagttttaggttccaggtccgcttgggccgtggaattcttcgcttcctggtgtggtcactgtatcgccttcgcacccacgtggaaagccctggccgaagatgtgaaggcctggcgtcccgcactgtatctcgcagcactcgactgcgccgaagaaaccaattcggcagtctgtagggactttaatatccccggattccctaccgttagatttttcaaggcttttaccaagaacggatctggggcagtgtttccggtcgccggtgcagacgtgcagacgttgagggagcgcctgattgatgccttggagagccaccatgatacttggccaccggcttgtcctccccttgagcctgctaaacttgaggagatcgacgggtttttcgctaggaacaacgaagagtacttggcgttgattttcgagaagggaggctcctatctgggccgtgaggtggccctcgatttgtcgcagcataaaggagtggccgttcggagagtgctgaacaccgaagcgaatgtagtgagaaagtttggggtgacggactttcccagctgctacctcctgttcagaaacggcagcgtaagtcgcgttcctgttttgatggagtcacgatccttctacaccgcataccttcagaggctgtccggcttaaccagagaagcagcccagaccactgtggccccaacaacggccaacaagattgctcctaccgtctggaagctggccgatagaagcaaaatctacatggcagacctggagagcgcgctgcattatatactacgcattgaagtgggcaggttcccagtactcgagggccaacgcctggtggcgctgaaaaaattcgtggcggtgcttgctaagtacttccccggacggcctctcgtgcaaaatttcctgcactcagttaatgagtggcttaaacggcaaaaacggaataaaatcccctatagctttttcaagacagctctggacgaccgaaaagagggagccgtcctggcaaaaaaagtaaattggattggatgccagggatccgaacctcactttcgcggatttccttgttcactgtgggtgctgtttcacttcttgactgttcaggcagctcgccagaatgtggaccactcccaggaggctgcgaaagccaaggaggtgctccctgcgataagaggctatgtgcattacttctttgggtgtcgagattgcgccagtcacttcgagcagatggctgcagcctccatgcacagggtaggatcccccaacgccgcagtcctgtggctttggtcatcacacaaccgggtgaatgcgcgactcgcaggagcgccatccgaagacccccagttcccaaaggtgcaatggccaccacgggaactctgtagcgcctgccataacgagaggctggacgtccctgtttgggacgtagaagccactttgaactttctgaaagcgcattttagtccttctaatattattttagactttcccgcagcgggtagcgccgctaggcgcgacgtgcagaacgtggcagcggcaccagaattagcaatgggcgctctcgagctggaatctaggaattctacacttgatcctggaaagcccgagatgatgaagtctccgactaatactacacctcatgtgccagcggaggggcctgaggcatcgcgccctccgaagctccaccctggtctgagggccgctcctggtcaagagccgcctgagcatatggctgagcttcagaggaacgaacaggagcagccattgggccagtggcatctgtccaaacgggacacaggcgcagcgctgttagccgaaagcagggcagagaaaaataggttgtggggccctctcgaggtacgaagggtggggagaagttccaagcaattagtggacatccctgaaggacagctggaggcacgagccggtcgcggacgagggcagtggctgcaggtgctgggtggtgggttcagttacctggatatctcactttgcgtcggtctttactcactctcattcatgggattgctcgccatgtacacctactttcaagccaagatcagggccctgaaaggacacgccggacaccccgcagcctag

SEQ ID NO: 10721 - DNA, 1476 bp, synthetic construct
  misc_feature 1..1476: note = source = /note="Description of Artificial Sequence: Synthetic coding sequence"
  source 1..1476: mol_type = other DNA
atgaaaaccttcacctggaccctgggcgtcctgttcttcttgctggtagataccggccactgccgcggaggccagttcaaaattaagaaaattaatcagcgcagatatcctagagctactgacggtaaggaagaggcaaagaaatgtgcatatacctttctggtgcccgagcagcgcattaccgggcctatctgtgtcaataccaagggccaggatgctagcacaattaaggacatgattacccggatggatctcgaaaacctgaaagatgtgctctctcgacagaagcgggaaatcgacgtgctgcagcttgtcgttgatgtcgacggaaatatcgtgaatgaggttaagttgctccgaaaagagtctcgcaatatgaattctagggtgacgcaactgtacatgcagttactgcacgagataatacgaaagcgcgacaattccctggagctgtcacagctagagaacaaaatcctgaacgtaacaaccgagatgctgaaaatggcgacaaggtatcgagagctggaggtcaaatatgcaagtctgacagatctagtgaacaatcaatctgtgatgatcacactgctcgaggagcaatgcctccggatttttagtagacaggacactcacgtatcccccccattagtacaggtggtcccacagcacatccccaactcccagcaatatacccccggactactgggtggtaatgagatccagcgcgaccccggttatcctcgcgatctgatgccccctccagatcttgcaactagccctacaaagtccccatttaagattccgcctgtcacttttatcaacgaaggacctttcaaggactgccagcaggcgaaggaggcagggcactcagtgtccggtatctacatgatcaaaccagaaaactccaacgggccaatgcagttatggtgcgaaaacagtttggaccctgggggatggactgttattcagaagcggacagacggatctgtgaatttcttccgaaattgggagaattacaagaagggattcgggaatatagatggcgagtactggctgggcctggaaaacatctacatgctgtccaaccaggataactacaagttgctgatagaactcgaggactggagcgataagaaagtctatgctgagtattcgtcatttaggctggagccagaaagcgagttttatcgccttcgattaggaacttatcaaggcaatgctggggatagtatgatgtggcacaatggcaagcagtttacaactctggaccgcgataaagacatgtacgctggtaactgtgcccacttccacaagggtggctggtggtacaacgcctgtgcacattcgaatttgaacggcgtgtggtacagagggggtcactatagaagtaagcatcaggatgggatattctgggcagagtataggggtggcagctactctctgcgggcagtgcagatgatgatcaagccaattgactag

SEQ ID NO: 10722 - DNA, 2484 bp, synthetic construct
  misc_feature 1..2484: note = source = /note="Description of Artificial Sequence: Synthetic coding sequence"
  source 1..2484: mol_type = other DNA
atgatgtgcctgaagattttgagaatttcacttgcaattctggctggctgggccctgtgctccgccaacagcgagctgggctggacgcgcaaaaaaagcctggtagaacgcgaacatctcaatcaggtactacttgaaggtgagcgctgctggctcggagcaaaggttaggcgcccaagagcatctccccagcaccacctctttggagtgtatccttccagggctggtaactatctcaggccataccccgttggcgaacaagagattcatcacactggcagaagcaaacccgatactgaaggcaacgctgtgagcctggtgccaccggacctgacagaaaatcccgctggactgaggggagccgttgaggagccagcagcgccttgggtgggggatagccctatcggtcagtcagaactcctcggggatgatgacgcctacctgggaaatcagcgctcaaaggaatctctgggggaggcgggtatccagaagggttcagcaatggcggcaacaacaaccactgcaatttttaccactctgaatgagcccaagccagaaacacagaggcggggatgggccaaatcaagacaaaggaggcaggtgtggaaacgtcgcgctgaagacgggcaaggcgatagtgggatcagtagtcacttccagccatggccaaagcactccttgaaacatcgggtcaagaaatccccgcctgaagagagtaaccagaatgggggagagggaagttacagagaagcagaaaccttcaacagccaggtcggcctgccaatcctctatttttcgggtagacgagagaggctgttgctgagacccgaagtgctcgcggagattccgcgagaggcgttcactgtggaagcttgggtaaaacctgagggaggccagaacaaccccgctatcatcgctggagtctttgacaattgctctcatactgtgtcagataagggctgggcacttggaatcagatcaggaaaggacaagggcaagcgagacgccaggttttttttctccctctgtactgatagagttaagaaagcaaccattttaattagccatagccgatatcagcctgggacgtggacacatgtggccgcaacttacgatggtcggcacatggcgctttacgtggacggaacccaggttgcgtctagtctcgatcagagcggtccgctcaattcaccattcatggcttcctgccggtctctgctcctgggcggagactctagtgaggatgggcactacttccggggacatctgggaactcttgtattctggagcacggctctcccccagtcacatttccagcatagctctcaacattcctctggagaagaggaggccaccgacctggttctgacagcatcattcgagcccgtaaatactgaatgggtcccattcagggacgagaagtatcctcggctggaggtgctgcagggatttgaacccgagccagaaatcctgtcccccttacaaccgcctctgtgcggccaaacagtttgcgacaatgtcgaactcatctcccagtacaacgggtattggccgctgaggggtgagaaagtcatcaggtaccaggtagtgaatatatgcgacgatgaaggcctgaatcccatagtcagtgaggagcaaatacggctccagcacgaagccctgaacgaagcgttttccagatacaacattagctggcagctcagtgtgcatcaagttcacaactccaccctgagacacagggtagtgctcgtcaattgtgaacctagtaagatcggaaatgaccattgcgatcctgagtgtgagcatccgttgacaggttacgatggaggggactgccgactccaaggcaggtgttattcctggaacaggcgggatggcctctgccatgttgaatgtaataatatgcttaatgatttcgacgatggggattgttgcgatccccaggtcgccgacgtaaggaaaacatgctttgatccagattctcctaaaagggcatatatgtccgtaaaggaactcaaagaagccctccagctgaacagcacccattttctaaatatttattttgcctcgagcgtccgggaagatctcgccggagcagccacctggccatgggacaaagacgcagtgacgcacctcggtgggatcgttctgtcaccagcatactacgggatgcccggtcatacagatactatgattcacgaagttggccacgtccttggactataccacgtattcaaaggagtgtctgaacgtgaatcttgcaatgacccttgcaaggaaacagtgccctcaatggagacaggcgacctgtgcgctgatactgcacccacccctaagtcagagctgtgtcgcgagcctgagcctacaagtgacacttgtgggttcacaaggttccctggcgcaccgttcacaaattacatgtcttacacaggtatcaccaccgtattgttttgttttttgctacgaatccatggcggtctctag

SEQ ID NO: 10723 - DNA, 5376 bp, synthetic construct
  misc_feature 1..5376: note = source = /note="Description of Artificial Sequence: Synthetic coding sequence"
  source 1..5376: mol_type = other DNA
atgatgtgcctcaaaatcctgagaatctcactggcgattctcgctggatgggctctctgttctgccaattccgagctcggatggactagaaagaagtcactggttgagcgggaacatttgaatcaggtcctgctggaaggggagaggtgctggctgggagccaaagtgcggcgaccgagagcatcaccacagcaccatcttttcggtgtctacccctcacgcgcaggcaactacttacggccttacccggtgggcgagcaagaaatccatcacactggcaggtccaagcctgacaccgaaggcaacgctgtttctttagtcccacccgatctgactgaaaacccggctggcctgaggggtgccgtcgaagaacctgcggctccctgggtcggcgacagccctatcggtcagagcgagctgctcggggatgacgatgcatacctcggcaatcaaagaagtaaagagtctttgggcgaagccggaattcagaagggcagcgcaatggcagctacgactacgaccgccatctttaccacgctgaacgaacccaaacctgagacacagaggcggggatgggcaaagagcagacagcgcaggcaagtctggaagcgccgagcagaagacggtcagggagactccgggatcagctcacactttcaaccctggccaaaacactctctgaagcaccgggtaaagaaaagccctcccgaggaaagtaatcaaaatgggggagagggctcatatcgagaagccgaaacatttaacagccaggtgggcctccccattctttactttagcggacgcagagagcgcctcctgctaagaccagaggtccttgccgagattccaagagaggcatttacagtggaggcctgggtgaagcccgaaggcggacagaacaatccggcaataatcgcaggagtgttcgataactgctcccatacagtttcggataagggatgggccctcggtatcaggtcaggaaaagataagggcaagagagatgcacggttcttctttagcctgtgcactgacagagttaagaaggccacaatactcatttcacatagtagataccagccgggaacgtggactcacgttgccgctacatacgacggcaggcacatggccctctatgtagacggcactcaggttgctagttctctcgaccagagcggtcctcttaattccccctttatggctagctgccgcagcctgttactgggtggagactctagtgaggatgggcactattttcggggacacctggggactctcgtgttttggtctaccgctctgcctcagtcccacttccagcatagtagccagcacagtagcggcgaggaggaggctacggacttggtgctgaccgcctccttcgagccggtaaacaccgaatgggtgccctttcgcgacgagaaatatcctcgcttggaagtactgcaggggtttgaacccgaaccggagattttaagcccactccagcctcccctctgcggccagactgtttgcgacaatgtagagctgattagccagtataatggatactggcctttgcgtggggagaaagtcattagataccaggtggtaaatatctgcgacgatgagggcttgaatccaattgtatccgaagagcaaatccgactccaacatgaagccttgaacgaagccttttcaaggtacaacatctcttggcagctttcagtccaccaggtccacaactccactttacggcatcgcgttgtactcgtgaattgcgagccctctaagatcgggaacgatcactgtgatcctgaatgtgaacatccactcactggttatgacggcggtgactgccggctgcaaggcaggtgctactcctggaatcggagggacggactctgccatgtggagtgcaataacatgcttaacgacttcgatgatggcgattgttgcgacccgcaggtggctgacgttcgaaagacttgttttgatcccgattccccgaaaagggcttatatgagtgttaaggagctgaaagaggcactgcaactgaactccacccatttcctcaatatttactttgctagtagtgtccgtgaagacctggccggtgccgctacatggccctgggataaagacgccgtaacccatttgggtgggatcgtgctaagtccagcgtactacgggatgcccggacataccgataccatgatccacgaggtcgggcacgtgttagggctctatcatgtgtttaaaggcgtgtccgagagggagtcttgcaacgacccctgcaaggagaccgtacctagtatggaaaccggtgacctgtgcgcggatactgccccaacaccaaaatcagaactgtgccgagagccagaacctacctcagacacttgtggcttcactcgatttcctggcgctccattcactaactatatgagctataccgatgacaactgtacagataatttcacacccaatcaggtagcaaggatgcactgttacctggacctcgtttaccagcagtggacagagagccgaaagcccacacctataccaatccctcccatggtgattggtcagaccaacaaaagtctgacaatccattggctgcccccaatctcaggagttgtctatgaccgggcatcaggatccctgtgcggggcatgcacagaggatggaaccttccgccaatacgttcataccgcttcatcaagacgcgtgtgcgattctagtggatattggaccccggaggaagccgtcgggccacctgacgtcgaccagccgtgtgagccttcacttcaggcatggtccccagaggtgcatctataccacatgaatatgacagtcccatgtcctacagagggctgtagcctggaactgttgttccaacaccccgtccaggctgatactttgacactctgggtcacatctttctttatggagagcagccaggtgctctttgacactgaaattctgctggaaaataaggagtctgtgcatctgggacccctggacactttttgtgacatccctttgactattaagctccatgtggatggtaaagtttctggcgtcaaggtttacacctttgacgaacgaatagagatcgacgctgctctgctgaccagtcagccccactcaccactgtgtagtgggtgcagacccgtacgctatcaggtactgagagatcctccttttgcttctgggctgcctgttgtcgtcacccactctcatagaaagtttacagatgtcgaggtcacgccagggcagatgtatcagtaccaggtcctagcagaagctggaggcgaactcggagaagcatcaccaccccttaatcacattcatggcgcaccatactgcggggatggaaaagtatccgagcggctcggagaagagtgcgacgacggtgacctggtatcaggagatggctgctccaaggtttgcgagttagaagagggctttaactgcgtgggcgagcctagcctgtgctacatgtacgaaggggacggcatctgcgaacccttcgagagaaagacatcgattgtggactgtggcatatatacacccaaggggtatctggatcagtgggcaaccagggcttatagctctcatgaggacaaaaagaaatgcccagtgagcctcgtcaccggggagccacactctctcatctgcaccagctaccacccagatctccccaatcacagaccgctgacagggtggttcccatgcgtggcctcagaaaatgagacacaggatgatagaagcgaacagcctgagggaagcctgaagaaggaggatgaggtgtggttaaaagtgtgcttcaaccgtccgggagaggcccgtgctatcttcatctttctaacaactgacggactggtgccaggagagcatcagcagcccacagtaaccctgtatcttaccgacgtgcggggatctaaccactcactggggacctatggcctttcttgtcagcataacccactaatcataaacgtcacacatcatcagaatgtactgttccaccacactaccagtgtgcttctaaacttttcgtcccccagagtgggtatcagcgctgttgcactcaggactagtagcagaatcggcctcagtgccccatcaaattgcatctccgaagatgagggacagaatcatcagggacagtcatgcatccatcggccttgcggtaagcaggactcctgtccaagcctcctcttagaccacgccgatgtggttaactgtacctctatcggacctggcctgatgaaatgcgctatcacatgtcagagagggtttgctttgcaggctagttcgggacagtacattcggcctatgcagaaggaaattctccttacctgttcctcaggtcactgggaccagaacgtctcttgcctcccggttgattgcggagtgcctgatccgtccctggtgaactatgccaacttctcgtgcagtgagggtaccaaattccttaaaagatgctctatcagttgcgtgccccctgcgaaattacaggggctttcgccatggttgacctgtctggaggatgggctgtggtccctgcctgaggtctattgtaagctggaatgtgatgctcctcctatcatactgaacgcaaatctgttgctaccacactgcctacaagacaaccacgatgtgggtaccatttgtaaatatgaatgcaagccaggctactacgtggcagaatccgctgaggggaaggtgagaaataaattattgaaaatccagtgcctcgaggggggtatctgggagcaaggatcttgtattccagttgtatgtgagcccccaccgcctgtgttcgaagggatgtacgagtgcactaatggcttctccctcgatagtcagtgcgttctgaattgtaatcaggagcgcgagaaactccccatcctctgcacaaaagaaggcctctggacccaagaattcaagctgtgcgaaaatctgcagggcgagtgccctccaccgccatctgaactgaactctgttgagtataagtgcgaacagggttacggaattggagccgtgtgctctccactctgtgtcattccaccatctgaccctgttatgcttccagagaatatcaccgctgatactctggagcactggatggagccagtaaaggtgcagagcatcgtttgtaccggacgcagacagtggcatcccgaccctgttctggtgcactgcattcagagttgtgagccattccaggcagatggctggtgcgataccatcaataaccgagcatattgccactacgacggaggcgactgctgcagctctactctcagcagcaagaaggtaattcctttcgcagccgactgtgacttggacgaatgtacgtgcagggatcctaaagccgaagagaatcagtat

SEQ ID NO: 10724 - DNA, 702 bp, synthetic construct
  misc_feature 1..702: note = source = /note="Description of Artificial Sequence: Synthetic coding sequence"
  source 1..702: mol_type = other DNA
atgaaagaccctttggccaaggacgagcggatctacgtgaccaattactattacgggaatactctcgtagagtttcggaacctggagaactttaagcagggacgatggagtaatagttataagctgccctacagctggattggcacagggcatgtcgtatacaatggcgcattctattataatcgggcttttacaaggaatatcatcaaatatgacctcaagcagcggtacgttgccgcttgggccatgctgcatgacgtagcctatgaagaggctacaccttggcgatggcaaggccactccgacgtggactttgctgtagatgaaaacggcttgtggctgatctatccagccttagacgatgaaggattcagtcaggaggttatcgttttatcaaagcttaacgcagcagacttatccacacagaaggaaactacttggcgtacaggcctccgccgaaacttctacggcaactgcttcgttatatgcggcgtgctgtacgctgtggattcttacaaccagaggaatgccaatatctcttatgctttcgatacacacaccaacactcaaattgtacctaggctgctctttgagaacgagtattcatacactacacagatcgactacaacccaaaggaccgtttgttatatgcatgggataacggacaccaagtcacctatcacgtgatttttgcctactag

SEQ ID NO: 10725 - DNA, 579 bp, synthetic construct
  misc_feature 1..579: note = source = /note="Description of Artificial Sequence: Synthetic coding sequence"
  source 1..579: mol_type = other DNA
atgcttaaaaagatctctgtgggtgtggcaggtgatctgaataccgtcacaatgaagctcggttgtgtcctgatggcctgggccctgtacctcagtttgggagtgctgtgggtcgcgcaaatgctgctggcggcttctttcgagacccttcaatgcgagggccctgtctgcacagaagaatccagttgtcatacagaggatgacttaaccgacgccagggaagccggttttcaagtcaaggcctatacattcagcgagccctttcaccttatagtttcttacggcgcttcttccagcgcagccccaccaacgctgaacccagccccacagaaatcggcagcccctggcactgcccctgaggaagctcctgggccactgcctcccccacccaccccttcctccgaggaccctgggttttcctcgcctctcgggatgccagacccgcacctgtaccaccaaatgggactgctgctgaaacatatgcaggacgtacgcgtcctcctgggccatctgctgatggaactccgcgagctgagtggacatagaaaaccgggtactactaaggccacggctgagtag

SEQ ID NO: 10726 - DNA, 459 bp, synthetic construct
  misc_feature 1..459: note = source = /note="Description of Artificial Sequence: Synthetic coding sequence"
  source 1..459: mol_type = other DNA
atgctgctggctgcctcctttgagaccctacaatgcgaaggacccgtgtgcacagaagagtcttcttgtcacacagaagacgacctgacagacgcccgagaggctggattccaagtaaaagcttatacattctccgaacctttccatttaattgtcagctatggagctagctcttccgcagcgccacccaccctgaaccctgcaccccagaagtctgcagcacccggtacagcccctgaggaggcgcctggccctttgccgcctcccccaacaccttcatccgaggatccaggcttttcttcacctttaggaatgcccgatcctcacctgtaccatcagatgggactgctccttaagcacatgcaggacgtacgggttctgctcggccacctgttgatggagctgagagagctcagcgggcaccggaaacctggaactactaaagccaccgcagaatag

SEQ ID NO: 10727 - DNA, 1098 bp, synthetic construct
  misc_feature 1..1098: note = source = /note="Description of Artificial Sequence: Synthetic coding sequence"
  source 1..1098: mol_type = other DNA
atgaagctgggctgcgtgctgatggcctgggcactttacctcagcctcggggtgttgtgggtggctcagatgctgctggcagcagggtgtcacgcagctgctagtttcgaaaccttgcagtgcgaagggccagtgtgtacagaggaaagctcctgccacaccgaggatgatttgacagacgccagagaggcagggtttcaggtcaaagcctataccttcagtgagccctttcacctcatcgtttcctatgattggctgatcctccagggccctgctaaacccgtgttcgaaggggacttgctcgtcctcaggtgccaggcctggcaagactggccacttacacaggttaccttttatagggatggttcagccttgggtcctccaggccctaatagggaattcagtattacagtggtgcagaaagcggattctggccactatcattgctccgggatcttccaaagccccggtccaggcataccagaaactgcttccgttgtggctatcaccgtgcaagaattattcccagccccaatcctgagggctgtaccgagtgccgagccccaggctgggagcccgatgaccctctcatgccagactaagctgcctctgcagaggagcgctgcgaggctgctgttttccttctacaaagacgggagaatagtgcaatccagaggcctatcctcagagttccagatccctacagcgtccgaggaccatagcggcagttattggtgcgaggccgctaccgaggataatcaggtgtggaagcagtcacctcagttagagatcagggtccaaggtgcttcgtcttcagccgctcctccaactctaaatcctgcgccacagaagtctgctgcacctggcacggccccagaggaggcaccaggcccactgccccctcccccaacaccttcttccgaggaccctggcttctcatcaccgctggggatgccagacccccatctgtaccaccaaatgggattgttacttaaacacatgcaggatgtaagagttctgctgggacacctcctgatggagctccgtgagcttagtgggcatagaaaacccggaacgacaaaggccaccgccgagtag

SEQ ID NO: 10728 - DNA, 711 bp, synthetic construct
  misc_feature 1..711: note = source = /note="Description of Artificial Sequence: Synthetic coding sequence"
  source 1..711: mol_type = other DNA
atgctgaagaagatatccgtgggcgtagccggagatttaaataccgtcactatgaaactgggctgcgtcctcatggcctgggctctgtacctgagtctgggcgtgctgtgggtggcgcagatgctgctggagctctttcccgctcccatcctcagggcggtcccttcagccgagccccaggccggtagccccatgacccttagttgccagacaaagcttccactccagcgcagcgccgcaagactgctcttctcattctataaagacggccgaatagtacagtcccggggattatcttctgaattccagataccaactgcatcagaagaccactctgggtcatactggtgcgaagccgcaacagaggataatcaggtgtggaagcagagcccccagcttgaaattcgtgtgcagggtgctagcagctctgcagcgccaccaaccttgaacccagcacctcagaagagcgctgcccctggaacagcccctgaggaggccccaggcccactgccccctccgcctactccctcatctgaggacccagggttctcttcaccgctgggcatgcccgacccccacctgtaccatcagatggggttactcctaaaacatatgcaggatgtgcgggtgcttttggggcatctactgatggagttgcgcgaactgtctggtcacagaaaacccggaacaacaaaagccacagccgaatag

SEQ ID NO: 10729 - DNA, 1149 bp, synthetic construct
  misc_feature 1..1149: note = source = /note="Description of Artificial Sequence: Synthetic coding sequence"
  source 1..1149: mol_type = other DNA
atgctgaagaaaattagcgtgggcgtggccggtgacttaaacacggttaccatgaaactggggtgcgtccttatggcatgggctctctacctgtctctcggagtgctctgggtggctcagatgctgctcgccgcaggatgtcatgccgctgcttccttcgaaactctccaatgcgagggtcctgtgtgcacagaggaatccagctgccacacagaggacgatctgactgacgccagagaagctggattccaggtcaaggcctatactttcagcgaacccttccaccttatcgtgtcgtatgactggctgatcctgcaaggacccgcaaagccggtattcgaaggcgatttgttggttctccgctgtcaggcctggcaggactggcccctgacgcaagtgacgttctatagagatggaagcgcgctgggaccaccagggccaaatcgcgagttcagtattaccgtcgttcagaaagctgactccgggcactaccattgcagtgggattttccagagcccaggaccaggcatccccgaaaccgctagtgtcgttgcaatcaccgttcaggagctgttccctgcccctatcctcagagccgtcccctccgctgaacctcaggctgggagtcctatgacactttcctgccagactaaattgccactccagcggtccgccgcaaggctgctgttttctttctataaggatggaagaatcgtgcagtctagagggctttcgagtgagttccagattcctactgccagcgaagatcactcgggaagctactggtgcgaggccgcaaccgaggacaaccaagtctggaagcaatccccccagctggagatccgtgtgcagggcgctagctcttcagcagcaccacccacactcaaccccgcaccccagaagtcagcagccccagggaccgccccagaagaggcacccggaccccttccaccgcctcccaccccctcctccgaggacccagggttcagttcaccgctcggtatgcccgacccacacctctaccaccagatgggcctgctgctcaaacatatgcaggacgtgcgggttctgctgggccacctcctgatggagttgcgcgaactttccggccaccgaaagccaggtactaccaaagcgactgcagagtag

SEQ ID NO: 10730 - DNA, 738 bp, synthetic construct
  misc_feature 1..738: note = source = /note="Description of Artificial Sequence: Synthetic coding sequence"
  source 1..738: mol_type = other DNA
atgtctcggctgagggcactcctaggattggggctgttagtagccggtagtcgtgtgcctagaattaaatcccagacaatagcctgccggtctgggcctacatggtggggtccacaacggctgaactctggcggaagatgggactctgaagtgatggccagtaccgttgtcaaatatctgtctcaggaggaagcgcaagccgtcgaccaggagctgtttaacgaatatcagttttcagtggaccagctgatggagttagcgggactgtcttgtgccactgccatagccaaggcataccccccaacgtccatgagtcggagccctccaacagttctggtcatttgtggcccaggtaacaatggaggggatggtctggtctgcgcacggcacctgaagctttttgggtatgaaccgacgatttattatccaaagcgcccaaataaaccactgttcacagccttggtgacccagtgtcagaaaatggacattccttttttaggggaaatgcccgctgagccgatgactatcgacgagctctacgaactcgtggtggatgccattttcggtttctcattcaaaggagacgtgagagagccctttcactcaatcttgtccgtgttgaaagggctcactgttcctatagccagcatcgatatccctagcggcgctgggatacaaaaagtgggatggggacgcctggggccttacccaccagactcctgccctcaccaggtatag

SEQ ID NO: 10731 - DNA, 783 bp, synthetic construct
  misc_feature 1..783: note = source = /note="Description of Artificial Sequence: Synthetic coding sequence"
  source 1..783: mol_type = other DNA
atgtcacggctaagggcacttttaggccttgggctgctggttgcaggctctcgcgtgcccaggattaagtcacagacgattgcctgccgttccggcccaacatggtggggcccacagaggctgaactctgggggaagatgggactcggaggtgatggcttccaccgtcgtgaaatatctgtcccaggaagaagctcaggcagtagaccaggaattgttcaatgaataccagttttccgtagatcagcttatggagctggccggactaagctgcgcaacagctatagcaaaggcatatccacccacgagcatgtctcgctcaccccctaccgtcttggtcatttgtggcccagggaacaatggcggagacggactcgtctgtgctagacacctgaaactgttcggttacgagccaactatttattatcccaagaggcccaacaagccgttgtttactgcattagttacccaatgccagaagatggatattccttttttgggggaaatgccagcagaattgcaaggtaggtgcagcgggactgtgccccaacaccccgagtgcccggaggggactcactgcgcacattgccagcacagacacagcttgaggatgggaaggggcgaagggaaatgttggagagatccagcacgcctggcccacatccctcattcacctcaaaagatatgcaaccctgtgtatcggtccctgcccctccccggaggcagtttctgtgcgacatgtagcggcgaggaggtgcccgctgaacctgccacattgccatag

SEQ ID NO: 10732 - DNA, 867 bp, synthetic construct
  misc_feature 1..867: note = source = /note="Description of Artificial Sequence: Synthetic coding sequence"
  source 1..867: mol_type = other DNA
atgagtcggctgcgcgcacttctgggactcgggctcctcgtggcaggctcccgagtgccccgtatcaaaagccagaccatcgcctgcagaagcggacccacatggtgggggcctcagaggctgaattctggaggaagatgggactccgaagtgatggcatccaccgtggtcaagtatctatcccaggaggaggcgcaagccgttgaccaggaacttttcaatgaataccaattctctgtggatcaattgatggaactggccggtcttagttgtgcgaccgcaatcgccaaagcttacccacccacttctatgtcgcggagtccccctactgttcttgtaatttgcggacctggcaacaacggaggagatgggctggtgtgtgccaggcacctgaaactgttcggctatgaacccactatatactatccaaagaggccgaataagcctttgtttacggcactcgtcacccagtgccagaagatggatattcccttcctaggggaaatgcccgctgagcctatgactattgatgagctttatgagctggtagtggacgcgattttcgggttctcctttaagggcgatgtacgcgaacctttccacagcatcctgagcgttctgaagggtctgaccgtgcctatcgctagtattgacattccttccggatgggatgtggagaaagggaacgccggaggtatccagcccgatctcttgatctccttaaccgcccctaaaaagtctgcgacgcaattcactggcagatatcactatctgggcggtcggtttgtaccgccagctctggagaagaagtaccagctgaacctgccgccttacccggatactgagtgcgtctacaggctgcagtag

SEQ ID NO: 10733 - DNA, 879 bp, synthetic construct
  misc_feature 1..879: note = source = /note="Description of Artificial Sequence: Synthetic coding sequence"
  source 1..879: mol_type = other DNA
atgcatctgaggctgatttcctggcttttcattatcttaaactttatggaatacatcggctcacaaaacgcaagccgcggtcggagacagcgccgaatgcatccaaatgtgtcccagggatgccagggtggttgtgcaacatgctctgattataacggatgcctgagttgtaagcctcggctgttctttgcccttgagcggatcgggatgaagcagattggagtgtgtttgtcaagctgcccctccggctattatggaacgcgatatccggatatcaacaagtgcacaaaatgcaaggccgattgcgacacctgcttcaataagaacttttgtactaagtgtaagtcaggtttctatctccacttaggaaaatgcctggacaactgccctgaggggctggaagctaataatcacaccatggagtgcgtgtctattgtacattgtgaagttagcgaatggaatccctggtccccatgcacaaagaaaggaaaaacatgcggatttaaaaggggcactgaaactagggttcgggagataatacagcatccgtcagcgaaggggaacctgtgtccccctactaatgaaactcgcaagtgcacagtccagaggaaaaaatgccagaagggtgagcgcggtaagaagggcagggagagaaaacgaaagaagccaaataagggtgaatctaaagaagcaatccctgatagcaagtccctcgagagttctaaggagatccctgagcagagggagaataaacagcagcagaaaaaacgaaaggttcaggataaacagaagtcaggcatcgaagttaccttagccgagggcctgacttcggtgtcccagcggacacagcctacgccttgtcggaggcgctatttgtag

SEQ ID NO: 10734 - DNA, 2871 bp, synthetic construct
  misc_feature 1..2871: note = source = /note="Description of Artificial Sequence: Synthetic coding sequence"
  source 1..2871: mol_type = other DNA
atggagacccaagaactgcgcggtgctttggctctgctgctgctatgttttttcacttccgcctcacaagatctccaggtcatcgacctgcttactgtgggggagagccggcaaatggtggcggtcgctgaaaagataaggactgccctgctgacagccggtgacatttacctccttagtaccttccggctccctccaaagcagggaggcgtgctattcggactctactcaagacaggacaacacaaggtggctagaagcaagcgttgtgggaaagattaataaggtccttgtgaggtaccagcgcgaagatgggaaggtgcacgcggttaaccttcagcaagccggtctagccgacgggagaactcatactgtactcctgaggctgcgcggtccatccagacctagtcctgcactgcatttgtatgtcgactgcaagctgggagaccagcacgccggactccccgcactggcacccatcccccctgccgaagtggacgggctggagattcgcaccggccaaaaagcctatctgaggatgcaggggttcgtggaaagcatgaagatcattcttggcggaagcatggctcgcgtaggagcattgagtgagtgccccttccagggcgatgaatctatccactccgctgtgactaacgctttgcactctattctgggagagcagacaaaagccttggtaactcagctgaccttgttcaaccagattttggtggagctgcgggacgacataagagatcaggttaaggaaatgtccctgatcaggaacaccattatggagtgtcaggtctgtgggttccacgagcagagaagccattgctctccaaatccgtgcttccgcggagtggattgcatggaagtttacgagtatccgggataccggtgtggaccctgcccaccagggcttcagggaaatggcacacattgctccgatattaatgagtgcgcacacgccgatccttgttttccaggatcctcttgcatcaacacaatgccgggtttccactgcgaagcgtgccccagaggctataaagggacccaggtcagcggcgtcggcatagactatgcgcgtgccagtaaacaagtgtgtaacgacattgacgagtgtaatgatggtaataatgggggatgtgacccaaattctatttgcacgaacacggtgggttccttcaagtgcggtccttgcaggctgggcttcctggggaaccagagtcaaggttgtctgccggcacgcacttgccacagccccgcacattccccttgtcacatacacgctcattgtctcttcgagaggaatggagcggtaagctgccaatgtaatgtgggctgggccggtaatgggaacgtgtgtgggaccgatacagacattgacgggtaccccgaccaggccttgccctgcatggataacaacaagcactgtaagcaggacaattgcttgctgacaccaaattcaggccaagaagatgccgataacgatggagtgggagaccagtgcgatgatgacgccgacggcgatggtatcaaaaacgtggaggacaattgccgcctgttcccgaacaaggaccaacagaactccgatacagactcattcggcgacgcctgtgacaactgcccgaatgtgcctaataatgaccagaaagacaccgatgggaatggagagggcgatgcctgcgacaatgatgttgatggtgacggtattccaaatggcctggataactgccccaaggtgcccaaccctctgcagacagatagggacgaagacggtgtaggggacgcatgcgattcctgtccggagatgagcaatcccacccaaactgatgccgacagcgatctggtcggcgacgtttgtgataccaacgaggactccgacggagacgggcatcaggacacaaaggataattgcccacagctgccaaacagcagtcaattagactccgacaacgacggcctgggggatgaatgtgacggcgacgacgataatgacggaatccccgattacgtgcctcctggtcccgacaactgtagattggtgcctaaccccaaccagaaagattccgacgggaacggagttggcgacgtttgcgaggatgatttcgataacgacgccgtggtcgaccctttagacgtgtgtccggagtctgcagaggttaccctgactgatttccgcgcttaccagaccgtcgtgctggatcctgagggagacgcccagatcgacccaaactgggtggtcctgaatcagggcatggagattgtacagacaatgaattctgatccgggtctagccgtggggtacactgccttcaacggggtcgattttgaagggacattccatgtaaacaccgtaacagacgatgactacgctggcttcctattcagttaccaggatagtggaagattctatgtagtgatgtggaagcaaacagagcagacatattggcaggccactccctttagggctgtcgctcagcccggattgcagctgaaggcagtcacatccgtgtctggcccaggagagcatttgcgcaatgccctttggcatactgggcacacacccgaccaggtgaggctactatggaccgaccccaggaacgtgggatggagggacaaaacaagttaccgttggcaactgctacaccgaccccaggtgggctacatccgtgtaaaactgtacgagggtccccaactggtggcagatagcggggtaattattgatacctctatgagaggtggcaggcttggagtcttttgcttttctcaagagaacataatctggagtaatctccaataccgctgtaatgataccgttccagaggattttgaacctttccggagacagcttctccagggacgggtgtag

SEQ ID NO: 10735 - DNA, 1110 bp, synthetic construct
  misc_feature 1..1110: note = source = /note="Description of Artificial Sequence: Synthetic coding sequence"
  source 1..1110: mol_type = other DNA
atgcttccatggctgttggtcttttcggctttggggattcaagcctggggcgattcaagctggaacaaaactcaggccaaacaagtgagcgaagggctgcagtacctcttcgaaaacatttcacaattgacggaaaaggacgtcagtacaacggtttcacggaaggcatggggggctgaggccgtggggtgctctatccaattgaccaccccagtcaacgttcttgtgattcatcacgtacctgggctggagtgtcacgaccaaaccgtgtgcagccagcggctgagggagctgcaggcccaccatgtgcacaacaactctgggtgtgacgtggcctataacttcctggttggagacgatggcagagtgtacgagggggtgggctggaatattcagggggttcacacccagggctataataatatcagcttgggtttcgcctttttcggaacaaagaaagggcacagccccagcccagccgctctcagcgcaatggaaaatctgatcacttacgcagtgcagaaaggccatttgtcttcatcctacgtgcagcctctgctaggcaaaggggagaactgtctggccccacgacagaagactagcctcaaaaaagcctgtcctggggtcgttccgaggagcgtgtggggcgctcgggagacccactgtcctaggatgactctcccagccaagtatggaattataatccatacagccggtaggacctgtaatatctcagacgaatgtcgccttttagtgagagatatacaaagtttctacatcgaccgcctgaagtcttgcgatatcggatacaatttcctagtcggtcaagatggcgctatctatgagggagtcgggtggaatgtgcagggatcaagcacacctgggtacgacgacattgctctgggaattacatttatgggtaccttcactgggatccctccaaatgcagcagctctggaggcagcccaagatctcatccagtgcgccatggttaaaggctaccttaccccaaattaccttctcgtgggacattcagatgtggcacgtacattatcgcctggccaggctctttacaatattatctctacctggccccatttcaagcattag

SEQ ID NO: 10736 - DNA, 675 bp, synthetic construct
  misc_feature 1..675: note = source = /note="Description of Artificial Sequence: Synthetic coding sequence"
  source 1..675: mol_type = other DNA
atggagaagatcccatttgtactgggcggtaaccttcagggcggagagttggtggtcgcctacccttacgatctcgtacgaagcccgtggaagactcaagagcacacacctaccccagacgaccacgtgttccggtggctggcctacagttacgcttccactcatcgactgatgaccgacgcacggaggagagtctgccataccgaggactttcagaaagaagaggggacagtgaatggtgcgagctggcatactgtagcgggaagcctcaatgattttagttatctgcacacgaactgtttcgaactctctatttacgtagggtgcgacaagtatccacacgagagccagctccccgaagaatgggagaacaaccgggagagtttaatcgtgttcatggaacaggttcatcgcggaatcaagggcctggtccgagattcacatggcaaaggcattcccaatgctatcatatctgtggagggcatcaaccatgatatcagaaccggcagggtcagcttgcagaagctgtcccttgcatgccgccgagtccgttgtgcgtttgctctcagctctagctcaactatgattgtgagacccccacagccctatgggaccgtgccacactcttcccctgacccagtgacaacaaaaatcagcccccttcggaacttctag

SEQ ID NO: 10737 - DNA, 285 bp, synthetic construct
  misc_feature 1..285: note = source = /note="Description of Artificial Sequence: Synthetic coding sequence"
  source 1..285: mol_type = other DNA
atgccagtgatcgctgggggtatattggcggcattattgctgctgatcgtggtagtactttgtctttatttcaaaatacacaacgcacttaaggcggcaaaggaacccgaggccgtcgccgtgaaaaatcataatccagataaggtctggtgggcgaagaactcacaggcaaagacaatagccaccgagagctgccccgcactccagtgttgcgagggatatagaatgtgcgcatcctttgactctctgcccccttgttgctgcgacatcaatgaaggcctgtag

SEQ ID NO: 10738 - DNA, 285 bp, synthetic construct
  misc_feature 1..285: note = source = /note="Description of Artificial Sequence: Synthetic coding sequence"
  source 1..285: mol_type = other DNA
atgcccgtgattgcgggaggaattctcgccgctctactcctgctcattgtggttgtcctctgtttgtatttcaaaatccataacgctctgaaagctgccaaagaacctgaggcggttgccgtaaagaaccacaacccagataaggtgtggtgggcaaaaaattcgcaggccaaaaccatcgcaacagagagctgccccgctcttcagtgttgcgaaggatacagaatgtgtgcgtccttcgacagcctgcctccctgttgttgcgacatcaacgaggggttatag

SEQ ID NO: 10739 - DNA, 1026 bp, synthetic construct
  misc_feature 1..1026: note = source = /note="Description of Artificial Sequence: Synthetic coding sequence"
  source 1..1026: mol_type = other DNA
atggtccccgctgctggcgcacttctgtgggtgctgctgctcaaccttggccctcgtgccgctggtgcacagggccttacacaaacccctacagaaatgcagcgcgtgtcgcttaggttcggtggacctatgacacggtcttatagatcaactgcaaggacggggcttccgagaaaaaccagaatcatcttggaggatgagaatgatgccatggcagatgcggaccgcctagccggtccggctgccgctgagctgttggcagccacagtctcaacagggttctctagaagcagcgccatcaatgaggaggatggaagttcagaagagggcgtcgtgatcaatgccggtaaggattctactagtagagagctgcccagtgcaacgcccaacacagccggatcttcatccaccagattcattgctaattcacaggagccagagatccggctcacctcttcactgccccgttctcccggaaggtcaaccgaagacctccccggttcacaggccaccctgtctcaatggagcacacccggaagcactccgtctaggtggccttcaccctcgcccacggccatgcctagtccagaggacctccggttggtgctaatgccgtgggggccttggcactgtcattgtaaatccggaactatgagcagatccagaagcggaaaacttcatggacttagcggcaggctgagggtgggcgctctgagccagctgcgcacggagcacaagccatgtacatatcagcagtgtccctgtaacaggctgagggaagaatgtccgcttgatacttccctgtgtactgacaccaattgtgcatctcagtctaccaccagcacccgaacgaccaccacccccttccccactatccacctgcgctcctcccccagtttgccacctgcgtctccctgccccgcactcgccttctggaaacgcgtacggatcggcctggaggacatttggaactccctatcctcagtattcacagagatgcagcccatcgaccgcaaccagaggtag

SEQ ID NO: 10740 - DNA, 366 bp, synthetic construct
  misc_feature 1..366: note = source = /note="Description of Artificial Sequence: Synthetic coding sequence"
  source 1..366: mol_type = other DNA
atggatgtactgtttgttgccatcttcgccgtgcccctgattctgggacaggaatacgaggatgaagaacgactcggtgaggatgagtattatcaggtcgtgtattactacactgtgacaccttcatatgacgacttctccgcagatttcactatcgattactcaatattcgagagcgaagaccgactaaaccggcttgataaggacattacagaggccatcgagaccacgatctcgctggaaactgcccgagcggaccatccaaagccggttacggtaaagccagtcacgactgagccagttgaagagggatgttacgactccctcgatgggtcactggctcgcggaaattggaagataaaatag

SEQ ID NO: 10741 - DNA, 396 bp, synthetic construct
  misc_feature 1..396: note = source = /note="Description of Artificial Sequence: Synthetic coding sequence"
  source 1..396: mol_type = other DNA
atggacgtcctgttcgtggcaatctttgcagtgccactgatcttgggacaggagtacgaagacgaggagagattgggcgaggatgaatattatcaagttgtctactattacacagtcactcccagctacgatgacttcagcgcggattttacgattgattatagcatctttgagagcgaagatcggttaaatagactggacaaggacatcaccgaggccatagaaactaccatctctctcgaaactgcaagggctgatcatccgaagcccgtgaccgtcaagcccgtcacaactgagcccagtcctgaccttaacgatgccgtgtccagcctcaggtcccctatcccattgctactatcctgcgccttcgtgcaagtggggatgtactttatgtag

SEQ ID NO: 10742 - DNA, 396 bp, synthetic construct
  misc_feature 1..396: note = source = /note="Description of Artificial Sequence: Synthetic coding sequence"
  source 1..396: mol_type = other DNA
atggatgtccttttcgttgccatctttgccgtacccctgatcctaggtcaggaatatgaggacgaggagcggctaggagaggacgagtactaccaggtggtttattactataccgtcaccccatcctatgacgacttctcagctgactttactattgactactctatatttgaatccgaagaccgcctgaacaggctggacaaggacattacagaggcgatagaaacaaccatatcactcgagaccgcacgggctgaccaccccaaacctgttacagtcaagccggtaacaactgagcccagtcctgacctgaacgacgcagttagtagtcttcgcagccccattcccttgttgctaagttgtgctttcgtgcaggttgggatgtactttatgtag

SEQ ID NO: 10743 - DNA, 312 bp, synthetic construct
  misc_feature 1..312: note = source = /note="Description of Artificial Sequence: Synthetic coding sequence"
  source 1..312: mol_type = other DNA
atgtccgggaggggaaaagggggtaaaggactggggaaaggcggtgccaagcgtcatcgaaaggtgttgagagataacatccagggtattaccaagccggcaatacgcagacttgctcgtaggggcggagtgaagcgaatctcaggactgatctatgaggaaaccaggggtgtactcaaggtcttcctcgagaacgtgattagagatgccgtgacctataccgaacatgccaaacgtaaaaccgtgaccgcaatggatgtcgtttacgcactgaagcggcaaggtaggaccctgtacggcttcgggggatag

SEQ ID NO: 10744 - DNA, 312 bp, synthetic construct
  misc_feature 1..312: note = source = /note="Description of Artificial Sequence: Synthetic coding sequence"
  source 1..312: mol_type = other DNA
atgtctggccgagggaagggcggaaaaggactgggcaaagggggagctaagcggcataggaaagttctccgagacaacatccaaggcattacgaaacccgcaatccggagactcgcacggagaggcggtgtgaagcgcataagtggcctgatttacgaggaaacacggggagtactgaaggtattcctcgagaacgtgattcgagacgccgtgacctataccgagcacgcaaagcggaagacagtcaccgctatggacgtggtttacgccttgaagcgacaggggcgaactctgtacggctttggcggttag

SEQ ID NO: 10745 - DNA, 1404 bp, synthetic construct
  misc_feature 1..1404: note = source = /note="Description of Artificial Sequence: Synthetic coding sequence"
  source 1..1404: mol_type = other DNA
atgcttggaatctggatcgtcgcctttttattctttgggacgtcacggggtaaggaggtttgttacgagaggctcgggtgttttaaggacggtctgccctggacacgaaccttttcgaccgagcttgtagggttgccctggtcacctgaaaaaatcaacactcggttcctcctgtacacgatccataatcccaatgcctatcaagaaatatccgccgtgaatagttccaccatccaggcctcgtacttcggaacagataagataacgaggatcaatattgcagggtggaagaccgacgggaagtggcaacgagatatgtgtaacgtgctccttcagctagaggacattaactgtatcaatcttgattggatcaacggttccagggagtacatccacgccgtgaataacctgagagtggtgggcgctgaggtagcttacttcatcgatgtactgatgaagaaatttgaatactcgccttcgaaagtgcatctgattggacactcactgggagcccacctggcaggggaggctggctcaagaattccaggactcggtcggataacaggtctggacccggcaggcccatttttccacaacacccccaaagaagtacggctcgaccctagcgacgctaactttgttgacgtgattcacacaaatgcagcccgaatcctgtttgaattgggagtgggcacaatagacgcctgtgggcacttagacttctaccctaacgggggaaaacatatgcccggatgtgaagatttgatcacacctttgctgaaattcaatttcaacgcatataaaaaagaaatggcctctttctttgactgtaaccatgctcggtcttatcaattttacgctgagtcaatactgaatccagacgcgttcatcgcatatccgtgccgctcctatacgtcctttaaggcgggaaattgctttttttgcagcaaagaaggatgtcccactatgggacacttcgcagacagatttcattttaaaaatatgaaaactaacggctcacactattttttaaacacaggctccctgtcccctttcgcacggtggagacataaattgagcgttaagctgagtgggagcgaagtgacgcaaggaaccgtgttccttcgagtgggaggggctgtgcgcaagacaggggagtttgctatcgttagtgggaaactcgaacccggaatgacgtataccaaactaattgacgctgacgtgaacgtcggaaacattacctctgtacaattcatttggaagaagcacctgtttgaggacagtcagaacaaacttggtgccgagatggtgattaatacaagcggaaaatacggttataagtccacattttgctctcaggacattatgggcccaaacatcctgcagaatttaaaaccctgctag

SEQ ID NO: 10746 - DNA, 1287 bp, synthetic construct
  misc_feature 1..1287: note = source = /note="Description of Artificial Sequence: Synthetic coding sequence"
  source 1..1287: mol_type = other DNA
atgatcactggggtgttctccatgaggctgtggaccccagtcggggtcctcacaagtctcgcttattgtcttcaccagagaagagtcgccctcgcggaacttcaggaagctgatggacagtgtcccgtggaccggtctctactcaaactgaaaatggtgcaggtggtttttagacacggtgcgagatctccattgaaaccactgccccttgaagaacaggtggaatggaatcctcaactgttggaggtcccaccacagacccagtttgattatacagtaacaaatctggcaggaggcccaaagccttactccccctacgactctcagtatcatgaaaccactcttaaaggcggtatgtttgccggtcagctaacgaaggttggcatgcagcagatgtttgcactcggggagcgcctgcggaagaactacgtagaggatatcccattcctgtcccctacttttaacccacaggaggtgtttatcagatcaaccaatatctttaggaacctggagtccacaaggtgcctactagctgggctttttcagtgccaaaaggaaggcccaataattatacacactgatgaggcggactccgaggtgctgtatccgaattatcagagttgttggagccttaggcaaagaacccggggtaggcggcagaccgcctctcttcagcctgggatttccgaagatctcaagaaggtaaaagatcgcatggggattgactcatccgacaaggtcgatttcttcattctcctggacaacgtagccgctgagcaggcccacaacctcccaagttgccctatgctgaaacgttttgcaaggatgattgagcaaagggccgtcgataccagcctctacatcctgcctaaggaggacagggagtccctccagatggcagtaggcccttttctgcacatcctggagtcaaacttgctgaaagcagtcgactcagccacagctcccgacaaaattaggaagctgtatctgtacgcagcacacgatgtgaccttcatccccctgctgatgacactgggcatttttgaccacaaatggccacccttcgccgtggatctgactatggagctctatcaacacctggagagtaaggagtggtttgtacagttatactaccacggaaaggaacaggtgccccgtggatgtccagacggactttgtccgctcgacatgttcctgaatgccatgtcagtctacactctgagtccggagaagtatcatgcattgtgctcccagactcaggtgatggaggtaggaaatgaagaatag

SEQ ID NO: 10747 - DNA, 711 bp, synthetic construct
  misc_feature 1..711: note = source = /note="Description of Artificial Sequence: Synthetic coding sequence"
  source 1..711: mol_type = other DNA
atgtgtgtgacataccataacggcactggatattgtaaatgcccggagggtttcttaggtgagtattgccagcacagggacccatgtgagaagaaccgctgccagaatggcggaacatgtgtggcccaagctatgctgggcaaggcgacctgtcgctgcgcttctggttttactggcgaggactgtcaatattccacttcgcacccctgctttgtaagtcgtccatgccttaatggaggcacctgccacatgctttcccgagatacatatgagtgcacttgccaggtggggttcacagggaaagagtgccaatggactgacgcctgcctcagtcatccttgtgccaatggaagcacgtgcaccactgtcgcgaaccagttttcatgcaagtgtctgacaggctttaccggccaaaagtgtgagaccgacgtaaacgaatgtgatattcctgggcactgtcagcacgggggaacctgcttgaacctcccaggatcttaccagtgtcagtgtctgcagggttttacaggtcagtactgtgacagcctgtatgtcccctgcgccccttctccttgcgtgaatggcggaacctgccgccagactggcgatttcacttttgaatgtaactgtcttcccgagactgtgcgcaggggcacggaactgtgggagcgagatcgtgaggtttggaatggtaaagagcatgacgagaactag

SEQ ID NO: 10748 - DNA, 990 bp, synthetic construct
  misc_feature 1..990: note = source = /note="Description of Artificial Sequence: Synthetic coding sequence"
  source 1..990: mol_type = other DNA
atggttacaaaggctttcgttctgctggctatctttgcagaagctagcgccaaatcttgtgccccaaataaggccgatgtgatcttggttttctgctatcccaaaaccataattacaaaaattcccgagtgcccgtatggttgggaagtgcaccagcttgctcttggaggtttatgctacaatggtgtccatgagggcggatactatcagtttgtcataccggacctaagccccaaaaacaagagttattgcggaactcagagcgagtacaaacctcccatctaccacttctattctcacattgtcagtaacgacactacagtgattgtaaagaatcaacccgtgaactacagtttttcgtgcacctaccattcgacatacttggtcaatcaggctgcttttgatcaacgtgtagcaaccgtgcacgtaaagaatggatccatgggaactttcgagagccaactttcactcaacttttatacaaatgctaaattcagcattaagaaagaggcaccatttgtcttagaggcatctgagatcggaagcgacctctttgctggggtggaagctaaagggctgtccatcagattcaaagttgtactgaacagttgttgggctacgccctcagcagatttcatgtatcccttacagtggcagctgatcaataaagggtgccctaccgacgaaaccgtactcgtgcacgagaatgggagggaccacagagccaccttccagtttaatgcttttcggttccagaacatacctaagttgtccaaggtgtggcttcattgtgagaccttcatatgtgatagtgaaaaactttcttgccccgtaacttgtgataagcgtaagcgcctgttacgggatcagaccggaggagtgctggttgtggagctttcgctccggtccagaggatttagctctctgtatagcttttctgacgtccttcaccacttgataatgatgttgggaatctgtgctgtgttgtag

SEQ ID NO: 10749 - DNA, 1161 bp, synthetic construct
  misc_feature 1..1161: note = source = /note="Description of Artificial Sequence: Synthetic coding sequence"
  source 1..1161: mol_type = other DNA
atggcgcagtggcactgttcacagaggacacaggctggtggtcatggtgtgggggagcggctggctcaatgccaggaccagtcaagtcgccacgccgcagaactgcgggacttcaagaacaaaatgctcccattgctagaagttgctgagaaggagagggaggcattacgaaccgaggccgatacaatttccggcagggttgatcgactggaaagagaggttgattatctagagactcaaaaccccgctctgccctgcgtggagtttgacgagaaagttacaggaggacccggtacaaagggaaagggaaggagaaacgagaagtatgacatggttactgactgcggctataccatctcccaggtgagatcaatgaagatcctgaaacgatttggagggcctgcagggctctggaccaaggatcccctgggccaaactgagaagatctacgtcttggatgggacacaaaatgacaccgctttcgtttttcccagactgcgagactttacattagcaatggccgctagaaaagcctcccgcgtgagagttccgttcccatgggtaggcaccgggcagctggtctatggcggttttttatattttgctagacgacccccaggtaggccaggcggagggggagagatggaaaacactctgcagctgataaagtttcacctggctaacaggacggtggtcgattcatccgtgtttcccgctgaaggtctgattcccccatacggccttactgctgatacctacatcgaccttgccgcagacgaagaaggtctgtgggctgtgtatgccactcgggaggatgatcgccacctgtgcctagcaaagttagacccacagaccctggatacagaacagcagtgggatacaccttgcccaagagaaaatgcagaggccgcttttgtgatctgtggcactctttacgttgtatacaatacacggcctgcttctcgcgctcgtattcagtgctccttcgacgcatccggtactttgactccagagcgtgcggctctgccttacttccctcgcaggtacggtgcccatgcttctctgcgctacaatccccgagagcgccaactttacgcctgggatgacggctaccagattgtctataaattggagatgcggaagaaggaggaagaggtgtag

SEQ ID NO: 10750 - DNA, 510 bp, synthetic construct
  misc_feature 1..510: note = source = /note="Description of Artificial Sequence: Synthetic coding sequence"
  source 1..510: mol_type = other DNA
atgtccgaacgcgttgaaagaaattggtcgacaggtggctggctcctggcactgtgtctggcatggctatggactcatttaacccttgccgctctgcagccccctactgcaaccgtcctcgtgcagcagggcacctgtgaggttatcgcggcacatcgatgctgcaaccgaaataggatcgaggaacgttcccagacagttaagtgctcctgcttcagcgggcaggttgctggaactacacgcgctaagcctagctgcgttgatgacctgttattagctgctcactgcgcgcgacgggatcctcgcgcagcacttaggctgttgttgccgcagccgccaagcagctgtagagatggtggcgtacgttggtcaccagcttgcagggggaggagtgtccggtgtagcagaacctgtagggacggcgctgccgctgttgacacaaaatccaaaccacccaggtcccacgactcctcttgggggtcccgtccaggccaggagagactggactag

SEQ ID NO: 10751 - DNA, 693 bp, synthetic construct
  misc_feature 1..693: note = source = /note="Description of Artificial Sequence: Synthetic coding sequence"
  source 1..693: mol_type = other DNA
atgaggctggcaggccctcttcgaattgtggtgctcgtggtaagtgtgggcgtaacttggattgtggtctcgatacttctggggggacctggcagtggatttccacgcatccaacagctgtttacatctcctgaaagcagcgtcaccgcagccccaagggcccgaaagtacaagtgcgggttaccacagccttgcccagaggagcacctagcctttagagtggtctccggggcagcgaacgtgataggacctaaaatctgcctggaggataaaatgctcatgtcatccgtaaaagacaacgtgggtaggggactgaatatagcactggtgaacggggtttccggcgagctcatcgaggccagggcatttgacatgtgggcaggcgatgtcaatgacctgctgaaattcatccgtcctttacatgaaggaactctggtcttcgtggcaagttatgacgatcctgcaactaagatgaacgaagaaaccagaaagctcttttcagagttaggctctaggaatgctaaagaactcgcttttagagattcctgggtttttgttggcgctaagggcgtgcagaataaatctccctttgagcagcacgtgaagaacagcaagcactcgaataaatatgaagggtggcccgaagcgctggagatggagggctgcattcctcgcaggtcaacagccagttag

SEQ ID NO: 10752 - DNA, 1176 bp, synthetic construct
  misc_feature 1..1176: note = source = /note="Description of Artificial Sequence: Synthetic coding sequence"
  source 1..1176: mol_type = other DNA
atgctacgaccaggcggagcagaagaagcggctcaactgccgctacggagggccagtgctccggtgcccgtgccgtcccccgcagctccagatggatcacgcgctagcgctcgcctaggactcgcctgcctcctgctattacttttgctgacgttgcccgctagagtagataccagctggtggtatataggagcactgggggcacgggtgatctgcgacaacatccctggactggtctctcgccaacgacaactgtgtcagagataccctgatataatgcggagtgtaggggagggggctcgggaatggatccgagagtgtcagcaccagtttcgacaccatcgttggaactgcactacgctggacagggatcacacggttttcggtcgtgtcatgctccggtcgtcaagggaggcggcatttgtgtacgccatttcatccgcgggagtcgttcacgctattacacgggcatgctcacaaggcgagctgagcgtctgctcatgtgacccctacacacggggtaggcatcatgaccaaaggggagattttgactggggtggctgttcagacaacatacattacggagtgaggtttgccaaggctttcgttgatgctaaggaaaagaggctgaaagatgcacgcgcattgatgaacctccacaacaaccgatgtgggaggaccgctgtgaggagatttttaaagctggaatgcaaatgccacggggtgagcggttcatgtacactgagaacctgttggagggccctcagcgactttcggagaaccggcgactatctaaggcggcgttacgatggtgctgtccaggttatggccactcaagatggggctaattttacagctgccagacaaggataccggagagctacccgcacggacttagtctatttcgataactctcctgattactgtgtactggacaaagcagctggcagcctgggaacagcaggacgggtgtgtagcaagaccagcaaaggtacagacggctgcgagattatgtgctgcggcagaggctatgacacaacccgggtcaccagggtgactcagtgcgaatgtaaatttcattggtgttgtgccgtgagatgtaaggaatgtcgcaacaccgttgacgttcatacctgcaaagctcccaagaaggccgagtggctagaccaaacttag

SEQ ID NO: 10753 - DNA, 1119 bp, synthetic construct
  misc_feature 1..1119: note = source = /note="Description of Artificial Sequence: Synthetic coding sequence"
  source 1..1119: mol_type = other DNA
atgctggacgggctgggagtggtggccattagtattttcggtatccagctgaaaaccgaaggaagcctgaggactgcagtgcctggcatacctacccagtctgcatttaacaaatgtctgcagcgctatataggagcactgggggcacgtgtaatttgcgataacatcccaggtttagtgtcaagacagaggcaactttgtcagcgctaccccgatatcatgaggagcgtaggcgaaggcgctcgggaatggattagggaatgccagcaccagttccgccaccatcggtggaactgtacgactctcgatcgggatcacactgtctttggccgagtgatgcttcggagcagtcgggaggccgcatttgtgtacgcgatttccagcgcaggggtcgtgcacgctataactagggcatgttctcagggagaattgtctgtgtgctcctgcgacccatacactagaggtcgccaccacgaccagcggggtgactttgattgggggggatgttcagacaatatccattacggagtgcgattcgctaaggccttcgtcgatgcaaaagagaaacggctgaaggacgcacgagcactgatgaaccttcacaataatcgatgcggaaggaccgcggttagaaggtttctgaagctcgagtgtaagtgccacggtgttagcggtagttgtacgctccgaacgtgttggagggcgctgtcagattttagaaggactggagactatctgagacgccgatatgacggagcagtgcaagtgatggcaacccaggacggggcaaacttcacagcagccagacagggatacaggcgcgcaactagaaccgatcttgtatatttcgacaactcccctgactattgcgttctagacaaagccgctggttcactgggcaccgccggtcgcgtctgttcgaagacctcaaaaggaaccgacggatgtgagataatgtgctgcgggaggggctatgatacaaccagggtcactcgagtgacgcagtgcgagtgcaagttccattggtgctgtgcggtgaggtgtaaagaatgcaggaacacagtggacgtgcatacttgtaaggcccctaagaaggccgagtggctcgatcaaacctag

SEQ ID NO: 10754 - DNA, 1242 bp, synthetic construct
  misc_feature 1..1242: note = source = /note="Description of Artificial Sequence: Synthetic coding sequence"
  source 1..1242: mol_type = other DNA
atggaaaatatgttgctttggctcattttcttcacccccggatggactctgatcgacgggtccgagatggagtgggattttatgtggcatctgagaaaggtgcccaggattgtcagtgaaagaacgtttcatctgacctccccagcctttgaggccgatgcaaagatgatggtgaataccgtgtgcggtatcgagtgccagaaagagctccccacacccagcctatccgaactcgaggattatctatcttatgaaacagtttttgaaaacggaacaagaacactaacacgagttaaggtgcaggatcttgtcctggagccgacgcagaacataaccaccaagggagtgtccgtgcgacgcaagagacaggtgtacggcactgattcaagattctccatcctagacaagcggtttctcaccaacttcccctttagcacggcggtcaaactaagcacaggttgttccgggatactcatctcgccccagcatgtgctcacggcggcacactgcgtccacgatggaaaggactacgtcaagggttctaaaaaattgcgtgttggtcttttaaagatgcgaaataaatccggaggaaaaaagcgcagggggtcgaagcgctcaaggcgcgaggctagtgggggagatcaacgcgagggtacacgtgagcacctccgagaaagagcaaaggggggaagacggaggaagaagtccgggagaggccaacggattgcagaaggcaggccttctttccaatggacgcgcgtgaagaacactcacatccctaagggctgggcgcgaggtgggatgggggacgctacacttgattacgattatgctctgttagagctcaaacgggcacataaaaaaaagtatatggaattagggatttcgcccactatcaagaagatgccaggcggtatgatccacttctccgggttcgacaacgatagggctgatcagttggtctacaggttttgctcagtgtcggacgaatctaacgacctgctgtatcagtattgcgatgcagagtccggcagtaccggctccggcgtgtatctgagactgaaggacccagataagaaaaactggaagaggaaaatcatagctgtgtactccgggcaccagtgggtggatgtgcatggcgtgcagaaagactataacgtggcagtacgcataactcccctcaaatatgctcagatttgcctgtggattcatggaaatgacgcaaactgcgcctacggatag

SEQ ID NO: 10755 - DNA, 1143 bp, synthetic construct
  misc_feature 1..1143: note = source = /note="Description of Artificial Sequence: Synthetic coding sequence"
  source 1..1143: mol_type = other DNA
atgggtgcgacaactatggatcagaagtcactgtgggctggctctgcgtacaagctcgtttgctatttcaccaattggtcccaggacaggcaagagcccggaaagttcacacccgagaacatcgaccccttcctttgctctcacttgatttactcgttcgccagcatagagaataataaagtgatcattaaggataagtctgaagttatgctgtaccagacaatcaactctctgaaaaccaaaaatccgaagttaaaaattctgctgtccatcgggggttacctcttcggaagcaagggttttcacccgatggtggatagttccacatctagactggaatttattaattccatcatactcttcctgagaaatcacaattttgatggccttgacgtcagctggatttatcctgatcagaaggaaaacacacatttcacagtgctcattcacgagcttgcagaggcctttcaaaaggactttaccaaaagcactaaggagcgattgctgctgacagccggagtgtctgcgggaagacagatgatcgacaattcgtaccaagtagaaaaacttgcgaaagacctggatttcatcaatttactgtcttttgatttccacggcagttgggaaaagccactcattacgggccacaactcaccgctgtccaagggatggcaggatcgtggtccatcgtcgtattacaacgttgagtatgcagtggggtactggatacacaagggaatgccctcggaaaaagtcgtcatgggcatccctacctacggtcactccttcacacttgcatctgcagagacaaccgtgggcgcaccggcttcagggccaggtgccgcaggtccaattacagagtctagtggctttctggcctattacgaaatatgccagtttttaaaaggtgctaagatcacccgacttcaggatcagcaagtgccctacgctgtgaagggtaaccagtgggtgggttatgacgacgtcaagagcatggaaactaaagtccaatttctaaagaatctcaacctgggtggtgcaatgatttggtccatagacatggacgattttactggcaagagctgcaaccaggggccatatccactggtacaggctgtaaagcggagtttgggcagcctgtag

SEQ ID NO: 10756 - DNA, 1173 bp, synthetic construct
  misc_feature 1..1173: note = source = /note="Description of Artificial Sequence: Synthetic coding sequence"
  source 1..1173: mol_type = other DNA
atgggagccaccacaatggaccagaaatcattatgggcgggtgtcgtcgtcttactcttactgcaaggagggtccgcctacaagttggtgtgttattttaccaattggtcacaggataggcaggagccgggaaagtttacccccgagaatatcgatccattcctgtgcagccatttgatttatagttttgccagtatagagaacaacaaggtcatcatcaaggacaaatctgaggttatgctgtatcaaacgattaattcactgaaaacgaagaaccccaagttgaagatcctcctgtccattggcggttacctgttcggcagcaagggatttcaccctatggtggacagcagtacctctcgactggagtttattaactctatcattctcttcctccgcaatcacaacttcgacggactggacgtgtcttggatctaccccgatcagaaagagaatactcattttactgtgctgatacacgaactggcagaagcgtttcaaaaggatttcaccaaatccacaaaggaaaggctgctgctgaccgcgggagtgagtgccggaaggcagatgatagataattcttatcaggttgagaagctggcaaaggatctggatttcataaatcttttgtcttttgatttccacggtagctgggagaagccactcattaccggccataatagccccctctccaaagggtggcaagatcgcggacccagcagttactataacgtggagtatgccgtaggatattggatacataagggtatgcccagcgagaaggtggtgatgggaattcctacctacgggcatagcttcaccttggcaagcgccgagaccaccgtgggagctcccgcatccggaccaggggcagctggtccaatcaccgagtcgagcggatttctggcatattatgagatatgccagtttttaaaaggggctaagattactcgactgcaagaccagcaggttccatacgctgtaaagggcaaccagtgggtggggtacgatgacgttaagtctatggaaaccaaagtgcaatttctgaagaatctcaatctgggcggtgccatgatttggagtatcgatatggacgactttaccgggaagtcatgcaaccaggggccttatcctctagtgcaggcagtcaagaggtccttgggtagcctgtag

SEQ ID NO: 10757 - DNA, 2202 bp, synthetic construct
  misc_feature 1..2202: note = source = /note="Description of Artificial Sequence: Synthetic coding sequence"
  source 1..2202: mol_type = other DNA
atggctggaggcagagagacctgcctgccactgatcggcttcatcctgatctgcttaaagatggtggctagtgccaaatccgcccctgagattcccacgattgatcaggcgtactccaaattgtcaaactccattactgtcgaatgggcaaccgttccgggagctacgagctacctactgacagccgaggatggggatacagtcatcgaaactaccgtggctaactcacccggaaccgtaaccgggctcaaagccgctacgtggtatgaaataaccataagatccatctccgcagccggtcgtagccaagcttccccacctaagcaggcaaaaactgtgctcgcggcacctattttggaagtctcaagccctagctccgatagcatcttggtccaatgggaggctgtttacatggccattgctttttcagtcagtatcatgagagcaaatgggttgggatccatctggaaagaaaacacaaccaacactagcctcacattcacatctctcgaagctggcacgctgtacaccatcaaggcatacgcctggaatgccaatagaattccaggcgatgactcaacgtgcaaccagcgcacttcacctcgggctcccgcaaatatccaggtttcctttgatagcggcgcactgaaggcctcattttcatgggccagagccgagggggcattcaactatacagtcatggcgctctctgactcttccgagttgacctgctccactaccttcagcagctgcacaatctcctccctgcagtgcggcactgaatatctgataagtgtactcgctagcaatgatgccggatcctccaagtcgtcctctgccatgacattaaaaaccgtggcctgcgctcccggtcgggtcaccatccaggaagatcctccaggccacctgagcgtggcatggtccagcgtcgatcttggcgattattacgtcgttttcgttaaatctgatgatgggctggaggttcattgcaacacatctttgacacagtgtaatttcttgagtgagtgtgggtttacttactttattagcgtctttgtgtacaacaaagccggtcagagccccctcggcgacatttttaattacaccacagccccttgctgccccagcgacattaacccagtactggttagctctgaccgggtggagattgtatggagtcctgttcgaggcgcagagttgtacgagaccaaggcggtcgacggctataacatggttgagtgcaacgacactacacccgcttgtacactgtctgcactggaatgcgatacaaaatacaacattaccgtgtattcatttaatgaagtcaggggcagtaatatgagttgtacgccccaatttatcactaccgcgccttgctcacccgaaattaagaacgtttctcgagacgccttctctatgatcaatgtgcattggaggagcactaatgatgacgcgacttatacggtgactgcccagggagagaaaggattatatcagtgttcgtcaacgggcgagagctgcactatgagaggattaccctgcgggagtgttttcagtgtgacagccgtggctgaaactcaggccggtcggagcctgccaagctatagcgtaccgttggagactgttccctgttgccccacagggttgacagtaacccagataacccaaagcgtcattaatgtatcttggactattgggcgagtcgcccagacccacgtggctgtcttagagtctcatacaggccagtccaaatgccacactcaccaaaatcattgtctactgggatgcatcacctgtgggataaactacaccgtgacactgaaggcaatcagcgccactggcctcacagccgactgtagctaccagtcatacttttcgggcgcatgttgccccctcggagttaagttgtatagacttggcccaaacggaattagaatctattggcaggcttcgaggggctccgctaattactccaccgacctgtacgggtccaagggcattttcacctgcacgccatcagccggtttgagcttttgtgacgtcaccgaaatcccatgcggagacgtttacactgttatggtgtctcctgttgccaaaaccggtttgaagctaactttttgcccaaagaagatctactctgtcacatgttctggaagcacattggggatggtgatctaccgtggtaaaagaaacgaagagtag

SEQ ID NO: 10758 - DNA, 555 bp, synthetic construct
  misc_feature 1..555: note = source = /note="Description of Artificial Sequence: Synthetic coding sequence"
  source 1..555: mol_type = other DNA
atgaggggacaaggcagaaaagagtccctgtctgactctagggatttagacgggagttatgaccagctcactgacagcgtggacgatgaattcgagctgagtaccgtgtgtcacaggccagagggtctggaacagctccaggaacagactaaattcacaagaaaggagttacaagtactgtatagaggcttcaagaacgagtgtccttccggcattgtaaatgaggagaatttcaagcagatctattcccagtttttccctcagggagactcatccacctatgctacatttctctttaacgctttcgataccaatcatgacggctcagtgagctttgaggagatgctggacataatgaagtccatctatgatatgatgggaaaatacacctatccagcattgcgtgaggaagcccctcgcgagcacgtggagagcttctttcagaagatggaccggaacaaggatggagtcgtgaccatcgaagaatttatcgagagttgccagaaggatgagaacattatgcggtcaatgcagctctttgacaacgtcatctag

SEQ ID NO: 10759 - DNA, 759 bp, synthetic construct
  misc_feature 1..759: note = source = /note="Description of Artificial Sequence: Synthetic coding sequence"
  source 1..759: mol_type = other DNA
atgcggggacaaggacggaaagagagcctttccgactcccgagatctcgatgggagctacgatcaacttaccgggcatccccctggtcctacaaaaaaagctttaaagcagaggttcctgaaactgctgccatgctgtgggccacaagccctcccatcagttagtgagtctaacgtcgacgacgagtttgagctttccacggtgtgccaccgacctgagggattagagcagctacaggagcagacaaaatttactaggaaagaactgcaagtcctgtaccggggatttaaaaatgaatgtccttccggcattgtgaacgaggaaaatttcaagcagatctacagtcaattctttcctcagggagattcttcaacatatgctacttttctgtttaacgcttttgacacaaaccatgatggatcagtgtcttttgaggactttgtggccggtctgagcgttatcttacggggaactgtagacgacagacttaattgggctttcaacctgtatgatcttaacaaggacggctgcattactaaagaggaaatgttagacataatgaaaagcatctacgacatgatgggcaagtatacctacccagcgttacgagaagaagcaccccgagaacacgtcgaatcattctttcagaagatggaccggaacaaggacggggtggtgactatcgaggagtttatagagtcctgccagaaagacgaaaatatcatgcgaagcatgcagctgtttgataacgtcatctag

SEQ ID NO: 10760 - DNA, 1377 bp, synthetic construct
  misc_feature 1..1377: note = source = /note="Description of Artificial Sequence: Synthetic coding sequence"
  source 1..1377: mol_type = other DNA
atgcaggctactagcaatctccttaatctgttgctcctttctctgtttgcaggtctggatccaagcaagactcaaatctccccgaaggaaggctggcaagtttattctagcgcccaggaccccgacggcagatgcatttgcactgtggtggctcccgagcagaatctgtgcagccgggacgctaaatctcggcagttgcgccaactgctcgaaaaggtccaaaatatgtcccaatctatcgaagtcctcaatttaaggactcagcgggatttccagtacgtgttgaagatggagacgcagatgaaggggctcaaggctaagttccggcaaattgaggacgacaggaagacattgatgacgaagcacttccaggagctcaaagagaaaatggatgagcttctccccctgattcccgtgcttgaacaatacaaaactgacgccaaactcattacccagttcaaggaggaaatccgtaacctgtcagccgtgctaaccggtattcaagaggagatcggagcatacgactatgaggaactgcatcagcgcgtgctgtcattagagaccaggctacgggactgcatgaagaagcttacctgcggcaagcttatgaaaatcacagggccagtcacagtcaagacctcagggactcgttttggagcctggatgactgacccactggcctccgagaagaacaatcgcgtatggtacatggattcctacacaaacaacaagatagtgcgcgagtacaagagcattgctgattttgtctcaggagccgagagtagaacctataacctgcccttcaaatgggccggaacgaatcacgtcgtgtacaatggttctctatatttcaacaagtaccagagtaacattatcattaaatattcatttgacatgggaagggtgttggctcagagaagcctggaatacgctggctttcataatgtgtatccttacacgtggggtggatttagtgatatcgatctcatggctgacgaaatcgggctttgggctgtttacgccacgaaccagaacgcaggcaatatcgttatctcgcaacttaaccaagataccctagaagtgatgaaatcctggtctaccggctaccccaagaggagtgccggagagagctttatgatatgcgggacgctatacgtgaccaactctcacctgaccggagccaaagtgtattacagttatagcactaagacatctacttacgagtataccgacataccctttcacaatcagtatttccacatatctatgttggattataacgctcgagaccgggctctttatgcctggaataatggacaccaggtgcttttcaatgtgaccctgtttcacatcatcaagaccgaagatgacacatag

SEQ ID NO: 10761 - DNA, 915 bp, synthetic construct
  misc_feature 1..915: note = source = /note="Description of Artificial Sequence: Synthetic coding sequence"
  source 1..915: mol_type = other DNA
atgctgcccccaccacggccagccgcagctctcgccttgccggtcctactgctgcttttggtcgtcctgaccccacctcctactggagctcgaccctccccaggccctgattatctgcgcaggggatggatgaggctcctggcggagggggagggatgtgccccatgccggccagaggaatgtgctgctccgaggggctgcttggcaggaagagtcagggacgcctgcggctgttgttgggagtgtgccaatttggaagggcagctttgtgatctggaccctagcgctcatttctacgggcattgcggggagcagcttgagtgtcgattggacacgggcggagacctcagccggggagaagttcccgaaccactatgtgcctgtcgatcacagtctcccctgtgcgggagcgacgggcacacctattctcagatttgtagactccaagaagccgcacgtgcccgtcccgatgctaatttaactgtggcccatccagggccatgcgagtccggtccccagatcgtcagtcacccgtatgatacctggaatgtgacaggtcaggacgtgatcttcggctgcgaggttttcgcctaccccatggcgtctattgaatggcggaaagacggccttgatatccagctgccgggagatgatccacacattagcgtgcagtttcggggtgggcctcagaggtttgaggttacgggctggctgcaaatacaggctgtccgtcccagtgacgaaggaacataccgctgtctgggtaggaacgccttgggacaggtggaggctcctgccagcttgacagttttgactccagatcagctcaactccacgggaattcctcaactccgatctcttaatcttgtccctgaagaagaagccgaaagtgaggagaacgatgactattactag

SEQ ID NO: 10762 - DNA, 327 bp, synthetic construct
  misc_feature 1..327: note = source = /note="Description of Artificial Sequence: Synthetic coding sequence"
  source 1..327: mol_type = other DNA
atgaccccctctcgacttccttggctcctttcatgggtttcagcgacagcttggagggccgcaagaagcccactgctgtgccactctttacgtaaaacgagtagcagccagggagggaagtctgaactcgttaagcaatccctgaaaaagcccaagttgccggagggacgttttgacgcgccagaagattcccacctagagaaggaaccgctggagaagtttccagatgacgttaacccggtgaccaaggagaagggagggccacgcggacctgagcctactcggtatggggactgggagcgtaaagggagatgcattgatttctag

SEQ ID NO: 10763 - DNA, 663 bp, synthetic construct
  misc_feature 1..663: note = source = /note="Description of Artificial Sequence: Synthetic coding sequence"
  source 1..663: mol_type = other DNA
atggctggactatctaggggctcagccagagccctccttgcagctttgcttgcctctacactactggccctcctcgtgagcccagccaggggccgagggggacgagatcatggcgattgggacgaagcctctaggctgcccccattgccaccacgcgaggatgcagccagggtggctagattcgtgactcacgtgagcgattggggagcactggcaacaatttccacccttgaggccgtgcgtggacgacccttcgctgacgtgctctcactgtccgatggccctccaggcgcaggttccggcgtgccctacttctacttgagtccactgcaactctccgtgtctaatctgcaggagaatccgtatgcaaccctaactatgactctcgcacagacaaatttctgcaaaaagcacggcttcgaccctcaatctcctttgtgcgttcatattatgctctccggaacagttaccaaggtgaacgagactgaaatggatatcgccaaacactcgttattcatccggcacccagaaatgaagacctggcccagtagccacaattggttcttcgctaagttgaatattacaaatatatgggtactggactactttggtggtccaaagattgtcactccagaggagtactataacgtcacagtgcagtag

SEQ ID NO: 10764 - DNA, 2760 bp, synthetic construct
  misc_feature 1..2760: note = source = /note="Description of Artificial Sequence: Synthetic coding sequence"
  source 1..2760: mol_type = other DNA
atgggcctgttcagggggttcgtgttccttctggtcctctgtctgttgcatcagagtaacacgagcttcattaagttgaataacaatggttttgaagacatagttattgtcatcgaccctagtgtgccagaggacgaaaaaatcattgaacagatcgaggacatggtgacaacagcatcaacgtacctcttcgaggcaaccgagaaaaggtttttttttaagaatgtcagcattttaatcccagaaaattggaaagaaaaccctcagtacaagcggcctaagcatgaaaatcacaagcatgctgatgtcattgtcgccccaccaacgctgcccggacgggacgagccttacacaaagcaatttactgaatgtggtgagaagggcgagtacatccattttaccccggatttgctacttggaaaaaaacagaatgagtatggtcctccgggaaagctcttcgtgcacgagtgggctcaccttcgctggggggtatttgatgaatacaatgaagaccagcctttctaccgcgcaaaaagtaagaaaatcgaagctactcgctgctccgctggcatttccgggcgaaatcgtgtgtataaatgtcagggtgggagctgcttgagtagagcctgccggatcgatagcactactaaactgtatggaaaagattgtcaattctttcccgataaagttcagaccgagaaggcttcaatcatgttcatgcagtctattgacagtgtcgtcgaattttgtaatgagaagacccataatcaggaagcgccaagcctgcagaacatcaaatgtaatttcagaagcacgtgggaggtgattagtaatagcgaggattttaaaaatacaatacctatggtgacccctcctccccctccggtgtttagtctcctcaagatctctcaacgcatagtgtgccttgtgctggataagtccggctcgatgggaggtaaagatcgcttgaaccgcatgaatcaggcggcaaaacacttcctattacaaaccgttgagaacgggagctgggtagggatggtgcactttgacagtactgcgacgatagtgaacaaactgattcagattaaatcatccgacgagagaaacaccctgatggccggtctccctacttaccccctcggaggcacctcaatttgttccgggatcaaatatgcgttccaggtgatcggcgagttgcatagccagttagacggctctgaggtcctgcttctcacggacggtgaggacaacactgcctccagctgtattgacgaggtgaagcaatccggggctattgttcactttattgccttaggacgggctgcggacgaggccgtcatcgaaatgagcaagattacaggtgggtcccatttttacgtgtccgacgaagcccagaacaacgggctgattgatgctttcggtgctttgacctcaggtaataccgacctgtcgcaaaaatctttacaactagagagcaaaggcctcaccctgaattccaacgcctggatgaatgacaccgttattattgacagcacagtggggaaggataccttcttcctcatcacctggaactcattgcccccatccatttccctttgggacccatccggaaccatcatggagaactttactgtggatgccacctcaaaaatggcctacctgtccatccctggtaccgctaaagtgggtacttgggcatataatctgcaggcaaaagctaatcccgagacactgaccattaccgtaacctctcgagcggctaactcttccgtccctcctatcaccgtgaatgctaaaatgaacaaggatgtcaattccttccctagcccaatgatcgtgtatgctgaaattctgcagggatatgtgcctgtcctgggggcaaacgtgacagcctttatagagtcccagaatgggcatacagaggtactggagctgctggacaatggtgccggagccgacagtttcaaaaatgacggtgtgtacagcaggtacttcactgcctataccgaaaatggccgatacagccttaaggtgagggctcatgggggagctaacaccgcccgactcaagctaagacctcccctgaatagagcagcatatatcccaggctgggtcgttaatggggagatagaggcaaacccaccacgcccagaaatcgatgaggacacacagacaaccctggaggatttttcacgaaccgcttcaggcggtgctttcgtggtcagtcaggtgccttcactccccctgcccgatcagtacccacccagccagattaccgatctcgatgctactgtgcacgaggacaagatcattctgacatggacagctccgggagataacttcgacgtggggaaagtccaacgatatatcatccgtatctctgccagcatccttgatctacgcgactcttttgacgacgcactgcaagttaatacaactgacctgagtccaaaggaagccaactcaaaagaatccttcgcattcaagcccgaaaatatttccgaagagaatgctacgcatattttcatcgccatcaaatctattgataagagcaacctcacatcaaaagttagtaatatagcacaggtcaccctgttcattccccaggctaaccccgatgacatcgatccgacgcccacgcctactccaacccctacacccgacaagtcccacaactcaggtgtcaatattagtaccctggttctgagtgtcatcggttccgtggtgatagtaaactttattctatcaactacgatctag

SEQ ID NO: 10765 - DNA, 1938 bp, synthetic construct
  misc_feature 1..1938: note = source = /note="Description of Artificial Sequence: Synthetic coding sequence"
  source 1..1938: mol_type = other DNA
atggcacctagcgccgatcccggaatgagcagaatgcttccgttcttgctacttctgtggttcctgcccatcacagagggaagtcagcgggctgaacccatgttcacagccgtgactaattctgtgcttccccctgactatgacagcaatccgactcaattaaactacggagtcgccgttaccgacgtcgaccatgatggagacttcgaaatcgtcgtagccggatacaacgggccaaatctggtgcttaagtatgacagagctcagaaacgactagtgaacatcgcagtcgacgagagatcctcgccctattacgccctcagagacagacagggcaatgccatcggcgtgactgcttgcgatattgacggcgatgggagggaagaaatttattttctcaataccaacaacgcttttagcggcgtggccacttacacagacaagctgtttaagttccggaacaacagatgggaagacattctctctgatgaagtcaatgtcgccaggggtgtagctagcttgttcgccggacgtagcgttgcatgcgtggatcgcaagggatcagggaggtactctatatacatcgccaactacgcatacggtaatgtcggaccagatgccctgatcgaaatggaccctgaggcctctgacctgtctcgaggtatattagcccttagagatgtggccgcagaggccggtgtctctaagtatacggggggtcgaggagtctccgttggccctatcctgtcatcatctgcctcagacattttctgcgataacgaaaatgggcctaactttttattccacaacagaggcgacgggactttcgtggatgctgcagctagcgctggagtcgacgaccctcatcaacacggcaggggagttgccctagctgacttcaacagggatggaaaggtagatatagtgtacgggaattggaatggtcctcatcgcttgtacctgcagatgagcacgcatggaaaggtgcggttccgtgacatagcgagtcctaagtttagcatgcctagccctgttaggaccgttattacagccgactttgacaacgaccaggagctggagattttctttaataacatcgcatataggagctccagtgcaaatcggttgttccgagtgattagacgcgagcatggagaccccctgatcgaagaattgaaccccggtgacgccctggaacccgaagggcgtggaaccggtggggttgtcacagacttcgatggggatgggatgctggaccttattctgagtcacggggagtccatggcacaaccgcttagcgtctttcgcggaaatcaagggttcaataacaactggctgcgggttgttccgcgtactcgctttggcgctttcgcaagaggagcgaaggtggtcctctatacgaagaagagcggcgctcatctccggatcatcgatggcggttctgggtatctttgcgagatggaaccggttgctcacttcggattgggaaaagacgaggcttcaagtgtggaagtgacatggccagacggaaagatggtgagcagaaatgtcgcatcaggagagatgaacagcgttcttgaaatcctttaccctcgtgacgaggatacattgcaggatccagcacccctggaatgtggccagggtttctctcaacaggagaacgggcactgcatggacaccaatgaatgcatccaatttccgttcgtgtgccccagagataaacctgtctgcgtaaacacatatggctcatatcggtgccgtactaacaaaaagtgttcgaggggatacgaacctaacgaggacggcaccgcctgtgtggctcaggtggcttttcttggcggatactccagcgcggcttcccgtatcagcgaacccctcagtagagccagctatctcagcctgggactgggattatgtctccagctgtacgccctgtag

SEQ ID NO: 10766 - DNA, 1986 bp, synthetic construct
  misc_feature 1..1986: note = source = /note="Description of Artificial Sequence: Synthetic coding sequence"
  source 1..1986: mol_type = other DNA
atggctcctagcgccgatcccggaatgtctagaatgctgccctttcttctcctactctggttcctgcctattacagagggatcccagcgcgcagaacctatgtttaccgcggtgacaaactccgtactcccacctgactacgatagcaatcccacacagctcaattatggggtggccgtgacggatgtcgatcacgatggagactttgagattgtagtcgctggttacaatggccctaacctcgtactgaaatatgaccgagctcagaagaggctggtcaatattgctgtagatgaacgatccagcccatactacgctttacgcgataggcaggggaacgccattggagtgacagcctgtgacattgatggggatggtcgtgaggaaatctatttcttgaataccaacaacgcatttagcggcgtcgcaacctacacggacaagcttttcaaattccgcaacaacagatgggaagatatcctgtccgatgaggtgaacgtagcaaggggcgtggcctctctgttcgctggcaggtccgtagcatgcgttgatcggaagggaagcggtaggtatagtatctacatagcgaattatgcctacgggaacgtgggaccagacgcccttatcgaaatggatcccgaggcttccgacttgtcgcgcggtattctggcccttcgtgatgttgccgcagaagctggggttagtaagtatacgggaggtcgcggagtctccgtcggtccaatccttagttcctcagcgagtgatattttctgcgataacgagaacgggcctaacttcttatttcacaatcgaggtgatggcactttcgtcgatgccgcagcctcggctggcgtggacgatccacaccagcatggccgaggtgtcgcactggctgatttcaatagagacggtaaggttgatatcgtgtatggcaattggaatggaccccacaggctgtatcttcagatgtctacccatgggaaggtgaggtttcgtgacatagcatcaccgaaattttctatgccgtcccccgttcgaactgtgattactgccgacttcgataacgaccaagaacttgagatttttttcaataatatagcataccggtctagcagcgcaaaccgcctgttccgggtaatacggagggaacatggcgaccctcttatagaagaactgaacccaggcgacgccttggaacctgaaggacgcggaaccggaggagtagtgacagatttcgacggggacgggatgcttgacttgattctttcacatggagaatccatggcgcagccactatcagttttccgcggaaaccaggggtttaacaacaattggttacgagtggtgcccaggaccaggtttggggctttcgctagaggcgctaaggtcgttctttatacaaaaaaatccggcgcacacctgcgcatcatcgatggcggttccgggtacctgtgcgagatggaaccagtcgcccatttcggcttgggcaaggacgaagcgagttccgtcgaggtcacttggccagatggaaagatggtcagtaggaacgtggcttctggggagatgaattctgtgcttgaaattttataccctcgcgacgaggacacactccaggaccccgcaccgctggagtgtggccaggggttctcgcaacaagagaatggccattgtatggacacaaacgagtgcatacagtttcccttcgtctgccctagggataagcctgtgtgcgtgaacacctacggcagttatcgctgtcggacaaacaaaaaatgttctagaggatatgaacccaatgaggatgggactgcctgcgtcggcaccctcggacaatcaccgggaccaaggcctaccactcccaccgccgctgccgcaaccgcggctgcagcagctgctgccggtgcagccactgccgctcccgtgcttgtcgacggcgacttaaatcttggttccgtagtgaaggagagttgcgagcccagttgttag

SEQ ID NO: 10767 - DNA, 1230 bp, synthetic construct
  misc_feature 1..1230: note = source = /note="Description of Artificial Sequence: Synthetic coding sequence"
  source 1..1230: mol_type = other DNA
atggctctgactccgggttggggatcttcggcaggcccagttagacccgaactgtggctactgctttgggccgcagcttggaggctgggcgcatctgcgtgtcctgccctttgtacgtgtaccggtactactgtggattgccacggtaccgggttgcaagcaatccccaagaacattccacggaacacagagagactcgaactcaacgggaacaacattacaagaatccacaaaaacgattttgccggactcaaacagctccgggtgctccagctcatggagaaccagattggggctgtggagcgaggagcctttgatgacatgaaggagctggaacggttaagactgaaccgaaaccagttgcacatgcttccagagctcctgtttcagaacaatcaggctttatcacgcctagacttgagtgagaatgccatacaggccattcctagaaaggcttttcgcggagctacggatctgaaaaacctccaacttgacaagaaccagattagctgcatagaggaaggggctttcagagctctacgtggcttggaggtcttaactctaaataataacaacatcacaactataccagtctcttcttttaaccacatgcccaagctacggacttttaggctgcattctaatcacttattttgtgattgtcacctggcttggttaagtcagtggctacgccaacggcctacaatcgggctctttacccagtgtagtggcccagcctccctgcgtggccttaatgtggccgaggtacagaagtcggaatttagctgctcaggacagggtgaagcgggacgggtcccaacgtgtaccctttcttctggaagttgccctgctatgtgtacctgtagcaacggaattgtcgactgcaggggaaagggactgacagccattccagccaatctccctgagaccatgactgagatcagacttgaactcaacgggatcaaatcaatacctccaggggcattttccccctaccgaaaactgcgcagaatcgacctgtcaaacaatcaaatcgccgaaatcgctccagacgccttccaagggttgaggtcactcaatagcttgcatacaggacccgtcacttgcccacatactactgggacacactcatcccactgccgcgcatttgctgtggcggtgccgcatagcagaaacgacctagaggctatgttcgaggaggaggtgccccgaatcttttactccgcatag

SEQ ID NO: 10768 - DNA, 1143 bp, synthetic construct
  misc_feature 1..1143: note = source = /note="Description of Artificial Sequence: Synthetic coding sequence"
  source 1..1143: mol_type = other DNA
atggctttgacaccaggctggggttcttccgcaggccctgtgcggccagagctttggctgctcctgtgggcagccgcttggagattaggagcatccgcctgcccagccctctgcacatgcactggaaccaccgtggattgtcatggtacggggctccaggcaattccaaaaaatatccccagaaatactgaaagacttgaactgaatgggaacaatatcacccgaatccataagaatgattttgccggacttaagcaattacgcgtgctccagctcatggaaaaccaaatcggagccgtcgaacggggagcgtttgacgacatgaaggagctggaacgactcgatctcagtgaaaacgccatccaagccataccccgtaaggccttcagaggtgccactgatctaaagaacctgcagctggacaagaaccagatttcctgtatcgaggagggcgcttttagagctctgcgaggcttagaagtgctgacactgaacaataataacatcactactatccctgtgtctagttttaaccacatgcccaaactaaggaccttcagactgcacagtaaccacttgttctgtgattgccacctggcttggctttcacagtggctgcggcagcgacctaccattggactgtttacccagtgttccgggccagcatctcttagaggactgaacgtggccgaagtccagaagtccgagttcagctgctccggtcaaggcgaggcaggccgtgtgccaacatgcaccctctcaagcggcagttgtcctgccatgtgtacctgtagtaatggcatcgtggattgcaggggcaaggggctgaccgccataccagcgaacctccctgagactatgacagagatcaggctcgagttaaacgggattaagtcaatcccccctggcgctttttctccctatcgcaagctaaggagaattgatctgtctaacaaccaaattgcagaaatcgcccctgacgcctttcagggcctgaggtccttgaattctttggtcctctacggtaataagatcaccgacctgcccaggggagtctttggtggactatatactttacagctgctcctcctgaacgcaaataaaattaattgtatccgacccgatgcgtttcaggacctgtag

SEQ ID NO: 10769 - DNA, 2448 bp, synthetic construct
  misc_feature 1..2448: note = source = /note="Description of Artificial Sequence: Synthetic coding sequence"
  source 1..2448: mol_type = other DNA
atggctctcacccccggatgggggtcaagcgccggaccggtccgacccgagctatggctcctcctctgggctgccgcttggaggctaggagcgtctgcctgtccggcattgtgcacctgtacaggcactacagtggactgccacgggacaggcctgcaggcaatccccaagaatatacctagaaacactgagcgcttagagctgaacggtaacaacatcacccgcatccacaagaatgacttcgctgggcttaaacagttgcgagtcttacagctgatggagaatcagatcggcgctgtggagcgaggggcattcgatgatatgaaagaattagagaggctccgcctaaacagaaaccagctgcatatgctgcccgaactgctcttccaaaacaatcaggccctgtctcggttggacctttccgaaaacgcgatccaggccattcccaggaaagcttttaggggagccactgatctaaagaacttgcaattggataaaaatcagatctcttgcattgaagaaggagcctttcgagccctgagagggctcgaagtgttgaccctgaataataataatattacaacaattccagtctcctcttttaaccacatgccgaaactgcgaacctttaggttacactccaaccacctcttttgcgactgccatctagcctggctctcccaatggctgcgacagaggccaactatcggtctctttactcagtgctccgggcctgcctctctacggggactgaatgtcgctgaagtccagaagtccgaattttcttgttcaggccaaggagaggcaggccgagtccccacctgtacattatccagcggaagctgtcccgctatgtgcacttgctcaaacggtatcgtcgactgccggggtaaaggactcacagcaataccagctaacctcccagagaccatgaccgaaatcagattagagttgaatggtattaagtctatcccccctggtgcttttagcccttatcgaaagctccgcagaatctgtccactcagcttctgtagcccatgcagagacctgagcaacaatcagatcgccgagatagcaccggatgccttccaggggttaagatcccttaattcactagtgctttacggaaacaaaattaccgacttgccacgaggagtttttggtgggctatatacactacagctcctcctcttgaatgcgaacaagattaactgcattaggcctgacgcattccaagatctgcagaacctgtcgttactgtcgttatatgataataaaatccaaagccttgcgaagggaacatttaccagtttgcgagccatccagactctgcacttagcacagaatcccttcatctgtgactgtaacctgaagtggctcgccgatttcctgcgaaccaatccaatcgagaccagtggcgctcggtgtgccagcccaaggagacttgccaataagcgaatcgggcagattaagtcaaaaaagttcagatgctctgccaaagagcaatatttcattcctggaactgaagactaccagctgaactccgagtgcaacagtgacgttgtttgcccccacaaatgcaggtgcgaagcaaatgtcgtagaatgctcgagcctcaagttaactaagattccagagagaattccccagtccacagccgagctacgcctaaataacaatgaaatatccattctggaggcaactggtatgtttaagaaattgacccacctgaaaaagattaacctaagtaacaacaaagttagcgaaatcgaagacggcgcttttgaaggggcagcctctgtgtcagagctccacctaaccgcaaaccagctcgagtcaatcagaagcggaatgttccgcggactggatggcctgcgaacactgatgctgcgcaacaaccggatatcatgtattcataacgacagtttcacaggccttcggaatgttcgcctgttaagtctgtatgataatcagatcaccaccgtttctcctggtgcctttgatacactgcagtctctttctactctgaacttactcgcaaacccttttaattgcaactgtcagttggcttggttaggaggctggctcaggaaaagaaaaattgtaacaggcaaccccagatgtcagaaccccgactttctgagacaaattcctctccaagacgtggcattccctgatttccgatgcgaggaagggcaggaggaaggaggctgtctgccaaggccccaatgtccacaggagtgcgcctgcctagataccgttgtgagatgttcaaataagcacctccgggctctacccaaaggcatcccaaaaaatgtgacagaactctacctggacggaaaccagttcacgctcgtgcccggacaactgagtacatttaagtatctacagctggttattctctcatacaacgcgctgcagtgcattccaccactggccttccaatag

SEQ ID NO: 10770 - DNA, 4386 bp, synthetic construct
  misc_feature 1..4386: note = source = /note="Description of Artificial Sequence: Synthetic coding sequence"
  source 1..4386: mol_type = other DNA
atggccctgacaccgggttggggaagcagtgcaggtcctgtgcgtccagagttgtggctgctgctgtgggctgcggcttggcggctcggagcatccgcgtgtccagctctttgtacgtgtactggcactaccgtggactgtcacggaaccgggctgcaggccataccaaaaaatatccctcgaaatacagagcggctcgaactgaacggaaacaacatcactcgcatccataagaacgatttcgccggactgaaacagctgagagtgctgcagctaatggagaatcagatcggagctgtggagcggggagcctttgacgacatgaaggagctggagcgacttcggctgaatagaaaccaacttcatatgctgcccgagctacttttccaaaataaccaggccctgagcagactcgacctgagtgaaaacgcgatccaggctatccccaggaaggcatttcgaggcgctaccgatctgaaaaacctccagctcgataagaaccaaataagttgtatagaagaaggggcatttcgggctctccgaggtctggaagtgttaacgctgaataacaacaacattacaactatcccagtgtcctccttcaaccatatgccaaaattaaggacatttcgcctacacagcaatcacttgttctgcgactgtcatctcgcctggctcagtcaatggctgcgccagcgcccaactatcggactttttacccagtgttccggccctgcttcactgagggggctgaacgtggctgaagtgcagaagtctgagttctcctgctccgggcaaggggaggccggacgagtgccgacgtgtacactctcatccgggagttgtcctgcgatgtgcacctgctccaatgggatcgtggactgccgcggtaagggcctcaccgccattccagccaacctcccagagactatgaccgaaatccggctcgagctcaatggcattaagtccatcccgcctggggcatttagtccatatcggaaactgaggagaatcgacctgagtaataatcagatcgccgagatcgctcctgatgccttccaagggcttcgcagtctgaactccctggtcttgtacggtaataaaattacagacctccccagaggggtatttggcggactctataccctccagctgcttctcttgaacgctaacaaaattaactgtattaggcctgacgcctttcaggatttacaaaacctatccctgctatctctctatgacaacaagatccagtcacttgcaaaggggacctttacgtccctacgcgcaatccagacccttcacttagctcagaacccgttcatttgtgactgcaacttgaaatggctggcggattttctgcggacaaacccaattgagaccagtggagccaggtgcgcttctccacgtcggctggccaacaaacggataggccaaattaaatctaaaaaatttcgctgtagcgccaaagagcaatatttcattccgggaacagaggactatcagctaaactcggagtgtaatagcgacgtcgtatgtccacataaatgcaggtgtgaagctaatgtcgtggagtgctcttctttaaagctgacaaaaattcccgagcgcatcccccagagcacagctgagctgcgcttgaacaacaacgagattagcatactagaggcgacaggaatgtttaagaaattgactcacctaaaaaaaatcaacctgagtaacaacaaggtctctgagatcgaggatggggcttttgaaggagccgcatccgtaagcgagctgcatctcacagcaaaccagctggagagtattaggtccggaatgttccgtgggctggacggactcaggacactgatgctccgcaacaatcgcatctcatgtatccacaacgatagcttcactggcctaagaaatgttcgcttactcagtctatacgataatcagattactaccgtttcaccaggagccttcgataccctgcagtcgctctctaccttaaacttgctggctaacccttttaactgtaattgtcagctggcttggctcggtggatggctccgaaaacgcaaaatcgtgacaggcaatccccgatgtcagaatccagactttctccgacagattcccctgcaggacgtggcttttcccgacttccgctgtgaagagggccaagaagaagggggttgtctgcctcgtccacagtgcccacaagagtgtgcttgtcttgacaccgtcgtgcggtgcagcaacaagcatctccgggcattgccaaaagggatcccaaaaaatgtcactgaactctatctcgatgggaatcagtttacactggtgccgggtcagttgagcacctttaaatacctgcagttggtcgacctttcaaacaataagattagctcactgtccaattcatcttttactaatatgtctcagctgacgacacttatcctcagctataatgccctgcaatgtattcccccactcgcctttcaagggctccgaagtttgagactgctctcattgcacgggaatgatatttctaccctgcaggaaggcatcttcgctgatgttacttctcttagtcacctggccattggcgcaaacccactgtactgcgattgccatctgcgatggttgagtagctgggtcaagaccggatataaagagcctggcatcgccaggtgcgctggtccccaggatatggaaggaaagctgttgttaactactccggctaaaaagttcgagtgccagggccctccaactctggcagtgcaggccaagtgcgatttatgcctctcatctccgtgccaaaatcagggtacttgccataacgatccactggaggtgtataggtgcgcttgtccttccggatacaaaggtcgagattgcgaggtatctctggacagctgtagttcaggcccatgcgaaaatggagggacctgtcatgctcaagaaggcgaggacgcacccttcacttgctcctgccccacaggtttcgaaggcccaacgtgtggcgtgaatacggacgattgtgtcgaccacgcctgtgctaatgggggagtctgtgtagacggtgtggggaattatacatgccagtgtccactacaatacgagggaaaggcctgtgaacaactggtcgatctctgcagcccagacctgaacccttgtcagcacgaagcccaatgcgttggcactccggatggtcccagatgtgagtgcatgcctgggtacgccggagacaactgcagtgaaaatcaagatgattgtcgcgatcatcgatgccagaatggcgctcagtgtatggatgaggtcaactcttacagttgcctgtgtgccgagggctacagcggccagctttgcgaaattccccctcacctgccggcaccaaaaagcccgtgcgaagggacagagtgccagaatggggctaactgcgtcgatcagggcaatcgacccgtatgtcagtgcttgccaggatttggcggtccagagtgcgagaagctcctgagtgtgaatttcgtcgaccgtgatacttatctgcagttcacggacttgcagaattggcctagggctaatattaccctgcaagtctccaccgccgaggataacggaatcctgctctacaatggcgacaatgaccatatcgccgtcgaactttaccaaggacacgtacgggtgtcttacgaccccggttcctacccttcatctgcgatctacagtgccgagaccattaacgacggacagttccataccgtggaactggtcgcattcgaccagatggtcaacctgtcaatcgacgggggaagccctatgacaatggacaactttggaaaacactataccctgaattctgaagcccctctgtatgttggcggaatgccggttgacgtaaattccgccgcattccggttgtggcagatcttaaacggcaccgggtttcacggatgtatcagaaatctctacatcaataacgagctccaagatttcaccaaaacacaaatgaaacccggtgtagtgccagggtgtgagccctgtcgtaagttgtactgcctgcacggaatctgtcagcccaatgctactccaggacccatgtgtcactgcgaggctggttgggtggggttgcactgcgaccagccggctgatggaccatgccacggccacaagtgtgtgcacgggcagtgtgtgccacttgatgccctcagctattcttgccaatgccaggatggatacagtggcgctctctgcaaccaatcccccagcgccggtggaacacttagcggcacctttacccgctcccggggtgctatgccctccgccagaccacgcgcaccctgtcatggctggtctgcaggcgctcgcgctcaggccagagccgctgccagggccttcggatag

SEQ ID NO: 10771 - DNA, 570 bp, synthetic construct
  misc_feature 1..570: note = source = /note="Description of Artificial Sequence: Synthetic coding sequence"
  source 1..570: mol_type = other DNA
atggaagctacaggcacagacgaggtcgataagctgaaaactaagttcatttcagcgtggaataacatgaaatatagctgggtgctaaaaacaaaaacttacttctcccggaactcacccgtgcttcttttgggtaagtgctaccatttcaaatacgaggatgaggataaaacactcccagcagagtcaggctgcacaattgaagatcacgtgatcgcgggaaacgttgaggagttcaggaaggacttcatatcccgaatctggctgacctaccgtgaagagtttccacagatagagggcagtgccctaacaactgattgtgggtgggggtgcactttgcgcaccgggcagatgcttctggcccaggggcttatcttgcactttctgggaagagcatggacatggcccgacgccctgaacattgagaatagtgatagtgaaagctggacctctcacactgtaaaaaaattcaccgcctccttcgaagcctcactgtctggggagcgcgagtttaagacacctactatttcactcaaagaaaccattggcaagtattctgacgatcactag

SEQ ID NO: 10772 - DNA, 1377 bp, synthetic construct
  misc_feature 1..1377: note = source = /note="Description of Artificial Sequence: Synthetic coding sequence"
  source 1..1377: mol_type = other DNA
atggaagctactggaactgacgaagtggacaagcttaagactaaatttatttcggcttggaataacatgaagtactcttgggtcctgaaaacaaaaacatatttttcccgaaacagcccagtattattgttagggaaatgttaccactttaagtacgaggatgaggataaaacacttccagccgaatctggatgcaccatagaggatcatgtgatcgccggaaacgtcgaggagtttcggaaagattttattagccggatttggcttacctaccgcgaagagttcccccagatcgagggctcagcccttacaactgactgcggctggggatgcacattaagaaccgggcaaatgttattagctcaaggattgatccttcatttccttgggcgagcttggacctggccagatgcgcttaatattgagaactctgactccgagtcttggacatcacacaccgtgaagaagtttacagcctctttcgaggcatctctgagcggggagcgagaatttaagacacccactattagcctcaaggagaccattggcaagtattctgatgaccacgagatgagaaatgaagtgtaccataggaaaataatctcatggtttggcgacagccctctggccctgttcggcctgcatcaactgattgagtatgggaagaagtccggcaaaaaagctggagactggtatggtcctgcggtggtcgcacatatcctgcggaaggctgtggaggaagccaggcacccggatctgcagggtatcactatctacgttgctcaggactgtaccgtgtacaactctgacgtgattgataagcagtctgcctcaatgactagcgacaatgccgacgataaggcagtgattatcctggtgccagtacggctgggtggtgaacgcactaacactgattaccttgagtttgtgaaaggcattttatcattagagtactgtgtcggaattatcggcggtaaacccaaacagtcatattactttgcgggtttccaggatgactccttgatttatatggatccacattattgccagtcatttgtggatgtctccataaaggatttccccttggagacttttcattgccccagcccaaagaaaatgagttttagaaaaatggatccatcttgtactatagggttctactgccggaacgtgcaggatttcaagcgcgcttcagaggaaatcactaagatgctgaaattttcaagcaaagaaaaatatcctttattcactttcgtcaacggccactctagagattacgacttcacatctactaccaccaacgaggaggatctcttttccgaggacgagaagaagcagctcaagaggttcagcactgaggaattcgtgttactctag

SEQ ID NO: 10773 - DNA, 8178 bp, synthetic construct
  misc_feature 1..8178: note = source = /note="Description of Artificial Sequence: Synthetic coding sequence"
  source 1..8178: mol_type = other DNA
atggaacagactgactgcaagccatatcagcctttgcccaaagttaaacacgagatggacctggcatatacttctagcagtgacgagtctgaagatggacgcaagcctcggcagtcttacaactccagggaaaccttacacgagtacaaccaggaacttaggatgaactacaactcacagtctaggaaacgtaaagaggttgagaaatctacacaagagatggaattttgtgaaacaagccacactctctgcagcggttatcagaccgatatgcattcagtttcgcgacatggctaccagctagaaatggggagcgacgtcgacacagaaaccgaaggcgctgcctctccggaccacgcactccgcatgtggataagaggaatgaaatctgaacactcaagttgtttaagtagcagggctaatagcgccctgtctctaaccgatacagaccatgaaaggaagagcgatggcgaaaatggctttaaattctcacctgtgtgttgtgacatggaggcccaagcgggttccacccaggatgtccaatccagtccccacaaccagttcaccttccgcccactgcccccacctcccccaccgccacatgcttgtacttgcgccagaaagccccctcccgctgctgacagcctccagaggcggagcatgacaacaagatcccaaccctctcctgcggcacccgctccgccaacatccacccaagactcagtgcacctgcataattcatgggtgctgaactccaatatccccctcgaaacgcggcattttctcttcaagcatgggtcaggatcatcagcaatcttcagcgcagcaagccaaaactatcctcttacatcaaatacggtctattcccccccaccccgacccttaccccgttctaccttcagtcgaccagctttcacttttaataagccctaccggtgctgcaattggaaatgtacggctctgagtgccaccgcgattactgtgacgcttgccctcctgttggcctatgtgatcgccgtgcacctcttcggcctcacgtggcagctgcagccggtcgagggagaactctacgccaacggagtttccaaagggaatcgaggaaccgaatccatggacacaacatattcccctattggaggtaaggtgtctgacaagagcgagaagaaggtgtttcaaaagggcagagccatagataccggtgaagtcgacatcggggctcaggtaatgcaaaccattccgcctggcctgttttggaggtttcaaataacgatccaccaccccatctatctgaagttcaacattagtctggcaaaggattctctgttgggcatctacggacgtagaaacatcccacctacccatacccagttcgactttgtcaaactgatggatggtaagcagttagtgaaacaggacagtaaaggttcggatgacactcagcatagcccgcgtaacctgatactgaccagccttcaggagaccggatttatcgaatacatggatcagggaccgtggtatctggccttctataatgacggcaaaaagatggaacaggtcttcgttttaaccaccgcaatcgagatcatggatgattgcagtacaaattgcaatggaaatggcgaatgcatctccgggcattgtcattgttttccaggctttctgggacctgattgcgctcgggatagctgcccagtgctgtgcggtggaaacggtgagtacgagaaaggccattgcgtgtgtcgtcacggctggaaagggcctgaatgcgacgtcccagaagaacagtgtatcgacccgacttgctttggacacggcacgtgcataatgggcgtgtgtatatgcgttcccggatataagggagagatctgtgaggaagaggactgcctggatccaatgtgttcaaatcatggtatctgcgtgaaaggcgagtgtcattgcagtacaggctggggtggggtcaattgcgaaacaccactcccggtgtgtcaggaacagtgcagcggccatggaacttttctccttgacgcgggagtctgctcttgcgaccctaaatggacagggtctgactgttctaccgagctgtgcactatggagtgtggctcacatggggtgtgtagtcgtggcatttgtcaatgtgaagaaggctgggttgggccaacctgcgaggaacggtcttgtcatagccactgtaccgagcatggccaatgcaaagacggcaagtgcgaatgttctccgggttgggaaggcgatcactgcaccattgcccactacctggatgcagtaagggacggttgcccgggactgtgctttggaaacggacgttgtacactggaccagaatggatggcactgtgtttgtcaggtcgggtggtccggaaccggctgtaatgttgtgatggagatgctgtgtggcgacaacctggataacgatggagacgggctcactgattgcgttgatcctgattgctgtcaacagagcaattgttatatctcacccctttgtcaagggagtcccgaccctctagacctgattcaacagtctcaaacactgttttcccagcatacttctaggcttttctatgatcggatcaagtttctaattgggaaggactctacccacgtgattccgcctgaggtttcctttgattccaggcgggcatgcgtgatcagaggacaggtggtcgcaattgatggcaccccactggttggcgtgaatgtcagcttcttacaccactccgattatggctttaccatcagccggcaagatggaagctttgacctcgtggctataggaggcatttcagtaatcctgattttcgatcgctcgcccttcctcccagagaagaggaccctctggttaccctggaatcagtttatcgtggtggagaaggtgaccatgcagcgcgtcgtgagtgaccctccctcctgcgacatttctaatttcatatcccccaatccaatcgtgctgccaagcccattaacaagcttcgggggttcctgtcctgaaagaggcactattgtcccggagctgcaggtggtgcaggaggagatccctatcccgtcctccttcgtgagactctcctatctgagtagcaggacccccggttataagaccctcttgcgtatcctcctgacacactccaccatccccgtcgggatgattaaggtccacctcacggttgcagtggagggtcgtctcacccagaaatggttccctgccgcaatcaatcttgtctatactttcgcctggaacaaaactgatatctacggacaaaaagtgtggggactggctgaggctctcgtgagcgtgggctacgagtacgaaacatgtccagatttcatactgtgggagcagcggaccgtcgtgctgcaggggtttgaaatggacgccagtaacctggggggttggagtctgaacaaacaccacatcctcaatccacagtcagggattatacataagggaaatggggagaatatgttcatcagccagcagcctccggtgataagcaccatcatgggcaacggtcaccagcgcagcgtagcgtgtaccaattgtaatgggcctgcacataacaataaactgttcgccccagtcgctctggcctccgggccagacggaagcgtatacgtgggtgatttcaacttcgtgaggcgcattttcccatcaggtaacagcgttagtatattagaattatccacatccccagcccataagtattacctggccatggatcctgtgtcggagtctctgtacctatcagatactaacactaggaaggtgtataagctgaaaagcttagtcgaaactaaggatctatcgaagaatttcgaagtcgtcgcaggcactggggatcagtgcttgccctttgatcaatctcactgcggcgacggcggtagagccagtgaagcctctctgaacagtccacgtggaatcaccgtcgatcgacacggctttatttacttcgtggacggtacaatgattcgaaagattgacgagaacgccgttattactaccgtgataggatctaatggattgacctctacacaacccctgtcttgcgatagcggcatggacattacacaggttcgcctcgaatggcctactgatctggcagtgaatccaatggataactcgctgtacgtattagataataatattgtgctgcagatcagtgaaaatcgaagggttagaattatagctggcaggcccatccactgtcaggtgccaggtatcgatcactttttagtctctaaggtagccatccacagtacccttgagagcgctagagctatcagcgtttcccacagtggactgttatttattgccgaaactgatgagaggaaggtcaatcgtatccaacaagtgacaaccaacggagaaatctatataatagccggagcccctaccgactgtgactgcaagatcgacccaaactgcgattgcttctccggagacggcggatacgctaaggatgccaagatgaaggctccatcctcgcttgctgtctcaccggatggtactctctacgtggctgacctggggaatgtgagaatccgcaccatctctcgcaaccaggctcacctcaacgatatgaatatctacgaaatcgcttcacctgccgaccaggagctgtatcagttcaccgtaaatggcacacacctacacactctgaatctaataactcgggactacgtgtacaactttacctacaattctgagggagatctcggagcgatcacgagtagtaatggaaacagcgttcatatacgtagagatgccggtggtatgcccctgtggctggtagtgcctggtggacaagtttactggctcactatcagtagcaatggagtgctgaaacgtgtttcagcccaaggttataatcttgctctcatgacatacccagggaatacgggcctgctagccaccaaatccaatgagaacggctggaccactgtatatgagtacgatccggagggccacctcacaaatgcaacattccccacaggggaagtgagctcgttccactccgacttagaaaagctgactaaagtcgaacttgatacatctaatagagaaaacgtcctgatgagtacaaaccttacagcgacatctacgatctatatcctgaaacaggagaatacccaaagtacataccgcgtcaatccagacggatcactgagggtaactttcgcctctggcatggagatcgggctgtccagcgaaccacatattctggccggagccgtaaacccgactcttggcaaatgcaatatcagccttcccggtgagcacaacgcaaatctaatcgagtggaggcagaggaaggaacagaacaaaggcaatgtcagcgccttcgaacggcgtctgagagcccataatcggaacctacttagcatagatttcgatcatattaccaggacaggaaagatttatgatgaccatagaaagtttactttacgaatcctgtacgatcagaccggaaggccaattctctggagcccagtgtccagatacaatgaggttaatatcacttactctccctcagggctagtgacttttattcagcgaggaacctggaacgagaaaatggaatacgatcaatctgggaaaattataagtcggacctgggcggacggaaaaatctggagctacacttacttagagaagagcgtgatgctgcttctgcacagccagaggcgatatatcttcgaatatgaccagcctgattgcctgctctccgtcactatgcctagcatggtccggcatagtttacaaacaatgctgtccgttggttattacagaaatatatatactcccccagactcaagcactagcttcatacaggactacagccgggacggtcggcttctacaaacgctgcaccttggcaccggaagaagagtgctgtacaaatatacaaaacaagctcgtttgtctgaggtgctgtacgataccacccaagttaccttaacctatgaggaatcctcaggggttataaagactatccatctgatgcacgatgggttcatctgtacaatcagatacagacagactggcccactgattggcagacaaattttccggttctcagaagaggggcttgtcaatgcccgtttcgactattcctacaacaactttcgggtgacctctatgcaagccgttatcaacgaaacccctttgcctatcgacctgtacaggtatgtcgacgtctccgggaggacagaacaattcgggaagttctccgttataaactacgacctgaaccaggtgattacaactacagtcatgaaacacacaaaaatcttctcagccaacggccaggtaattgaagtccagtatgagatactgaaggccatcgcttattggatgaccatccagtatgataacgtcggccgaatggtaatttgtgatataagggtaggcgtggatgccaacattaccagatatttctatgagtacgacgccgatggacagctgcagactgtgagcgtcaacgacaagacacagtggaggtattcctacgatttgaatgggaatatcaatttgctaagccacggaaagagtgcgagactgacccctttgcgatacgatctgagagaccggataacgcgtttgggagaaatccagtacaagatggacgaggatggctttctccggcagcgcggtaatgacattttcgagtacaactccaacggactccttcagaaggcatataataaggcctctggctggacggtgcagtactattatgacggtttagggagaagagtcgccagcaagagctccctcggacaacacctgcaattcttctacgcggacttgaccaatcccatccgcgtcacgcacttgtacaaccatacatcctcagagattacctcattgtactacgatctgcagggtcacctgatcgcaatggaattgtccagtggtgaggaatattatgtcgcctgtgacaatactggcacaccccttgctgtgttctcatcacgcggacaggtaattaaagagatattgtacaccccctatggggacatttaccacgatacataccccgatttccaggtcatcatagggtttcacgggggactctacgacttcctcaccaaacttgtacatctcggccaaagggactacgacgttgtggccggaaggtggactacccccaaccaccacatttggaagcagctgaatctgttgccaaagccgttcaatttatattcgttcgagaacaactaccccgtcgggaaaatacaggacgtggctaagtatactaccgacatacggtcttggctggaattatttggcttccaactacacaatgtgttgccaggttttccgaagcccgagctagagaacctggagcttacctatgagcttctccgtctgcagacaaagacccaagagtgggaccccggaaaaactatactgggaatccagtgcgagctgcaaaagcagttgaggaattttattagcctggaccagctgccaatgaccccccgatacaatgacggcagatgtctcgaagggggtaagcagcctcggttcgcggcagttccatctgtgttcggcaagggcattaaatttgccatcaaagatggcatcgtgacagccgatatcattggggttgctaatgaggatagccgcagactggcggctatcctgaataacgcacattatctggaaaacctgcatttcacgatcgagggtcgcgatacccactatttcataaagctgggctccttggaagaggaccttgtgcttatcggaaacaccggtgggagacggatcctggagaacggtgtaaatgttaccgtgtcccagatgaccagtgttctcaacggtagaactcgcaggtttgctgatatccagctgcaacatggtgcactctgttttaacatccggtacggcacaactgtggaggaggaaaagaatcatgtgttagaaatcgctaggcaacgggctgtcgcccaggcctggacgaaggagcagcggagactgcaggaaggcgaggagggtataagggcctggaccgagggtgaaaagcagcagcttttgtcaacagggagagtgcagggatacgacggctactttgtgctgtccgtagagcagtaccttgagctcagtgactcagccaacaatatacatttcatgcgtcagtccgagattggtagacgctac

SEQ ID NO: 10774 - DNA, 204 bp, synthetic construct
  misc_feature 1..204: note = source = /note="Description of Artificial Sequence: Synthetic coding sequence"
  source 1..204: mol_type = other DNA
atgaaaattcaactcttcttcttcattttgcacttttgggtcacgattttaccagcaaaaaagaaataccccgaatacggttcgttggacctccgccgtgagtgcagaatcggaaacggccagtgcaagaatcaatgtcacgaaaatgagatccggattgcgtactgcataagacccggaacgcattgttgcctgcaacaatag

SEQ ID NO: 10775 - DNA, 831 bp, synthetic construct
  misc_feature 1..831: note = source = /note="Description of Artificial Sequence: Synthetic coding sequence"
  source 1..831: mol_type = other DNA
atgaagcagattctccatccagcattagagacaacagcttgtaccaatcacttcaatgcagatccatgctccaccggatttgtcttcccagctatgacccttttccctgtgctgctttttctcgtggctgggctgttaccaagcttccccgctaacgaagacaaggatcccgcattcacggcgttgttgactacgcaaacccaagttcagcgcgagatcgttaataagcacaacgagctgcggagggccgtatctccccctgccagaaacatgcttaaaatggagtggaataaagaagccgcagctaatgcacagaaatgggctaaccagtgcaactataggcacagtaatcctaaggaccgcatgactagcctcaaatgtggagagaatttgtatatgtcaagcgcatcttcctcctggagtcaggctattcagtcctggtttgacgaatacaatgactttgactttggggtaggtcctaagactcccaatgcagttgtgggccactatactcaagtggtatggtacagcagctacctggttggctgtggtaacgcctactgccccaatcagaaggtgctaaagtattactatgtctgccagtactgcccggcagggaactgggctaacaggctgtatgtcccatatgaacagggagctccttgcgcctcctgtccagacaattgcgacgacggactgtgcaccaacgggtgcaagtatgaggatctgtactcaaactgcaagtcactaaaattgacccttacctgcaaacatcaactcgtgagagactcctgtaaggcgtcctgtaattgttcaaatagcatctactag

SEQ ID NO: 10776 - DNA, 1350 bp, synthetic construct
  misc_feature 1..1350: note = source = /note="Description of Artificial Sequence: Synthetic coding sequence"
  source 1..1350: mol_type = other DNA
atgttagccgaatggggtgcttgcctgttattggctgtggccctcttggggccagggcttcaagctcaggcaatggagggagttaagtgtggcggagtgctctcggcaccttccggcaatttcagttcacccaatttccccagactatacccgtacaacactgaatgcagctggctcatcgttgtcgctgagggctctagcgttctgttaacattccacgcttttgacctggagtatcatgacacatgcagcttcgatttcttagaaatttacaacggcgctagcccagataaaggcaaccttctgggtcgtttctgtggaaaggtacctccaccaccattcactagcagttggcacgtgatgagtgtcattttccacagcgacaaacatgttgcctcccatggattctccgctggctaccaaaaggatgtgtgtggaggtgtacttaccgggttatccggcgtcctgacctccccagaatatcccaacaattatcctaactcaatggagtgccactgggtcattagggcggcaggccctgcacatgtgaagctcgttttcgtggacttccaggtcgagggcaacgaggaatgcacctacgattacgtggccgtcttaggtggacctggccctaccaggggacatcactattgcggctccacaagacctcctacacttgtatcactgggacatgagctacaagtggtcttcaaatcggactttaatattggaggcagaggattcaaagcttactattttagcggggaatgccaggaggtgtacatggcgatgcgcggtaatttctcaagcccacaatacccctcctcctatcccaacaatataaggtgccactggaccatcaggctgcctccaggttatcaagtcaaggttttcttcctcgacttggacctcgaggagccaaacagcctgactaagacatgcgatttcgaccacctggccgcatttgatggagcctcagaggaggcccctctgttgggcaattggtgtgggcatcatctgccccctcctgttacaagcagtcacaatcaactccttctgctgctgcatacagatcgatcaacaacacgccgagggttttccgtcgcatatatcggtggtcaactcggctgcggatcaggctcaacggaaggagagggagaggctctgcagccccagagcctgcagtctccctcgagcattcctccagtctgtcccgcaccccctatgaatgggctgctgcagttgctcctgcactggttgcacccctgccccttgtcaggcccacttaggttggatggtacagcaccggcatgcttccactattgtcgagcatcctttccgagtttttag

SEQ ID NO: 10777 - DNA, 1434 bp, synthetic construct
  misc_feature 1..1434: note = source = /note="Description of Artificial Sequence: Synthetic coding sequence"
  source 1..1434: mol_type = other DNA
atgacctcgaagttcctgctcgtctcattcatattggccgcactgagcttatcaacaactttcagcctgcagcccgaccagcagaaggtgcttctcgtttcttttgacggatttaggtgggactatctgtataaggtgcctacgcctcactttcactacataatgaagtacggtgtgcacgtgaagcaggttacaaacgtattcattaccaagacctatcccaaccactatacactggtcaccggcctgtttgcagagaaccatggcatagtggccaatgacatgtttgacccgatccgaaataaatctttcagcctggaccacatgaatatctatgacagcaaattctgggaagaagctaccccaatatggattacaaatcagcgagcgggtcacacgagcggggctgctatgtggccaggcaccgatgtgaagattcataagcggtttcccacccattacatgccatacaacgagtcagtatccttcgaggacagagtcgcaaagatcattgagtggttcacttcaaaggaaccaataaacctcggactattatattgggaagacccggatgatatggggcatcatctcggtcccgactcgccactgatgggtccagtgataagtgatatagataaaaaactggggtacctgattcagatgctgaagaaggctaagttgtggaataccctgaatctgatcataacaagcgaccacgggatgacccaatgctctgaagaaaggctgattgagctggaccagtacctggacaaggatcattatactcttatcgaccaatctcccgtcgccgctattctccccaaagaagggaagttcgatgaggtgtacgaggctctaacgcatgctcatcctaatttaactgtgtataaaaaagaggacgtgcccgagcgttggcattataaatataactccagaatccagcctatcatcgccgtcgctgatgaaggatggcacatactgcagaataaatcagacgatttcctgctgggcaaccacggatatgacaacgctctcgcggatatgcatcctatcttcttggctcacggcccagctttccggaaaaattttagcaaggaagctatgaacagcaccgatctctatcccctactctgccacctcttaaacattacagcgatgccacataacgggtcattctggaatgtccaggacttacttaactcggcaatgccccgagtggtaccttatacccagagcaccattttgcttcccggaagtgtaaagcccgcagagtacgaccaggagggctcttatccctattttatcggcgtatcgttgggtagcattattgtgattgtgtttttcgttattttcatcaaacatcttattcactcacagattccagcattgcaggatatgcacgccgaaattgcgcagcccttgcttcaggcctag

SEQ ID NO: 10778 - DNA, 1479 bp, synthetic construct
  misc_feature 1..1479: note = source = /note="Description of Artificial Sequence: Synthetic coding sequence"
  source 1..1479: mol_type = other DNA
atgggaagtgccccttgggctcccgttctcctgttggcactcgggctccgcggactccaagctggtgcccgacgggctcccgaccccggatttcaagagcggttttttcagcaaagactggaccacttcaattttgagcggttcggaaataagacatttcctcagagatttttggtgtctgacaggttttgggtgcggggtgaaggacctatctttttctataccgggaatgagggcgacgtttgggccttcgcgaacaacagtgctttcgtcgctgaattggccgctgagcggggagcactcctagtgttcgccgaacatagatattacggcaaaagtttgccattcggtgcccaatccacccaacgcggacacaccgagctattaacagtcgaacaagccctggctgatttcgcagagctgcttagggctttaaggagggacctcggcgcacaggatgcacccgcaattgccttcggcggatcgtatggagggatgctgtccgcctacctgcgaatgaaatatcctcacttagtggctggcgcactcgccgcatccgccccagtcctggccgttgccggactaggcgattctaaccaatttttccgcgacgtcacagccgattttgagggtcagagccctaagtgcactcagggcgtaagagaagcatttcgacagattaaggatctcttcctgcagggagcctatgacacagtgcgatgggagtttggaacatgtcagcctctgtcagatgagaaggacctaacacaattattcatgtttgcgagaaacgctttcacagtcctcgcaatgatggactacccttaccccaccgattttctgggcccactccctgctaaccctgtgaaagtggggtgcgatcgcctgctgtcggaagcccagcggatcactggtctgagagcactggccggactggtgtataatgcgagcggttccgagcattgctatgatatttatcggctgtaccatagctgcgctgacccaacggggtgcggcactgggcctgacgcgagggcttgggattaccaggcgtgtacagagattaaccttacttttgccagcaacaacgtaactgatatgtttcctgacttgcctttcactgacgagctgcgccagcggtattgcctcgatacctggggtgtgtggcccaggcccgactggctgctgacatctttttgggggggagacctccgagccgcatcaaatataattttttccaatggtaatcttgatccttgggctggtgggggtatccgccgtaatttgtccgcttcggtaatcgctgtgaccattcagggaggggctcaccacttggatctacgggcaagccatccagaagatcctgcaagcgtcgtggaggctagaaagcttgaagcaaccatcatcggcgaatgggtcaaggcagctcgtagagagcagcaacctgcactgagaggcggtccccgtctgtccttatag

SEQ ID NO: 10779 - DNA, 2850 bp, synthetic construct
  misc_feature 1..2850: note = source = /note="Description of Artificial Sequence: Synthetic coding sequence"
  source 1..2850: mol_type = other DNA
atgatcctcagcctcctgttttcgctgggcggaccactcgggtggggtcttctgggcgcatgggcccaagctagctctacaagccttagcgatctacagagtagtcggactcctggagtgtggaaagccgaagcagaggacaccggaaaagatccagtgggtaggaactggtgcccctatcctatgtctaagctggttactctactggctctgtgtaaaaccgagaagtttctcattcatagccagcagccgtgcccacagggcgcacccgattgtcagaaagtgaaggttatgtatcgtatggcgcacaagccagtttaccaggtcaagcagaaagtacttacttccctggcatggcgctgctgtcctggctacaccgggccaaattgtgaacaccatgatagcatggcaattccagaacccgctgaccctggcgattctcatcaggaacctcaggacggtcccgtgtccttcaagcctggccacctggccgcagtcatcaatgaagtagaagtgcaacaggagcagcaggaacacctgctcggtgacctgcagaatgatgttcacagggtggcggacagtctaccgggtctgtggaaagctctgcccggtaacctcaccgcggcagtgatggaagcaaatcaaacaggccatgaatttcctgatcgctcactcgagcaagttttactgcctcacgtggataccttcctccaggtgcacttttcccccatctggcggagcttcaaccaaagcctgcacagcctcacacaggcgatcaggaatctgagtttggacgtggaagccaaccgccaggccatctccagggtccaggactccgcagtcgcaagggctgattttcaggaactcggagcaaaattcgaggccaaggtccaggaaaacactcagcgtgttggacagctgcggcaagacgtggaagaccgcctgcatgcccagcacttcacacttcacagaagtatctccgaactgcaagcagatgtggacactaagctaaaacgcctccacaaagcgcaagaagctcctggcactaatggatccctggttctggccacaccaggcgcaggtgccaggccagaacccgattctcttcaagcccgtctgggccagctccaacggaacctgtctgagctccacatgactaccgcccgtagggaggaggaactccagtacaccctggaggacatgcgcgctacgctgacgcgacacgtcgatgaaataaaggaactgtacagtgagagcgacgaaactttcgaccagatttctaaagtggagcgccaggttgaggaactgcaagtgaatcataccgccctgcgggagctgagggttatcctgatggaaaagagtttgatcatggaggagaacaaagaagaggtcgagcggcagttgctggagctgaaccttaccttgcagcacctgcaggggggtcatgccgacctgattaagtacgtgaaggactgcaactgccagaagctgtacttggatcttgatgttatcagagagggccagcgggacgctactcgcgctctggaggaaacgcaggtgtcactcgatgagaggagacagctcgatggctcctcactgcaggccttacagaacgccgtcgacgccgtgagtctagcagttgacgcacataaggctgagggcgagcgcgcacgtgctgctacttctaggctacgcagccaggtccaggccctcgatgacgaggtgggcgcactaaaggccgcagctgctgaagccaggcatgaggtgcgccagttgcatagcgccttcgcagcactgttagaggacgccctcagacacgaagcagtactcgcagctcttttcggcgaggaagtgctagaggaaatgtccgaacagacccctgggcctctgcccttatcttacgagcaaatccgtgtggctctgcaggatgcagcctctgggctgcaggagcaggcattagggtgggacgagttggctgccagggtgacagcccttgaacaggcatcagaacctcctcgacctgctgagcacctggagccatctcatgacgccggtcgcgaggaggccgcaactaccgccctagcgggacttgcgagggagctgcagtccctcagtaacgatgtgaagaacgtgggcagatgttgtgaggccgaggctggtgccggagcggcttcactcaacgcctccttgcacggattgcacaatgcgctgtttgccacccagagaagtctcgagcagcatcagaggttgtttcattccctatttgggaactttcaaggactcatggaggcgaacgtatcgcttgatctcgggaaattgcagactatgctctcaagaaagggcaagaaacaacagaaagatctagaggcaccaagaaaacgggacaagaaggaggcggagccactcgtggacatacgggttaccggccctgtacctggtgcccttggcgcagccttgtgggaagccggaagtcccgtggccttctacgctagcttcagcgaaggaacggcagccctacagaccgtgaaatttaacaccacttacatcaacatcgggtctagctattttcccgaacatggttactttcgcgcaccagagcgaggcgtctatcttttcgccgtctcggtggaattcggccctgggccaggtacaggacagctggtgtttggtggccaccaccgcacgcctgtctgtacaactggacaggggagcggatcaaccgctaccgtgttcgctatggcagaactccagaaaggtgaacgtgtctggtttgagctgacccaaggaagcattaccaagcgcagtctctcaggcacagccttcggcggttttctgatgttcaagacctag

SEQ ID NO: 10780 - DNA, 246 bp, synthetic construct
  misc_feature 1..246: note = source = /note="Description of Artificial Sequence: Synthetic coding sequence"
  source 1..246: mol_type = other DNA
atgagactgctcgtcctcagttcactgctgtgcatcctgcttttatgtttcagcattttttcaaccgaagggaaacggagacccgcaaaagcctggtcaggccgacgcacgagactttgctgtcatcgagtaccatcccccaacagtaccaatttaaaaggccaccatgtgcgcctctgcaagccctgcaagctagaacccgaaccaaggctgtgggtagtcccaggagctctcccacaagtgtag

SEQ ID NO: 10781 - DNA, 690 bp, synthetic construct
  misc_feature 1..690: note = source = /note="Description of Artificial Sequence: Synthetic coding sequence"
  source 1..690: mol_type = other DNA
atgtcgtttctccaggatcccagtttctttacgatgggaatgtggtccattggcgctggagccctgggggcagccgcactggccctgctcctcgctaacacggatgtgttcctctcaaagccacagaaggccgctctggagtacctggaggatatcgatctcaaaaccctcgagaaggagccacggacttttaaggcaaaagaactttgggagaagaacggcgctgtgattatggccgttcgcagacccggatgttttctatgccgggaggaggcggctgacctgtcaagcctgaagagcatgttggaccagctgggagtacctctttacgctgtcgtcaaagagcacatccgcaccgaagtgaaggattttcagccctacttcaaaggagagatctttctggatgagaagaagaagttctatggacctcaacgtcgtaaaatgatgtttatgggattcattcgcctgggtgtgtggtacaacttttttcgtgcctggaacggcggtttctctgggaatctggagggtgaaggcttcatcctcggaggggtgtttgtggtgggttcgggaaaacaaggcattttactggagcatcgggagaaggaattcggcgataaagtgaatctgctctctgtgcttgaggcagctaaaatgattaaaccgcagacgctcgcgtcagagaagaaatag

SEQ ID NO: 10782 - DNA, 657 bp, synthetic construct
  misc_feature 1..657: note = source = /note="Description of Artificial Sequence: Synthetic coding sequence"
  source 1..657: mol_type = other DNA
atggggatgtggagcatcggggctggcgcattgggcgcagcagccttagcactgctactcgccaacacagatgtgtttttgtccaagccccaaaaagcagccctggaatatctcgaggatattgacctgaagacacttgaaaaagagcccagaacctttaaggcgaaggagctctgggagaaaaacggcgctgtgattatggcggtacgcagacccggatgcttcctttgtcgggaggaggccgcagatctgagctctctgaaatccatgctggaccagctgggagtccccctgtacgccgtcgtcaaggagcatatccggaccgaagtaaaggatttccaaccctattttaagggagaaatttttctggacgagaagaagaaattctacggccctcagagaagaaaaatgatgtttatgggctttattaggctgggcgtttggtataacttctttagggcctggaacgggggattcagtggtaatctggaaggcgaaggattcatactgggaggagtgtttgtagtagggagtgggaaacaaggtatcctgctcgaacaccgagagaaagagttcggtgataaagttaatttgttgtctgttctcgaggccgcaaagatgatcaaaccccagactctcgcttccgagaaaaagtag

SEQ ID NO: 10783 - DNA, 690 bp, synthetic construct
  misc_feature 1..690: note = source = /note="Description of Artificial Sequence: Synthetic coding sequence"
  source 1..690: mol_type = other DNA
atgtctttcctgcaagacccctcattctttacaatgggaatgtggagcattggcgcaggggcactgggcgctgccgcactggccctgctcctcgcaaacaccgacgtgttcctcagcaaaccccagaaggccgctctggagtatctagaagacatcgacctgaagacgctggaaaaggagccacgcacatttaaagcaaaggagctgtgggagaaaaatggggctgtgattatggctgtccgacgcccagggtgtttcctctgccgtgaggaagcagcagatctgagcagcctgaaatcaatgctcgaccaattgggagtgcccctgtacgcggtcgtgaaggagcatataaggaccgaagtgaaggatttccagccctattttaagggcgaaatttttctggatgagaaaaagaagttttacggaccccagcggcgaaagatgatgtttatgggattcataagactcggcgtgtggtataatttctttagagcgtggaacggaggcttctctggtaacctggagggggaaggctttattttgggcggagtcttcgttgtgggctccggaaaacagggcatccttcttgaacaccgagaaaaggaattcggcgacaaagtaaacctgctttccgtcttagaggccgcaaagatgatcaagccgcagaccttagcaagcgagaagaaatag

SEQ ID NO: 10784 - DNA, 690 bp, synthetic construct
  misc_feature 1..690: note = source = /note="Description of Artificial Sequence: Synthetic coding sequence"
  source 1..690: mol_type = other DNA
atgagcttcctgcaggatcctagctttttcactatgggtatgtggtccatcggtgccggagccctgggtgccgctgccttggccctcctattggcaaatacggatgtgttcctttcgaaacctcagaaagccgcacttgagtacctggaggatatcgacttgaaaactctagagaaagaaccacgcacatttaaggccaaagagctttgggaaaaaaacggcgctgtgattatggccgtgcggaggcccggatgttttctgtgccgggaggaagcggctgacctgtcctcacttaaaagtatgctagaccagctcggggtgcctctgtacgcagtggtcaaagaacacatcaggactgaagtcaaagacttccagccatacttcaagggagaaatttttttggacgaaaagaagaagttttacggtcctcagagacgcaagatgatgttcatgggtttcattcgcctcggagtgtggtataactttttccgggcatggaatggtgggttcagcggcaacctcgaaggcgagggatttatcctggggggtgtgttcgtggtgggatcagggaaacagggcatactcttagaacatagggagaaggagttcggcgataaagttaacttgctctctgtgcttgaggctgccaaaatgatcaagcctcagacactggcgtcagagaagaagtag

SEQ ID NO: 10785 - DNA, 1248 bp, synthetic construct
  misc_feature 1..1248: note = source = /note="Description of Artificial Sequence: Synthetic coding sequence"
  source 1..1248: mol_type = other DNA
atgtcaccctttctgtatttagtcttgctcgtcctgggactgcacgccacaatacattgcgcatcccctgaaggtaaggtgacagcctgtcactcctctcagccgaatgccacactgtataaaatgagtagcattaatgcagattttgcttttaacctgtatcggagatttacggtcgagacccccgataagaatatcttcttcagccctgtgagcatctccgcagcactggttatgctgtcattcggagcctgctgcagcacacaaacagaaatcgtggaaacacttgggttcaatctaaccgacacccccatggttgagatccaacatgggttccagcacttgatatgctctctcaatttccctaagaaggagctggaactccagattggcaatgcgctctttataggcaaacatctcaaaccgctggctaaattcttgaatgatgtgaaaacactttacgagaccgaggtgttttctaccgacttcagcaatataagcgcagcaaagcaagagatcaacagccatgtagagatgcaaaccaaagggaaggtcgtggggctaatccaggacttgaaaccgaatacgatcatggtcctggtcaactatattcatttcaaagctcagtgggccaatccctttgatcccagcaagactgaggactcatctagtttcctgattgataagacaaccaccgttcaggtgcccatgatgcaccaaatggaacagtactaccatctcgtggacatggagctcaactgcactgtgctccaaatggactattcaaagaacgccttagcgctgtttgtgctaccaaaggaaggtcagatggaatctgtggaagctgccatgtcctccaaaacactcaagaagtggaatcgcctcctgcaaaaaggctgggttgacctctttgtgcccaagttctccattagtgccacatacgacctgggagccactctccttaaaatgggcattcagcacgcatattcggagaacgctgatttcagtggtctgacagaagacaacggcttgaaactttctaatgctgcccacaaggctgtgctgcacatcggagagaaagggacagaagccgctgccgtgcccgaggtagagctcagtgaccaaccggagaatacatttctgcaccccattattcaaattgaccgctcattcatgctcctcatacttgaaagatcaacccgctccatcctgttcctcggaaaagtcgtgaatcctactgaggcttag

SEQ ID NO: 10786 - DNA, 240 bp, synthetic construct
  misc_feature 1..240: note = source = /note="Description of Artificial Sequence: Synthetic coding sequence"
  source 1..240: mol_type = other DNA
atggcccctcagactctgctgccagtcttagttctgtgcgttctacttctgcaagcccaaggcggatatagggacaagaagcgaatgcagaagacgcagttatctcctgagatcaaggtgtgtcaacagcagcctaagctgtacctgtgcaaacacttgtgcgagtcacaccgcgactgccaggctaataacatatgttgttccacctactgcggtaatgtttgcatgagcatcttgtag

SEQ ID NO: 10787 - DNA, 486 bp, synthetic construct
  misc_feature 1..486: note = source = /note="Description of Artificial Sequence: Synthetic coding sequence"
  source 1..486: mol_type = other DNA
atgggcctgagcggactgctgcccattctggttccattcattctcctgggggacattcaggagccagggcacgcggagggtatactcggtaagccatgtcctaaaattaaggtagagtgcgaggtggaagagattgaccaatgcacaaagcccagggattgtccggagaacatgaagtgctgtccctttagcagaggcaagaagtgcctggattttcggaaaatatatgcagtttgtcaccgccgattagcccctgcgtggcccccttaccatacaggcggtacaattaagaagacaaaaatctgtagcgagttcatatacgggggtagccagggtaataacaataattttcagaccgaagccatctgtttggtgacgtgtaagaagtatcacaaatccgccctgctgtacacaatccggaggagcttgaacaatctacaggaccttgcgcacaaccctgggcttagtccccgtgttcccgactag

SEQ ID NO: 10788 - DNA, 261 bp, synthetic construct
  misc_feature 1..261: note = source = /note="Description of Artificial Sequence: Synthetic coding sequence"
  source 1..261: mol_type = other DNA
atggggctgtcgggactcctcccgatactggtgcctttcatccttctgggggacattcaggagcctggccacgctgaagggatcctcgggaagccatgcccgaagatcaaagtggagtgtgaggtcgaagagattgatcagtgcactaagccacgggactgccctgaaaacatgaagtgttgcccattttcaaggggcaagaagtgcctggatttcaggaaagtgtcactgacactgtaccacaaggaggaactggaatag

SEQ ID NO: 10789 - DNA, 375 bp, synthetic construct
  misc_feature 1..375: note = source = /note="Description of Artificial Sequence: Synthetic coding sequence"
  source 1..375: mol_type = other DNA
atgcctgcatgccgcttgggtccactggctgctgccctgcttctctcccttctgcttttcgggtttacgttagtatccggtactggagctgagaagaccggtgtatgtccagagctgcaggccgatcagaactgcacccaagagtgcgtttcagattctgagtgtgccgacaacctgaaatgttgttcggcaggatgcgccacgttctgttccttgccgaatgataaggaggggtcttgcccccaagtcaatatcaactttcctcaactggggctctgtcgagatcaatgtcaggtggatagtcagtgcccgggacagatgaagtgctgcagaaacggatgcggcaaggtgagctgcgtcacccctaatttctag

SEQ ID NO: 10790 - DNA, 1428 bp, synthetic construct
  misc_feature 1..1428: note = source = /note="Description of Artificial Sequence: Synthetic coding sequence"
  source 1..1428: mol_type = other DNA
atggccgacatgcagaacctagttgagcggctcgagcgcgctgtcggcagattggaggctgtatcacacacctcagatatgcacaggggatatgcggacagtccttctaaggcgggagccgctccgtatgttcaggcttttgatagcctcctggccggtccagtcgccgagtacctgaaaatcagtaaagagataggcggtgatgtgcagaaacacgctgaaatggtccatacaggattgaagctggagcgggcacttttggtgactgcctcccagtgccaacagcctgccgaaaacaagctgtccgatctgctcgcacccatctcagaacagatcaaggaagtcattacattcagggaaaagaaccggggatctaaactgttcaaccacctgagtgccgtgtccgagtccattcaggctctcggctgggtggcaatggcccctaagccgggaccatacgttaaggaaatgaatgatgccgcaatgttctacacaaatcgggtgctgaaagaatataaggacgttgataagaaacatgtcgactgggtaaaagcgtatctgtccatctggactgaattgcaagcatacatcaaggagttccatactaccgggctagcctggagcaagactggaccggttgcaaaggaactaagcggtctgccatcaggaccgtccgcgggttcctgtcccccaccccctccgccatgcccccctcctcctcccgtctcaactatctcctgctcctacgagtcggcaagtagatcatccctgttcgctcagatcaaccagggagagagcataacgcacgcgctgaaacacgtgtccgatgatatgaagacacacaagaatcccgcattgaaagctcagagtggacctgtgcgttcagggcctaaaccattttctgctcctaaaccacagacaagtcctagccctaaacgagctacgaaaaaggaacccgctgtattagaattggaaggaaagaaatggcgagtggaaaaccaggagaacgtttccaacctggtcatagaagataccgagctcaagcaggtggcctacatttacaagtgtgttaatactaccctgcaaattaagggtaagatcaacagtattaccgttgataactgcaaaaaattaggactggtcttcgacgacgtggtgggtatcgtggagataataaatagcaaggacgtaaaggtccaggtcatggggaaagtgccaaccatcagcattaacaagacagatggttgtcatgcctacctgtctaagaactctctagattgcgaaattgttagtgcgaaaagctcagaaatgaacgtacttatccccaccgaggggggagacttcaatgaatttcctgtgccggagcagttcaaaaccctgtggaacggccagaagctcgtgacaactgtcactgagatcgcagggtag

SEQ ID NO: 10791 - DNA, 438 bp, synthetic construct
  misc_feature 1..438: note = source = /note="Description of Artificial Sequence: Synthetic coding sequence"
  source 1..438: mol_type = other DNA
atggccgacatgcagaatctggtggaacggcttgagcgggcagtggggcgattggaggctgtgtcgcacacgtctgacatgcatagagggtacgctgactcccctagcaaggctggcgcagccccttacgttcaggcgtacatcaaggaattccataccacagggctggcttggtctaagacaggtcctgttgcaaaagaattaagtggtttaccttcaggaccatccgccggaagttgcccacctccccctccaccctgcccacccccaccccctgtatccaccattagctgttcttacgaaagtgcaagcagatccagcctattcgcacagataaatcagggcgaatcaatcactcacgccctgaaacacgtgagcgacgatatgaagacccacaagaatcctgccctaaaggcccagagcgggcctgtacgctag

SEQ ID NO: 10792 - DNA, 1428 bp, synthetic construct
  misc_feature 1..1428: note = source = /note="Description of Artificial Sequence: Synthetic coding sequence"
  source 1..1428: mol_type = other DNA
atggctgacatgcagaaccttgtggaacggcttgagagagcagttgggaggctcgaagctgtctcgcatacctcagatatgcatcggggatacgccgacagcccatcgaaggccggagcggcaccatacgttcaagctttcgattccctgctggccggacctgtcgccgaatacctgaaaatttcgaaagagattgggggtgatgtacaaaagcatgcagaaatggtgcataccggcctgaaactagagcgagctctcctcgtgacagcatcccagtgccagcaaccagctgagaacaagctttccgatctgttggcgccaatttccgaacagattaaggaggttatcacatttcgggaaaaaaaccgcggatctaagctgttcaaccacctgtcagccgtgagcgagtccattcaggctctggggtgggtggccatggcacctaaacctgggccttacgtgaaggagatgaacgatgcggctatgttttacaccaacagggtactcaaagagtacaaagatgtcgacaagaagcacgtcgactgggtgaaagcctatctttccatttggacggaactccaggcctacattaaagagtttcataccaccggcctggcctggagtaaaaccggtcctgtagccaaggaactgtcaggtttgccttcaggtccttcggctggctcctgccctccccctccccctccctgtccccctccccctcccgtgtcaacgatatcctgctcgtacgaatccgcttccagaagctccctcttcgctcagataaaccagggagagagcattacacatgccttgaagcacgtatcagatgacatgaagactcacaaaaatccggcactgaaggcccagagtggaccggttagatctggacccaaacccttttccgctccaaaacctcagacctcgccaagtccaaagcgtgctacaaaaaaggagcccgctgtcctggaactcgaaggcaagaagtggcgggttgaaaaccaggaaaacgttagcaacctcgtgatagaggatactgagttgaagcaggtggcttacatttacaagtgcgttaacaccactttacaaatcaagggcaagatcaactcaatcacagttgataattgcaaaaaacttggtctcgtgtttgacgacgttgtggggatcgtggagattattaacagtaaggacgtcaaggtgcaagtcatgggcaaggttccaaccatctctataaacaaaactgatggctgtcacgcttacctgagcaaaaacagcttggattgtgagattgtgagtgccaagtcatcggagatgaacgttcttatccccacggagggtggtgacttcaacgaatttcctgtccctgagcagtttaagacactgtggaacggacaaaaactggtgaccaccgtcacggagattgctggttag

SEQ ID NO: 10793 - DNA, 1425 bp, synthetic construct
  misc_feature 1..1425: note = source = /note="Description of Artificial Sequence: Synthetic coding sequence"
  source 1..1425: mol_type = other DNA
atggccgatatgcaaaacctggtggaaaggctggaaagggcggtggggaggctagaggccgtgagccacaccagtgacatgcaccgtgggtatgccgactccccttccaagggagccgctccttatgttcaagcttttgattcactcctggcaggcccagtggcagagtacctaaaaatttcgaaagagatcggaggggacgtgcagaaacacgctgaaatggtgcatacgggtctcaagttggagcgagcccttctggtaacagcttctcaatgccagcagcccgctgagaacaaactgagcgatctgttagccccaatatcagagcagatcaaagaggtgatcacttttcgcgagaaaaatcggggttctaagttattcaatcacctgagcgcagttagtgagtccattcaggccctagggtgggtcgccatggcccctaagcctgggccttacgtcaaggaaatgaacgatgctgccatgttctatacaaatcgcgtgctcaaggaatataaagacgtcgacaagaagcatgtcgattgggtgaaagcctatttgagcatctggactgaactgcaggcgtatatcaaggagttccacacaaccgggcttgcctggagcaagacaggacccgtggccaaggaactatcaggtttaccatcagggccatctgccggatcatgtccaccacctccacctccatgcccccctccaccgccagtgtcgacaataagctgtagttatgaaagcgcttcccgcagtagcctctttgcccaaattaaccagggtgagagcatcacacacgccctgaaacatgtttctgatgacatgaaaacccataagaatcccgcactgaaggcccagtcgggacccgtcagatctggcccaaagcctttctcagctccaaaaccgcaaacctcccccagccccaaaagggccacaaaaaaagagcctgccgtgctggagctcgagggcaagaaatggcgcgttgagaaccaggaaaatgtcagtaatctcgtaatcgaggacacagagctgaagcaggttgcctacatctataaatgtgtgaatacgacactgcagattaagggaaaaattaattccattactgtggacaactgcaagaagctgggtcttgtcttcgacgatgtggttggtattgtggagattatcaattccaaggatgtgaaagtccaggtcatggggaaggtgcccactatcagtatcaataagaccgatggctgtcatgcttatctgtcaaaaaactctctagattgcgagatagtttccgctaagagttccgagatgaatgttttaattccaacagaggggggtgattttaacgaatttccagtgcctgagcagtttaaaacactgtggaacggccagaaactcgttaccaccgtgacagaaatagccggttag

SEQ ID NO: 10794 - DNA, 1425 bp, synthetic construct
  misc_feature 1..1425: note = source = /note="Description of Artificial Sequence: Synthetic coding sequence"
  source 1..1425: mol_type = other DNA
atggctgatatgcaaaatctggttgagcgcctggaacgagctgtcggaaggctcgaggcagtcagtcacactagcgatatgcaccgaggctatgccgatagtccgagcaagggcgcagcaccatacgtgcaggcatttgactctttactggcagggccagtggccgaatacctcaagatttccaaagagattggcggagacgttcagaagcacgccgagatggtgcacactggcttaaagttggaacgagcacttctagtgactgcctcacagtgtcaacagcccgcagaaaacaagctcagtgacctcctggctcccatcagcgagcagattaaggaggttattacgttcagagagaaaaatcgtggctcaaaactgtttaatcacctttccgccgtttcagagtccattcaggcattaggatgggtggctatggcccctaagccaggaccgtacgttaaggaaatgaatgacgccgcaatgttctatacaaacagggtcctgaaggaatataaagatgtggacaaaaaacacgtagattgggtgaaagcctacctgagcatttggaccgaactgcaggcctatatcaaagaatttcatacgacaggcctggcatggtccaaaaccggtcccgtcgcaaaggagttatccgggttacctagcggcccatctgccggttcttgcccgcctccaccgcctccatgcccaccacctcccccagtgtccaccatttcttgctcctacgagtctgctagcagatcctctctgttcgcgcagataaatcaaggggaatcaatcacacatgccctgaagcacgtgtctgacgatatgaaaacccataagaatccggcacttaaagcgcagtccgggcctgtgagatccgggccaaaacctttcagtgctcccaaaccacagacgtcccctagccctaaaagggccaccaagaaagaacccgcagtgctagagcttgaaggaaagaagtggcgcgtggagaaccaggagaatgtgagcaacttggtgatagaagatactgaactgaagcaggtcgcctacatctataagtgtgtgaacactacactgcagataaaaggaaaaatcaactcaatcaccgtcgataactgcaagaaattaggcctcgtatttgatgatgtggttgggatcgtggagatcatcaattccaaagacgtgaaggtacaggtgatgggcaaggttccaacaatatctatcaataaaaccgacgggtgtcatgcgtacctgagcaagaattctctagattgtgagattgttagcgccaaaagctccgagatgaatgtgcttattcctactgaaggcggtgacttcaacgagtttcccgttcctgagcaatttaagactctgtggaatggtcagaaactggtgaccacagtgacagagattgccggatag

SEQ ID NO: 10795 - DNA, 1428 bp, synthetic construct
  misc_feature 1..1428: note = source = /note="Description of Artificial Sequence: Synthetic coding sequence"
  source 1..1428: mol_type = other DNA
atggcggacatgcagaatctcgtggaaaggcttgagcgcgcagtgggaaggctggaggccgtgtctcacacgagtgatatgcatcggggttacgccgatagccctagtaaggcgggagccgcaccatacgtccaggcttttgattctctgctggccggtcctgtggcggagtacttaaaaatatcaaaggaaattgggggtgatgtccagaaacatgccgagatggtccatacagggcttaaacttgaaagggccctgctggtgacagcttcccaatgccagcagcctgcagagaacaagctgagtgacctgcttgcccctatttcagaacagataaaggaggtgatcacatttagggagaaaaaccgaggttccaagctgtttaatcatctctcggctgtgtcggaatccattcaagcccttggctgggtcgcgatggcaccgaaacccggaccgtacgtgaaggaaatgaacgatgctgcaatgttctacaccaaccgcgtgcttaaggagtataaagatgttgacaagaagcacgtggactgggtcaaggcatacctgtctatatggaccgaactccaggcatacataaaagagttccacaccacaggcttggcatggtcgaagacaggacctgtcgccaaggagctatcagggcttcccagtgggccatctgctggctcatgccctccaccaccacctccctgcccccctccccctcctgtgtccacaatcagctgcagctatgaatcagccagtcggagcagtctatttgcccaaatcaaccagggtgagtctataacgcacgctcttaaacatgtcagtgacgacatgaagacacataagaatcctgcattgaaggctcagagtggacctgtgcgcagcggcccaaagccttttagcgccccaaagccgcagaccagccctagtcctaagcgtgcgactaagaaagaacctgctgtgttggagttagagggcaagaagtggcgggtagagaatcaggagaatgtctcgaaccttgtgatcgaggatacggagctcaagcaggtcgcctatatctacaagtgtgtgaatacgacacttcaaattaagggaaagataaatagcataactgttgataactgtaagaagctggggctggtatttgacgatgtcgttggcattgttgagataatcaactctaaggatgtcaaggtccaggtaatgggaaaggtcccaaccatttctatcaacaagacagacggttgccacgcttacctctctaaaaatagcttagactgcgaaatagttagcgctaagagtagcgagatgaacgtgctgatccccaccgagggcggtgacttcaatgagttcccagttcctgagcagttcaagacactatggaacggccaaaagttagtcaccaccgtgaccgaaattgcgggatag

SEQ ID NO: 10796 - DNA, 1209 bp, synthetic construct
  misc_feature 1..1209: note = source = /note="Description of Artificial Sequence: Synthetic coding sequence"
  source 1..1209: mol_type = other DNA
atgactgccttgccaggtcctctttggctgctaggcttggcactgtgcgcactgggaggcggtggaccaggcctccggccaccaccaggctgcccccagcgacggcttggcgctcgcgaaagacgcgacgtgcagagggagatcttagctgtgttaggtctccctggacgcccacgcccacgggctccgcctgcagctagtagattgccggcatccgcaccgttatttatgctggatctgtaccacgcaatggctggcgacgatgacgaggatggggctcccgctgagcggagactgggaagggcggacttagtaatgtcattcgtgaacatggtcgagcgcgatcgggcacttggacatcaggagccccactggaaggaatttaggttcgatcttacccagattcccgctggcgaagctgtcacagccgctgagttccgaatctacaaagtgccaagcattcatctcttgaatcggacactgcatgtgagtatgttccaggttgtccaggagcaatcaaacagagaatctgacctgttcttcctcgacctccaaacactacgagcaggggatgagggctggctggtcctcgacgtcactgccgcttccgactgttggctgctcaagcggcataaggaccttgggcttcggctgtatgttgaaacagaagatggccattctgtagatcctggactcgctggactcctggggcagcgggctccaagatcccagcagcccttcgtggtaacattctttagggcttcacccagtcctattcgcaccccgcgtgctgtaaggcctttgagaaggaggcaacccaagaagagcaatgaactccctcaagcaaataggttaccaggtatcttcgacgatgtgcacggaagccatggacgccaagtctgccgcagacatgagctttacgttagttttcaggaccttggttggctcgactgggtgatcgctccccagggctactccgcttactactgtgagggtgagtgctcgtttcctctcgatagttgcatgaacgcaaccaatcacgcaatcctgcagtccctggttcaccttatgatgccagacgccgtgcccaaagcctgttgcgccccaaccaagcttagcgcaacaagcgtactgtattacgattccagcaataacgtgattctccggaagcataggaatatggtagtaaaggcctgtggctgtcactag

SEQ ID NO: 10797 - DNA, 804 bp, synthetic construct
  misc_feature 1..804: note = source = /note="Description of Artificial Sequence: Synthetic coding sequence"
  source 1..804: mol_type = other DNA
atggcagcaattaggatgggcaagcttaccaccatgcctgcaggactgatctatgcatcagtcagcgtgcatgctgcaaaacaggaagagagtaaaaaacagctggtgaagcccgagcagctaccaatctatactgcacctcccctccagtcgaagtatgtggaagaacaaccgggtcacttacaaatgggattcgcaagtattcgaaccgcaacaggatgctacatcggttggtgtaagggggtgtacgtgtttgtgaagaacggaataatggatacggtgcagtttgggaaggacgcatacgtatatctgaaaaatcctccacgagactttctgcccaagatgggtgttatcactgtgagcgggctggctggactggtgagtgccaggaaggggtcgaagttcaaaaagatcacgtatccactagggctggctactctgggggctactgtgtgttatccggtccagagtgtgattatcgctaaagtcaccgcaaaaaggtacatgctacaagcctccaagttcctggagcagctgaatcactgcggtcaaaaggctgccaaaaaatctcactcactcaacttaaagaaaacaaagctagggtccagctccgagatagaagtccccgcaaagacaacccatgtactgaagcactccgttcctctgcccaccgagctcagctccgaagctaaaactaagagtgagtctacttccggagccacacagttcatgccagaccctaaattgatggatcatggccagagccatcctgaagatatagatatgtattctacccgtagttag

SEQ ID NO: 10798 - DNA, 807 bp, synthetic construct
  misc_feature 1..807: note = source = /note="Description of Artificial Sequence: Synthetic coding sequence"
  source 1..807: mol_type = other DNA
atggcggcaatcaggatgggcaaactaacaactatgcctgcgggattgatttatgccagtgtaagcgttcatgcagccaaacaagaggagtcgaagaagcagttggtgaaaccagaacagttacctatctacaccgcaccccctctgcagagcaaatatgtcgaggaacaacccggtcatttgcagatgggttttgccagtattcggacagctaccggctgctatatcggctggtgtaaaggtgtctacgttttcgtcaagaacggaattatggacaccgtgcaattcggaaaagatgcatacgtctatcttaaaaaccccccacgcgactttctgcctaagatgggagtgatcacagtgagcggccttgccggtctggttagcgcacgaaagggctcaaaattcaagaagataacctaccccctgggtcttgctactcttggagctaccgtctgttatccagtgcagagtgtaatcatcgctaaagtgaccgccaagaaggtgtacgccacgtctcagcagatcttcggagcagtgaagtctctctggacaaagagttccaaggaggaaagtctccccaagcccaaggagaagacaaaactggggagctccagcgagattgaggtccctgccaagaccacacacgtgttgaagcacagcgtgccactgcccacagaactatcatctgaggctaaaaccaagagcgagtctacttctggagccacccagtttatgcccgatcccaagctgatggaccacggccaatcgcaccccgaggacattgacatgtatagcacacgctcttag

SEQ ID NO: 10799 - DNA, 3672 bp, synthetic construct
  misc_feature 1..3672: note = source = /note="Description of Artificial Sequence: Synthetic coding sequence"
  source 1..3672: mol_type = other DNA
atggccccactgagagcactgctgtcctacctgctgccactgcattgcgccctgtgtgctgcggcaggctctcgaacgcctgagcttcacctctccggaaagctgtccgattatggcgttaccgtgccgtgttccacagatttccgagggaggttcctctctcatgttgtatctggacccgcagcggctagcgctggttcaatggtggtggacacacctcccacgctacctcgtcacagttctcacctgagagtggcgagaagccctctacaccctggcggtacactgtggccagggagagtcggccgacactctctgtatttcaacgtgacagtctttggaaaagaactgcacctcagattgaggccaaacaggaggctggtagtcccgggaagttccgttgaatggcaagaggatttccgggagctttttaggcaacctctccggcaggaatgtgtatacaccggcggtgtcacagggatgcccggtgccgcagtggccatatcaaactgcgacggtttagccggactcatccggaccgacagtaccgattttttcattgaaccactcgaaagagggcagcaggaaaaggaggcatctggacgaacgcacgtggtgtaccgcagggaggccgtgcagcaggagtgggccgagccagatggagacttgcataatgaagcctttgggctgggcgatctgcctaacctgttgggtctggttggagaccagctgggggacactgaaaggaaacggaggcacgctaagcccggttcctattcaattgaggtgctgcttgtggttgacgactccgtcgtaaggtttcacggaaaagagcacgtgcagaactatgtgctgactctcatgaacatcgtggatgagatctatcacgatgagtccttgggtgtccatatcaacattgccctggtcaggctgataatggtaggctatagacagtccctgtccctaattgaacggggtaatcctagcagatctctcgagcaggtttgcaggtgggcccattcacagcagcgccaggaccccagccacgcagagcaccacgatcacgtggtgtttctcacccggcaggatttcggaccttccgggtatgccccagttactggaatgtgccacccactgcgctcatgtgcgctcaaccatgaagacggcttctcaagcgcttttgtgatagcccatgaaacgggccacgtgctgggaatggaacacgacggacagggcaacggatgcgcagatgaaaccagcctggggtctgtgatggccccactcgtgcaggccgcattccaccgctttcactggtctcgttgcagcaaacttgaactgtctaggtatttgccctcctacgactgcctgttagacgatcccttcgaccctgcctggccgcagcctcctgagctccctggcattaactactccatggacgagcaatgtaggttcgactttgggagtggttatcagacttgcctagctttccggaccttcgaaccgtgcaagcagctgtggtgttcacaccctgataatccatatttttgcaaaacaaagaaaggccctccattggatggtacagagtgcgcacctggaaaatggtgcttcaagggccattgtatttggaagtcacccgaacagacatacggccaggatggcggttggtctagctggacgaagttcgggtcatgcagtcgcagctgcggaggtggcgttcggtcacgctctaggtcgtgtaacaatccatccccagcgtacggtggtagactgtgtctgggcccaatgtttgagtaccaggtttgcaactccgaggagtgccccggaacatacgaggactttagggcacagcagtgtgcaaaacgaaacagctactatgtccatcagaatgctaagcactcatgggtcccttacgagcccgacgatgacgctcaaaagtgcgaactcatttgccagtccgccgacactggcgatgtggtgttcatgaaccaagtggttcacgacggcacgcggtgttcgtaccgggacccttattccgtttgtgctcggggagaatgtgtgcccgttgggtgtgacaaggaggtcggctctatgaaggcagatgacaagtgcggcgtgtgtggtggcgacaattctcactgtcgcactgttaagggcacacttggcaaggcttctaaacaggcaggggctctcaagcttgtacagatacctgctggcgcacggcacatccagatcgaggcactggaaaaatctccccatagaatcgtggtcaagaatcaggtgaccggctctttcatcctcaatcccaagggaaaagaagccactagtcgaacttttaccgccatggggctcgaatgggaagatgcagtggaggacgccaaagagagccttaagacatcaggtcccctccccgaagccattgcgatcctggctctgcctccgaccgagggcggtcctagatccagcctggcttacaagtacgtaattcacgaagacctgctgcctttgatcggcagtaacaacgttctgctcgaggagatggatacctacgaatgggccctgaaatcttgggccccatgtagtaaggcatgtgggggaggaatccagttcaccaagtacggctgtaggcgccgacgggatcaccacatggtccagcggcatctctgtgaccataaaaagaggccaaagccaatcagacgcaggtgtaaccagcatccttgcagtcagcccgtttgggtaacagaggagtggggagcctgctctagatcctgcggaaagcttggcgtccagacaagagggattcaatgtcttttgcctctctcaaacggtacccataaagttatgccagccaaagcttgcgctggtgatcgcccagaagctcgcagaccctgcttgcgagttccttgtcccgctcaatggcgtctgggagcctggtctcaatgctctgccacatgtggagagggtatacaacagcgccaggtggtctgtaggactaacgcaaacagcctcgggcactgcgagggggataggccggacacggtccaggtctgtagcctgccggcatgcggcggtaatcaccagaactcgacagtccgggctgacgtgtgggagctggggacgcctgaagggcagtgggtgcctcagtctgagcccttacaccctataaataaaatcagttcaacagaaccgtgtaccggggaccgttctgtcttttgccagatggaggtgctggatcgctattgttccattccaggctaccatagactttgctgtgtgtcgtgcatcaagaaagccagtgggcctaaccccggtcctgaccccggaccaacttctttaccacccttctccacaccaggcagtcctctgccagggccacaggaccccgcagatgctgccgagcctcctgggaagccaacaggatcagaggatcaccagcacggaagggcgactcagctgcccggtgcattggacacctcctctccaggcacgcagcatcctttcgcaccagaaacgcctattccaggtgcctcctggagcatctccccaaccacgcctggagggcttccatggggctggacccagaccccaacaccagtgcctgaagacaagggccaaccgggagaggacctccgccatcctggaacttctctccccgctgcatcacccgtgacctag

SEQ ID NO: 10800 - DNA, 3681 bp, synthetic construct
  misc_feature 1..3681: note = source = /note="Description of Artificial Sequence: Synthetic coding sequence"
  source 1..3681: mol_type = other DNA
atggctcctctgcgcgctctgctctcgtaccttctccccctgcactgcgcgttatgcgccgctgccggtagccggacccccgagctccacctctcgggtaagctttctgattacggggtgacggtcccttgctcaaccgatttccgtgggagattcctgagtcatgtcgtctccgggcctgctgccgcttccgcagggtcaatggtggtcgatacaccccctacactgccccgacactcatctcatcttcgcgtggcgaggagtcctctccatccaggtgggaccctgtggcccggtcgcgtcggtagacattccctctacttcaacgttacagtcttcggcaaggagctgcacctgaggctcaggcccaaccgcaggttggtggtgccaggatcttccgtggagtggcaggaggatttccgcgagctcttccgccagccactgagacaggagtgtgtctacaccgggggagtgacggggatgcccggagccgcagtggccatctctaactgcgacggactcgctgggctcattcgaacggactctaccgatttttttatagagccactcgagcgcggacagcaggagaaggaagcgagtggtagaacccatgtcgtttatcggagagaggctgttcagcaggaatgggcagaaccagatggggacctccataatgaagctttcggtctaggcgaccttcctaacctcctgggccttgttggggatcaactcggagataccgagaggaagcgtcggcatgctaaacccggatcatattctatcgaagttctcctggtggtcgatgacagtgtggtccgttttcatggtaaagaacacgttcaaaattacgtgctcacccttatgaacatcgtggatgagatttaccatgacgaatcccttggggtgcacataaatatcgctctggtccggcttattatggtgggctatagacagtccctgagcttaatcgagcgcggaaacccatcacgtagcctcgagcaggtgtgtcggtgggcacacagccagcaacgacaggatcccagtcacgcagaacatcacgatcatgtggtttttttgactcggcaggattttggaccttctggtatgcaaggttacgcccctgtcaccggtatgtgccaccctctgcggtcttgcgcactaaatcacgaggatggattttcctcagcgttcgtaatcgcccatgagacaggccacgtgctgggcatggagcacgatggccagggcaacgggtgtgccgatgaaacctccctgggctccgtgatggcgccacttgtgcaggcagctttccaccggtttcattggtcccgctgtagcaaactcgagctgtctcgatacttgccttcatatgactgtttgctggatgaccctttcgaccctgcctggcctcagcctcccgagttgcccggtatcaactactctatggacgagcagtgtcgcttcgatttcgggtctggctaccagacttgcctggcttttagaacgtttgagccatgtaaacagctgtggtgttctcaccctgataacccttacttttgcaaaactaaaaaaggaccaccactggatggcaccgaatgcgctcccggtaagtggtgtttcaagggccactgtatttggaagtctcccgagcaaacttacgggcaagatggcggttggtcatcttggactaagttcgggtcctgttcccgttcatgtggaggcggagtacggtctagatcccgcagttgcaacaatccttcaccagcctatggagggaggctgtgcctcggaccaatgttcgaataccaggtttgtaatagtgaggagtgtccgggtacttacgaggattttagagctcagcagtgcgctaagcgcaactcatattatgtgcatcagaatgccaagcattcatgggtcccctacgaacccgatgatgacgctcagaaatgtgagctgatttgccagagcgccgatactggcgacgtggtgtttatgaatcaggtggtgcacgatggcacccggtgctcataccgcgacccttattctgtctgcgcgcgaggggagtgcgtgcctgtgggctgcgataaggaagtcggctctatgaaggctgacgataaatgcggtgtctgcgggggagataatagtcactgtcggacagtaaagggcacactgggaaaggctagcaagcaggccggtgccttaaaattggttcaaatacctgccggtgcaaggcatattcaaatagaggcattagaaaaaagccctcatagaatcgtagttaaaaaccaggtcactggcagcttcatcctcaacccaaaaggtaaggaagccacttcaagaacctttactgccatgggcctggaatgggaagatgcagtcgaggacgctaaggagtctctgaagacgagtggcccactccctgaagccatagccatactagcattgccgcctacggaaggagggcctcggtcgagcctcgcctacaagtacgtgatccatgaggacttactcccacttatcgggtcaaataacgtcttactagaggaaatggatacatacgagtgggcccttaaatcttgggccccatgcagtaaggcgtgtggtggtggtattcagttcacaaagtacggttgccgcagaaggcgagatcatcacatggtacaaaggcatctgtgcgaccacaagaaacggccaaaacctattcgccgtcggtgtaaccagcacccctgtagccagcccgtgtgggtgactgaggagtggggtgcatgttctcggtcatgtggaaaactgggcgttcagacaaggggcatccaatgcttactaccattgtcaaacgggactcacaaggtgatgcctgccaaggcgtgtgccggtgaccgacccgaggctagacggccatgtctgagggtcccctgtcctgcccaatggagattaggcgcttggagtcagtgctccgcgacttgtggcgaggggattcaacagaggcaagtcgtgtgtcgcaccaatgccaattctctgggccattgcgaaggagatcgccctgacaccgtccaagtctgctctttgcccgcatgcggtggaaaccaccaaaactcgaccgtgcgagccgacgtgtgggaactcggaacgcccgaagggcagtgggtcccccagtcggagccactccaccccattaacaagatatcatctaccgaaccctgcacaggcgaccgctctgtgttctgccagatggaggtgcttgatcgctactgttccatcccagggtaccaccgcctgtgctgtgtgtcatgtataaagaaagctagcggaccaaatcctggcccagatccaggtccgacctctctgccccctttctccacaccgggatcaccacttcccggaccccaagacccagcagacgcagctgaacctcccggaaagccaacagggtctgaggaccatcagcatggacgcgcaactcagctccctggcgcactggatacatcaagtcccggaacccagcatcccttcgcacctgaaactcccatacctggcgctagctggtccatcagcccaacaactcctggtggcttgccttgggggtggactcagacacctactcctgttcctgaagacaaaggtcaacccggtgaggatcttagacatcccggaacatcactgcccgctgccagccctgtgacatag

SEQ ID NO: 10801 - DNA, 762 bp, synthetic construct
  misc_feature 1..762: note = source = /note="Description of Artificial Sequence: Synthetic coding sequence"
  source 1..762: mol_type = other DNA
atggccgctgcaacaaggggctgtaggccctggggctccctgcttggactgctgggccttgtcagcgcagccgcagctgcctgggacttggcctccctgaggtgcaccctgggggcattttgtgagtgtgactttaggcccgacttaccagggctcgaatgcgacctcgcccagcatctcgcgggtcagcacttagctaaagcactggtagttaaagccttgaaagctttcgtgagggaccctgctcccacaaaacctctcgtactgagcctgcatggttggactggcacgggaaagtcctatgtgtctagtttactggcgcactacctgtttcaaggtggactccggtctcctcgagtccaccacttctcccccgtgctgcactttcctcaccctagccatatagaaaggtataaaaaagatctcaaatcctgggtgcagggaaatcttacagcatgtggccgatccctcttccttttcgatgagatggacaagatgccacctggcctcatggaggtcctccgtccattcttgggcagtagctgggtcgtctacggcaccaactacagaaaagccatcttcattttcatccgatggggcccagctctccagtgggctcagtggggcggtcacttctccgaagtgcagctgtatagtctctctctgtgttcccagcagaacccagtcccacacggtttgtcctgggctttcccagtaccctctgctacattgagagatgatattgtgattcccccaggctag

SEQ ID NO: 10802 - DNA, 966 bp, synthetic construct
  misc_feature 1..966: note = source = /note="Description of Artificial Sequence: Synthetic coding sequence"
  source 1..966: mol_type = other DNA
atggccgctgctactaggggatgtaggccatggggcagcttactagggttgctcgggctagtttccgccgctgctgcagcctgggatctcgcatccctgcgctgcaccctgggcgcattttgtgagtgcgattttcgtcccgatctgccaggactggagtgcgaccttgcgcaacacctggccggacaacacttggctaaggccttggtcgtgaaggccctgaaggccttcgtccgggaccccgcaccaaccaagccacttgttctttctcttcatggctggaccggaaccggaaagtcgtatgttagttcattacttgctcactatctgtttcaggggggtttgcgatcccctcgagtgcaccattttagccccgtcttacactttccacatccaagccacatagagagatacaagaaggacttgaaatcctgggtacaaggaaatctgacagcatgcgggcgtagcctgtttctgtttgacgagatggacaagatgccacctggcctcatggaagttttgcgcccatttttggggagttcctgggtggtatacggaacgaactaccggaaagccatttttatttttatttccaataccggaggcaaacagatcaatcaggtggctttggaggcttggagatctcgccgtgaccgggaagagattctgttgcaagaacttgagcccgttatctccagggccgtgctggataacccccatcacggtttcagtaactcaggaatcatggaggaacggctgcttgacgctgtagttccgtttctgcccctacagcggcaccacgtgcgccactgcgtcctcaacgagctcgcgcaattggggctggagcccagggatgaggtggtgcaggctgtgctcgactcgaccactttttttcccgaagacgagcagcttttcagctcaaatggttgtaaaaccgtggctagccgaatagctttttttctttag

SEQ ID NO: 10803 - DNA, 576 bp, synthetic construct
  misc_feature 1..576: note = source = /note="Description of Artificial Sequence: Synthetic coding sequence"
  source 1..576: mol_type = other DNA
atgcaggtgtggtgtgatcagcgccatgatcccggtggatggactgtcattcagcggagactggacgggtcagtgaactttttccgtaactgggaaacgtataagcaggggttcggaaatatagacggggaatactggctgggactagagaatatctactggctcactaaccagggaaactataaacttctggtgaccatggaagattggagcggccgaaaagtgtttgccgaatatgcatcgttccggttagagccggagtcagagtattataagcttagacttgggagataccatggaaacgcgggtgatagcttcacatggcataacggtaaacaatttactacgctggatagggatcacgacgtttataccggcaattgcgctcattaccagaaaggagggtggtggtataacgcttgcgcccacagcaacctcaatggggtttggtaccggggagggcattaccggtcacgctatcaagacggggtgtattgggcggagttcagaggcggtagctactccctgaagaaggtggtgatgatgatcagacccaaccctaacacatttcactag

SEQ ID NO: 10804 - DNA, 1482 bp, synthetic construct
  misc_feature 1..1482: note = source = /note="Description of Artificial Sequence: Synthetic coding sequence"
  source 1..1482: mol_type = other DNA
atgcgcccactgtgcgtaacatgttggtggttagggctactagccgctatgggcgctgtcgctgggcaagaagacggctttgaaggcaccgaagagggcagcccccgagaatttatctatttaaacaggtacaaacgagctggagagtcccaggataagtgcacctacacctttatcgtgccccagcaaagggtgacaggcgctatttgtgtgaactctaaagaaccggaggtcctcctggagaacagagtccataagcaggagttagagctcctgaataacgaactgctcaagcagaaacggcagatcgagacgcttcagcagctggtcgaagtggatgggggaatcgtctctgaggttaagttgttgcggaaggagtctcgaaatatgaatagcagggtgacccagctctatatgcagctgttgcacgaaataatcaggaaacgggacaatgcgctggagttgtcgcagttggaaaataggatcctgaatcagacagccgatatgctccagctggctagcaagtataaggacttggaacataagtaccaacacctcgctacactggcgcacaaccagtccgagatcatagcacagctggaagaacattgccagagggtaccttcagctcggcctgtgcctcagccaccacctgctgctcctcctcgggtctatcagcccccaacttataatcgcatcatcaaccagatctccactaatgaaatccagtctgaccagaatcttaaagttctacccccacccctacccactatgcccacacttactagcctgcctagctccacagataagccttcaggcccatggcgcgactgtttgcaggccttagaagatggccacgatacaagttccatctacctggtgaaacctgagaatactaacagactcatgcaggtctggtgcgatcagcgacacgacccaggaggctggaccgtgatccagaggcggttggacggctccgtgaactttttccggaattgggaaacttacaagcagggattcggaaatatcgatggtgaatactggttggggctggagaacatctactggctgaccaaccaaggcaactacaaattactggtgaccatggaagactggtctgggaggaaggtctttgccgaatatgctagtttcagactcgagcctgaatctgagtactacaagctgcgccttgggcgttatcatggaaatgccggagacagcttcacatggcataatggtaagcaatttacgacgctggatcgcgaccatgacgtctacactggcaattgcgcacactaccagaaggggggttggtggtacaatgcctgcgcacattctaacctgaacggtgtttggtatcgcggaggacactacaggagtaggtaccaggatggcgtgtattgggcagagttccgtggaggctcctatagcctgaagaaggtggtgatgatgatcagaccgaatcccaataccttccactag

SEQ ID NO: 10805 - DNA, 1959 bp, synthetic construct
  misc_feature 1..1959: note = source = /note="Description of Artificial Sequence: Synthetic coding sequence"
  source 1..1959: mol_type = other DNA
atggccgctgccgctcttccacctcgaccgttactattgttgcccttggtgcttttgctgtccgggcgacctacccgcgcagactccaaagtcttcggggatctggaccaggtgcgcatgacgtcagaaggaagcgattgccgatgcaaatgtatcatgcgcccactgagtaaggacgcctgcagtcgcgttagatcaggcagggctagagtggaggacttctacacagtagagaccgtctcttccgggactgattgtcgctgtagctgtaccgcccctccatcatcactgaacccctgtgagaatgagtggaagatggaaaagctcaagaaacaggctcctgaacttctcaaactgcagtccatggttgatctgctggaaggcaccctatacagtatggatttgatgaaagtgcatgcgtatgtccacaaagtcgcaagtcagatgaacacactggaggagtcaatcaaagccaaccttagccgagaaaacgaggtggtgaaggatagcgtgcgacatctgtccgagcagctgaggcattacgagaatcacagcgctatcatgttagggattaaaaaagaactgagccgattgggccttcaattgttgcagaaagatgctgccgcagcgcctgcaacccctgcgactggaacaggcagcaaggcgcaagacactgcgagaggaaagggcaaggacataagtaagtacggaagcgtgcagaagtccttcgccgacagaggactccccaaaccaccaaaagaaaaacttttgcaagtcgagaaactcaggaaagaatccggaaagggttcattcctccagcccaccgccaagcccagggctctggcacagcaacaagccgtgatcaggggctttacgtattacaaggctggcaaacaggaggtgaccgaggccgtcgccgacaacacgcttcagggaacatcatggctggagcagctgcccccaaaagtcgagggtcgcagtaactccgcggaacctaattctgcagagcaggacgaagccgaaccaaggagctctgaacgtgttgacctagcatctgggacccctacctcaatcccagccaccaccacaacagctacgacaacgcctacaccaaccacttcactgctccccaccgagcctccttccggccctgaggtcagctcacagggacgagaagcctcatgcgaaggaaccctcagagcggttgacccccctgtgagacaccactcttatggtaggcacgaaggggcttggatgaaagatcccgcagccagggacgaccgcatctacgtgaccaactactactacggcaactcactagtggaattcaggaatttagaaaatttcaagcagggtcgctggagtaacatgtacaaactgccttacaattggattggtactggccatgtggtttatcagggcgcattctactacaatcgtgcttttaccaagaacatcattaaatacgatctgcgccagaggttcgtggcttcatgggcgctccttcccgacgtggtgtatgaagacaccacaccctggaagtggcgtggtcacagcgacatcgatttcgccgtcgacgagtccggattgtgggtcatctatcctgcagtcgatgacagagatgaggcccagccagaggtgatcgttctgtctaggctggatccaggcgacctgtccgtgcaccgcgaaaccacgtggaagacccgtctgaggcggaactcatacggcaattgctttctcgtttgtggaatcctgtatgcagttgatacatataaccaacaagaaggccaagtagcatacgctttcgacacccataccggaacagatgcccgaccgcagctcccttttctgaatgagcatgcttacaccacccagattgactacaacccaaaagaaagggtactctacgcctgggacaacgggcaccaactcacatacacattgcacttcgtggtttag

SEQ ID NO: 10806 - DNA, 1641 bp, synthetic construct
  misc_feature 1..1641: note = source = /note="Description of Artificial Sequence: Synthetic coding sequence"
  source 1..1641: mol_type = other DNA
atgaaaaaccaggataaaaagaatggggctgccaaacaatcgaatccaaaaagctcacctgggcagcccgaggcgggacccgagggcgctcaggagaggccttctcaagccgctcctgcggtggaggccgaaggcccagggtcctcccaggcccctcggaagcctgaaggcgcacaggcaaggacagcccagagcggagctctgcgcgacgtgagcgaggaactgtcaaggcagctcgaggatatactctccacttactgcgttgacaacaaccagggaggtcctggcgaagatggcgcacagggagaacccgcagaaccggaagacgcagaaaagtctaggacatatgtggcccgtaatggcgagccagagcccacgcccgtggtcaacggggaaaaggagccttccaaaggtgaccccaacaccgaggaaatcaggcagtctgacgaagttggggatcgtgaccaccgacgccctcaggagaaaaagaaggctaaaggattagggaaggagattaccttactaatgcagacattaaacaccctgtccacaccggaggagaagcttgccgcactgtgtaaaaaatatgcggaactgctggaagaacaccgaaattcacagaagcaaatgaaactgctgcagaaaaaacaatctcaattggttcaggagaaggaccacctgagaggggagcacagcaaggcagtcttggctcgctcaaaattggagagcctttgtcgggagcttcagcggcataataggagcctgaaagaggagggtgtgcaacgtgccagagaggaagaagaaaagcggaaggaggtgacaagtcacttccaggtgactttgaatgatatccagcttcagatggagcaacacaacgagagaaattctaagctcagacaggaaaatatggagcttgccgagcgcctgaagaagctgattgaacagtatgagctgcgcgaggaacacattgataaagtgttcaagcataaggatctgcagcagcaattggtcgacgccaagctgcagcaggcccaggaaatgctgaaagaagcggaggaaagacaccagagagaaaaagatttcttactgaaggaagcagtggagagtcaacggatgtgcgagctgatgaagcagcaggagacccacttgaagcaacagctggccctgtacacggagaagtttgaggagttccagaacacgctgtcgaagtccagcgaggtattcactacctttaaacaagaaatggaaaagatgacaaagaagatcaaaaagctcgagaaagagactaccatgtaccgcagtcggtgggaaagcagcaacaaggctctgctcgaaatggccgaggagaaaaccgtgcgagacaaggaacttgaaggtctgcaggtaaaaatacagaggcttgaaaaactgtgtcgtgctcttcagactgagcgcaacgatctgaataaaagagttcaagacctgagtgcaggcggtcaagggagcctgaccgatagtggcccagagcgcagaccagaaggcccaggcgcacaagctccaagctcccccagggtgaccgaggctccatgttaccccggtgcccctagcactgaggcctcagggcagactgggccacaggaacccacgtccgcacgcgcatag

SEQ ID NO: 10807 - DNA, 1641 bp, synthetic construct
  misc_feature 1..1641: note = source = /note="Description of Artificial Sequence: Synthetic coding sequence"
  source 1..1641: mol_type = other DNA
atgaagaaccaggacaaaaagaatggggctgcaaagcagagcaaccctaaatcatcaccaggccagccagaggccggacccgagggagcacaggagaggccttcacaggcggctcccgctgttgaagctgaagggcctggttccagccaggctccgcgtaagccagaaggagcacaggcacgaacagcccagtcgggggctttgagggacgtgtctgaagagctgtcacggcagctggaagacatcctttcaacctactgtgtggacaacaatcagggaggcccaggggaagatggtgcgcagggcgagcccgctgaacctgaagatgccgaaaaatcgcgcacctacgtggctagaaacggagaaccagagccaacaccggtagtgaacggtgaaaaagaaccctctaagggcgatccaaatactgaggagattcggcagtctgacgaagtgggagatagggatcaccgccgaccacaggaaaagaagaaggcaaagggcttgggcaaggaaataaccctgttgatgcaaacccttaacactctctccacccccgaggaaaagctcgcggcactgtgtaagaagtatgctgagctgctggaagaacaccgcaacagccaaaagcagatgaaactgctgcagaaaaaacagtcccaacttgtgcaggaaaaagaccacttaaggggcgaacactccaaggctgtgcttgccaggagcaagctcgagtctctctgcagagagctccagcggcataatagatccctgaaagaagagggcgttcagcgggctagagaggaggaagaaaagcgcaaagaagttacctcacacttccaagtcactctcaacgatattcagctccaaatggagcagcataatgaaagaaatagtaagttgcgacaagaaaatatggaattagcagagcgacttaagaagttgatcgagcagtatgagctgcgggaggaacacattgacaaagtcttcaagcacaaggacctgcagcaacagttagtggacgctaagttgcagcaggcccaagagatgctgaaggaggctgaggagcgacatcaacgagagaaagacttccttttgaaggaggccgtggagtctcagcgaatgtgcgaattaatgaagcagcaagagacacatttaaagcaacagctggccctctataccgaaaagttcgaagagtttcaaaatacactaagcaagagctccgaggtattcactacattcaagcaagaaatggaaaaaatgactaagaaaatcaagaagctggagaaggagaccacaatgtaccgctctagatgggaatctagcaataaggcactcttggagatggctgaagagaagactgtgagggacaaagagcttgagggacttcaagtgaagatccagcgcctggagaagctttgtcgcgcactgcagactgaaagaaacgacctaaataaaagagtgcaggacttgtctgccggtggccagggcagcttaaccgactcaggcccagaacgccgaccggagggccctggcgctcaggcaccctctagtccacgcgtgacagaggccccatgctacccaggcgctccatccacagaggcctccggacaaacaggccctcaggagcccaccagcgcccgtgcttag

SEQ ID NO: 10808 - DNA, 1392 bp, synthetic construct
  misc_feature 1..1392: note = source = /note="Description of Artificial Sequence: Synthetic coding sequence"
  source 1..1392: mol_type = other DNA
atgcatggttcctgtagcttcttgatgctacttctgcctttattgctgctactcgtggccactacaggtcctgtcggagccctgacagatgaggaaaagcgattgatggttgagctgcataatctgtatcgtgcccaggtcagtccgaccgccagcgatatgctgcacatgcgctgggatgaggagcttgccgcattcgctaaagcctatgctcgtcagtgtgtctggggtcataataaggagcgtggcaggagaggggaaaacctgtttgcaatcacagatgagggtatggatgtccctctggccatggaggagtggcaccacgagcgagagcactacaatttgtctgccgctacatgcagtccaggacagatgtgcgggcattatactcaggtcgtgtgggcaaagacagagcggatcggatgcgggtcacacttttgtgaaaagctgcagggcgtggaggaaacgaatattgagctgcttgtttgtaattacgagcctccaggaaacgttaaaggtaagcgaccctatcaagagggaaccccctgtagccagtgtcccagcggttaccattgcaaaaactccctgtgtgagcctattggatctcctgaggatgctcaagatctgccataccttgtgaccgaggctccttcttttcgggctactgaggcatctgactccagaaaaatgggcaccccaagtagcctggccaccgggatccccgctttcttggtgacagaggttagtggatcactggctactaaggcccttccagcggtcgagacccaggctccaaccagccttgccaccaaggatccaccatccatggccaccgaggcgccaccctgtgtgacaaccgaagtccctagcatcctggcggctcattctctgcctagtcttgatgaagagccagtaacttttcccaagagcacacatgtgcccatccccaaaagtgccgataaggtcacagataaaaccaaagtgccgtctcgttcacccgaaaacagtctggaccccaaaatgtcattgaccggcgctagggagcttctgccccatgcacaggaggaggcggaagcagaggctgagctgcccccttcatctgaggtgctggcttcggtgttcccggctcaggacaaaccaggcgagttgcaggcaaccctggatcacacaggccacacctcaagcaaaagccttcccaatttcccaaataccagtgcaacggcaaatgctacaggcggtagggctctagccctgcagagtagtcttcctggggctgagggcccagacaaaccatcagtggtgtcaggtctcaactcagggccaggccacgtgtggggcccactgctcggacttttactactgcccccattggtcctggctggaattttctag

SEQ ID NO: 10809 - DNA, 459 bp, synthetic construct
  misc_feature 1..459: note = source = /note="Description of Artificial Sequence: Synthetic coding sequence"
  source 1..459: mol_type = other DNA
atgatgctgccacaatggcttctgctccttttcttgcttttctttttcttattcctgttaacaaggggttcactctcccccactaaatataacttgctagagctgaaggagtcatgtatcagaaatcaggactgcgaaaccggatgctgccagcgtgcccctgacaattgcgagtcccattgtgctgagaaggggtcagagggaagtctctgccagacccaagtgttctttggtcaatatagagcgtgcccctgcctccggaatctcacctgcatttactctaaaaacgaaaaatggctctccattgcttacgggcgatgccaaaagataggacgccagaagctggccaaaaaaatgtttttagtcttgcctcctagctgctgcttgttgctgctgcatctcctcagctcacttcccagggcactctgtagcccctgttccccagagccccctccctag

SEQ ID NO: 10810 - DNA, 366 bp, synthetic construct
  misc_feature 1..366: note = source = /note="Description of Artificial Sequence: Synthetic coding sequence"
  source 1..366: mol_type = other DNA
atgatgcttccgcagtggctcctgctcctgtttttgctattttttttcctctttctgctgacccgaggttcactgagcccgaccaaatacaaccttctggaactgaaagagagttgtattcggaatcaagactgcgagacagggtgctgccagcgtgcgcctgataattgcgaatcccattgcgccgaaaaaggctccgagggctccctatgccaaactcaggtattctttggacagtacagagcatgtccctgtctgcggaacctgacatgtatctactccaaaaatgaaaaatggctgtctatcgcctacggaagatgccaaaagatcggacgtcagaaactcgctaaaaagatgttcttctag

SEQ ID NO: 10811 - DNA, 1122 bp, synthetic construct
  misc_feature 1..1122: note = source = /note="Description of Artificial Sequence: Synthetic coding sequence"
  source 1..1122: mol_type = other DNA
atgcgcctcctggcttggttaatctttctggcgaattggggaggcgctcgagccgaacccggaaagttctggcacatcgccgacctccatctcgatccagattacaaggtgtccaaggacccctttcaagtgtgtccgagtgctgggtcccagccggtgcccgatgcagggccatggggagactatctgtgtgacagtccctgggccctcatcaattcatcaatttacgccatgaaggaaatcgaaccagagcccgattttatcctgtggactggggacgatacaccacacgtgccggacgaaaaactcggtgaggcggcagtcctggagattgtcgaacgcctcactaagttgataagggaggtctttcccgacaccaaggtttatgctgctctgggaaatcatgactttcacccaaagaaccagtttccggcaggcagcaataatatttacaaccaaatcgccgagctatggaagccttggctctcgaatgagtctatcgcgctgttcaagaagggagcattctattgtgagaagctcccgggaccttcaggagcgggtagaatagtcgtgttaaataccaatctgtattatacgagtaacgcacttacagccgatatggctgatcctggacagcaattccaatggcttgaggacgtcctcacggacgccagcaaggcgggtgatatggtctacatcgtgggccacgtgcccccagggttctttgagaagacccagaataaggcatggtttagagaaggctttaatgagaaataccttaaggttgtccggaaacatcaccgagtgattgcaggccaattctttgggcaccaccacaccgattcattccggatgctgtatgatgatgccggagttccgatctcggccatgttcatcaccccgggtgtgacgccttggaagacaaccttgccaggcgtagtgaacggggcaaacaacccagccatccgggtcttcgaatatgatcgagccacactatctctaaaggttcgttctcctgccgaagctcggggtggaggctgggagggcttgaaatgcatcaccaccttcccacactctcagttgatccacctacccctcaccactgagccacaggagggctag

SEQ ID NO: 10812 - DNA, 810 bp, synthetic construct
  misc_feature 1..810: note = source = /note="Description of Artificial Sequence: Synthetic coding sequence"
  source 1..810: mol_type = other DNA
atgaggctgctggcttggctgatctttctggctaattggggcggagccagagccgaaccagaggaggctcagggcccttgcgctcaagaaaagggcaagggtcctccaccgacttcaatccttgcaagtctcgcccctgggctggaagccggtaagttctggcatattgcagaccttcatctggatccagattataaagtgtccaaggacccatttcaggtatgcccttccgctggctcccaaccagtcccagacgcaggcccttggggggactacttatgcgatagtccctgggcgctcattaacagttccatttacgccatgaaggagattgagccagagccggacttcatcctgtggacaggcgacgacacaccacacgtcccagacgaaaaattgggtgaagcggcagttctggagatcgtcgagagacttactaaacttatacgggaggtgtttcccgatacaaaggtttatgccgcactgggcaatcatgattttcacccaaagaaccagttcccagctgggtcaaataacatctacaatcaaatagccgagctgtggaaaccctggctgagtaacgagtcaatcgccctcttcaaaaagggcgcattctattgcgagaaactgcctggaccatctggagccggtcgtattgtggtgctgaataccaatctttattacacctctaatgcgttgaccgctgatatggccgatcctggccagcaattccagtggcttgaggacgtgctgacagacgcttcaaaagccggagatatggtgtatatcgtagggcacgtccccccatag

SEQ ID NO: 10813 - DNA, 1368 bp, synthetic construct
  misc_feature 1..1368: note = source = /note="Description of Artificial Sequence: Synthetic coding sequence"
  source 1..1368: mol_type = other DNA
atgcggctgcttgcctggctcatcttcctggctaactggggtggtgctagagcggaacctggaaagttctggcacattgccgacctgcacctggaccctgattacaaggttagcaaagacccttttcaggtgtgcccgtcagcaggatcccaacctgtgcccgatgccggtccgtggggtgattatctgtgtgattccccttgggccctgatcaacagcagcatctatgcgatgaaggaaatcgagcctgagcctgatttcattttatggactggcgatgatactccgcatgtgccagatgagaagctgggagaagcggcagttttggaaattgtcgaaaggctgaccaaattgattcgcgaagtgttccccgacaccaaggtctatgcagctctggggaaccacgacttccatccaaaaaatcagttcccggcaggctcgaacaatatatataatcaaatagcagaactctggaagccgtggctatctaacgagtcaattgccttgtttaagaaaggagccttctactgcgagaagttacctggcccttccggggcaggcagaatcgtggttttgaatacaaatctttactatacgagtaacgctctcactgccgacatggctgatcctggacaacaatttcagtggctcgaggatgttctgacagacgcttctaaagccggagacatggtgtatatcgtgggccatgtcccacccggattttttgagaagacacagaacaaggcctggttcagggagggttttaatgaaaaatatctcaaggtagttcgcaaacaccaccgggtgatcgccggacagttctttggccatcaccacacagactccttccgcatgctctatgacgacgctggtgtgcctatttctgccatgttcattactcccggagtaaccccttggaaaacgacactaccaggagtcgttaatggtgccaataaccccgctatcagagtctttgagtatgatcgggctaccctctcactgaaggatatggtgacgtatttcatgaatttgtcgcaggccaatgcccaagggacccctcgctgggagctggaataccagctgacagaagcttatggcgtgcctgacgcatccgcacattccatgcataccgttctggacaggattgctggcgatcaaagtacacttcagaggtactacgtatataactcagtgagctattccgcgggagtgtgcgacgaagcgtgcagcatgcagcacgtgtgcgctatgagacaagtcgacatcgacgcctataccacctgcctctatgcgagtggcactacccctgtgccgcagctccccctgctgctgatggcactgcttggcctgtgcaccctagtgctgtag

SEQ ID NO: 10814 - DNA, 867 bp, synthetic construct
  misc_feature 1..867: note = source = /note="Description of Artificial Sequence: Synthetic coding sequence"
  source 1..867: mol_type = other DNA
atggcacttgcccctcctcctcgcggattgtggcaggcaaaagatatctcacctattgtcaaagcagccaggagagacggcgagcttttgctgtccgcccaactcgactcagaggagagagacccaggagtacctcggcctagcccatacgcaccttatatcctcgtctacgccaacgatctcgcgatttccgagcctaactcagtcgccgtgactctccagaggtatgatccgtttcccgctggggatcccgagccacgcgcagccccaaataacagcgcggaccccagagtaagacgggctgctcaagcaacaggccctttgcaggacaacgagctccccggactcgatgaacgaccgccaagggcgcacgctcagcattttcacaagcatcagctgtggccctcaccgttcagggctctgaaacctagaccgggaagaaaggaccgcagaaagaaggggcaggaggttttcatggcagcctcccaagttctcgattttgacgagaagacaatgcagaaggctaggcgcaaacaatgggacgagcccagggtctgttcgcgcagatacttgaaggtggatttcgctgatattggttggaacgaatggattatctcaccgaagagctttgacgcatattactgtgccggtgcctgcgagtttcctatgccaaaaatagtgcggccttccaaccacgcgaccatccaaagcattgtacgcgctgtaggcattatccctggaatacctgagccctgctgcgtgcccgacaagatgaattcacttggagtgctgttcttggacgaaaatagaaacgtggtactcaaggtctaccccaatatgagcgtggacacatgtgcttgtcgctag

SEQ ID NO: 10815 - DNA, 1626 bp, synthetic construct
  misc_feature 1..1626: note = source = /note="Description of Artificial Sequence: Synthetic coding sequence"
  source 1..1626: mol_type = other DNA
atgcccttcagactcctgatccctctcggcttgctgtgcgcactgctaccacagcaccatggcgctcctgggccagacggtagcgctcccgacccagcgcactactccttctcactcacattgattgatgccctagatactctcctgatcctgggaaatgtgtcagagttccagagggtggttgaggtgctgcaggattcagttgacttcgatatcgacgtgaacgcctccgtatttgagacaaacatcagggtcgtgggcggactgttgagcgctcatctgttaagcaagaaagccggagttgaagtcgaagccggatggccttgctccggcccactgctgagaatggctgaggaagccgctcgtaagctgctccctgcttttcagacccccacaggcatgccgtatggtacagtcaatctgttacacggtgtaaatcctggagagacccctgtgacatgcacagccggaattggaacctttatcgtcgaatttgctacgctgtcctccctgacaggggaccccgtgtttgaggatgtggctcgggtggctctcatgagactgtgggaatcccggagcgatatcgggctggttgggaatcacatagatgtattgaccggcaagtgggtggctcaagatgctgggattggggcaggggttgactcttactttgaatacctcgtgaagggcgcaatcttgctgcaagacaagaagttgatggctatgttccttgaatacaacaaggccataagaaactacacccggtttgatgactggtatttgtgggtgcagatgtataaaggaaccgttagcatgcccgtgtttcagagtttagaagcctattggcctgggctacagtccctcatcggggatattgacaacgctatgagaacgttcttgaactactacacggtctggaagcagttcggcggactgccggaattttataacatacctcagggatacactgtggagaaacgggagggctacccattgagacccgagctgatcgagagtgctatgtatctctacagagcaaccggcgatcctacactgctcgagttaggacgggacgccgtggagagtatcgagaaaatttccaaggttgaatgtggtttcgctaccattaaagacctcagagatcacaaactggataaccgaatggagagtttcttcctagccgagacagtgaagtacctatacctgctattcgatccaaccaacttcatacacaacaatggatctacgttcgacgctgtgatcacgccctatggagaatgtatcctcggtgcaggtggctacatctttaacactgaagctcacccgattgatcctgccgcactccactgttgtcaacgcttgaaagaagagcagtgggaggtggaggacctaatgagggaattttactcactaaaacgatctaggagcaaattccagaaaaacacagtgtcttcgggcccatgggaacctcctgcccgacccggaacattgttctcccccgagaaccatgaccaggctcgcgaaaggaagccggctaagcagaaagtgccactcctgtcttgcccttcacaaccgtttacatcaaaactagccctcctgggacaagtgtttctcgactcaagctag

SEQ ID NO: 10816 - DNA, 1737 bp, synthetic construct
  misc_feature 1..1737: note = source = /note="Description of Artificial Sequence: Synthetic coding sequence"
  source 1..1737: mol_type = other DNA
atgcccttccggttactgattcctcttgggctcctttgtgccctgctccctcagcatcatggagccccaggccctgatgggtctgctccagaccctgcccactaccgggagcgcgtgaaagccatgttctatcacgcctacgattcctatttggaaaacgcgttcccctttgacgagctgcggcctctgacctgtgacggacacgacacatggggatcttttagcctcacccttattgacgcactcgatacactgctgatactcggaaatgtgagcgagttccaaagggtcgtggaggtgttacaggacagtgtggatttcgacattgacgtcaatgcctcggtgttcgagactaacatcagagttgtcgggggactactgtcagcacatctgctttcaaaaaaggccggagtggaagtggaggctggttggccatgcagcggccctctgcttagaatggcagaagaagcggcaaggaaactgctgccagcatttcaaacacccacgggcatgccttacggcactgtaaacctgctgcatggagtcaatcccggtgagacacccgtaacctgcaccgccggtatcgggacgtttattgtagagttcgcaactctgtcctctctcaccggcgatccagtttttgaagatgttgccagagtggcacttatgcgcttgtgggaatctagaagtgacattggtttggtgggtaaccatatagacgtgctgactggcaaatgggtcgcccaagatgctggaatcggtgccggagttgattcgtatttcgagtacctggttaaaggcgctattcttcttcaggacaagaaactgatggctatgtttctggagtacaacaaagcaataagaaactatacccgctttgatgactggtacttatgggtacagatgtataaaggcaccgtgtctatgcccgtcttccagagtctcgaggcttactggcccggactgcagtccttaattggtgacatcgataatgcaatgagaactttcttgaattactataccgtgtggaagcagttcggaggcttacccgagttttacaatatcccccagggctacacagtggagaaaagggagggatatcccttacgacctgaattaatcgaatccgcgatgtacctatatcgtgctacgggtgatccgactctgctagagctcgggagggacgccgtggaaagtatcgaaaagatttccaaggtggaatgcggatttgctacgattaaggacctcagagatcataaactcgataatagaatggagagctttttcctggccgagactgttaagtacctctacctgctcttcgaccctaccaattttatacataacaacggctctaccttcgatgcggttatcacgccctacggtgagtgtatcttgggggctgggggttatatcttcaacaccgaggctcacccaatcgatcccgctgctcttcattgctgccagcgcttaaaagaggagcagtgggaagtggaggacctgatgagagagttctatagtcttaaacgctcccggtccaagttccaaaagaatacagtgtcaagcggcccttgggaaccaccagcccgaccaggcacactgttctccccagaaaatcacgaccaggccagggagagaaagccggcaaagcagaaggtcccgttgctatcctgcccctcccagcccttcacatccaagctggccttgctcggtcaggtgtttctggatagtagctag

SEQ ID NO: 10817 - DNA, 495 bp, synthetic construct
  misc_feature 1..495: note = source = /note="Description of Artificial Sequence: Synthetic coding sequence"
  source 1..495: mol_type = other DNA
atgcgcagctgttacgtggcccaggctggcctaaagctcccaggctcatctgatcccccagcctccgctagccagtccacacgcattacagcatctggctacggtcccccatcgtccaggccaagctctcgtgtggttaacggagaagatgctgtgccctacagctggccatggcaggtgtctctgcagtacgaaaagagtggctccttctatcacacgtgcgggggatcgttaatcgcccctgattgggtcgtgactgcagggcactgtatatctagtagtaggacataccaggtagtcttgggtgaatatgacagggccgttaaagaaggccctgagcaggtgattccaattaactccggagacctgttcgtccatcccctgtggaataggagttgcgtcgcctgcggaaacgacatcgctctcataaaactgtcccgcagtgctcagctgggcgacgctgtgcagttggcttccttaccgccagccggttag

SEQ ID NO: 10818 - DNA, 3663 bp, synthetic construct
  misc_feature 1..3663: note = source = /note="Description of Artificial Sequence: Synthetic coding sequence"
  source 1..3663: mol_type = other DNA
atgccaggattactaaactggatcacgggggcagccctccctctcaccgcaagtgacgtgacctcatgtgtctccggctatgcgctgggcttgaccgcttcactgacttatgggaatcttgaggctcaaccatttcaaggcctgtttgtataccctctggatgagtgtactaccgttattgggttcgaggcggtcattgccgaccgggtggtgaccgtccagatcaaggacaaggctaagctggaaagtggtcacttcgacgcgtcccacgtaaggtcacctaccgtgaccggcaacattctgcaggacggagtgtcaatcgcccctcattcctgtacccccggaaaggtcacccttgatgaggatctcgaacgcatcctctttgtcgctaacttgggcacgatcgctcccatggagaacgttacaattttcatcagtacttcatctgaactcccaaccttgccttcaggagctgtgagagtgctgctgcccgctgtgtgcgccccaaccgtgccacaattctgcacgaagtctactggtacttccaatcagcaggcccagggaaaagatagacattgctttggagcttgggctcctggttcatggaacaagttgtgcctggctaccctgctgaacaccgaggtgtcaaatcccatggaatacgaattcaatttccaattagagattagggggccatgcttacttgccggagtggaaagcccgactcatgagatacgcgctgatgcagcaccatccgctcgttccgcgaaatcaatcattattacgctggctaacaagcataccttcgacaggccggtggaaattctaatacaccctagcgaacctcacatgccacatgtacttatagagaaaggcgatatgacacttggagagtttgaccaacacctgaagggcaggactgatttcataaagggtatgaaaaagaaatctcgagcagagcgaaaaacagagataattcgaaagcgcctgcataaagacattccacatcacagtgtgataatgctgaatttctgtcccgatttgcagagcgtgcagccctgcttgcgcaaagcccatggggaattcatatttctcatcgaccggtcttcctcaatgtctgggatctctatgcatcgagtgaaagatgcaatgctcgtggcactgaaatctctcatgccagcttgcctctttaacattattggattcggaagcaccttcaagtctttgttcccttcctctcagacctacagcgaggactctctggccatggcctgtgatgatattcaacgaatgaaggccgacatggggggaacaaatatcctctcacctctgaaatgggtgatcaggcagcctgtccataggggccatccgcgactcctgttcgtgatcaccgatggcgcagtgaacaacactgggaaggtgctggaactggtgcggaatcacgcattttctacacgctgctattcgttcggtatcggccctaatgtgtgtcatcgcctggtcaaggggctggcatccgtttccgaaggcagtgcagagctccttatggaaggagagcgactgcagcctaagatggtaaaaagtctgaaaaaagctatggccccagtcttgtctgacgtcacagttgaatggatctttccagagactaccgaagtgctggtctcgccggtgtctgcatcatccctttttccaggggagaggcttgtggggtacggcatcgtgtgcgatgcctcccttcacataagcaaccccaggtcagacaagaggcgacgatattcaatgctacatagccaggagtcaggaagcagtgtcttctaccactctcaggacgacggacctggactggagggcggtgattgcgccaaaaacagcggcgcacccttcatactgggccaggccaagaatgcacgcttggccagcggagactctactactaagcatgatctgaatctgtcccagcgccgacgagcgtactctacgaaccaaattaccaatcacaagcccctgcccagggccactatggccagtgatccaatgcctgctgctaagcgataccctctcagaaaagccaggttacaggacctaactaaccagacctcactggatgtccagaggtggcagatcgacttgcagcctcttctcaacagcggtcaggacctgaaccaagggccaaagctccggggtcctggcgctcgccgtcccagcttgcttccccagggctgtcagcctttcctgccctgggggcaggaaactcaagcatggtccccagtgagggagcgcacaagcgactctcggtcaccgggtgacttggaaccctcccaccaccctagcgcttttgaaactgaaacgtcttccgattgggatccacccgcagagagccaggagagggctagcccatctaggcctgcaactccggcacctgttctgggaaaagccctggttaaaggcctgcacgatagtcagagattgcagtgggaagtgtcctttgagttaggaacacccggaccagaaagggggggagcccaagacgctgacctgtggagtgaaacttttcatcacttggctgcacgtgccattattcgtgattttgagcagctggctgagcgggaaggagaaattgaacaaggctcaaaccgtcgataccaggtttccgcattgcatacatccaaggcttgtaacataatcagcaagtatacagcgtttgttccagtggacgtgagcaaatcccgctacctgccaaccgtcgtggagtaccccaattccgcagctctgagaatgttgggctcccgcgcactggctcagcagtggagaggtactagcagtggttttggcagacctcagactatgctcggtgaggatagcgccccaggaaacggcaagtttcaagccttgaatatggaagcttccccaactgccctcttttctgaggccagatcgccagggagagaaaagcacggagccagtgagggacctcaaaggtctttggcgaccaataccctgtcttctatgaaagcttccgaaaacctctttggctcttggctgaacttaaacaaatccagacttctgacaagagcagccaaaggcttcctgtctaagccactgatcaaggctgtagagagcaccagcggaaaccagtccttcgactatatccccctcgtttccctccagcttgcgtcaggagcctttcttctcaatgaagcattttgtgaggccactcatatccccatggagaagctgaaatggacttcaccgttcacttgtcaccgtgtgagtctcactacccggcctagtgagtccaaaactccatctccccagctatgtacttcatcccctcccagacatccctcctgtgattctttttccctagagcccttggctaaggggaagctgggtctcgagcctcgagcagtcgtggagcacaccgggaagctgtgggctactgtcgtgggtctggcctggctcgagcactcctccgcatcgtatttcacagaatgggagctggtggcagcaaaggccaatagttggctcgagcagcaggaggtccccgaaggtagaacacaggggaccctgaaggccgctgcgaggcaactattcgtcctcctgaggcactgggacgaaaatctcgagttcaacatgctgtgctacaatcctaactacgtttag

SEQ ID NO: 10819 - DNA, 3051 bp, synthetic construct
  misc_feature 1..3051: note = source = /note="Description of Artificial Sequence: Synthetic coding sequence"
  source 1..3051: mol_type = other DNA
atgcctggcctcttgaattggattacgggtgctgccctgccacttacagcgagtgacgtcactagttgtgtttccggttacgctctgggactcacagccagcttgacttatggcaatctcgaagcccagccattccaggggctctttgtgtatccactcgacgagtgtactacagtcatcggcttcgaagccgtgatagccgatcgggttgtaactgtccagattaaggataaggccaagcttgagtccgggcactttgatgcaagccatgtgaggtctcccacagtcactggaaacatcttgcaagacggcgtgtccatcgcccctcattcttgtactcccggaaaagtgaccctggacgaagatctggagagaatcctgtttgttgccaatctgggtactattgcacccatggaaaatgttactatcttcatctctacctcatccgagctgcccaccctgccaagcggagccgtgcgggtcttgctccctgctgtatgcgcacccaccgtgccacaattctgtacgaaatctaccggcactagcaaccagcaggcacaggggaaggatcggcattgcttcggtgcatgggcacccggaagctggaataaactgtgtttagccaccctactcaataccgaggtctccaatccgatggagtatgaatttaacttccagctggagattcgcggaccgtgcctgctggctggagttgagtctcccacccacgaaattcgggcagatgctgccccaagcgctaggtccgccaagtcaattattattacgctggccaataaacatacttttgaccgccctgtggagatcctaatccacccatccgaaccccacatgcctcatgtgctcatcgaaaagggagacatgaccctgggcgagtttgatcagcatctgaaggggcgtaccgattttatcaaggggatgaagaaaaagtctcgcgctgaaagaaagaccgagataattcgaaaaaggctgcacaaggatattccgcatcactcagtgattatgctcaatttctgtccagatttgcaaagcgtccaaccttgccttcgcaaggcccacggcgaattcatcttcctgatcgaccgttcatcctccatgtccggaatctctatgcatagggtcaaagacgcaatgttagtagccctgaaatccctgatgccagcatgcctcttcaacatcatcgggtttggctcaacatttaagagtctgttcccctcttcccaaacgtattcagaggactcgcttgcaatggcatgcgacgatatacagagaatgaaagcagacatggggggaaccaatattctctctcccttgaagtgggttatccggcagcctgtccaccgcggacacccaagactgttgtttgtaataaccgacggcgctgtcaataatactggcaaggtgctagaactggtaagaaaccatgccttctcgactcgatgttacagtttcgggatagggccaaacgtgtgccataggctggtgaagggtctggcctctgtgtccgagggctccgctgagcttttgatggaaggggagcgcctgcaacctaagatggtgaagtctctaaagaaggccatggctcccgtgctctccgacgtgacggttgaatggatttttccagaaactacagaggtgttagtcagccctgtctctgcaagcagtctattccccggtgagagattggttggctacggaattgtctgtgacgcctcgcttcatatcagcaacccaagatcagacaagagacgcaggtactctatgctgcacagtcaggagagcggaagttcagtgttctatcattctcaagatgacgggcctgggctcgagggaggggactgcgcaaagaactcaggcgcaccttttattctgggtcaggctaaaaatgcacgcctcgctagtggagactcaacgaccaagcatgatctgaatctatcgcaacggaggcgagcctattccacgaatcagatcacaaaccataaacctttgccgcgagccactatggcttcagacccaatgcccgctgcaaaaaggtacccgctgcgaaaggctagactccaggatctaaccaatcaaacctccctcgacgttcaaagatggcagattgatttgcaacctttgttgaattctggacaggacttgaatcaagggcctaaacttcggggaccaggagcgaggcgcccatcgctgctgccacaaggatgtcagcctttcttgccttggggacaagagacccaggcctggtcacctgtccgcgaaaggacgtccgacagcaggagcccaggagatctagagccttcacatcacccaagtgctttcgagacggagacctcatccgactgggacccaccagcggagtcccaggaacgagccagcccttcccggcctgcaacaccggctcccgtgctcggtaaagctctcgtcaaaggcctgcacgactctcagagactccagtgggaagtttcctttgaactcggcaccccgggtcccgaacggggaggagcccaggacgcggacctgtggagtgagacatttcaccacttggctgcacgcgctataattagagatttcgagcaattggctgagagggaaggagagattgagcaaggctccaaccgacggtaccaggttagtgccctccacacttcaaaagcctgtaacattatttctaagtatacggccttcgtccccgtggacgtctctaagtcaaggtaccttccaacagtggtggaatatcctaactccgctgcactcaggatgctgggtagccgggcactggctcaacagtggcggggaacttccagtgggtttggacgaccacagactatgctgggtgaggactcagccccaggtaacgggccacgtaagtgttctcagaccctgatgggatttaagactaagaccgaaactgaacacagcgtgcgtggctggaagcccagaggcgctctgcagaatcagtctgtgctatcaacctcctggtcacattggcccccaaagcctcggcgtacaagcagtacgccagagccatcctag

SEQ ID NO: 10820 - DNA, 3663 bp, synthetic construct
  misc_feature 1..3663: note = source = /note="Description of Artificial Sequence: Synthetic coding sequence"
  source 1..3663: mol_type = other DNA
atgccagggctcctaaactggatcacaggcgcagccctccctttgacagcctctgacgtcaccagctgtgtgtccgggtacgctcttggcctgaccgcttctcttacatacggaaatctcgaagctcagccttttcagggtctgtttgtgtaccctcttgacgaatgtaccaccgtcatcggattcgaggcagtcatcgctgatagagtggtcaccgtgcaaattaaagacaaggcaaaactggagagtggccattttgacgcttcccatgtccggtctcccaccgtgactggcaacatattgcaggacggcgtgtccatcgctcctcacagttgcacgcccggaaaagtaacactggacgaggacttagaacgaatactattcgtggcaaacctcggaacaatcgcccctatggagaatgtgactatattcattagcaccagttcagagcttcctaccctcccaagtggcgctgtaagagtactcctcccggctgtttgtgcccctacggtgccccagttctgtacgaagtctacaggaacgtcaaaccaacaggcacagggaaaggatcggcattgttttggagcctgggctcctggcagttggaacaagctgtgcctcgccactttactgaataccgaggtttcaaatcccatggaatacgaatttaattttcagctcgagattcgcggaccgtgtctgttggcaggtgtggagagccccacccacgagatcagagcagacgccgctcctagtgccagatctgcaaagagtatcataattactctggccaataaacacacttttgatcgtcccgtcgagattctcatccatccgtcagagccgcacatgcctcatgttctgattgagaagggcgatatgactttgggagaatttgatcagcatttgaaaggacggaccgactttattaagggcatgaaaaagaaatctagagcagagcggaagaccgagataatccggaagaggttgcacaaagatatcccgcatcacagcgtaatcatgctgaacttctgccctgatttacaaagtgtgcagccatgcctacgaaaggcccacggggaatttatttttctcatcgatagaagttcatccatgtccggaatctccatgcatcgagtgaaggatgccatgctggtggctctgaagtccctgatgcctgcatgtttatttaacatcattggcttcggctcaaccttcaagtctctattccccagttcacaaacttatagcgaagatagtctggccatggcctgcgatgacatacagagaatgaaggctgacatggggggaaccaatattttgagccccttaaagtgggttattcggcaacctgttcacagaggacacccccgactgctcttcgtgattaccgatggcgctgtgaataacactgggaaggtcctcgaactggtgcggaaccacgcattttccacacggtgctatagcttcggtatcggacccaacgtgtgtcaccggcttgtaaaaggattggcctcggtctcagaagggtctgctgaactcttgatggaaggggagaggcttcagccgaagatggtcaaatcactgaagaaagccatggcaccagtgctttctgatgttacagtagagtggatatttccagaaaccactgaggttctggtcagccccgtttcagccagcagcttgtttccaggagaacgccttgtgggttatggaatagtgtgtgacgccagcctgcacatcagcaacccacgcagcgataaacggagacggtattccatgctgcactctcaagaatctggctcctccgtgttctaccatagccaagacgatggaccaggcctcgaggggggagattgcgccaaaaatagcggcgctcctttcatcctgggacaagccaaaaacgcgcgtttagcttcaggcgacagcactacaaaacatgatctgaacctcagccagcggcgacgggcatactcgaccaatcaaatcaccaatcataaaccgctgcccagggccactatggcatcagatccgatgcctgccgctaagcgctatcctctgaggaaagcgcgtctgcaagacttgaccaaccagacttccttggacgtgcaacggtggcagatcgacctgcagcccctccttaatagtggccaggaccttaaccagggacctaagctgcgagggcctggagccagacgtccctcactcctcccacagggttgtcaaccattcctcccatgggggcaggagacacaggcctggagtccggtgagggaaagaacctccgactctagaagtcccggagatcttgagccatcccaccacccatcagcgtttgagaccgagacatcatcagactgggaccccccagccgagtcccaggagcgtgcctctccctccaggcccgctaccccagccccagtactcggcaaggccctggtgaagggcctgcatgacagccagaggctccagtgggaagtgtccttcgagttgggaacccccggacccgagcgcggtggtgcacaggacgctgatttatggtctgaaacatttcaccatctggctgctcgggctattattcgtgacttcgagcagctggcagagagagaaggcgagattgagcagggatcaaaccgtcgctatcaggtgagcgcccttcacactagcaaagcctgcaacatcatatccaagtatacagctttcgtacccgtggatgtgagcaagtcccgctacctccctaccgtcgtggaatatccaaattcggccgctctccgaatgctcggctccagagccctcgctcagcaatggaggggcacctcgtccggcttcggtaggccacagacaatgctgggtgaagacagcgcaccaggcaatgggaaattccaggccttaaatatggaagcttcccctacagcgctgttctcggaagccaggtctcccggtagggagaaacacggcgcatcagaaggccctcagcgctccttggccactaatactctttcgagcatgaaggccagtgaaaacctcttcggttcatggttaaacctgaacaagtctcgcttgctcacacgcgcagctaaggggttcctgtctaaacctctcatcaaggccgtcgagagcacttccgggaatcagagtttcgattacattccattagttagcctgcagcttgcctctggtgcctttttgttgaacgaagccttctgtgaggcaacccacattcctatggaaaaactgaaatggacttcacccttcacttgccaccgcgtatccctaacaactcgtccgtctgaatctaagactcccagcccgcagctctgcacatcctcacccccaagacatccatcctgtgactcgttctcattggagccacttgctaagggtaagttaggccttgagcctcgggctgttgttgaacataccggcaagctgtgggcaacagtggtaggcctagcgtggttggagcactcgagcgcctcatattttacagaatgggaactcgtcgcagccaaagctaattcctggctggaacagcaagaagtgcccgaaggacgcacacaggggacccttaaagccgctgcccgtcagcttttcgtgctgttgagacattgggacgagaacctggaatttaacatgttatgctataatcccaattacgtgtag

SEQ ID NO: 10821 - DNA, 5234 bp, synthetic construct
  misc_feature 1..5234: note = source = /note="Description of Artificial Sequence: Synthetic coding sequence"
  source 1..5234: mol_type = other DNA
atgcgacttctgtgggggctcatctgggcctccagttttttcacattgagtctgcagaagccacggctgctgctgttctctcccagcgtggtgcaccttggtgtgccactctctgtgggtgttcagctgcaggacgtaccgaggggccaggtggtcaaaggaagcgtattcctgaggaatccgtcgcggaacaatgtcccatgctctccaaaagtagacttcaccttgtcctctgagcgagactttgcgttgctgtcactacaggtgcccctaaaggacgctaagtcttgcggactccaccagctgcttcgcggtccagaggttcagctcgtcgctcattctccatggctcaaggattccctttcacgcacaacgaacatacagggaatcaacctccttttctcctcacggcgaggccacctgttcctccagactgatcaacctatatataatccaggccagagagttcgttacagggtgtttgctctcgatcaaaaaatgaggccttccaccgacacaattaccgtaatggtggagaactcacatggtctccgagtaaggaagaaggaggtgtatatgccatccagtatttttcaggacgatttcgtgatccctgacataagtgaaccgggaacctggaaaatctctgcacgcttctctgacggtctggaaagcaatagcagcacccagttcgaggtgaagaaatatgtgttgcctaatttcgaagtgaaaatcactccaggcaaaccctacattctcacggtaccgggacacttagacgaaatgcaactggatatccaggcacgatacatctatggaaagcccgtgcagggcgtggcttatgtgcggttcggcctgctcgacgaggatggcaaaaaaactttcttccgtggattggaatcccagaccaaactggtgaacggccaaagccacatcagtttgtctaaggctgaatttcaggatgctctggaaaaactcaacatggggatcaccgatctgcaaggcctgcgcttgtatgtagccgcagccattattgagtaccctggtggagagatggaggaggccgagttgacatcctggtatttcgtgagtagtccgttttcactagatctgagcaagacaaaacggcacctagtgcctggggcaccatttctgctccaggccctcgtccgtgagatgagcgggtctcctgcttccggcattccagtcaaggtctctgctactgtgagctctcctggttctgtgcccgaagtccaggatattcaacagaacacagatggttctgggcaggtcagtatcccgattataatacctcagacgatctctgagctccagctgtccgtttcggctggctcacctcatcctgcgatcgccaggctgactgtcgcggctccaccgtcgggagggccaggcttcttgtcaatcgagcgtcccgacagccgaccaccccgagtcggagataccctgaacctgaacctgagagctgtggggtcgggggctactttcagccactactactatatgatcctttctcggggacagatcgtgttcatgaaccgagaacctaagcggactctcacaagtgtgagtgtatttgtcgaccaccatctggcacccagcttctatttcgtggcattctactatcatggagatcacccagttgcaaactcgcttcgggtggatgttcaggctggggcttgtgagggcaagctcgagttgagtgtggatggtgccaagcagtacagaaacggagagagcgtgaagttgcatcttgaaactgattcccttgccctggtggccctgggcgcactggacactgctctctacgctgcaggatccaaatcgcataagccactcaacatgggaaaggtctttgaagctatgaactcatacgacttgggctgcggccctgggggaggcgactctgccctgcaggtttttcaagccgcagggctggcgttctccgatggggaccaatggacactgtctcgcaaaaggctgtcatgtcctaaagagaagaccaccagaaaaaaaagaaatgtcaactttcagaaggccatcaatgagaagttaggacaatacgcctcaccaacggccaaaagatgttgtcaggacggcgttactcgtctccccatgatgagatcatgtgagcagagagcagctagggtgcaacagccagattgtagggaaccgttcctgtcctgctgtcagtttgcagagtccctacggaaaaaatccagggacaaaggccaagcagggctacagcgagcgctcgaaattctgcaagaagaggatctaattgacgaagatgatattccagtccggagcttcttccctgaaaattggctgtggcgcgtcgagaccgtggacagattccagatcctcacactgtggctacctgatagtctcacaacctgggaaatccacggcctgtccttgtctaaaacaaaaggactctgtgtggcaactccggttcagctgagggtgttccgcgagttccatcttcacttgaggctccccatgagtgtccggcgattcgaacaacttgagctgagaccagtcctgtacaactacctagacaagaacctgacagtgagcgtccacgtgagtcctgtggaagggctgtgcctggcaggcggtgggggactcgcacagcaggtcctcgtccctgccggtagcgcacgccctgtggccttttctgtagtcccaactgctgccgcagccgtgtccctcaaagttgtcgccagaggttcctttgagttccctgtcggcgatgcagtgtctaaagtgctgcagattgagaaagagggcgcaatacacagggaggaactagtatatgaacttaaccccttggaccaccggggtcgcactctggaaattcccggtaacagcgatccgaatatgattcccgacggggacttcaacagctacgtacgtgtaacagcatccgatccactggataccttggggagcgagggcgcattgtcgcctggtggggtggcctctctccttagactgccacggggatgtggggaacagacaatgatctacttggcccctacactcgccgcttctaggtatctggataagaccgaacagtggtctacgctaccgcctgaaaccaaggaccacgccgtggacttgattcagaagggctacatgagaatccaacagttccgaaaagccgacggctcctatgctgcttggttgtccagaggcagcagtacatggctaactgcatttgtgttgaaggtgcttagtttggcacaggaacaggttggtggtagtcctgaaaaacttcaggagacttctaactggctcctgtctcagcagcaagccgacggtagcttccaggatcttagtccagtcatccatcggagcatgcaaggagggttggttgggaatgatgaaacggtggcattgaccgcatttgtgacaatcgctctgcatcatggactcgccgtgttccaggacgagggcgctgagcctttgaagcaacgcgttgaagcgtccattagcaaggctagttcctttctcggcgagaaggcgtctgcaggattattgggggctcacgcggctgctatcaccgcgtacgcactcacactgactaaggccccagccgacttgagaggcgttgcccataacaatcttatggccatggcacaagagacgggagataatctctactggggttctgtaaccggatcacagtctaacgccgttagccccaccccagctccccgaaacccgagtgacccaatgccacaggctcctgctctttggatcgagactacggcttacgccctgctgcaccttctgttacacgaaggcaaggccgagatggccgaccaagccgctgcatggctaactagacagggcagctttcagggcggatttagaagcacgcaggatacggttatcgcccttgatgctctctctgcatattggattgcctcgcacaccacagaagagcgtgggctgaatgttacactctccagcaccggacggaatggattcaagtcccatgcactgcagttgaataacagacagatccgtggactggaggaggagttgcaattttccctgggctcaaagattaacgttaaggttggaggcaatagcaagggcacactgaaagtgttaaggacctacaatgtgttagacatgaaaaacacgacttgccaggatttgcagattgaagtaactgtcaagggacatgtggagtatacgatggaggcaaatgaggattacgaggactatgaatatgatgagctacctgcaaaggatgatcctgacgctcctctgcagccagtcacacctctgcagctgtttgaaggcaggaggaatagacggcgacgagaggctccaaaggtagtggaagagcaagagagtagagtccactacaccgtctgcatctggaggaacggtaaggtcggactgtcagggatggccatcgcggacgttaccttgctgagcgggttccacgccctgcgagcagatctagagaaattgacaagtttgagtgaccgctacgtgagtcactttgagacagaaggaccccacgtcttactgtacttcgatagcgtccccacctctcgcgaatgcgtcggattcgaagcagtccaggaagtgcctgtgggtctggttcaaccagcctccgcgaccctgtacgactattacaatcctgaacgacgctgctccgtgttctacggcgcaccttcaaagtcgaggctgttggccacactttgcagtgcagaggtgtgtcagtgcgccgagggcaagtgtcccagacagagacgcgctctagagagaggcttacaagatgaagatggctacagaatgaaatttgcctgctattatcccagagtagagtatggtttccaggtgaaggtcctgcgggaggactctagggctgctttccgactcttcgaaacaaaaatcacccaggtgcttcactttaccaaggacgtgaaggctgctgcaaatcagatgagaaactttctcgtgagagcttcttgccgactcagactggagccagggaaggagtacctgatcatgggactcgacggcgcaacctatgatttggaaggacatcctcaatacttgctggatagtaacagctggatagaagagatgcccagcgagagactatgccgcagcacaagacaacgtgccgcttgtgcccagctcaatgattttttacaggaatatggcacccaggggtgtcaggtcta

SEQ ID NO: 10822 - DNA, 1242 bp, synthetic construct
  misc_feature 1..1242: note = source = /note="Description of Artificial Sequence: Synthetic coding sequence"
  source 1..1242: mol_type = other DNA
atgaagggagccttaggctccccagtggcagccgctggggctgcaatgcaggaaagctttggctgcgtcgtggccaataggtttcatcagctcctggacgacgaatctgacccattcgacatcctccgcgaggctgaacggagaagacagcaacagctgcagcgaaaaagaagagacgaagccgctgccgcagctggggctgggcctcgaggaggcagatcccccgctggtgcgtccggccatagggcgggtgccggaggacggcgagagagccagaaggagcgaaagtccctgcccgctcctgtagcgcaaagacccgacagtcccggtggcggactgcaggcgcctgggcagaaacgtacgcccaggagaggagagcagcagggttggaacgactccaggggtccagagggaatgctggaaagagcagaacgccgatcttatcgagagtataggccatacgaaacggaacgccaggcagactttactgctgaaaagttccccgatgagaaacccggagaccgcttcgaccgcgaccggccattacgaggcagaggcggtcccagaggcggtatgagaggacggggtagagggggacctggcaaccgagtgttcgatgctttcgaccaacgtggcaaacgggagttcgaaaggtatggcggtaacgataagattgctgttcgcaccgaagataatatgggcggttgcggagtacggacttgggggtccggtaaggataccagcgatgtagaacccactgcgccaatggaggaacccactgtggtagaggaatcccagggcacaccggaggaggaatctccggctaaggttcctgagctcgaggtcgaagaagagactcaagttcaggagatgaccctggacgagtggaagaacctgcaggaacagacccgcccaaaaccagagtttaacatcaggaagccagagtcgacagtgccttccaaggcggtggttattcacaagtcaaagtatagagatgatatggttaaggatgattatgaagacgactcgcacgtgtttcgcaagccagctaatgacataacctctcaactcgaaatcaacttcggaaacttgccccgacccggacgcggtgctcgagggggaaccagaggcggacgcggtcggattagaagggctgaaaattatggcccacgcgcagaggtggtgatgcaagacgttgcacctaaccccgacgatccagaggacttcccagccctcagctag

SEQ ID NO: 10823 - DNA, 927 bp, synthetic construct
  misc_feature 1..927: note = source = /note="Description of Artificial Sequence: Synthetic coding sequence"
  source 1..927: mol_type = other DNA
atgaaaggtgccctgggatctccagtggccgcagccggagccgctatgcaggaatcctttggttgtgttgtcgctaaccgcttccatcagctactggacgacgaatccgacccgtttgatatcctgcgcgaagccgagaggcggaggcagcaacagttgcagcgcaagcggcgtgacgaagcagccgctgccgcaggggctgggcctcggggtgggaggtctccagccggagcttctggacatcgcgctggagccggaggaagaagggaaagccagaaagagagaaaatccctgccagctcctgttgcccagagacccgatagcccaggcggtgggctgcaggccccaggccagaaacgcaccccgcgaaggggtgaacagcagggttggaacgattcccggggtcctgaggggatgttagagagggccgagcgccgatcctatagggaataccgtccttacgagacagagcgccaggcagatttcaccgcagagaagttccccgatgagaaggtgccagagctggaagtcgaggaggaaacccaggttcaggagatgaccctcgacgaatggaagaaccttcaggagcagactagacctaagcccgagttcaatatacgcaagcccgagtcgaccgttcctagcaaggcagtcgttatccacaaatcaaagtatagagatgatatggtgaaggacgactatgaggatgactcccacgtgtttagaaaaccggcaaacgacattacctctcagctggagatcaactttggcaatctccctagaccaggaagaggagccagaggcggaactcggggtggtcggggaaggataagacgggctgaaaactacggacctcgcgcagaggttgtcatgcaggatgttgcgccaaacccagacgatcccgaagattttcccgctctttcgtag

SEQ ID NO: 10824 - DNA, 1437 bp, synthetic construct
  misc_feature 1..1437: note = source = /note="Description of Artificial Sequence: Synthetic coding sequence"
  source 1..1437: mol_type = other DNA
atgccacgtcgtggttactctaaaccaggcagttggggatccttctgggctatgttaacgctcgtgggtctggtgactcatgctgcacagcgggctgacgttgggggtgaagcggcaggaacctcaatcaaccatagtcaggccgtccttcaacgcctacaagagctgctgcgccaagggaacgcgagcgatgtagtactccgagtgcaagcggcaggcacagacgaagtgcgagtgttccacgcacacagactactattagggctgcattctgagcttttcctggaactgctgtccaatcagtctgaagccgtcctccaggagccacaggactgtgccgcagtgttcgataagtttatcaggtacttgtactgcggtgaactaacagtgcttttgacccaggcgattcccctacatcggctggcgaccaaatacggtgttagctctctgcagagaggcgtggctgactacatgagagctcacctggccggtggagctggccctgcagtcggctggtaccattatgctgtgggtacaggcgacgaggccctgagagaatcctgtcttcagtttctggcttggaatttaagtgctgtggcggcaagtaccgagtggggggctgtcagtcctgagctgctatggcagttgctgcagaggagtgacctcgtactgcaggatgagctagaactgttccacgccctggaagcctggctcggcagagccaggccacctccagctgtggccgagagagcactccgggcaatcagataccccatgattccgcctgcccagctgttccagttgcaggcccgatccgccgctcttgctaggcacggtccagctgtggctgatctccttctgcaggcctaccagtttcatgcggcttcccccctgcattacgctaaatttttcgatgtgaatggatcggctttcctcccacggaactatcttgctcctgcatggggtgccccttgggtaatcaataacccagctagagatgaccgatccacctcgttccagacccaacttggacctagcggtcatgacgcagggaggcgcgtcacctggaatgtgttattcagcccccgatggctgcctgtctcactgaggcctgtgtatgcggatgcagctggcacagccctccccgcagctagacctgaagatggcaggccgaggctcgtggtgactcccgctagtagtggaggtgacgcagctggcgtctcatttcagaagactgtccttgtcggggcaagacaacagggcagactgctggtccgacacgcctattcttttcaccagtcgtccgaggaggccggagatttccttgcccacgccgacttacagcgacggaattcagagtaccttgtggagaacgcacttcatctgcacttgattgtcaaaccagtgtaccacactctgattaggacacccaagtag

SEQ ID NO: 10825 - DNA, 477 bp, synthetic construct
  misc_feature 1..477: note = source = /note="Description of Artificial Sequence: Synthetic coding sequence"
  source 1..477: mol_type = other DNA
atgtgttgcccgggaggccattacaccttgatcctccggaggggcaacaggttcagacgtgagaagagacctgcaaaggtgaccggggctcagaccgaggtacagctggccccacctctaccgagggggagggcacgcaggagcccatggagtgtgccaatatccctgtctattgaccgccttgagttcgacctgctgtaccccgctatcaagggagacaccatccagctgtacctgggtgcaaagcttctggacagtcagggcaaagtcactaaatggttcaacaattctgctgcttctctgacgatgccgaccctggataacatcccatttagcctaattgttagccaggacgtggtgaaagctgctgttgccgctgtgctcagtcctgaggagtttatggtattgttggatagtgttctgcccgaatccgcacacaggctgaagtcctccatcggactaataaatgagaagtag

SEQ ID NO: 10826 - DNA, 771 bp, synthetic construct
  misc_feature 1..771: note = source = /note="Description of Artificial Sequence: Synthetic coding sequence"
  source 1..771: mol_type = other DNA
atgtttcagaccggaggcctgatcgtcttttatggcctcctcgctcaaacgatggcccagtttggaggtctgccagtgcctctcgaccaaacactacctctcaatgttaaccctgctctacctctttcccctactggtctggccggatcacttacaaatgcattaagcaatggtctcctatcagggggactgctgggcattcttgagaatcttcccctactggatattctgaagccaggtgggggaacctcgggtggtttattgggtggactgctcggaaaggtgacatcagtgattccagggctcaataacataatagatatcaaggtgacagatccacagttgttggagctgggcctggtccagtcacccgatggccatagactttacgtcaccatccccctagggattaaactgcaagtcaacacacctctcgtgggagcctctctattgcgactcgctgtgaaactcgatattaccgctgagattttggccgtcagggacaagcaggagcgtattcatctcgttttgggcgactgcacacatagccccggttccttacagatctcactgctcgatggcctggggcctctgcccatacaggggctgctggacagtctcacagggattctgaacaaggtcttgccagagctggtccagggcaacgtctgtcccttagtgaacgaggtcctgcggggtctcgatattacactggtccacgatattgtgaacatgctaatacatggccttcagtttgtcattaaggtatag

SEQ ID NO: 10827 - DNA, 771 bp, synthetic construct
  misc_feature 1..771: note = source = /note="Description of Artificial Sequence: Synthetic coding sequence"
  source 1..771: mol_type = other DNA
atgttccagaccggaggactgatcgtcttttatggactcctggcccaaacgatggctcagtttgggggactgcctgttccactggatcaaacccttcccctcaatgtcaatccagctctgcctctttcacctacaggactcgccggttcccttaccaatgccttgagcaatggcctcctgtccggcggactgctgggtatcctagaaaacttgccgctgcttgatattctgaagccgggagggggaactagcggaggcctcctaggcggtctactgggaaaagtgaccagcgtcatccccggactaaacaatataattgatattaaggtaaccgacccccagctgctcgagctgggactggtccaatcgccggacgggcaccggttgtatgtaacaatccctctagggatcaagctgcaggtcaacacccctctggtgggcgcaagtttgctgagactggcagtaaaattggatatcactgcggagatacttgctgtccgggacaagcaggaacgcatccatctggtccttggcgactgcactcattcaccagggtcgctccagatttccctgttggacggcttgggacccttgccaattcaaggactgctagacagtctgaccggcatcctgaacaaagtgctgcctgagctcgttcaggggaatgtctgccctctggtcaatgaggtccttcgaggactcgatattacccttgtgcacgatatcgtcaacatgttgatacacggactccagttcgtcattaaagtctag

SEQ ID NO: 10828 - DNA, 657 bp, synthetic construct
  misc_feature 1..657: note = source = /note="Description of Artificial Sequence: Synthetic coding sequence"
  source 1..657: mol_type = other DNA
atgatgtgtccactctggcgactgcttatattcctcgggctcctggcgctgcctctcgcccctcacaagcagccgtggccaggcctcgcccaggcccatcgtgacaataagagcaccttggcacgtatcatcgcccaaggtctcatcaagcacaatgcggagagccggatccaaaatattcactttggggacagattgaacgcttccgcccaggtcgcccctgggttagttggttggcttatcagtggcaggaaacatcagcaacagcaggagagtcgctcctttgacaataatatcgtgaagatgtgtgctcatatgagcatcgtggtggaattctggctggagaaggatgaatttggaagaagagaccttgtgatcggaaaatgcgacgcagagccaagttccgtgcacgtggccatcctgaccgaagccatacctccaaaaatgaatcagtttctctacaacctaaaagaaaatctacagaaggttcttccacatatggtggagtcgcaggtttgtcctctgataggggaaatactcgggcagcttgatgtgaaattactgaagagcctgatagagcaggaagcggcacatgaacctactcaccacgagaccagccagccgagcgcatgccaggccggagagtcacctagttag

SEQ ID NO: 10829 - DNA, 765 bp, synthetic construct
  misc_feature 1..765: note = source = /note="Description of Artificial Sequence: Synthetic coding sequence"
  source 1..765: mol_type = other DNA
atgatgtgccccctgtggaggctcctcattttcttggggcttctggcactgccattagctccccacaagcagccctggccgggactggcgcaagcccatagagataacaagtctactctggctcgaattattgctcaaggcctcatcaaacataatgctgagtccagaatccagaatatccatttcggtgatcgactgaacgcttccgctcaagtcgctcctgggttggtcggttggctaatttcgggccgaaaacatcaacagcagcaggagtcatcaatcaatatcaccaatatacagttggattgcgggggtatccagatctcctttcataaggagtggttctccgccaatatctcgcttgaattcgatttggagctcaggccatcttttgacaacaacattgtcaaaatgtgcgcccatatgagtattgtggtggaattctggctggagaaagatgagtttgggaggcgtgatcttgtaattggaaaatgtgatgctgagccaagcagtgtccatgtcgctattctcactgaggcgatccccccaaaaatgaaccagtttctgtacaatctcaaagagaatctgcagaaagtgttgccccatatggtagagtcacaggtttgccctctgataggggagatactaggccaactggacgtgaagctgttaaaatcgctgatcgagcaggaggcagctcacgaacctacccatcatgagacttcacagccttctgcctgtcaagccggtgaatcgccaagctag

SEQ ID NO: 10830 - DNA, 1635 bp, synthetic construct
  misc_feature 1..1635: note = source = /note="Description of Artificial Sequence: Synthetic coding sequence"
  source 1..1635: mol_type = other DNA
atgaaaatctccatgatcaattacaaatccctgctggcactactgtttattctggcatcctggatcattttcaccgtgtttcagaactctaccaaggtgtggtccgcccttaacctatcaatttcattgcactattggaacaactctacaaagtccttgtttccgaaaacccctcttattagtcttaaacccttaacagagacagagctgagaatcaaagagatcatagagaagttggaccagcagattccccctcggcctttcacccatgtcaataccactacatccgcaacacatagcaccgctacgattctcaatcctcgggatacatactgccggggagatcagcttcatatacttctcgaggtgcgggatcacctggggagacgtaagcagtatggtggcgattttctcagggcccgtatgtcctccccagcactgatggctggggctagcggcaaagtgaccgactttaataacgggacatacctcgtgtcgtttaccctgttttgggaggggcaggtgtcattatctctcctgctaatccatcccagcgagggagtaagcgcactgtggtccgctaggaaccagggttacgacagagttatcttcaccggacagtttgtgaacggaaccagccaagtccactccgagtgtggattgatattgaacactaacgctgaactctgccagtacctagataatcgagaccaggaggggttctactgcgtacgccctcagcacatgccctgcgcggcactgacacacatgtacagcaagaataagaaggtctcctacctgagtaagcaggagaagagtctgttcgagcgaagcaacgtgggagtggagatcatggaaaagttcaacaccatctcggtctctaagtgcaacaaggaaacagtcgccatgaaggaaaaatgcaagtttgggatgacttccaccatcccttcaggacacgtgtggcgcaacacatggaatcccgtgtcatgttctctagcaactgtcaaaatgaaggaatgcctgcgaggtaaactgatttacctcatgggtgattcaacaattagacagtggatggaatactttaaagcgagtataaacacgctgaagagtgtagacttacatgagtctgggaaactccagcaccagctggctgtcgatcttgaccggaacattaatatacagtggcagaaatactgttatcccctaattggaagcatgacctattctgttaaagagatggagtatctgacaagagccatcgacaggacgggtggcgagaagaacacagtcatagtcatcagtttaggacagcacttccgaccatttcccatcgacgtgtttatccggagagctcttaatgttcacaaggcaatacaacacctgctgctccggtcccctgatactatggttatcattaaaacagagaatatccgggaaatgtataatgacgcagaacgcttctccgacttccatggctatattcagtatctgattatcaaggacatatttcaagacttgtccgtgtctataatcgatgcttgggacataaccatagcttacggaaccaataacgtgcaccctccacagcacgtagtcggtaatcagatcaatatcctgttaaactacatctgttag

SEQ ID NO: 10831 - DNA, 1845 bp, synthetic construct
  misc_feature 1..1845: note = source = /note="Description of Artificial Sequence: Synthetic coding sequence"
  source 1..1845: mol_type = other DNA
atgtggatggcctggtgtgttgcagccctgtccgtcgtggcagtctgtggtacttctcacgagacgaacacagttctaagagtgaccaaagacgtcctgtctaatgcgatctccggcatgttgcagcagtctgacgccctgcacagtgccttgcgagaggttcctcttggtgttggagatattccatacaacgattttcacgtgcgtggccctccacccgtgtataccaatgggaagaagttggatggcatctaccagtacggtcacatcgaaaccaacgataacactgcccagctgggcggaaagtatagatacggagagattctggagtcagagggatctatcagagacctgcgcaacagtggctatagaagcgctgaaaacgcttacgggggacacaggggactgggaagataccgggctgccccagtgggaaggttgcaccggagagagctgcaaccgggagaaattcctccaggggtggccaccggagctgtcggcccaggtgggctactgggcacgggaggcatgttagccgcagacgggatcctggccggtcagggcggattgctgggagggggaggtctcttaggagacgggggactactgggcggagggggagtgcttggcgtgctgggcgagggtggcattctaagcactgtgcaaggaatcactggcctccgcattgttgaactaacactaccaagggtgagcgtgcggttgctgccaggcgtgggcgtatacctgagcctctacactagagtggcaattaatggaaagagtctgattggcttcctcgacatcgcggtggaagtgaatatcaccgccaaggtgcggcttaccatggatcgaaccggctaccctcggttggtaattgagcggtgtgatactcttttaggcggaataaaggtgaagttgctgcggggactgctgcccaacctcgtggacaacctggttaacagggtgctggctgacgtgcttccagatctgctgtgcccaattgtagatgtggtccttggccttgtaaatgatcaactgggattggtggactctctcattccactggggattcttggtagtgtccagtacacttttagttccctaccgctggtgactggtgaatttctagagctcgacttaaacacacttgtgggagaggccggagggggactgatcgactaccctctcgggtggcctgccgtgagcccaaagcctatgccggagttacctcctatgggggacaataccaagtcccagctagcaatgtcggctaattttctgggatctgtgctcacattactgcaaaaacagcatgcccttgatttagatatcaccaacggaatgttcgaagagctccctccattgaccaccgccacattgggcgctctgatccccaaggtgttccagcagtacccagaatcctgtcctcttatcatccgcatccaggtattgaacccgccatccgtgatgttgcaaaaggataaggcattggttaaagttctggccacagcggaggtaatggtgtctcagccgaaggatttggaaaccaccatttgtttgatcgacgtggatactgagttcctggcatcattctccaccgagggcgacaagctcatgatagacgcaaagctggaaaaaacgtcactcaacctccgcactagcaacgtgggcaactttgacataggactgatggaagtcttggttgaaaagatcttcgacctggccttcatgcctgctatgaacgccgtattaggcagcggagtgccacttcctaagattctgaacattgatttttcgaacgcggatatagacgtgctggaggacctactggttctcagcgcctag

SEQ ID NO: 10832 - DNA, 1431 bp, synthetic construct
  misc_feature 1..1431: note = source = /note="Description of Artificial Sequence: Synthetic coding sequence"
  source 1..1431: mol_type = other DNA
atgcaaccggtcatgctggcgctgtggagtctgctgttattatggggactggcaacgccttgtcaggaactgctagaaactgttggtaccctcgcacgcatagacaaagatgagttggggaaagccattcagaatagcttagtcggcgagcctattcttcagaacgtgctaggatctgtgacagctgtcaaccgtggactcctaggctctggaggattgctggggggtgggggattgcttggccacgggggagtgtttggggtggtggaggaactgagtggactaaaaatcgaagagctcacgcttccaaaggtcttactcaagctgttaccaggttttggcgtccagctgagcctccataccaaggtggggatgcactgcagcgggcctttggggggtctcctgcagctcgcggctgaggtgaacgtcacaagcagagtagcgctcgcagtaagctcacgtggcacaccaattttgatcctgaaaaggtgcagcaccctgctgggccatatctccttgtttagcggcctcctgccaacccctctcttcggcgttgtggaacagatgctgtttaaggttctgcccggactgctctgccctgtcgtggactcagtccttggagtggtgaatgaactgttgggcgcagtcttgggactggtaagtttgggagctctgggaagtgtggaattctccttagcgaccttgcctttaatttcgaatcagtacattgaactcgacattaatcccatagtgaaatccgttgctggggatattattgactttccgaagtcaagagcccctgccaaagtccctcccaaaaaagatcacacatctcaggtcatggtcccactctatctcttcaatactacttttggactgcttcagactaacggtgctctggacatggatataacccctgaattggtgccctctgatgtgcccctcacgactacggacctcgctgctctcctccctgaggctctcggaaagctccccctccatcagcagttactgctcttcttgagagtgagggaggcccctacagtgactcttcacaataaaaaggcacttgtatcgctccccgctaacatccatgtgttattttatgtcccgaaaggcactcctgaatctctgttcgaactgaactcggtcatgacagttagggctcagctggccccatcggctaccaagctccacattagcttgagcctcgagaggctgtccgtaaaggtcgcttccagcttcactcacgcatttgatggctcccgcctcgaggaatggctgtctcatgtagtaggagctgtgtatgcaccaaagttaaacgtcgcccttgatgtgggtatacccctacctaaagtactgaacattaatttcagtaattcagttttggaaatagtcgagaacgccgtcgtgctgaccgttgcctcatag

SEQ ID NO: 10833 - DNA, 585 bp, synthetic construct
  misc_feature 1..585: note = source = /note="Description of Artificial Sequence: Synthetic coding sequence"
  source 1..585: mol_type = other DNA
atgcaggatgccccattgagttgtttgtcgcccaccaagtggagctctgttagttccgccgattccacagagaagagtgcttccggagctggcacgcgcaacctcccctttcagttttgtctgcggcaggcactgcgcatgaaggctgccggtatcctgactctcattggctgtctggtgacaggtgcagagtcgaaaatctatacacggtgcaaactcgcaaagattttttcccgcgctggcctagataactattggggattcagcttgggcaactggatctgtatggcttactatgaatcaggttataataccacagctcagacggttttggacgatggcagtatagattacggaatctttcaaatcaactccttcgcatggtgtaggcgcggaaagctcaaagaaaacaaccactgccacgtggcctgttccgcattgatcacggacgacttaactgatgctattatttgcgcccgaaagatcgtcaaggagacacaaggcatgaactattggcagggctggaaaaaacactgcgaaggacgagacttatccgagtggaaaaaagggtgcgaagtatcctag

SEQ ID NO: 10834 - DNA, 1266 bp, synthetic construct
  misc_feature 1..1266: note = source = /note="Description of Artificial Sequence: Synthetic coding sequence"
  source 1..1266: mol_type = other DNA
atggggtttctaagccctatctacgtcatttttttcttctttggagtgaaggtgcactgccagtatgaaacataccagtgggacgaggactatgaccaggaaccagacgacgactaccaaactggctttccttttcggcaaaacgtggactacggagtaccatttcatcagtatactcttggatgtgtaagcgaatgtttctgtcctactaatttcccatcctctatgtactgtgataaccggaagctgaagacaattccaaacatccccatgcatatccaacagctctacctccagttcaacgagattgaagctgtgactgctaatagtttcattaatgccacccacttgaaagagataaacttaagtcacaataaaatcaagtcccaaaagatcgactatggtgtgttcgcgaaactgcctaatctgttgcaactgcacctcgagcataacaacctggaagaattccctttcccgttgcctaagagcctcgagaggctacttttggggtacaacgagatctccaaactgcagacaaatgccatggatggcctcgtgaaccttactatgcttgacttatgctacaactacttgcatgacagcttgttgaaggataagatttttgcgaagatggaaaaacttatgcagctgaatctttgttccaatcgactggaatcaatgccacccggactcccaagcagcttgatgtatttgtccctggagaataactctattagcagtattccagagaagtacttcgataagctccctaagttgcacaccctccgcatgagccacaataaattgcaggacatcccctacaacatctttaacctccccaatattgtggaacttagcgttggtcacaataagctcaagcaagccttctacattcctcgcaatttggagcacttatacctgcagaacaatgagattgagaaaatgaacctaactgtgatgtgccccagcatcgatcccctccactaccatcacttaacgtatattcgcgtggatcagaacaaacttaaagaacccatcagttcctacatattcttttgtttcccccacatacacacaatctactacggtgagcagaggtccaccaacggacaaactattcagttgaaaacccaggtgtttcgaagattccccgacgatgatgacgagtccgaggaccatgacgaccccgacaatgctcatgagagtcctgaacaggagggcgcagagggccatttcgacctgcactattacgagaaccaggagtag

SEQ ID NO: 10835 - DNA, 252 bp, synthetic construct
  misc_feature 1..252: note = source = /note="Description of Artificial Sequence: Synthetic coding sequence"
  source 1..252: mol_type = other DNA
atgctgtgttgctgccccttggcagatgccttacttattttcctcgagaccggatcatgttttcagcccggacagcagtcagaaaccctgtcacagaagcagaataagaccaataacaagaaatgggccggaggagccggatgtagaccctttaggttatggtgggtcggtaggagtcgcggagccggtgtccagctgtattcgacaaaaaaaggatggatactgcgaggaaagggagggaccgaagcatag

SEQ ID NO: 10836 - DNA, 2559 bp, synthetic construct
  misc_feature 1..2559: note = source = /note="Description of Artificial Sequence: Synthetic coding sequence"
  source 1..2559: mol_type = other DNA
atgctgcctaccgaggtgcctcagtcccaccctggacctagtgctctccttctgctgcagctccttctgccgcctacgtctgcttttttccccaatatttggtcactactggcagcccctggttccatcacacatcaggatctcaccgaagaggcagcgctcaatgtgaccctgcaattgttcctcgagcagccccctcccggtaggccccctctaaggttggaggacttcctcggaaggaccttacttgcagacgacttgttcgcagcctatttcgggccaggatcatccagaagattccgagcagctctcggtgaggtgtcccgcgctaacgcagcccaggacttcttgcctaccagtcggaacgatcccgatctgcattttgacgccgagcggctcggacagggacgagcccgactcgtcggagccctgagagagactgttgttgcagcgagagcgcttgatcatactttagcccgacagagactaggagccgctctgcatgcgttgcaggacttttactctcactcaaactgggtcgagctgggagagcagcaaccccacccccacctgctgtggccacgtcaggagctgcagaatctggcccaggtagcagatcccacttgcagcgactgcgaagagttgtcttgtccacgtaattggctcgggtttacccttttaaccagtgggtactttgggacccaccctcctaagccaccgggaaagtgtagccacggagggcattttgataggagctcctcacagcccccaagaggcggaattaataaggacagcacatcccctgggttctccccacatcacatgctgcatttgcaagctgcaaagctggcgctgctcgcctccattcaggcctttagccttctgcgcagcaggctgggagatcgcgatttcagccgcctgctggatattacccccgcaagtagcctctcattcgtgctcgatactactgggtcaatgggcgaagaaatcaacgcggctaagattcaagctagacacctggtagagcagagacggggatcccctatggaaccagtgcattatgtgctcgtcccatttcacgatccgggatttggcccagtgtttactacaagtgatcctgactctttctggcagcagcttaatgagattcatgcactggggggtggcgatgagcctgagatgtgtcttagcgctctgcagctcgcgctgctccacaccccaccactcagcgatatcttcgtgttcaccgatgcctccccaaaagatgcgttcctcacaaaccaggttgagagcctgacacaagaacggagatgtcgtgtgacattcctagtaaccgaggatacttcacgtgttcaggggagagcccgtagggagatcctctcccctctgagattcgaaccctataaggcagttgccttagcttcagggggagaagtgattttcacgaaggatcaacacatccgcgacgtcgcggctatcgtcggagagtccatggccgcacttgtgacattgcctctagacccaccagtcgtggtgcccggtcagccgttggttttttcagttgacggcttgctccagaaaatcactgttcgcatccatggtgacatctcctccttctggatcaagaaccctgctggagtgtcacagggacaggaggagggaggaggcccactaggccacacccgccgttttgggcaattctggatggtgaccatggacgaccctcctcaaactgggacttgggagattcaagttacagccgaagacacccccggagtaagagtccaagctcaaactagcttagacttcctgtttcacttcgggatccccatggaagacggaccccatcccggactgtacccactcacacagccagtggccggactccagacccaactgctcgttgaggtaaccggcctggggtctagggcgaatcccggagaccctcagccccacttttctcacgtgatactccggggagtccccgagggagctgaactgggacaagtccctctcgagcctgttggaccccctgagcgtgggctcttggccgctagcctgagccccacgttactgtcgaccccacgacccttcagtttggaactgataggccaggacgccgcaggcagaagactgcatcgcgcagccccacaaccgtccaccgtggtgccagtgttgcttgaactgtccggacccagcggtttcctcgccccaggcagcaaagtcccactcagtctccgcattgccagcttctctgggcctcaagacctggacctgcgcacatttgtgaatccaagcttttctttgacaagcaatctgtccagggcccatcttgagttaaacgaaagcgcttggggtcggctgtggctggaggtgccagacagcgctgccccagatagcgttgtcatggtcacagttaccgcaggagggcgtgaggctaacccagtaccaccaactcacgcctttttaaggttactagtgtcggctcctgcacctcaagtgcgtaatcactatttcccatcccaaggaccagcccaccacccctatcggcttatttag

SEQ ID NO: 10837 - DNA, 2676 bp, synthetic construct
  misc_feature 1..2676: note = source = /note="Description of Artificial Sequence: Synthetic coding sequence"
  source 1..2676: mol_type = other DNA
atgctcccaaccgaggtgccgcagtcccatcctggacccagcgctctcttattactgcaactcctactcccacccacatccgctttcttcccgaatatttggagcctattggccgcaccgggatccatcacccaccaggacctgaccgaagaagcggcactgaacgttaccctgcagctgttcttagagcaacctccacccggtagaccccctttgaggcttgaagattttctcggccgaactctccttgccgacgatctgttcgctgcctatttcgggccaggatcaagtcgtaggtttcgagcagccctgggtgaagtcagtcgggctaacgccgctcaggactttctccccacctctcgaaatgaccctgatttgcattttgatgccgaaagactaggtcaggggagggcaaggctcgtgggtgccttaagagagaccgtggttgcagcccgtgccctggatcatacactagccaggcagaggctcggagctgccttgcacgcgttacaagacttttattcacactctaactgggtagagctaggagaacaacagcctcaccctcacctgctctggcccaggcaggagctgcagaatctggcgcaggtggccgaccccacatgctcagactgcgaagagttatcctgccctcgcaattggttgggatttaccctgctgacttccggctacttcggcacacatcctccaaaacctcccggaaagtgttcacacggaggacacttcgatagaagttccagccaacccccacggggaggaattaataaggattcaacttctccgggtttctctccacatcacatgctccacttgcaggctgccaagctggctctcctcgcctctatccaagcgttctccctccttcgctctcgcctcggggatcgcgatttcagtaggctattggacatcaccccggcttctagcctaagcttcgtcctggatacaacaggttccatgggcgaggaaattaacgccgcaaaaatacaagccaggcatcttgttgaacagcgacgtggatctccaatggaacccgttcattacgtgttggtgccgtttcacgaccccggattcgggcctgtgttcaccacctccgacccagattctttctggcagcagttgaacgaaatccatgcattgggcggaggtgacgaaccggagatgtgcctgtcggctctgcagctagcgcttctgcatacgccaccactgagcgatatttttgtatttactgatgcgtcaccgaaggatgcttttttaaccaaccaggtggaaagtctgactcaagagaggcgatgtcgggtgacctttctggtcaccgaggatacctctagggtgcagggcagagctagaagagaaatcctgtcaccactgcgcttcgaaccttacaaagccgtcgccctagcttctggaggcgaggtgatttttactaaagatcaacatatcagagacgtagccgctattgttggagagagcatggctgcactcgtcaccttacctcttgacccgccagtggtcgtccctgggcaacctctggtcttttcggtggatggcctgctgcagaagatcaccgtgaggatccatggcgatatttctagtttttggatcaagaaccccgctggagtgagccaaggccaagaggaagggggtgggcctctggggcatactagaagatttgggcagttttggatggtgacaatggacgatccgcctcagacaggcacctgggaaatacaggtcaccgcagaggacactcctggcgtgagggtccaggcccagactagcttagacttcctctttcatttcggcatccctatggaggacggtccccacccaggcctgtatcccttgacccagcccgtagccggactgcagacgcaactcctggtggaagtgacaggacttggctcccgcgcaaatccaggtgacccacagccccactttagtcacgtaatccttagaggcgtgcccgaaggggcagaactggggcaggtccctcttgaacctgtgggacctcctgagcgcggtttactggctgcatccctgagcccaactctgctgagcacaccgcgaccgttttccttggaactgattggacaggatgctgccggacgacgcctacacagggccgctccccagccttccaccgttgtgcccgtgctcctagaactgagcggaccttctggcttcttggctcctggctcaaaagtgccgctgtctctgcgcatcgcctctttctctggaccacaggatttggatctgaggacctttgttaaccctagtttttcactgacgtccaacctgagcagagctcatctggaacttaacgagtccgcatggggcaggctgtggctggaagttccagatagcgctgcacctgactctgtggtaatggttaccgtgacagctggtgggcgtgaggcgaacccagtaccccctacgcacgcattcctgagattgctggtctctgccccagcaccgcaggaccgtcacaccaccccaactggtagcagcgaccccatccttaccactgccactccagccttttcaccctttaccctggtgacacagggaagagctggtgcaggtctggctgcaggcagtccgtggtggggcacagtgggtggagtactcctgttgttgggcctggcaagttggtag

SEQ ID NO: 10838 - DNA, 552 bp, synthetic construct
  misc_feature 1..552: note = source = /note="Description of Artificial Sequence: Synthetic coding sequence"
  source 1..552: mol_type = other DNA
atggtcaggatctggaccactattatgattgtgctgatcctgcttttgaggatcggccctaataaaccaagcttgtctggccgtcaggctccagcccaagcccaaacctcagacttggtgccttccctcttcccccttgggctttgggcacctgggttttgtacctggagttctccagatgaagataaacggcctaggaagccagttcccggtacaggaaatcgagatagcggaacaaggcgtcggctgcaggacgcaaccgaacaggatccaaggccaggcaatgacgtcgcgagcgcggagaccgcagggcctccttcgccatctggcatcagagcacaggatagagctcccagacaccggagagctccgcctgcccgtatgcctgtcgcccctgccccaagcgctgacggtgagcctctgcaggaacagggaggaggcttgtttcaccggacccggagcgtctataacggtctggaactaaatacctggatgaaagtggaacgtctattcgtcgagaaattccatcagagcttcagcctcgataattag

SEQ ID NO: 10839 - DNA, 444 bp, synthetic construct
  misc_feature 1..444: note = source = /note="Description of Artificial Sequence: Synthetic coding sequence"
  source 1..444: mol_type = other DNA
atggccggaccggcaggatctcagtccctggggccactctgctttcattctagcccccaagccttgtatacggtgttgctgatcgtgctggttatgatgtcactggtgtttggaaaatttgttcccgtcaactgggagccaccgcaaccacttcccttccccaagtacctgcgatgctaccggtgtctgctcgagactaaggaattaggttgtcttctcgggagtgatatctgcctgactccagccggatcgtcctgtattaccctgcacaagaagaattcttctggctccgatgtgatggtgagcgattgtcgtagcaaggaacaaatgtctgactgttctaatactcgcacctctcctgtatccggcttctggatcttttcacagtattgcttcctcgatttctgcaacgatccccagaacaggggtttgtacactccttag

SEQ ID NO: 10840 - DNA, 447 bp, synthetic construct
  misc_feature 1..447: note = source = /note="Description of Artificial Sequence: Synthetic coding sequence"
  source 1..447: mol_type = other DNA
atgcagaccttcccagttgctggggcacttgatccagcaatcttagatacaagttccccacaggctctgtacactgtgctgcttatcgtgttggtgatgatgagtctggttttcggaaagtttgtgcccgtgaattgggaaccgcctcagcctctcccatttcccaagtatctcaggtgttatagatgcctcttggagacaaaggaacttgggtgcctgcttgggtccgacatctgcctcaccccagcaggctcctcatgcatcaccctgcacaaaaaaaactcttcaggtagcgacgtgatggtgagtgactgtaggtccaaggaacagatgagcgactgttcaaacacgcgcacatcccctgtgagtgggttctggatcttctcacaatattgcttcctcgatttttgcaatgatccccagaatcggggactatataccccttag

SEQ ID NO: 10841 - DNA, 606 bp, synthetic construct
  misc_feature 1..606: note = source = /note="Description of Artificial Sequence: Synthetic coding sequence"
  source 1..606: mol_type = other DNA
atgaaggtgcatatgcttgtgggtgtgctggttatggtcggattcaccgttggcaaggtgccggtgccagatattcgtacatgtcacttctgtctggtcgaggaccccagcgtgggctgcattagcggaagtgagaagtgcactatcagtagctctagtttatgtatggtaattaccatatactacgatgtaaaggtgcgttttatcgtacggggttgcggtcagtacatctcttatcgctgtcaggagaagagaaacacatactttgccgagtactggtaccaggcgcaatgttgccagtatgactactgtaacagttggtcgagcccccagctgcagtcaagcttacccgaaccccatgaccggcctctcgcgctgccactctcagacagccagatccagtggttttaccaagcactcaatctaagtctccccttgccaaacttccacgctggaaccgagccagatggcctagaccccatggtgacacttagccttaatctgggcctgtcattcgctgaattacgacggatgtacctgttcctgaacagcagtgggttactggtgctgccccaagccggacttttaactccccatcccagctag

SEQ ID NO: 10842 - DNA, 345 bp, synthetic construct
  misc_feature 1..345: note = source = /note="Description of Artificial Sequence: Synthetic coding sequence"
  source 1..345: mol_type = other DNA
atgctcggaggcgaggaggccaggccgaacagttggccgtggcaggttagcctgcagtactctagtaatggacagtggtaccatacctgtgggggatccctgattgcgaattcgtgggtactgacagccgctcattgcatccgacagatcatcaaagctcataaagtcttgcagagatgctcattaattttatttttcgtccgtgacctgtgctctagccagctggaactcacaggggtcagtgccggaagttcgggtatctaccgggtcatgctgggccaacacaatctgtatgtggccgaatctggttcactggccgttagtgtaagcaaaatcgttgtctag

SEQ ID NO: 10843 - DNA, 810 bp, synthetic construct
  misc_feature 1..810: note = source = /note="Description of Artificial Sequence: Synthetic coding sequence"
  source 1..810: mol_type = other DNA
atgatccgcaccttactattgtcgacactcgttgccggagccctgtcatgtggcgtctcaacatatgcacctgacatgtctagaatgctcggcggagaggaggccagacccaattcctggccatggcaagtgtcccttcagtacagcagtaatggtcagtggtaccatacttgcggtggatctctcattgcaaacagctgggtgttgaccgccgcacattgtataagttcctctgggatctacagggtgatgttggggcagcataatctttacgtggctgagtccggttcactcgccgtgagcgtgtccaaaattgttgtgcataaggactggaacagtgatcaggtgagcaaagggaatgatattgctttgctaaagttagccaatcctgtgtccctgactgacaagatccagttagcatgccttccgccagcgggaacaattttacctaacaattacccgtgctatgtcacaggatggggcagacttcagacaaatggggctctgcctgacgacctcaaacagggacagctattggtcgtcgactacgccacctgcagttcatccggttggtgggggtctaccgttaaaactaatatgatctgtgctggaggggacggcgtcatttgcacatgtaatggagacagtgggggtccactcaattgtcaggcatctgatggaaggtgggaggtgcacggcataggaagtctgacctccgttctggggtgcaattattattataagcccagtatattcactagagtgtcaaattataatgattggatcaactccgtgatcgccaataattag

SEQ ID NO: 10844 - DNA, 567 bp, synthetic construct
  misc_feature 1..567: note = source = /note="Description of Artificial Sequence: Synthetic coding sequence"
  source 1..567: mol_type = other DNA
atgtttcaccagatctgggccgcacttctgtatttctacgggattattctgaactcaatatatcagtgtccagaacactcccaactcacgactcttggcgtggatggcaaggagttcccggaagtgcacctgggccagtggtattttatcgctggggctgctcccactaaagaggagttggccaccttcgatcccgtggacaatattgttttcaacatggccgctgggagcgcaccaatgcaattacatctgcgcgcaacaattagaatgaaggacggcctttgcgtgcctcgcaagtggatctatcatctgactgagggtagcacagatctgcgcaccgagggccgtccagacatgaaaaccgagctgttctcatcgagctgtccgggagggatcatgcttaatgaaacgggccaagggtaccagcggttcctgctctacaatagatcgcctcaccctccagagaagtgcgtggaagagttcaaatctctgacaagttgtctcgatagcaaggctttccttctgaccccgaggaatcaggaagcctgcgaactctctaataactag

SEQ ID NO: 10845 - DNA, 390 bp, synthetic construct
  misc_feature 1..390: note = source = /note="Description of Artificial Sequence: Synthetic coding sequence"
  source 1..390: mol_type = other DNA
atggccgctggcagcgctcctatgcagctgcacttgagagctacaattagaatgaaggatggcctctgtgttccaagaaagtggatttaccatctgaccgagggtagcaccgaccttcggactgaagggagaccagatatgaaaaccgagctgttttcctcctcttgccccggagggatcatgctcaatgagactgggcaggggtaccagagattccttttgtataatcggtccccgcatccacctgagaagtgtgtcgaagaattcaaatctctcaccagctgtctggactcgaaagccttcctattgacaccacggaatcagggtaaaggcctcaagtcgcacaagaccggtctggggctgacgaaaagttcgggagtgaccggctag

SEQ ID NO: 10846 - DNA, 351 bp, synthetic construct
  misc_feature 1..351: note = source = /note="Description of Artificial Sequence: Synthetic coding sequence"
  source 1..351: mol_type = other DNA
atggcagctggcagcgcaccgatgcagttacacctgagggccacgatccgcatgaaggatggtctctgcgtccctcgcaagtggatctaccatttaaccgagggtagtaccgacctgcgcactgaggggaggccagacatgaagactgaacttttcagctcctcttgccccggtgggatcatgcttaacgagacgggacaggggtatcaacggtttctactgtataatcgatccccacacccacctgagaaatgcgttgaggagtttaaatctctgacttcttgtctagatagcaaagccttcctactgacaccccgtaaccaggaggcatgcgaattatccaacaactag

SEQ ID NO: 10847 - DNA, 435 bp, synthetic construct
  misc_feature 1..435: note = source = /note="Description of Artificial Sequence: Synthetic coding sequence"
  source 1..435: mol_type = other DNA
atgattagaacgctgctcctgtctaccctggtggcaggagcacttagttgtggggatccaacctacccgccttatgttacaagagtggtgggcggagaggaggctcgccctaactcgtggccctggcaagtgagcctgcagtattcttcaaacgggaagtggtaccatacgtgtgggggttcactcatcgccaatagttgggtcctcactgccgcacattgcatcagtcaatccatggtacagtgcgcccataaagtgctgcagcggtgttccctgattctgttttttgttcgggacttgtgcagttctcagctggaactgaccggcgtgtcagccggatcatcaaggacttatcgggtaggacttgggcgacataatctctacgtcgctgaaagtggcagcctcgccgtctccgtgtctaagattgtggtgtag

SEQ ID NO: 10848 - DNA, 204 bp, synthetic construct
  misc_feature 1..204: note = source = /note="Description of Artificial Sequence: Synthetic coding sequence"
  source 1..204: mol_type = other DNA
atgaaactgttgctactgacactgactgtattgctcctgctgagccagctgaccccgggaggtacacagaggtgctggaatctttacggcaaatgtaggtacaggtgttccaagaaagagcgggtctacgtctattgtattaacaacaaaatgtgttgcgtgaagcctaaataccagcccaaggagagatggtggccgttttag

SEQ ID NO: 10849 - DNA, 231 bp, synthetic construct
  misc_feature 1..231: note = source = /note="Description of Artificial Sequence: Synthetic coding sequence"
  source 1..231: mol_type = other DNA
atgaagctgctgctgctgttactgaccgtcaccctgctccttgcgcaagtgaccccagtgatgaagtgctggggcaagagcgggcgttgtaggaccacatgcaaggagtccgaggtgtactatattctgtgcaaaactgaagccaagtgttgtgtcgaccccaagtatgtgcccgtcaagccaaaactgacagatacgaatacaagtttggaaagtacgagtgccgtgtag

SEQ ID NO: 10850 - DNA, 267 bp, synthetic construct
  misc_feature 1..267: note = source = /note="Description of Artificial Sequence: Synthetic coding sequence"
  source 1..267: mol_type = other DNA
atgaagctcctttatttattcctggcaattctactcgccattgaggaacctgtgattagcgtggagtgctggatggacggtcactgtcggctgttgtgtaaggatggggaggattccatcattagatgcagaaaccggaaaagatgttgtgttcccagtcgataccttaccatccagcccgtgactatccatgggattctaggttggaccacgccccagatgtccactaccgcccctaagatgaaaaccaatattaccaatagatag

SEQ ID NO: 10851 - DNA, 255 bp, synthetic construct
  misc_feature 1..255: note = source = /note="Description of Artificial Sequence: Synthetic coding sequence"
  source 1..255: mol_type = other DNA
atgaagctactctacctctttctcgcaattctgctagcgatcgaagagccagttatcagtgggaaaaggcacattctacgctgcatgggtaacagtgggatatgcagagcctcttgtaagaagaacgaacaaccgtatctctactgtcgaaattgtcagtcttgctgtttgcagagctatatgcggatttccattagcgggaaggaggagaacactgactggtcatacgagaagcagtggcctcgacttccctag

SEQ ID NO: 10852 - DNA, 2631 bp, synthetic construct
  misc_feature 1..2631: note = source = /note="Description of Artificial Sequence: Synthetic coding sequence"
  source 1..2631: mol_type = other DNA
atgggcccagaagctctctcatccctgctcctcttactattagtagcctctggggacgctgacatgaagggccattttgaccctgctaagtgtagatacgccctcggaatgcaggatagaacgattcccgatagcgatattagcgcttcttctagctggtcagatagcactgctgcaagacattctaggctagaaagtagcgatggcgatggcgcttggtgtccagcgggatcagtatttccaaaagaggaagaataccttcaagtggacctccagaggctgcacctggtggcattagtcggcactcagggtcgacacgccggtggtttagggaaggagttttcaaggtcatatcgcctgagatattcccgggacggcaggcgctggatgggttggaaagacagatggggacaggaagtgatttcgggcaacgaagatcccgaaggggtggtcctgaaggacctaggaccccctatggtcgcccgtttggtgcgtttttaccccagagcagatagggttatgtccgtttgtctacgagtcgagctttacggatgcctgtggcgcgacggtctattgtcatataccgctcctgtgggtcagaccatgtacctgtcagaggccgtctatttgaacgatagcacctatgatggtcacactgttggcggactccagtacggaggcctgggtcagctcgcagatggagttgttggtttggatgattttcgtaaatcacaggaactgcgagtttggccgggatatgactatgtgggctggagtaaccactcattcagcagcggctatgtggagatggaattcgagtttgaccgccttcgcgctttccaggccatgcaggtacactgcaacaatatgcacactctcggggctagattgccaggcggtgtggagtgccggttcagaagaggcccagctatggcctgggaaggggagcctatgcgccataatctggggggtaacttgggagatccgagagcaagagctgtgtctgtgccgttaggcggacgggttgctcgcttcctgcagtgtcggtttctgttcgcagggccttggctgctgttttccgagatttcatttatctcggatgtggtcaacaactccagccccgctctaggcggtacattccctcctgcaccgtggtggccccctggaccacctccgacaaactttagctcactggaactggaaccgcgagggcagcagcctgtcgcgaaggctgaggggtcacccaccgctatacttatcggatgccttgtggctatcattctcctgcttctattgattatcgccttaatgttgtggaggctgcactggaggcggctactcagtaaggccgagcgtcgtgtgctggaggaagaattaactgtgcatttatccgttccaggagataccatattgatcaacaaccggccaggccctcgggagcctcctccctaccaggagccccgtccccgtggtaacccccctcactcagccccttgtgtgccaaatggaagtgcctacagcggagactacatggaacccgagaagcctggcgcacccctgttgccccctcccccacagaatagcgtgccgcattatgccgaggcagatatcgtgaccctgcagggcgtgaccggagggaacacttatgctgtgcctgctctgccccctggagcagtcggcgacggtccccctcgagtggactttcctagatcacgtcttaggtttaaagaaaagctgggcgagggacaatttggagaggtgcacctgtgcgaggtggactccccccaggatctggtgtcattggatttccccctgaatgtgaggaagggacaccccctgttagtggcggtgaagatactgaggcctgacgcaactaagaacgcccgaaacgattttctcaaggaggtgaagatcatgtctcggctgaaggatcccaacatcattaggttattgggcgtttgtgtgcaggatgatcccctttgcatgattacagactacatggagaacggcgacctcaaccagttcttgtctgctcatcagttagaggataaggccgctgagggagcccctggagacggccaagccgctcaggggcctaccatctcctaccctatgctattacatgtggcggcacagattgctagcggcatgaggtacttggcgaccctgaactttgtgcatagggacttggccactcggaattgccttgtgggcgaaaactttaccattaagatagcggatttcgggatgagcagaaacctctatgccggagactattaccgtgtgcagggcagggccgtgctgcctattcgatggatggcctgggagtgtatactgatgggaaaatttaccacagccagcgatgtctgggctttcggcgtgacgctgtgggaagtgctgatgctttgcagagctcagcccttcggccagctgactgacgagcaggtgatcgagaacgctggcgaattcttccgagatcaaggccgtcaggtctacctaagcagacccccagcttgccctcaggggttgtacgagctgatgctgcgctgttggtcccgcgagtcagagcagcggccaccatttagtcaacttcaccggttcctggctgaggacgcattaaatacagtttag

SEQ ID NO: 10853 - DNA, 2742 bp, synthetic construct
  misc_feature 1..2742: note = source = /note="Description of Artificial Sequence: Synthetic coding sequence"
  source 1..2742: mol_type = other DNA
atgggacctgaggctctgagctccctcttgttgctcctactagtggcctccggcgatgcagatatgaagggccatttcgatccggcaaaatgccgctacgctctgggaatgcaagataggacgattcccgacagtgatatctccgcctccagttcctggtccgattctacagcggctcggcatagccggttggaatcatccgacggtgatggcgcttggtgccccgctggaagcgtcttccccaaagaggaagaatatttgcaggtggatttgcagcgtctccacttggttgctctggtgggaacacaaggccgacatgccggaggcctcggaaaagaattttctagatcttacaggcttcggtacagtagggacggacgacgctggatgggttggaaggaccggtggggacaggaagtaatctctggaaacgaagatcccgagggagtagtgctgaaagacctgggtcctcctatggtggctcgcctggtgcgcttttatccaagagctgatagagtaatgtctgtgtgcctccgcgtagagctgtacggttgcctctggcgggacggcctgttgtcatataccgcaccggtcgggcaaacaatgtacctgtcagaggctgtttatcttaacgactctacttacgatgggcacacagtcgggggactccagtatggcggactcgggcagttagcggacggagtggtcgggttagatgactttagaaagagccaggagctgagggtatggcccggttatgactatgtgggctggtctaaccattcatttagctcaggatacgttgagatggaattcgaatttgaccgcctgagggcattccaggccatgcaggtgcactgtaataacatgcatactctgggagcgcgactgcctggcggagtcgagtgtcgcttcagacggggacccgctatggcctgggagggggagcctatgagacataacttgggtggcaatctgggagaccccagggcgcgagccgtgtcagttccgctaggcggacgggttgcgagatttctacaatgccggtttctgttcgctgggccatggctgctgttcagtgagatttcattcatctctgacgtcgtgaacaacagctctcctgccttaggaggcaccttccctccagctccctggtggccacctggccctccccctaccaacttcagctcactggagcttgaaccacgaggacagcaacctgtagctaaagccgaaggtagtcctacggcgatcctgattggttgccttgtagccatcattctgctgcttttactcattatcgcattgatgctttggcgactgcattggcgcaggctgctcagtaaggctgagaggcgcgtgctcgaagaagagttgacggtgcacttgagcgtgcccggagacacaatacttatcaataatcgtccaggacctagagaacctccgccttaccaggagccaaggccgaggggaaatcctcctcattctgcaccttgcgtccctaatggttccgcactgctcctgagcaatccagcttacaggctcctacttgccacatatgctcgcccacccaggggacccggaccaccaactccggcatgggcgaagcctactaacacccaagcgtactcgggagattatatggagccagaaaaacctggggcacccctgttaccaccacctccgcagaattccgtgcctcattatgccgaggcagacatcgtcacactgcagggagtgaccgggggaaacacctatgccgtgcccgctctgcctcccggagccgtgggagacggtccaccacgggtagactttcccagatcaagattgcgcttcaaggagaaactaggagagggccagtttggggaggtgcacctttgtgaggtcgatagccctcaggacctggtcagcctggacttccccctgaatgtgaggaaaggacatcctctcctggtcgccgtaaagatcctgcgacccgacgcgacaaagaacgcaagaaatgatttcctgaaggaagtgaagattatgagccgcctgaaagatccaaacatcatccggctgctgggcgtatgcgtgcaggacgatccactctgcatgatcactgattatatggagaacggagatctgaatcagttcctttccgcccaccagttagaggataaggccgctgagggagcacctggtgacggtcaggccgctcagggcccaactattagctaccctatgctactgcatgttgctgcccagattgcaagcggcatgcggtatctcgctacccttaatttcgtacaccgcgacctggctactagaaactgcctggtgggagaaaacttcactatcaaaattgccgattttggcatgagccgcaacttgtacgcgggagactactaccgagtccagggcagagctgtactgccgattcgttggatggcttgggaatgcatccttatgggcaaatttactactgcgagtgacgtgtgggctttcggcgtgacactgtgggaggtgttgatgctctgtagagctcagccattcgggcaactgactgacgagcaggtcatcgagaacgcaggcgagtttttcagggaccagggtaggcaagtctatctgagtaggcccccagcatgtccacaaggcctttacgagctaatgctgcgctgctggagtagagagagtgagcagcgcccacctttcagccagctccaccgttttctggctgaggatgcgttgaacactgtctag

SEQ ID NO: 10854 - DNA, 2631 bp, synthetic construct
  misc_feature 1..2631: note = source = /note="Description of Artificial Sequence: Synthetic coding sequence"
  source 1..2631: mol_type = other DNA
atggggccagaggccctgtcgagcctcctgctgttgctgctggttgcaagtggcgacgcggatatgaaggggcatttcgatcctgcgaaatgccggtatgccttggggatgcaggaccgcactattccggactcggacatttccgccagttccagctggtctgacagcacagcggcacgacactcccgcctcgagtcttcggacggagatggtgcctggtgccctgctggctcggtgtttcccaaggaggaggaatatctgcaggtggacctgcaacgcctgcatcttgtggccctagtggggactcaaggacgacatgctggcggactcggcaaggaattctcccggtcctatcgcttgagatactcccgtgacggcagacgatggatgggctggaaggaccgctggggtcaggaggtaattagtggcaacgaagaccccgagggggtagttctgaaagatctcggcccaccaatggtggcacggttggtcaggttttatccgcgtgctgacagggtgatgtcagtatgtctgcgggtggaactgtacggttgcctttggagagatggcctgcttagctatactgctcctgtaggacagactatgtatctgtccgaggccgtgtacctgaatgattctacctacgatggtcacacagtcggaggcctgcagtacgggggtttgggtcaactggccgatggagtggttgggcttgatgactttcggaaatctcaggagctgcgtgtgtggccaggatatgattatgtggggtggagtaaccactcattctccagcgggtatgttgagatggagttcgaattcgatcgccttagagcctttcaagctatgcaggtgcattgtaacaacatgcataccctcggggctcgcctgcctggcggagtggagtgtcgattcagaagaggtccagcaatggcttgggagggagagcccatgcggcacaacctgggaggtaatttaggtgatccacgcgctcgggctgtatcggtgcctttgggtggtcgggtggccaggtttctgcagtgcaggttcttatttgcgggtccatggttattgtttagtgaaatctctttcatcagtgacgtggtgaacaatagctcacccgcattaggcggtacctttcctcccgcaccgtggtggcctccaggtccgcctccaaccaatttcagttcactagaactcgagccccgagggcagcagcccgtggccaaggctgagggaagccctaccgccatactgatcggctgccttgtagcaatcatccttttgctgctactcatcattgcattgatgctctggaggctgcattggcggaggctgttatctaaggccgagagacgggtgctggaagaggagctaaccgtgcatctgagtgtgcctggagatacgatcctgatcaataatcggccaggccctagagagccaccgccttaccaggagccgagacccaggggcaatccgccacactcagctccttgcgtgcctaatggctccgcatatagcggcgattacatggagcctgaaaagccaggcgcacctttgctgccccctccaccacagaatagtgtgccccactacgcagaggctgacattgtgactcttcaaggcgtgactgggggaaacacctacgccgtccccgctctccccccaggcgcagtaggcgacggaccacctagagtggacttcccaaggagtcgtctgcggttcaaggaaaagctgggagaaggccagttcggcgaggtgcatctctgtgaagttgattccccgcaggacctggtatctctggatttcccactgaacgtaaggaaagggcatcctctacttgttgccgtaaaaatcctccggcctgatgcaactaaaaacgctagaaatgattttctgaaggaggtaaaaatcatgtcacgtctgaaagaccctaatatcatccggctgctgggagtgtgcgtgcaagacgatccactgtgtatgattaccgattatatggagaatggagatctcaaccagtttctcagtgcacaccagttagaagacaaggctgccgaaggagcacctggcgacggacaggcggcacagggtccgacgatatcttaccccatgttgctgcatgttgccgcacagatagctagtggcatgagataccttgctacactaaacttcgttcacagggatctggcaacacgcaattgtctggttggcgaaaattttactataaagatcgcagactttggaatgtccaggaatctgtacgcgggagactactatagagtgcaaggtcgcgctgtgttgcctatccgatggatggcctgggagtgcatcctgatgggcaagtttaccactgcttctgatgtctgggctttcggagtcacactgtgggaagtgttgatgctttgtcgggctcaacctttcggacaactgacagatgaacaggtaatagaaaatgcaggtgagtttttcagagatcaagggaggcaggtttatctatcgagaccccctgcttgcccccaaggtctgtacgagctgatgctaaggtgctggtctcgtgagtccgaacagcggcctccgttctcccagctgcaccgctttcttgccgaggatgctctgaacactgtgtag

SEQ ID NO: 10855 - DNA, 2631 bp, synthetic construct
  misc_feature 1..2631: note = source = /note="Description of Artificial Sequence: Synthetic coding sequence"
  source 1..2631: mol_type = other DNA
atggggcctgaggccctcagtagcttgctgctcctattgctggttgcatccggggatgccgatatgaaaggacatttcgatccagccaagtgccgctatgcactcggcatgcaggatagaacaatccccgatagcgatatttccgcttctagtagttggtcagatagcaccgctgccagacactcgagactcgagagctctgatggagacggggcttggtgccctgccggttccgtctttccaaaggaggaagagtacctgcaggtggacctacaaagactgcacctggtggcgctagtcggcacccagggacggcatgctgggggactgggtaaggaatttagcaggtcctaccgcctccgatatagccgcgatggacggaggtggatgggttggaaggatagatgggggcaggaggtaatttccggaaacgaggacccagaaggagtggtcctgaaagatctggggcctccaatggtggcaaggctggtgcggttctatccacgcgctgaccgcgtaatgtccgtctgtctgagagtcgaactttatggatgcctatggagggacggactgctgtcttacaccgccccagttgggcaaaccatgtacctgtcagaagcagtttacctgaatgacagcacctacgacgggcacacagtgggcggtctccaatatggaggtttgggccagctggctgatggggttgttggattagatgacttccgaaaatctcaggaattacgagtctggcccggatatgactacgttggctggagtaaccatagtttctcatcagggtacgtcgaaatggagtttgaattcgatagactcagggccttccaggccatgcaagtccattgcaataacatgcatacgctgggggctcgcttgcccggaggcgttgagtgtcgctttagaaggggcccagccatggcctgggagggcgagcccatgagacataatctggggggaaacttgggggatccccgagcccgtgcagtgtccgtgcctctggggggtcgggtagccaggttcctccagtgtcgatttctatttgctggtccgtggttgttatttagtgagatctcctttattagcgatgtggtgaacaactccagtccagcactcggaggtacatttcccccagcgccatggtggccgcctgggcctcccccaacgaacttttcatcactcgaactggaaccccgaggccaacaacccgttgctaaagcagagggtagtcctactgcaatattgatcggatgtcttgtagcaattatactgctgctgctactcattattgctctgatgttgtggcgccttcattggcgtcggctgctttcgaaagccgagcgacgggtgctcgaggaagagttaactgtccacctgagcgtcccgggagacacgatcctgatcaataacaggccgggacccagagagccacccccttaccaggaaccaaggccaagggggaaccctccgcattcagccccatgtgtgcccaacgggtctgcctactccggggactatatggagcccgaaaagcctggggctccattgctgccaccccctccgcagaacagcgtgcctcattatgcagaggccgacatagtgacattgcagggcgtcaccgggggtaatacctatgcggtgccggctctccctcccggagcagtgggcgacggacctcctcgggtggatttcccccgatcgagattgcgcttcaaggagaagctgggcgaaggtcaatttggcgaggttcatctttgcgaggtcgattccccccaggatctcgtctcactggactttcccttaaacgtacgaaagggccacccgctgctggtggctgtgaagatcctacgacccgacgccactaaaaatgcacggaacgactttctcaaggaggttaaaatcatgtcacggttgaaagaccccaacatcatccggttacttggagtatgcgtgcaggacgacccgctgtgtatgattactgattacatggaaaatggggatctaaatcagttcctaagtgcccaccaactggaggacaaggctgctgagggtgcacccggtgacggccaagccgcacagggacctaccatctcttatcccatgttactccacgtcgccgctcagattgccagcggtatgcgatatctggcaacgttaaatttcgtacatagggatctcgcaactcgaaactgcttggtcggagaaaactttaccattaagattgcagacttcggcatgtccaggaacttatatgcgggtgattattaccgcgtgcagggtagggcagtccttccaatccgttggatggcatgggaatgtatcctaatgggtaagttcacaacagcttcagatgtttgggcctttggggtcacactgtgggaagtcttgatgctctgccgggcacaaccttttggccagttgactgatgagcaggtaattgaaaacgctggagaattttttcgcgaccagggcaggcaagtgtatctgagcaggccccctgcatgccctcagggcctttatgaactgatgctccgttgctggagtcgcgagtccgagcagcgtccacccttctcgcagctgcaccgctttctggcggaggatgctctgaatacagtgtag

SEQ ID NO: 10856 - DNA, 2760 bp, synthetic construct
  misc_feature 1..2760: note = source = /note="Description of Artificial Sequence: Synthetic coding sequence"
  source 1..2760: mol_type = other DNA
atgggacccgaggctctgagctccttgctcctgctcctattagtcgcttccggggacgcagacatgaaagggcactttgaccctgccaagtgcaggtatgcgttaggcatgcaggacagaaccatccccgatagcgatattagcgcctcctctagttggtccgatagcaccgccgctagacattcccggttggaatcctccgatggggatggagcctggtgcccagcgggttccgtgttcccaaaagaggaagagtatctacaggtagatctgcagcgactacatctcgtggcactggttggcactcagggcaggcacgcaggcggacttggtaaggaattcagcagaagctatcgcctccgttattccagagacggaagacgatggatgggatggaaagaccggtggggccaggaagtcatttccggaaatgaagaccccgaaggggtggtcctgaaagacctgggtccaccaatggttgctagactcgtaaggttctatcctcgggctgatagggtcatgtcagtgtgtctgagagtggagctttacgggtgtctttggcgggacggactgctctcttatactgcccctgtcggtcaaactatgtacctaagcgaggcagtttacttaaacgatagtacatatgacggccacaccgttggaggactgcagtatgggggactcgggcaactcgctgatggcgtcgtcggactggatgacttcagaaaatctcaagagctgcgagtatggcctggctacgattacgtcggatggtccaatcactcattttcgagcggctatgtcgaaatggagtttgagtttgaccgccttagagcattccaggctatgcaggtgcactgcaacaacatgcatacgctcggagccagactgcccggaggtgtggagtgcaggttcagacggggaccggctatggcatgggagggtgagccaatgcgccacaacctcgggggaaatctgggagatccacgagctcgtgccgtctcggtcccactggggggtcgcgtagctaggtttctgcagtgcaggttcctgtttgcgggaccttggctgctctttagtgaaatctcctttatatctgacgtggtcaacaatagttcccccgcactgggcggaacattccccccagcaccttggtggccgcctgggcctccacccactaacttcagcagcctagagctggagccacggggtcagcagccggtagctaaggccgagggctctccaactgctatcctgatcggctgcctcgtggcaatcattctgttgcttttactgatcatcgccctaatgctctggcggctgcattggcgaaggttactgagtaaagcggagcgaagggtcttggaggaagaactgacggtacatctgtcggtgccaggggacacgatactgattaataatcgccctgggccaagggaaccccctccctatcaagaaccccgacctcgcggaaatcctccccacagcgcaccgtgcgtgcctaacggaagtgctctgctgcttagcaatcccgcttaccgcctcctgttggcaacctatgcaagaccacctagaggacccggaccccctacacctgcatgggctaagcctactaatacacaggcatattccggcgactacatggagccagagaagcctggtgccccactgctgcccccacccccacagaatagtgttcctcactatgccgaggctgacatagtgactctgcagggggtgaccggaggcaacacctacgctgtacctgctctccctcctggcgcagtcggcgacgggcctccccgagtggactttccaagaagcagactgaggttcaaggagaaactgggcgagggacagttcggcgaggtgcacctatgcgaagtcgacagtccacaagatttggtgtccctcgacttccccttgaacgtgaggaagggccacccattgctggtggccgtcaagatattgcggcctgacgccacaaaaaatgcttccttctccttattttccaggaacgacttcctaaaggaggttaagatcatgagcagactcaaggacccaaacatcattagactgctgggagtttgcgttcaggacgacccactctgcatgatcaccgattatatggagaatggagatctgaaccagttcctatctgcacaccagctagaagacaaggccgcagagggggctcccggagacggtcaggctgctcagggcccaactataagttatcccatgcttctacatgtggccgcacagatcgccagcggcatgagatatctcgctactcttaacttcgtgcacagggacttggctacaaggaactgcctggtcggagagaacttcacaatcaaaatcgccgattttggcatgtcacgtaacctatacgctggcgattactatcgcgtgcagggcagagccgttctgccgatcagatggatggcctgggagtgcatcttaatggggaaatttacgacagcttcagacgtgtgggcattcggagttacactgtgggaagtgctgatgctctgcagagcgcagcctttcgggcagttgacggacgaacaggtcatagaaaacgcaggcgaatttttcagagaccaggggcgacaggtctacctgtcaagacctcctgcatgcccacaggggctctatgaactcatgttacgctgttggagtcgtgagtccgagcaacggcctccgttttcacagctgcacaggtttctcgctgaagacgctctgaacactgtttag

SEQ ID NO: 10857 - DNA, 1041 bp, synthetic construct
  misc_feature 1..1041: note = source = /note="Description of Artificial Sequence: Synthetic coding sequence"
  source 1..1041: mol_type = other DNA
atgctgaagaagcccctctccgcagtcacgtggctgtgtatcttcatcgtggcgttcgtgagtcaccccgcttggcttcagaagctgtcaaagcacaagactcccgctcagccccaactgaaggccgctaactgctgcgaggaagtgaaagaactcaaggcacaggtggctaacctgagtagtcttttgtccgaactaaataagaaacaggagcgcgactgggtgagcgtcgtcatgcaggtaatggaacttgagagtaactcaaagcgcatggagagccggctcaccgacgctgagtcaaaatacagcgaaatgaacaaccagatagatattatgcaattacaggccgctcagacagtgacacagacgagtgcagatgccatctacgactgttcaagcttgtaccagaaaaactacagaataagtggagtgtacaagctgccacccgacgactttctgggctcacccgagttggaagttttctgcgacatggagacttctggtggagggtggaccatcatccagcgcagaaagtctgggctggtcagcttctatcgcgattggaagcagtataagcaggggtttggttccattcgaggagatttctggctggggaacgaacacatccatagattgtctcgacagcctaccagattgagagttgagatggaagactgggaggggaacctaagatatgcagaatattcccattttgtgctgggaaatgagctgaatagttacagactgtttttaggaaattacacaggtaatgtgggcaatgatgccttgcagtatcacaacaacaccgctttctcaaccaaagataaagacaacgataactgcctggataagtgtgcacaactgaggaaaggcggatattggtataactgctgtacagactcaaatctgaatggcgtctattatagactgggggaacataataaacacctggatggcattacctggtatggttggcacggatctacttactctctgaagagagtcgagatgaaaattcggccagaagattttaaaccctag

SEQ ID NO: 10858 - DNA, 1056 bp, synthetic construct
  misc_feature 1..1056: note = source = /note="Description of Artificial Sequence: Synthetic coding sequence"
  source 1..1056: mol_type = other DNA
atgaaaggaagggccgttagctttgatcccctagcttgccaggggcttaatgcctcacccggatccctgacctctccattgagaagaatccgcagcctcaccggacgcgaggtacttacgcccttcccgggtctgggaaccgccgcagctccggcacaaggaggagcccaccttaaaccccattccctggtactgccaatcaccgccctgccgcctccacctttggccttacgaggccgtcaggcaacctctaagctgcccccatttctttctagcccattcccaccatccctgtgcccctgggtgcccgatcctggcttcaaggagactgcgttcctgtacgctgtgagctccgccgctcttactcacactctggccagagcctgcagcgccggtcgtatggagcgatgcacttgcgacgactcacccggtcttgagagccggcaagcatggcaatggggagtttgcggcgacaatttaaagtactcaacaaaattcctctcaaactttcttggatcaaaaaggggcaacaaagatcttcgggctcgggcagatgctcacaacacacatgtggggatcaaggccgtgaaaagcgggctaagaactacttgcaagtgccatggggtgagcgggtcttgcgcagtcagaacatgctggaaacagttgtccccattcagagaaactggtcaggttttgaagctaagatacgattcggctgtcaaggtgtcctcagccacgaatgaagcactgggaaggctcgagctgtgggcccctgcacgtcagggcagcctgacgaaaggtctggcccctagaagtggggatcttgtgtatatggaagactctccgagcttttgcaggccaagcaagtattcaccgggaacagcaggcagggtttgtagtcgagaagcctcctgtagttccctgtgctgtggaagaggctacgatactcagtcacgcctggtggcattcagctgccactgccaagtccagtggtgttgctacgtggaatgtcagcaatgcgtgcaagaggagttggtttatacatgcaaacattag

SEQ ID NO: 10859 - DNA, 462 bp, synthetic construct
  misc_feature 1..462: note = source = /note="Description of Artificial Sequence: Synthetic coding sequence"
  source 1..462: mol_type = other DNA
atgaagcatcttaggccccaattccctctgattctggctatctactgcttctgcatgttacagatcccatcctctggcttcccacagccactcgccgatccatcagacggcctggacattgttcaactcgagcagctggcttactgtctgtcacagtgggctcctctgagtcgacaacctaaggacaatcaggatatttataagaggttcctcttccattactcacgcactcaggaggctacccaccctgtgaaaaccgggttccctcccgtccatccgctgatgcacctggcggcaaagctggcaaatcggagaatgaagcggattttgcagaggggcagtggaacagctgccgtcgatttcactaaaaaggaccatactgcaacatggggcagaccttttttcctgttcagaccacgcaatgggcgaaacatagaggacgaagcacaaattcaatggtag

SEQ ID NO: 10860 - DNA, 765 bp, synthetic construct
  misc_feature 1..765: note = source = /note="Description of Artificial Sequence: Synthetic coding sequence"
  source 1..765: mol_type = other DNA
atggcagccgctagtgcgggagctacaaggctcctgctactgttgttgatggcagtagccgctccctcacgtgccaggggctccggctgcagagccggtacaggggctagaggcgcaggggctgaggggagggaaggcgaagcctgcggaacggtgggcttactgttagaacattccttcgagattgatgactccgcaaacttccgaaagcgtggcagtctgctgtggaaccaacaagacggcaccctgtctttaagccaacgccaactttccgaggaagagcgtggcagactgcgagatgtcgctgccctcaatgggttataccgtgttcggattcccagacgccctggggcactggatggccttgaggcaggaggctatgtgtccagttttgtgccagcatgttcgctggttgaaagccacctcagcgaccaattaaccctccacgtggacgtcgcaggaaacgtcgttggggtgtctgtagtaactcaccccggtgggtgccggggacacgaagtggaagatgtggacctggaactgtttaacaccagcgtgcagttacagccccctacaaccgccccagggccagaaaccgctgcatttatcgaacgcctggagatggagcaggcccagaaggcgaagaacccccaggagcagaagtcattttttgcaaagtattggcacatcatccttggtggagccgtgctgctgaccgctctgaggccagctgctccagggcctgccccaccaccccaggaagcctag

SEQ ID NO: 10861 - DNA, 810 bp, synthetic construct
  misc_feature 1..810: note = source = /note="Description of Artificial Sequence: Synthetic coding sequence"
  source 1..810: mol_type = other DNA
atggccgcagcaagtgccggtgcaaccagactactgctcctattattaatggctgtggccgcaccctcacgagccagaggcagcggatgccgggcaggaacaggggctcggggagctggagccgagggccgagagggcgaggcatgtggcacagtcggactcctcctggaacatagcttcgaaatcgatgactcggctaacttcagaaagcgcggaagtttattgtggaaccagcaggatggcactctttccctatcccaacgccagctgtctgaagaagaaagaggaaggctccgagatgtggctgcactgaacggactgtatcgcgttcggatacctcgcaggcctggagctctggacggcctagaagccggagggtatgtgagctctttcgtaccggcatgctcactggtcgagagccatttgtccgatcagctcacccttcatgtcgatgtggccggtaacgttgtgggagtgagtgtcgtgacccatcccggtggctgtcgcggacacgaagtagaggatgtggaccttgaattgttcaacacatctgttcaattgcagcccccaacaactgcacccggaccagaaaccgcggcttttattgaacgcctggaaatggagcaggcccagaaagcaaagaatcctcaggaacagaaatctttctttgcgaagtattggatgtacatcattcccgtcgtgctcttccttatgatgtcaggggctcctgacaccggaggccaaggaggtgggggagggggaggtggagggggaggcagtggccgatgttgtgtccctccctccctctag

SEQ ID NO: 10862 - DNA, 480 bp, synthetic construct
  misc_feature 1..480: note = source = /note="Description of Artificial Sequence: Synthetic coding sequence"
  source 1..480: mol_type = other DNA
atgtcctctccccaaagacggaaagctatgccttgggctctgagccttttgctcatggggttccagctcttggtgacctatgcttggtgttccgaggaggagatgggtggcaacaacaagatcgtgcaggatccgatgtttctagccacagtggaatttgccttaaacactttcaatgtccagagtaaagaggagcacgcttatcggctgctgcgggtgctttccagctggcgggaagatagcatggaccgaaagtggcgcggaaaaatggtcttcagcatgaatctgcagctgcggcaaaccgtctgccgcaaattcgaagatgatatagataattgccccttccaagagagcttggagctcaataatgtgcggcaggggattagctttccacaagtccatagctgtggatgttgcatgggctgtggggtgggcacgggtgcagcagacaaagccatccctcgcgataagggtaagtag

SEQ ID NO: 10863 - DNA, 1737 bp, synthetic construct
  misc_feature 1..1737: note = source = /note="Description of Artificial Sequence: Synthetic coding sequence"
  source 1..1737: mol_type = other DNA
atgctgctgttactgctgctcgcacctctctttctgaggccaccaggcgctggcggtgcacagaccccaaacgcaacctccgaaggttgccagatcattcatcctccttgggagggcggaattagatatagagggttaactcgcgaccaggtgaaggcaatcaacttcctacctgttgactacgaaatcgaatacgtttgtcgaggcgaaagagaggttgtggggcctaaagtgcgcaaatgcctggctaacggttcatggaccgacatggacacaccatctcgttgcgtgcgcatctgttccaaaagctacctaacacttgagaacgggaaggtattcttgactgggggtgacttaccagccctcgatggcgctcgcgtggattttcggtgcgatcccgattttcatctcgtgggatcctcacgctcaatctgttcacagggccagtggagtacccccaagcctcactgccaggttaaccgaacccctcatagtgagcggcgagctgtgtatattggggctctttttcctatgtcgggaggctggccaggcggtcaggcgtgccagccagcggtcgagatggccctggaggatgtgaattctcggcgtgatatcctcccagactatgaactgaagctcatacatcatgactcgaaatgcgacccaggacaggccaccaagtacctctatgagttactctacaacgatccaataaagataatacttatgcctggttgttcttcggtgagtactcttgtggctgaggcagcgaggatgtggaaccttatcgtactcagttatggctctagctccccagccctatcgaaccgccaacgctttccgacattctttagaacacatccttccgctacattgcacaaccccacacgggttaaactcttcgaaaaatggggctggaagaaaatagccacaatccaacagactaccgaggtgtttacttcgacactggacgacctggaggaaagggtcaaggaagctggtattgagatcacattcagacagtcgtttttctccgacccagccgtgccagtcaagaaccttaagcggcaagatgccaggattatagtcggactgttctatgaaacagaagccagaaaggtattttgcgaggtttacaaggaaaggctgtttgggaagaagtacgtgtggtttctcatcggctggtatgctgataattggtttaagatatacgacccctcgattaactgtaccgtagacgagatgactgaggccgtcgagggacatattactacggagatcgtgatgttgaatcctgcaaacacacgctccattagtaatatgacttctcaggagttcgtggagaagctaacaaagaggctcaaacgacacccggaggagactggaggtttccaggaggctccgttagcatacgacgctatctgggcactggccctggccttgaacaaaacatcaggcggaggagggcgaagcggcgtaagattagaagactttaattataacaatcagaccatcaccgaccagatttatagagccatgaattccagtagcttcgagggggtgtctggccatgtcgtgtttgatgcttccggctccaggatggcttggaccctaattgagcagttgcaggggggttcatataagaaaatcggttattatgattccaccaaagatgacttatcttggtctaaaacagacaagtggatcgttattagcaggacacattctcccacatag

SEQ ID NO: 10864 - DNA, 444 bp, synthetic construct
  misc_feature 1..444: note = source = /note="Description of Artificial Sequence: Synthetic coding sequence"
  source 1..444: mol_type = other DNA
atgctagggctgccatggaagggaggcttgtcctgggcattgctactgctgctgctgggctctcagattctcctgatctacgcctggcacttccatgaacagagagattgtgatgaacacaacgtgatggccaggtatttaccggcaactgtagagtttgccgtgcacacttttaatcaacaatctaaagattactatgcgtacaggttaggtcacatcctgaacagttggaaagagcaggtggaatccaaaacagtcttctctatggagttgttgcttggaagaacgcgatgtggcaaattcgaggacgacatcgacaattgccatttccaggagagtacagaactgaacaacacatttacctgtttcttcaccatcagcacgagaccgtggatgactcagttcagcttgctcaacaaaacctgtctggagggcttccattag

SEQ ID NO: 10865 - DNA, 444 bp, synthetic construct
  misc_feature 1..444: note = source = /note="Description of Artificial Sequence: Synthetic coding sequence"
  source 1..444: mol_type = other DNA
atgtggagcctccccccatcccgggcattgagttgtgccccacttctcttgcttttcagtttccagtttttggtcacatacgcctggcgattccaggaggaagaggagtggaatgatcagaaacagattgctgtctacctgcctcctacactggagttcgccgtctatacattcaataagcaatctaaggactggtacgcctataagttggtgcccgtgctggcatcttggaaagagcagggctacgacaagatgacatttagcatgaacctgcagcttggacggacgatgtgcgggaaattcgaggacgatattgacaactgcccctttcaggagtcaccagaattgaacaatacctgcacatgtttcttcacaattggaatcgagccatggcgcactaggttcgatctgtggaataagacttgttccggaggccattcttag

SEQ ID NO: 10866 - DNA, 2535 bp, synthetic construct
  misc_feature 1..2535: note = source = /note="Description of Artificial Sequence: Synthetic coding sequence"
  source 1..2535: mol_type = other DNA
atgggcccaggtgcaccattcgccagggtgggctggcccttgccgctgttagtggtgatggcagccggagttgctcctgtgtgggcatctcacagccctcacctgccaagaccccatagtagggtgcctcctcacccctcatcagagcgtcgcgctgtgtacattggcgctctctttcctatgtctggtggatggcctggaggccaggcctgtcagcccgcagttgagatggcactcgaagacgtaaacagccgccgagacatcttgcctgactacgaactcaagcttatccatcatgatagcaaatgcgaccccggacaggcaaccaagtatttatacgaactgctgtataacgaccctattaagattatacttatgcctgggtgcagtagcgtgagtacactggtggccgaagccgctcggatgtggaacctgatcgttctgagctacggaagttcctcacccgcactgagtaatcggcagcgctttccaactttttttagaacccaccccagtgcaaccctgcacaatccgacacgcgtaaagctttttgagaagtggggatggaagaagatagcgacgatccaacagacgacagaggtgtttactagtaccctggacgacctggaagagcgcgttaaagaggccggaattgaaatcacttttcgtcagagcttcttttccgaccccgcagtgcccgtaaagaacctgaagaggcaggatgcgcgtatcatcgtgggactcttctacgaaaccgaggctagaaaggtcttctgcgaagtctacaaggagagactctttggcaagaaatatgtctggttccttattggatggtacgccgataactggtttaaaatatatgacccttcaatcaattgtaccgttgacgaaatgactgaagcggtcgaaggtcacatcacgaccgaaattgtcatgcttaacccggctaacacaaggtcaatttccaatatgacatcccaggaatttgtggagaaattaacgaagagactgaaacggcatcctgaagagaccgggggatttcaagaggcccctctcgcatatgacgccatttgggcactcgccctggctctgaataagacctccggcggtggagggaggagcggagtgaggctggaggactttaactataacaaccagaccattacagaccaaatctatcgggcaatgaactccagctccttcgagggggtgtcggggcatgtggtctttgacgccagtgggagtcgaatggcatggacacttattgagcagctccaaggcggatcatataaaaaaatcgggtattacgactctacaaaggatgatctgtcatggtccaagactgacaaatggatcggcggtagcccgcctgccgatcagaccttggttattaaaacctttagatttttatctcagaagctgtttatcagcgttagcgtgcttagttcccttggaatcgtgctcgccgtcgtgtgtctgtctttcaacatctacaattcccacgtccgctacatccaaaacagccagccaaaccttaataatcttaccgccgtcggctgttctctggcgttggctgctgtattccctcttgggctggatggttaccatatcggccgtaaccaatttccatttgtctgtcaggctcgcttgtggctactgggcctgggatttagtttgggatatggcagcatgtttacaaagatttggtgggtccacactgttttcaccaaaaaggaggagaagaaggaatggcgaaaaacgctggagccctggaaactgtacgctaccgtgggactgttggtggggatggatgtgctgacactcgcaatttggcagattgttgacccactgcatagaactatagagacgtttgccaaggaagagcctaaggaagatatcgacgtgagcatactgcctcagcttgagcactgcagcagtagaaaaatgaacacatggttaggcatcttttacgggtataaaggattactgctgctgttgggcatcttccttgcgtatgagacaaagtctgtaagcacagaaaagattaatgatcatagggctgtagggatggcgatttacaacgtggcggtattatgcctcattaccgcgcctgtgacaatgatcctaagctcacagcaggacgctgcttttgcgttcgcttccctcgccattgtcttctccagttacatcaccctggttgtgcttttcgtacctaaaatgcgacgtctgatcacccgcggtgaatggcagtctgaggcacaggataccatgaaaactggttcgagcactaacaacaacgaggaagagaagtcacgattgcttgaaaaggagaacagagagttggagaagattatagctgaaaaggaggaacgcgtgagtgaactgcggcatcagctgcagtctagacagcagcttagatcccgaagacatccaccaacacccccagagccttcaggcggtttgcctagaggaccccctgagccaccggatcgcctgtcatgcgatggctcaagggtgcacctgctttacaagtag

SEQ ID NO: 10867 - DNA, 2700 bp, synthetic construct
  misc_feature 1..2700: note = source = /note="Description of Artificial Sequence: Synthetic coding sequence"
  source 1..2700: mol_type = other DNA
atgctgctgctgctcctgttggcccctctgttcctgagacctcctggcgctggcggagcccagacccccaacgccacttcagagggttgccagatcatccaccccccttgggaggggggaattagatacaggggcctgaccagggatcaggtaaaggccataaatttcttaccagtcgactatgaaattgaatacgtgtgccgtggagagagggaagttgtagggcctaaagtgaggaagtgcctggccaacggatcttggactgatatggacaccccaagccgctgcgttaatcggacaccacatagcgagaggcgcgcagtgtacatcggcgcactgtttcctatgtctggaggatggcccggaggtcaggcttgccagccagcagttgagatggcactggaggacgtgaattctaggcgcgatatcctgcccgactacgagctgaaattaattcaccacgactcaaaatgtgaccctggccaggccacaaaatatttgtatgagcttctgtataatgacccaatcaaaatcatactcatgcctgggtgtagcagtgtcagtacgctcgttgccgaagcagccagaatgtggaacttaatcgttttatcatatggcagcagttcccctgctctgtctaaccggcagcggtttcctaccttttttcggactcacccctctgccacactccataaccctactagagttaaattgtttgagaagtgggggtggaagaagatcgcaacaattcagcagaccaccgaggtgttcacaagcacacttgacgatctggaggagagggtcaaggaagcaggaatcgagatcaccttccgacagagcttcttttcggaccctgccgttcctgtcaaaaacctcaagcgccaagacgccaggatcatcgtgggacttttttatgaaacagaggcgagaaaagtgttttgcgaagtctacaaggagaggttgttcggcaagaaatatgtgtggttcttaatcgggtggtacgccgataactggttcaagatctatgatccatcgatcaactgcactgttgacgagatgacggaggccgttgaaggccacataactaccgagattgtgatgctcaacccggctaataccaggtcgatctcaaatatgacgagtcaggaattcgtagagaagctgacgaagagactcaagaggcaccctgaagagactggaggctttcaggaggccccactcgcttatgacgcaatctgggccctggcactggccctgaataaaactagcggaggcggtggcaggagcggggtcagattagaagatttcaactataacaatcagaccataaccgatcaaatttacagggcaatgaattcgagcagcttcgaaggcgtctcaggtcatgttgtgtttgacgcatctgggtcaagaatggcatggacacttattgaacagctgcagggcggttcatataagaaaatcggttattatgacagcaccaaagatgatttgtcttggtctaaaacagacaaatggattggaggctccccacctgccgatcaaaccctggtaatcaagacttttcgttttctgagtcaaaagttgtttattagtgtcagcgtcctcagctcactaggcattgtgttggcagtggtgtgtttgagttttaatatctataactcacacgtccgctacatccagaatagccagccaaatctgaataacttgactgccgtggggtgctcactcgcccttgcggctgtattccctctcgggctcgatggctaccacattggtcgaaaccagttcccttttgtgtgccaagctcgtctctggttgttaggcctgggtttcagtttaggttatgggagtatgttcacaaagatctggtgggttcataccgtgttcacaaagaaagaagaaaagaaggaatggaggaagaccctcgagccctggaaactttacgccaccgttggcctactcgtcggcatggacgtgttgacccttgctatctggcagatcgttgaccctctccaccgcaccattgaaactttcgcaaaggaggagcctaaggaagacatcgacgtttccatcctgccccagctggagcattgttctagccggaaaatgaacacctggctgggaattttttatggatacaagggcctgctgctcctgctaggtattttcttagcatacgagaccaaatcagtcagtaccgaaaaaatcaacgaccatagggccgtgggaatggcgatttacaatgtggctgtcctgtgtctcatcactgctcctgtgaccatgattcttagttcacagcaggacgcggcatttgccttcgcaagcctcgctatcgtcttcagcagctatataactttggtcgtactcttcgtcccaaagatgcgacgccttataaccagaggggaatggcagtccgaagcacaggacacgatgaagaccggctcatcaacaaataacaacgaggaagaaaagtctagattactagaaaaagagaacagggagttggagaagatcatcgcagagaaggaagaaagggtgagtgaactgaggcaccaactgcagagccggcagcagttacggtccaggcggcacccaccaacgcctcctgaaccgagtggcggacttccccgaggccctccagaacctccagatcggttgtcctgtgatgggagccgggtgcatctcctgtataaatag

SEQ ID NO: 10868 - DNA, 2886 bp, synthetic construct
  misc_feature 1..2886: note = source = /note="Description of Artificial Sequence: Synthetic coding sequence"
  source 1..2886: mol_type = other DNA
atgctccttctgctactgctggccccactctttctgaggccaccgggagctggaggagcacaaacccctaacgccacaagtgagggctgccagataattcacccaccttgggagggtgggattaggtacagaggccttacacgcgaccaggtaaaagcaatcaactttttacccgtggactacgagatcgaatatgtgtgccgaggagaacgagaggttgtgggacctaaggtacgcaagtgtctggcaaacggttcctggactgacatggacacacccagcaggtgtgtgcgcatctgctccaaatcttatctgaccctcgaaaatggaaaggtattcctgacaggaggtgacttacctgcgcttgatggggctcgcgttgatttcagatgcgacccagactttcatcttgtgggttcctcccggagtatctgttctcagggacagtggtccacccccaagcctcactgccaagttaacaggacacctcattcagagaggcgcgctgtgtatattggggctctctttcccatgagtgggggttggccagggggacaggcctgtcaacctgccgtcgagatggctctggaggacgtcaactctcggcgagatatcctgcccgactacgagctgaagctcatccatcatgattccaaatgtgatccaggccaggccacaaagtatttatacgagttactctacaatgatcctatcaaaattatcctcatgccagggtgtagcagcgtttctacactggtggcggaagccgcacgaatgtggaacctaatagtgttaagttacgggtctagctcacccgctttgtctaatcgacagagatttcccactttctttagaacacacccaagcgctaccttacacaatcccactagggtgaagctgttcgaaaagtggggttggaagaagatcgcgaccattcaacagacaactgaggtctttacttccacccttgatgacctagaggagcgcgtgaaagaggccggaattgagattactttccgacagtcctttttcagcgatcccgctgtgccggtgaagaacctcaaacggcaggacgccagaatcatagtgggattgttctatgagactgaggctcgtaaagtcttttgcgaagtatataaggagaggctgtttgggaagaaatacgtgtggtttttgattggatggtacgctgataattggtttaagatctatgatccgtcaatcaattgcaccgttgacgaaatgaccgaagcagtcgaggggcatataacgaccgagatcgtgatgttgaatcccgctaacacgaggtccatctccaacatgaccagtcaggaattcgtggaaaagctgactaaacggctaaagaggcatccagaagaaacaggaggtttccaggaggctcctctcgcctatgacgccatttgggcccttgctctcgcactgaacaaaacgtctggaggtggcggacgatcaggcgtgagactggaggatttcaactataacaaccagaccattaccgaccaaatctaccgcgcaatgaactcttcttcttttgagggtgtgtctggccacgtagtcttcgatgcgagcggatcgcggatggcgtggactctcattgagcagttgcaaggaggatcttataagaaaattggttactatgatagcaccaaagacgacctctcttggtccaaaacagacaagtggattggcggtagccccccagctgatcagaccttggtgatcaaaacattccgcttcctcagccagaagttgtttatctcggtgtctgtgcttagctccctcggcattgtccttgccgtggtgtgtctctcttttaacatctataatagccacgtcaggtatatccagaacagccagccaaacctcaataatcttacggccgtgggctgctcattggcgttagcagccgtcttccccctgggtttagacggatatcatatcgggcgaaaccaatttccatttgtatgtcaagcacgcctgtggctgctggggctgggattctccttgggctacggctccatgttcacaaagatatggtgggtacataccgtcttcacaaaaaaggaggagaagaaggagtggcgcaaaacactggaaccttggaagctctatgctaccgtcggtctgttagttggaatggatgtgctcaccctcgcgatttggcaaatcgtagaccctcttcaccgtactattgagacttttgccaaggaggagccgaaggaggatatcgacgtgtccatcctgcctcagctggagcactgttctagcagaaagatgaatacatggctagggatattttatggatacaagggccttctgttactcctaggaatcttcctcgcttacgagacaaagagtgtgagcacagaaaaaataaatgatcacagagctgtgggcatggccatatataatgttgccgtgctttgtctcatcaccgcgcctgtgaccatgatccttagcagccaacaggacgccgcatttgccttcgcgtcactggcaattgtcttctcaagctacattacactggtggtgctgttcgtaccaaagatgcgccgtctgattacacgaggcgagtggcaatcagaggcgcaggatactatgaagactggatcctccacaaataataacgaggaagaaaaaagtaggctcctggagaaggaaaaccgagaactcgaaaagattattgcggaaaaagaagagagagtgtccgaattacggcaccagttacagtccagacagcagcttcgatctcgccgacatccaccaactccacctgaaccctctggcggtctgccaagaggccctcccgagccacccgaccgtttgtcgtgtgacgggtcaagagtgcacctgttgtacaagtag

SEQ ID NO: 10869 - DNA, 882 bp, synthetic construct
  misc_feature 1..882: note = source = /note="Description of Artificial Sequence: Synthetic coding sequence"
  source 1..882: mol_type = other DNA
atgaacaacctttcattctccgagctttgttgtctcttctgctgcccaccgtgtccgggaaaaatcgctagcaagctggcctttctccctcccgacccaacttatactcttatgtgtgacgaatccggctcgcggtggactctccatctgtccgagagagcagattggcagtattcatccagagaaaaagacgcgattgaatgctttatgacgcgtactagtaaaggaaatcgtatcgcctgcatgttcgtcagatgctcaccaaatgccaaatacacattattattctcccacgggaacgccgtggatctaggacaaatgtcttctttttatataggactgggaagcagaattaattgcaacatattttcatatgattactccggttacggagcatcgagtggaaagcccaccgagaaaaacctgtacgccgacatcgaggctgcctggctggccttaagaacacgttatgggatccggcctgaaaatgtaataatttacggccagtccattgggactgttccctccgtggatctggccgctaggtacgagtcagctgctgttattctgcactcacctctcacttctggaatgagggtggcatttcccgacactaaaaaaacctactgtttcgatgcttttcctaacatagataagatctccaaaattacttctcccgttttaattattcacgggaccgaggacgaggtcatcgacttttcccacggactggccctgttcgaaaggtgtcagaggccagtcgagcctctgtgggtggagggtgccggtcacaatgacgtcgaactgtacggccagtacctggagagattgaaacagttcgtgagccaagaattggtgcagaaacacaaagaaggaaagtag

SEQ ID NO: 10870 - DNA, 1155 bp, synthetic construct
  misc_feature 1..1155: note = source = /note="Description of Artificial Sequence: Synthetic coding sequence"
  source 1..1155: mol_type = other DNA
atgtggtacgtgagcactcggggagtcgctccgagagtcaactttgagggagccttattctcaggctatgccccagacggagggctattcatgcctgaggaactgccccagctagatagaggcacgctttgccaatggagcactttaagttatccgggactagtgaaggaactttgtgcactgtttatcgggagtgagctcctaccaaaggacgaactgaacgatcttatcgatcgggctttttcgcggtttaggcatcgggaggtagtccatttgagccgactgcgcaatggcctgaatgttctggagctgtggcacggcgtgacctatgccttcaaagatctttccttgtcttgcaccacccagtttctgcagtacttcctggaaaagcgcgagaagcacgtgactgtcgtggttggcaccagtggagacactggttcagccgcaatagagtctgtgcagggggcaaagaacatggacattatcgtgctcttgcctaagggacattgtaccaaaattcaagagctacagatgaccacagtcctgaaacagaatgttcacgtcttcggggtggaaggaaactctgacgaactcgacgaacctataaagaccgtgtttgcagacgtggcattcgtcaagaagcacaatctgatgagcctgaattcgattaactggagccgggttctggtccagatggcccatcattttttcgcttattttcagtgcacaccctcccttgatactcaccctcttcctttggtggaggtcgtggtcccgactggggcagcaggcaaccttgccgcaggttatattgctcagaagatcggcctgcctatccgtctggtagtcgctgtcaatagaaacgacatcatccataggactgtgcagcagggcgactttagcctatccgaggctgtgaaaagcaccctcgcctccgcaatggacattcaggtaccatataatatggagcgcgtgttttggcttctctccggatccgattcacaagtcactcgggctttgatggaacaatttgagagaacacagagtgttaatcttccgaaggagcttcactcaaagcactcgccggtgctgccgaggccttgcctgtgttcccaggtgcccggaagctgtccgggttgctggcctgatccatag

SEQ ID NO: 10871 - DNA, 2889 bp, synthetic construct
  misc_feature 1..2889: note = source = /note="Description of Artificial Sequence: Synthetic coding sequence"
  source 1..2889: mol_type = other DNA
atgcttcgccgtccagcacccgctctcgctcccgctgccaggctgctgctggccggtctgctctgtgggggaggagtttgggcagctcgtgtcaacaaacataagccctggctagagccaacatatcatggaatcgtgacggaaaacgataatactgtccttctcgacccaccactgattgccctcgataaagatgctcccttgaggttcgccgagtcatttgaagtcactgtaacgaaagaaggagaaatctgcggcttcaagatccatgggcagaacgtgcctttcgacgccgtggtggtcgataagagcacaggagagggcgtgataagatccaaagagaagctggactgtgaattgcaaaaggactatagcttcactatccaggcatatgattgcggcaaagggcctgacggaacaaacgtgaaaaagtctcataaagctaccgtgcatatacaggtaaacgacgtcaacgagtacgccccagttttcaaggagaaaagctacaaggctacagtcatcgagggcaaacagtacgatagcatactgagggtggaagctgtggatgcagactgttccccacagttcagtcagatttgctcatatgagataatcacgcccgacgtgccatttaccgtggacaaggatgggtacatcaagaacactgaaaagctgaattacgggaaggagcatcagtacaaactgaccgtcacagcctacgactgcggcaaaaagcgggcaactgaggatgttctcgttaagatttcaataaaaccgacttgcaccccgggatggcagggttggaataatcggattgagtacgagccgggaaccggtgccctcgctgtgtttccaaatatacacttggagacatgtgacgaaccagtggcctccgtccaggctaccgtcgagctggagactagccacattggtaagggttgtgatcgcgatacttactcagagaagagtctgcaccgcctttgtggcgcagccgctggaactgccgaactcctgcccagccctagcgggtcgttaaattggactatgggtctgccgaccgataacggccatgacagtgaccaggtgtttgagtttaacgggacccaggccgtcagaatacctgatggggtcgtcagtgtttcacccaaggagccattcaccataagtgtgtggatgcgacacggacctttcgggaggaagaaggagactatcctctgttcctcggataagaccgacatgaatcgccaccactactctctgtacgttcacggctgcaggctgatattcctgttccggcaggatccatcagaagagaagaagtatagacccgcagagttccactggaagctgaaccaggtatgcgacgaagagtggcatcactacgtgcttaacgtggaatttccttctgttacgctgtatgtcgatggcaccagccacgagccattttctgtgacggaggactacccgctgcatccaagtaaaatcgagacacaactggtggttggcgcatgctggcagggaggggatctccacatgacccagttctttagaggcaatctcgctggcttaaccctgagaagcgggaagctggcagacaagaaagtgattgactgcctgtacacctgcaaggagggtctggatctgcaggtgcttgaggattccggaagaggggtgcagattcaagcccacccaagtcagctggtcctgactctcgaaggggaggacctaggagaactcgataaggccatgcagcatatatcttatctaaacagccgacaatttcctacccctggcattcgacgactcaaaatcacatccaccattaagtgctttaacgaagccacttgcatttcagtaccccctgtcgatggttacgtgatggtcctccaacccgaggaaccgaagatcagcctgtccggagttcaccatttcgctcgagccgctagcgagttcgaaagttcagagggagtgtttttgttcccagaactgagaataatcagcacaattacgcgggaagttgagccagaaggggatggagccgaggatcccaccgtgcaagagtctctggtgtccgaagagatagtccacgatctagacacatgcgaggttaccgtagaaggcgaggaactgaaccatgaacaagaaagtctagaagtggacatggccagactccagcagaaaggaatcgaggtttccagcagcgagttgggtatgactttcactggggtggataccatggcttcttatgaagaggtcctgcatctgcttaggtataggaattggcatgccagatccctgcttgacagaaaattcaaactaatatgcagtgagctgaacggcaggtacatctccaatgagttcaaggtggaggttaacgtaattcataccgcaaatccaatggaacacgccaaccatatggcggctcaaccacagttcgtgcacccagagcacagaagcttcgttgacctttcaggccacaacctggctaatccccaccccttcgcggtagtaccaagcactgccacggtggtaatcgtggtgtgcgtgtcctttctcgtgttcatgatcattctgggggttttcaggatccgagccgctcaccgccgtacaatgcgcgaccaggatacagggaaggagaacgagatggactgggacgacagcgcgctcacaatcaccgtcaaccccatggagacttatgaagatcagcactcgagtgaggaagaggaggaagaggaggaggaagaggaatctgaggacggggaggaagaagatgacataacttccgccgaatctgagagctctgaggaagaggagggcgaacaaggggatccccaaaatgccacccggcagcagcagctcgaatgggatgactccaccctctcctactag

SEQ ID NO: 10872 - DNA, 2946 bp, synthetic construct
  misc_feature 1..2946: note = source = /note="Description of Artificial Sequence: Synthetic coding sequence"
  source 1..2946: mol_type = other DNA
atgcttcggaggccagcaccggctctggccccagcggctcggctcctcctggcagggctcctttgcggcggtggagtgtgggctgcacgggtgaacaaacacaaaccatggttggaacctacctatcatggcatcgtcacagagaacgataacactgtgctcttggatcccccattgatcgctctcgataaggacgcgccactgaggttcgctgagtcttttgaggttaccgtgacaaaagagggcgaaatttgtgggttcaaaatccacggtcaaaacgtgccattcgacgctgtggttgtcgataaatctaccggcgagggggtcatcaggagcaaggaaaagttagattgcgagctgcagaaggattattcgttcactatccaggcatacgactgtggcaaaggacccgacggtaccaacgtgaagaagagtcacaaagcaaccgtacacatccaggttaacgatgtaaacgaatatgcacccgtttttaaggagaagagctacaaggctactgtgatagaggggaagcaatacgactctatcttgagagtggaagcagtcgacgctgactgctccccccagttctctcagatctgttcctacgaaatcataacccctgacgttccctttactgtggataaggacggctatataaagaatacagagaagttaaattatggtaaagaacaccagtataaactgaccgtcactgcatacgactgtggtaaaaagcgcgcaacagaagatgttctggtaaaaatctcgattaagcctacctgtacccccggatggcagggctggaacaatcgtatagagtatgagccagggaccggcgctttggctgtctttcctaacatccacctggagacctgcgacgaaccagtagcgtccgttcaggcaacagtggaactggagacctctcatatcggaaaagggtgtgacagggatacatatagcgagaagagcttgcacaggttatgcggggctgcggctgggaccgctgagctgctgccttctccttccggcagtctgaattggactatggggttaccgaccgacaatggtcacgattctgaccaagtgtttgagtttaacggcacccaagccgtgcgcattcctgacggtgtcgttagcgtgagcccaaaggaacctttcacgatctcggtttggatgaggcatggcccattcggcagaaagaaagaaaccatactttgcagtagcgacaagactgacatgaaccgtcaccattattccctgtacgtgcacggctgccgccttatattcttatttagacaggacccgagtgaagagaaaaaataccgccctgccgaattccactggaaactcaatcaggtctgcgacgaagaatggcaccattatgtactgaacgttgagtttcccagtgttactctgtacgtggatggaaccagccacgagcctttttcggtcaccgaggactacccacttcatccctctaagatcgagactcaattggtggtcggcgcatgctggcaagagtttagtggagtggaaaacgataacgagaccgagcctgttaccgtggctagtgccggtggtgacctccatatgacccagttcttcagaggaaacctcgccggactgacactgagaagcgggaaactggcggataaaaaggtaatagattgcctgtatacctgtaaagaggggctggatctgcaggtccttgaggatagcggacgtggcgtgcagattcaggctcatccaagtcagctggtgctgacgctggagggcgaggacctgggtgaactggacaaggccatgcagcacataagttacctcaacagcaggcagtttcccacaccagggattaggagacttaaaattacatccactattaaatgtttcaatgaggctacttgcattagcgtaccccctgtagatggctacgttatggttcttcagcctgaagagccaaaaattagtctcagtggcgttcaccactttgcaagggcggcttccgaattcgagtcttctgaaggggtatttctgttcccagagctgaggataatctctactattactagggaagtggagccggaaggcgacggagcagaagaccctaccgtccaggagagtttggtgagcgaggaaatcgtgcacgatctagatacgtgcgaggtaactgtagaaggggaggaacttaatcatgaacaggagagcttagaagtcgatatggcacgactccagcagaaagggatcgaagtttcctcatcggaactgggaatgacattcactggagtggataccatggcctcttacgaagaggtcctgcacctgctgcggtatcgcaactggcatgctaggtcccttctcgacagaaagtttaagctaatctgttctgagctgaacggacgatacatttctaatgagtttaaggtggaagtgaacgttatccacacagccaacccaatggagcacgctaatcatatggccgctcagccccagtttgtccatcctgaacacaggtcatttgtagatctgagcggccacaacctcgcgaaccctcatcccttcgctgtcgtgccctccacagctactgtagttatcgtggtatgtgtaagtttccttgtgtttatgatcattcttggcgtcttccggattagagccgcacaccgcaggacaatgagggaccaggatacggggaaggagaacgagatggactgggatgactcagccctcacaatcacagttaatcccatggaaacttacgaggaccagcattcatctgaggaggaggaggaagaagaagaggaggaagagtctgaggacggggaggaagaagatgacataacaagtgctgaatcagagagctctgaggaggaggagggcgaacagggcgatcctcagaatgctacacgtcagcagcagttagaatgggatgactccacactttcatactag

SEQ ID NO: 10873 - DNA, 678 bp, synthetic construct
  misc_feature 1..678: note = source = /note="Description of Artificial Sequence: Synthetic coding sequence"
  source 1..678: mol_type = other DNA
atgtctgggtgctccaaaaggtgtaaattaggtttcgtaaagtttgcccaaactatctttaaactgattaccgggaccctgtctaaagataagatcgaggatgaactggaaatgacaatggtctgccatcggcctgaaggactggagcaacttgaagctcagacaaacttcacgaaacgggagctgcaggtgctttaccgcggtttcaagaatgagtgcccaagtggggtggtgaatgaagacacctttaagcagatctatgcccaatttttcccacatggagatgcaagcacctacgcacactacctgttcaatgccttcgatacgacccaaactggctctgtcaagtttgaggacttcgtgacagccttgtcgatccttctacggggaacagtccatgaaaagctcaggtggaccttcaacctgtacgacatcaacaaggatggctatatcaataaagaggagatgatggacattgtaaaggcaatttatgatatgatgggcaagtatacctaccccgtgctgaaagaggatacgcctcggcagcacgttgacgtgttcttccaaaaaatggacaaaaataaagacgggattgtgactttagatgagtttcttgagagctgccaggaagacgacaatatcatgcggtctttacagctgttccaaaacgtcatgtag

SEQ ID NO: 10874 - DNA, 420 bp, synthetic construct
  misc_feature 1..420: note = source = /note="Description of Artificial Sequence: Synthetic coding sequence"
  source 1..420: mol_type = other DNA
atgtacaagcttgcatcttgttgtcttctgtttattgggttccttaatccattgctgtcactcccccttctggactctagggagatctcctttcagctctcagccccacacgaagacgcacgtctgacccccgaggaactggaaagagcctcgttgttgcagatcctgcccgaaatgctcggtgctgagagaggcgatatcctccggaaggcagactcttccacgaatatcttcaacccgagagggaacctgaggaagttccaagacttttcgggccaagaccctaacattcttctttcacacttgttggcacgcatttggaaaccttataagaaacaacgccgaaagctcaggcaggatctacgcctctggaaaaaagaaccgggtcttcgcatcttcaagaactacgtttgggtgtag

SEQ ID NO: 10875 - DNA, 879 bp, synthetic construct
  misc_feature 1..879: note = source = /note="Description of Artificial Sequence: Synthetic coding sequence"
  source 1..879: mol_type = other DNA
atggaggtgacggcagtggccacacaagggggttacgggtcttccgattgggtcacctcttatcttctgatgttctccgacggcggtcgaaactggaagcagtataggcgcgaagagagcatctggggctttcctggtaataccaatgccgattctgtcgtgcattaccgactgcagcctccctttgaagccagatttttgcgcttcctccccctcgcctggaacccacgcggacggataggaatgaggattgaagtgtatggatgtgcatacaagtctgaagtggtatattttgacggccaaagtgccctgctgtatcggctcgacaagaagccccttaagccaatccgcgacgtgatttccctgaagtttaaggcaatgcaaagcaatgggatcctgcttcacagggagggccaacacgggaaccatatcaccctcgagcttatcaaaggaaagctggtcttcttcctgaactccggaaatgcgaaactcccgagtacaatagctccagttacactgacgctgggcagccttctcgatgaccagcactggcatagtgtcttgattgagttacttgatactcaggtgaactttactgtggataagcacacgcatcatttccaagccaagggggacagcagttacctggaccttaatttcgaaataagttttgggggtataccaacgccgggacgaagccgcgcttttaggagaaagagtttccacggctgcctagagaatttgtactacaatggtgtcgatgtcaccgagctggccaagaaacataaaccgcaaatcctcatgatggaacttgcccacggcttacaggaccagaatctgaagatctctctgacagtgtgccaccaaaccacgcagtag

SEQ ID NO: 10876 - DNA, 783 bp, synthetic construct
  misc_feature 1..783: note = source = /note="Description of Artificial Sequence: Synthetic coding sequence"
  source 1..783: mol_type = other DNA
atgaagacgagcgacggatttactttaaatgctgaatcctacgtgagtttcacaactaagctcgacatacctacagctgcaaagtatgagtatggcgtgccccttcagacaagcgatagtttcctgcggttcccgtctagtttgaccagctccctatgcaccgacaataatccagctgccttcttggtgaatcaggcagtgaagtgcacacgcaagatcaacctcgagcagtgtgaagagatcgaagccctgtcgatggcattctactctagcccggaaatcctgagggttcccgatagtagaaagaaggtgcctattaccgttcagtctatcgtcattcagtccctgaataaaacactgacacgccgtgaggatacagacgtgctccagccgaccctggtgaatgcaggccacttctcactgtgcgtgaacgtggtgttggaagtgaagtattccttaacctatactgatgccggagaagttaccaaggctgacttgtcttttgtgttggggaccgtatcttccgtcgtggtgcctctacagcagaaattcgagatacattttttgcaaactgactggtcctctcctgtgtctgctcggtccacggagggggaagaacctgcagtgggccctgggctccctcgcctaagagggcctttttggaaattcccaggccctgggcatgctggccttggggctcaccctcttcaccacccagtgattcagcaggaggggttcctcccagctcccaggggctttggttacaggtccgaggtggactag

SEQ ID NO: 10877 - DNA, 3624 bp, synthetic construct
  misc_feature 1..3624: note = source = /note="Description of Artificial Sequence: Synthetic coding sequence"
  source 1..3624: mol_type = other DNA
atggcaagtgtggcatgggccgtccttaaagtgctgcttctgttacctacccagacttggtctcccgtcggtgcgggtaatcccccagattgcgatgctcctcttgcctcagctctgcccaggtccagtttctcgtcctcttctgagttatcttcatcccatgggccaggtttttcgcgtcttaataggagagacggcgcaggaggatggacccctctagtcagtaataagtatcagtggctccaaatcgaccttggcgaacggatggaggtaacggctgtggccactcaaggagggtacggctcatcagactgggtgactagttatcttttgatgttttccgatggcggacgaaactggaaacagtatcgccgagaggagtctatatggggctttccaggtaataccaacgcagattcggttgtacattacagactccagcctccgtttgaagccagattcctcagattcctgccacttgcttggaatcccagaggcagaattgggatgcgaattgaggtgtacggctgcgcgtataagtccgaggtggtctattttgacgggcagtctgccctcttgtatcggttggataagaaacctctcaagcccatccgggacgtgataagcctgaagtttaaagccatgcagtccaacggaatcttgctgcacagagaaggccagcacggcaaccacataacccttgaattgattaaggggaagctggtgtttttcctgaatagtggaaatgcgaagctgccaagtaccatcgcacccgtgaccctgacgctcggctcattactggacgatcagcactggcatagcgtgctgatcgagcttctggacactcaagtgaattttaccgtggataaacacactcaccacttccaagccaagggcgatagctcgtatcttgacctaaactttgaaatctcatttggaggtatacccactcccggacggtcacgcgcatttagacggaaatctttccatgggtgcctggaaaacctgtactacaacggcgtagacgtaacagaactggctaagaagcataagcctcagatcctgatgatgggtaatgtctctttctcttgtccgcagccacaaacagtccccgtgacttttttatcctctcggtcatacctcgctcttccaggcaattccggggaggacaaagtatctgtgacctttcagttcaggacttggaatagagcaggacatctgcttttcggcgaattaaggcggggaagtggatcctttgtgctttttctgaaggacggaaaactcaaactgtcactcttccagcccggacagagtccgagaaatgttacagcgggtgcgggactgaacgacggacaatggcattctgtgtcattttcagctaagtggagccacatgaacgtcgtcgttgacgatgataccgctgtgcagcctctagtggctgtgcttattgattcaggggatacatactacttcggtggctgccttgataattcttctggctcagggtgtaaatcacccctcggagggttccagggctgtctcagattgatcactataggtgacaaggcagttgacccaatcttagtgcagcaaggagccctcggttctttccgcgaccttcagatagactcctgtggcatcacagacaggtgcctccctagctactgcgaacatggcggtgagtgctcccagtcttgggatacttttagttgcgattgccttgggacaggttacaccggggagacctgccactcctcgctctacgaacagagctgcgaggcacacaaacacagaggaaatccttccggtctttactacatcgacgcagacggtagtggccctctcgggcctttcctggtgtattgtaatatgaccgacgcggcttggacagtagtgcaacatggcggacctgatgcagtgacactccgcggtgcgccatctggtcacccacgtagtgctgtatccttcgcgtatgctgcgggagcgggtcagctgcgatccgccgtgaatcttgccgagcgctgcgaacagagactggccctcagatgcggaacagcgcgtcggcctgattctcgggacggaactccgttgagctggtgggtgggtagaaccaacgagacccatacatcgtggggaggctccctgcctgatgctcagaaatgtacatgcggcctggagggcaattgcatcgattcacagtactattgcaattgtgacgctggaagaaacgaatggacgtccgacacaatagtcctgtctcaaaaagagcacctccccgtcacgcagattgtgatgactgacgccggtcgaccacacagcgaggctgcgtacaccctcggaccactactgtgtcgaggggatcagtccttttggaatagcgcctcttttaacactgagacaagttacctccacttccctgcctttcacggcgagctgacagccgacgtttgcttctttttcaagactacggtgtcatctggcgtctttatggagaacttgggcatcactgattttattaggatagaactccgcgcaccaactgaagtaaccttcagctttgatgttggcaacggaccctgcgaggtgacggtccagagccctacgccgtttaatgacaaccaatggcatcatgtcagagcggaaaggaatgtgaagggcgcaagcctgcaggtggatcagctgccacaaaagatgcagcccgcaccagccgatggccatgtgcggttgcagctcaacagccagctcttcatcgaaatctcagcttatttcgccaccggaagctccatgacctatcattttcaggagcactacacactgtcagagaatagttcctccctcgtgtcttctttgcatcgggacgtaactctcacccgcgaaatgatcacactcagcttccggaccacccggactccaagcctcctgttatacgtgtcaagcttttacgaggaatatctgagtgtgatcctagctaacaatggctctttacagatccgctataaactcgacaggcatcagaacccggatgcatttaccttcgactttaaaaacatggctgacggtcaactgcaccaagttaagatcaaccgggaggaagcggtggtcatggtggaggtgaaccagagtactaaaaagcaggtgattctatcgagcgggaccgagttcaacgctgtaaaatcccttatcctcggcaaggtgctcgaagctgcaggagcagacccagacacccggcgtgcagctactagcggcttcaccggctgtctgtctgctgtgcggttcggcagggctgctcctctgaaggccgcattgcgaccgtctggaccatcgcgggtgaccgtgagaggccatgtggcgcctatggctaggtgcgcagcaggagccgcttcagggtcccctgctagggaattagcccctagactggcaggcggagccggaaggagcggccctgctgatgaaggagaaccattagtcaacgccgaccgtcgagacagcgcagtcatcggcggagtgatagccgttgtgattttcatcctcctgtgtatcaccgcaatagccatccgcatctaccagcagcgcaagctgcgaaaagagaacgagtctaaagtctccaagaaagaggagtgttag

SEQ ID NO: 10878 - DNA, 2238 bp, synthetic construct
  misc_feature 1..2238: note = source = /note="Description of Artificial Sequence: Synthetic coding sequence"
  source 1..2238: mol_type = other DNA
atggcctcggtggcgtgggccgtgctgaaagtccttcttctgttgcccacccaaacctggagtcccgtcggagcaggaaacccacctgactgtgacgctcctctcgccagcgccctgccacgtagcagtttcagcagttccagtgagttgtccagcagccacgggccaggcttcagtcggctcaaccggcgagacggagcgggtggctggaccccgcttgtgtccaacaagtaccagtggctgcaaatagacttgggcgagcgaatggaagtaactgcagttgccacacagggaggatacggttcatcagattgggtcactagctatctcttgatgtttagtgacgggggaaggaactggaagcagtaccggagagaagagtcgatttggggattcccaggaaataccaacgccgactctgtcgtccattacagattgcaaccgccatttgaagccagatttttgagatttctgcccctggcatggaacccgcgaggaagaatcggaatgagaatcgaggtatacggttgtgcatacaaatccgaagttgtctacttcgatgggcaatcagctctgctctaccggttggataaaaagccgctgaagcctattcgggatgtgattagtcttaagttcaaggctatgcagtcgaacggtatcctactgcaccgagaagggcagcacggaaatcacatcactctggagctgattaaaggtaagctagtgtttttcttgaactccggaaacgccaaactgcccagtaccatcgcccctgttaccctgactctgggcagtctcctggatgaccagcattggcatagcgtcttgatcgagctgctggatacacaggtgaacttcactgtcgataagcatacgcatcacttccaagcaaaaggtgattccagctaccttgatcttaactttgagatcagtttcggaggcatacccacacctggccgatcccgagccttcaggagaaaatctttccacggctgcttggagaacctgtattataatggagttgatgtcaccgagctggcaaagaaacacaagcctcagatcctaatgatgggaaacgtgtcctttagttgtccgcagccccagaccgttcccgtgacatttctgagctcccggtcctatctcgctctgccaggaaactctggggaggacaaggtgtctgttacctttcagtttagaacctggaatagggctggccacctgctgtttggcgagctgcggcgtgggagtggctccttcgtgctgtttctgaaagatggaaaactgaagttgagtctgtttcagccgggacagtcacctagaaacgtgactgctggggcaggattaaatgacggacagtggcactctgtgtctttctccgcaaaatggtcccacatgaatgtcgtagtggacgatgatacagccgtccagcctctggtggctgtgctcatcgactccggagatacttattacttcggcggttgcctcgacaatagcagcggctccggatgtaaatctcccctcgggggatttcaaggctgcctccggctgattacgataggagacaaggctgtagacccgatcttggtgcagcagggggctttgggtagtttcagggatttacagatagactcttgcggtatcactgatcgatgcctgccatcttattgtgagcacggaggcgaatgttcccagtcctgggatactttcagctgcgactgcctaggcaccggatacacgggcgagacttgtcattcctctttgtatgaacagagctgcgaagcccacaagcaccgaggaaacccctccgggttgtactatattgatgctgatggctcggggccattgggtcccttcctcgtctactgcaatatgaccgatgcagcttggaccgtcgtccaacacggagggccagatgcagtcaccctgagaggggctcccagcggccatcctcgttcagcggtgagtttcgcctacgcagcgggagcaggtcagctgaggagcgcagtaaacttggcagaaagatgcgagcagagattagccttgcgctgcggaacggccagacgaccagattctcgggatggcacacccctgtcctggtgggtggggagaactaacgagacgcacacttcttgggggggtagtctccccgacgctcagaagtgcacatgcggactagagggaaactgcatcgacagccaatattactgtaattgcgacgccggacggaacgaatggtag

SEQ ID NO: 10879 - DNA, 549 bp, synthetic construct
  misc_feature 1..549: note = source = /note="Description of Artificial Sequence: Synthetic coding sequence"
  source 1..549: mol_type = other DNA
atggagccgcagctgggtcccgaggccgcagccctgcgcccaggatggctggctcttctactgtgggtctcagcgttaagctgttcattttctctgccagcctcgtcgctgtctagcctggtgccacaggtgcgtactagctacaatttcggacgtacgtttctaggtctcgacaaatgcaatgcctgcatcggaaccagtatctgcaaaaaatttttcaaagaagagatccgctccgataattggctcgcttctcacctgggcttgcccccagattctctgttgtcataccctgctaattattccgatgatagtaagatttggcgccctgtggagattttccgattagtaagcaaataccagaatgaaatttccgaccgtcgcatatgcgcgtctgcgtcagctccaaagacctgcagcatcgagagggtcctacggaaaactgagagatttcagaagtggctccaggccaaacggctgacccctgacctggttcaggactgccatcagggccagcgggaactaaagttcctctgcatgctccgatag

SEQ ID NO: 10880 - DNA, 282 bp, synthetic construct
  misc_feature 1..282: note = source = /note="Description of Artificial Sequence: Synthetic coding sequence"
  source 1..282: mol_type = other DNA
atggatagcctgcgcaaaatgttaatctcagtcgctatgcttggcgcaggcgcaggcgtgggctatgcactgcttgtaatcgtgacgccaggagaacgcaggaagcaggaaatgttgaaagagatgcctctacaagacccgcgtagtcgggaggaggccgcaaggactcagcagctgctactcgctaccttacaggaggctgcaaccacccaagagaacgtggcttggagaaagaactggatggtaggcggagaaggcggagcaggcggacggtcaccatag

SEQ ID NO: 10881 - DNA, 387 bp, synthetic construct
  misc_feature 1..387: note = source = /note="Description of Artificial Sequence: Synthetic coding sequence"
  source 1..387: mol_type = other DNA
atgggaaagtccgcaagtaagcagtttcacaacgaggtgttaaaagcacacaacgagtaccgacagaaacatggtgtcccgcctctcaaactgtgtaaaaacttaaaccgtgaggcgcagcagtacagcgaggcactggcttcaacgcgcatacttaagcactctccagagtcctctaggggccaatgtggcgagaatttggcctgggcttcctacgaccaaacgggacatttcacggccatggtatggaagaacaccaagaagatgggggttggcaaggccagcgctagtgatggctctagttttgtggttgccaggtatttcccagctggaaatgtggtgaatgagggtttcttcgaggaaaatgtactgcccccaaaaaaatag

SEQ ID NO: 10882 - DNA, 465 bp, synthetic construct
  misc_feature 1..465: note = source = /note="Description of Artificial Sequence: Synthetic coding sequence"
  source 1..465: mol_type = other DNA
atggggaagtcagctagcaagcagttccacaacgaagtcctgaaggcgcataatgagtacagacagaagcacggcgttccgcctctcaagctgtgcaagaatcttaatcgtgaagcacagcagtatagcgaagccctggcttctacccggattttgaaacactcccctgagagctcacggggtcaatgcggagagaacttagcatgggctagctacgaccagacaggcaaagaggtggcagacaggtggtactcagagatcaagaactacaattttcagcagcctggctttacctctggaactgggcacttcacggctatggtgtggaagaacacgaagaaaatgggagtgggcaaagctagcgcatcggatggatcgagcttcgtcgtggcccgttattttcccgcagggaacgtagtaaatgaaggattttttgaagaaaacgtcctcccacccaagaagtag

SEQ ID NO: 10883 - DNA, 831 bp, synthetic construct
  misc_feature 1..831: note = source = /note="Description of Artificial Sequence: Synthetic coding sequence"
  source 1..831: mol_type = other DNA
atggacagctcacgagagccgacactggggcgtctagacgctgctgggttctggcaggtgtggcaaagatttgatgcagacgaaaagggatacatcgaagaaaaagaactagacgcattttttctccacatgcttatgaaactgggcactgatgatacagtcatgaaggccaatctgcataaggttaagcaacagtttatgacaactcaggacgcctctaaggatggccgtatccgtatgaaggaattggccggtatgttcctaagtgaagatgaaaatttccttcttctgttccgcagagagaatccccttgactccagcgtggaattcatgcagatctggcggaaatatgatgccgattcgtctggattcatttctgcagccgaacttaggaactttttgcgtgacctgtttctgcaccataagaaggctatcagtgaagcgaagctggaggagtatacgggaacgatgatgaagattttcgatagaaacaaagatggacgtctggatctgaatgacctggcacgtatcctcgccctgcaagaaaatttcttgttacagttcaaaatggatgcttgttccactgaggaacgtaagagagatttcgaaaaaatatttgcctattacgacgtttctaaaactggcgctttggagggaccagaagtggacgggttcgtgaaggatatgatggaactggtgcagccttcaatcagtggagtggacctggataagtttagggaaatcctgttgcggcactgcgatgtaaataaagacgggaaaatccagaagtcagagctggccctgtgtcttggcctgaagatcaacccgtag

SEQ ID NO: 10884 - DNA, 216 bp, synthetic construct
  misc_feature 1..216: note = source = /note="Description of Artificial Sequence: Synthetic coding sequence"
  source 1..216: mol_type = other DNA
atgcccgcaggtgtgcccatgtctacatacctcaaaatgttcgcggcttctctgctggcaatgtgcgccggtgccgaagtcgtgcatcgctattatcgccctgacctgacaatcccagagatccccccaaaaaggggtgagctcaagacagagctactggggttgaaagaacggaaacacaagcctcaagtctcacaacaagaggagctcaagtag

SEQ ID NO: 10885 - DNA, 1287 bp, synthetic construct
  misc_feature 1..1287: note = source = /note="Description of Artificial Sequence: Synthetic coding sequence"
  source 1..1287: mol_type = other DNA
atgaagcctatgctgaaagacttttccaatcttctgctcgtcgtgctttgcgactatgtcctcggggaggccgaatacctgttgcttcgtgaacctggccacgtggcactcagcaatgacactgtgtatgtggactttcagtacttcgatggtgctaatgggaccttacgaaatgtgagtgtgctcttgcttgaggcgaatacgaaccagacagtcacaacaaagtacctcctgaccaatcaatcacagggaaccctcaaattcgagtgtttctactttaaagaggctggagactactggtttaccatgaccccggaggcgaccgataattcaacaccgtttccatggtgggagaagtccgccttccttaaggtagagtggcctgtcttccacgtcgatctcaaccggagtgctaaagctgctgagggaactttccaggtaggcctgtttaccagtcagcctttatgtcccttccccgtcgataagccaaatatcgtggtggacgtgatcttcaccaatagcctgcccgaggccagaagaaatagcagacaacctctcgaaattagaacctcgaagcgcaccgagctcgcccaaggccagtgggtcgagttcgggtgtgcaccattgggccctgaggcttatgtaactgttgtgctgaaactcctgggaagggatagcgtaatcaccagtactgggcctatcgacctggcacagaaatttggatataagctcgtgatggtgcctgaactcacgtgtgagtctggagttgaagtgacagtgcttcccccaccatgtacgtttgtgcaaggtgtggtcaccgtcttcaaggaagcccctaggtacccgggaaaacgaactatccacctcgcagaaaattcacttccactgggggagagacggaccattttcaattgcacgctcttcgacatgggaaagaataagtactgcttcgactttggtatcagttcaaggtctcacttcagcgccaaggaagagtgtatgctgattcagcgaaacacagagacatggggcctgtggcagccgtggtctcagtgtagtgccacttgtggtgatggggtcagagaacgtagacgtgtatgcctgacttcttttccctcgtctcccgtatgtcctggcatgagcctcgaagcttcactttgttcactggaagagtgcgcaggacgcttccgatcgtgttgcccaggctggagtgcaatggtaagaagccgcctgacaaattcagcaagtagggttcaggccattttactgcctcaacccctggcttag

SEQ ID NO: 10886 - DNA, 312 bp, synthetic construct
  misc_feature 1..312: note = source = /note="Description of Artificial Sequence: Synthetic coding sequence"
  source 1..312: mol_type = other DNA
atgaaactgtgtgtgactgtgctgtccttgctcgtgttggtggccgcattttgtagcttggcgctgtccgctcccatggggtcagacccgccaactgcttgctgtttcagctacacagccagaaagcttcccagaaatttcgtagtggattattacgagacgagcagtctgtgttctcaacctgccgtagtttacagggaaagtgccagttcagccgcaccaggcaggatacccagtacccgtgccgctccacacggtccatggtcaggacggggaagatgtctgccgcaggcaagggacaaagcccgttag

SEQ ID NO: 10887 - DNA, 279 bp, synthetic construct
  misc_feature 1..279: note = source = /note="Description of Artificial Sequence: Synthetic coding sequence"
  source 1..279: mol_type = other DNA
atgaaactctgtgtaactgtgcttagtctgctggtgttggtcgccgctttttgtagtttagccctatcagccccaatggggagcgatccccctaccgcatgttgtttctcctacactgccaggaaactgcccaggaactttgtggtcgactactacgagacaagctctctgtgctcgcagccagccgtcccatgggattctaatcttggcaagcaagtgtgtgccgatcccagcgaaagttgggtccaggaatacgtgtatgacctagagttgaattag

SEQ ID NO: 10888 - DNA, 282 bp, synthetic construct
  misc_feature 1..282: note = source = /note="Description of Artificial Sequence: Synthetic coding sequence"
  source 1..282: mol_type = other DNA
atgcaggtgagcacggcagcacttgctgtgctcttgtgcacaatggccctgtgcaaccaggtattgtctgcccctctggccgctgataccccgacagcctgctgtttcagctatacttcaaggcagattccacagaacttcattgccgattactttgagacctctagtcaatgttccaaacctagtgtcatcttccttactaagagaggaagacaggtctgcgccgaccctagtgaagagtgggtccagaagtacgtgtccgaccttgagttgagcgcttag

SEQ ID NO: 10889 - DNA, 1869 bp, synthetic construct
  misc_feature 1..1869: note = source = /note="Description of Artificial Sequence: Synthetic coding sequence"
  source 1..1869: mol_type = other DNA
atgggcaagtctgaggggccagtgggcatggtggaaagcgcagggagagccggtcaaaagcggcctggtttccttgagggcggattactcctcctgctgttactagtgaccgccgctctagtggctttgggtgtgctctacgccgacaggcggggaaagcagttgcctcgactggcttccagactttgttttttgcaggaggagcggacctttgtgaaaaggaagcccaggggaattcccgaagctcaggaagtctccgaggtatgtacaaccccaggctgcgtcatagcagcggcacgtatcttgcagaacatggaccctactaccgaaccgtgtgacgacttctaccagtttgcttgcggcggatggcttcgtagacatgtgatcccagaaaccaactcacgctacagcatctttgacgtgctccgcgatgaacttgaagttatcctgaaggttgagcttgagacccagcttgccaaagccacagtgccacaggaggagcggcatgacgttattgccctatatcatcgcatgggcctggaagaactccagtcccagtttggtctgaaaggcttcaattggacactgtttattcaaaccgttctttcgtctgtgaaaattaagctcctgcccgatgaggaagtggtggtttacggcataccctacctgcagaatctggagaacatcattgacacgtatagcgctcggaccatccagaattatctcgtgtggcgcttggtactggatcgcattgggagtctatctcagagatttaaagacacgagagttaactaccgaaaagctttattcggcactatggttgaggaggtgagatggcgagagtgcgtaggctacgtgaattccaacatggaaaacgctgttggcagtctttatgtgcgggaggccttccctggcgactctaagagcatggtcagagaactgatagataaagttcgaaccgtgttcgttgagacactcgatgaactggggtggatggatgaggaatctaagaagaaggcccaggagaaggccatgagtatccgggaacagatcggtcacccggattacattctcgaagagatgaatcgccgacttgatgaagagtattcaaatctcaactttagtgaggatctgtatttcgagaattctctacagaacctcaaagtgggggcacagcgcagcttaaggaaacttcgcgagaaggtggacccgaacctttggatcatcggcgcagcggtggtgaatgcgttttattcccccaaccgcaatcagatcgtgtttccggctgggatcctacagcccccatttttcagtaaggaacagccccaggcgctcaatttcgggggtatcggcatggttattggacacgagattactcatggatttgatgataatggcagaaattttgataagaacgggaatatgatggactggtggtcaaatttttccacccagcattttcgagagcagagcgaatgtatgatttaccagtacggaaactattcttgggaccttgccgacgaacaaaacgttaacgggtttaacaccttgggcgaaaacatcgcagacaatggcggagtacgacaggcttacaaggcatatctcaagtggatggccgaaggtggaaaagatcaacagctaccaggtctcgaccttacccacgaacagctattttttatcaactatgctcaggtctggtgcggttcttaccgcccagaattcgcaatccagagcattaaaaccgacgtccattcccccctcaaataccgggtcctgggctcacttcagaatcttgccgctttcgctgatacctttcactgcgccagaggaactcccatgcacccaaaggaacgatgtcgggtgtggtag

SEQ ID NO: 10890 - DNA, 2340 bp, synthetic construct
  misc_feature 1..2340: note = source = /note="Description of Artificial Sequence: Synthetic coding sequence"
  source 1..2340: mol_type = other DNA
atgggcaagtccgaaggacccgtaggcatggtcgaatccgcgggacgggctggccagaagaggccaggtttcctggagggaggcctgctgttgcttttactactagtgactgcagctctagtggcgctaggtgtgctctatgcagatcggcgtggaaagcagcttccacgactggctagtagactttgtttcttacaggaggaaagaactttcgtgaaaagaaaaccccgtggtatccctgaggcacaggaggtgagcgaagtttgtacaactccaggatgtgtcatcgccgctgctcgcatactacagaatatggacccaactaccgagccctgtgacgacttctatcaattcgcctgtggtggttggctcaggaggcatgtgataccggagaccaactccagatattctatcttcgatgttcttagggatgagctcgaggtgatactcaaagcagtcttggaaaattctacggctaaggaccgaccagctgtcgagaaagctcgtactctgtaccgctcctgcatgaaccagtctgttattgaaaaacgcggtagccagccattgttagacatccttgaagtcgtcggtggctggcctgtggccatggacaggtggaacgaaactgtagggttggaatgggagttggaacgtcagctcgcactgatgaattcacagttcaaccgcagggtcttgatagacttattcatttggaacgacgatcagaatagctcaaggcacatcatctatatcgatcagcctacgctgggcatgcctagccgagagtattactttaatggcggatccaaccggaaagtgcgcgaggcctacctccagttcatggtaagtgtggccacgctcttgagagaagatgcaaacctgcccagagatagttgcctggtgcaggaagatatggttcaggtgttagagttggagactcagctggccaaagcgactgtcccccaagaggaacggcacgacgtgattgccctgtatcatcggatgggtctggaggaattacaatcacagttcgggttgaaaggctttaactggacattattcatccagaccgtcctgagcagtgtcaagatcaagttactgcctgacgaggaagtcgtggtgtacgggatcccttacctacagaacctggagaatattatcgacacttactcagccagaactatacagaactatttagtgtggaggttagtactggacagaatcggctctctgagtcaacggtttaaggatactcgagttaattacagaaaagctctctttgggaccatggtagaggaagttcggtggagggagtgtgtgggatacgtgaattccaatatggaaaatgcagtggggagcctatacgtccgagaagcctttccaggcgactctaagtcaatggtgcgggagcttattgataaggtacgcactgtttttgtggagacgctcgatgaactcgggtggatggacgaggagagcaagaagaaggcacaggagaaggcaatgtcaatccgcgaacagataggccacccagactacatcctggaagagatgaaccgcaggctggatgaagagtatagcaacttgaattttagcgaggatctatactttgagaacagcctgcaaaatctgaaggtgggcgctcagaggagtctaagaaaacttcgggagaaagtagaccctaatctttggataattggtgccgcagtggtcaatgccttctactcacccaataggaatcagatcgttttcccagctgggatcctgcagccacccttcttttcaaaagagcagccacaagcattgaacttcgggggaattggcatggttattgggcacgaaattacgcatggctttgacgacaacggccgtaatttcgataagaacggaaacatgatggactggtggtctaatttcagcacccagcatttcagggaacagagtgaatgcatgatctatcagtacggaaactacagctgggacctggccgacgagcaaaacgtgaatggcttcaacacgctcggcgagaacattgcggataacggcggagtgagacaggcttacaaggcatatctgaaatggatggcagaaggtggtaaggaccagcagctgccaggcctggacctgacccacgaacagttgttttttatcaattatgcccaggtctggtgcggatcctatcgacctgaatttgctatccaatctatcaaaaccgacgtccattcccccctgaagtacagggttctaggatccttgcaaaatttagccgcattcgctgatacattccactgcgcaaggggaacacctatgcatcctaaagaaagatgccgcgtatggtag

SEQ ID NO: 10891 - DNA, 258 bp, synthetic construct
  misc_feature 1..258: note = source = /note="Description of Artificial Sequence: Synthetic coding sequence"
  source 1..258: mol_type = other DNA
atgtccgtccatatgcctgcaatgaagatttgcgaaaaactgaagaagttggatagtcagatctgtgagttgaagtacgagaaaacgctcgatcttgcaagcgttgatctgcgaaagatgcgcgtcgcggagctaaaacagatcctgcatagttggggtgaagagtgcagagcttgcgccgaaaagactgactacgtcaatctgattcaggagcttgccccaaagtacgccgcaactcatcctaaaacagagctgtag

SEQ ID NO: 10892 - DNA, 657 bp, synthetic construct
  misc_feature 1..657: note = source = /note="Description of Artificial Sequence: Synthetic coding sequence"
  source 1..657: mol_type = other DNA
atggggcgtgtgttcctgaccggagaaaaggctaattctatcctgaagagatatccaagggcaaatggcttctttgaggagatccgtcagggaaatatcgagagagaatgcaaagaggagttttgcacattcgaagaggctagagaggcattcgagaataacgaaaagaccaaggagttttggagtacatatactaaggcccaacaaggagagagtaaccggggatccgattggttccagttttatctgacattccctcttatctttggactatttattatcttattggtcatctttttgatttggcgctgcttccttaggaacaagacgcggaggcagaccgtaacggagggccatattccatttccccagcatctgaacattattacacccccacctcctccagacgaggttttcgactcgtctggactctctccaggtttcctcggctatgtcgtgggcaggtctgactccgtctctaccagactttcaaattgcgacccaccacctacatatgaagaggccactgggcaggtgaacctgcaacgctcagagacagaaccccacttggatcctccacccgagtatgaagacatagtcaactcaaatagcgctagcgctatacctatggtacccgttgttacaacaatcaagtag

SEQ ID NO: 10893 - DNA, 1365 bp, synthetic construct
  misc_feature 1..1365: note = source = /note="Description of Artificial Sequence: Synthetic coding sequence"
  source 1..1365: mol_type = other DNA
atggccagacctaacaaattcttgctgtggttctgctgcttcgcatggctgtgcttccctatcagtctggggtcccaggctagcggtggagaagctcagattgctgcgtccgccgaactggagtcaggcgctatgccctggtccctgctgcagcacatcgatgaacgagacagggcaggtttactgcccgcactgttcaaggtgttgtccgtgggcagaggtgggtcccctcggttgcaacccgacagcagagctttgcattacatgaagaagctatataaaacttatgctaccaaagaaggcattcctaaaagcaatcgatcccacctatataacacggtgaggctttttaccccttgcacacgacacaagcaggcgccaggggatcaggtgaccggcattctgcccagcgtggaattactgtttaatctagacaggatcactactgtggagcacctgctgaagtcagttctgctatacaacatcaacaacagcgtctcattttcatccgcggtaaagtgtgtgtgcaatctgatgataaaagagccaaagagcagctctcggaccttaggacgggcaccttattcatttacttttaatagtcagttcgaattcgggaaaaagcacaagtggattcagatagacgtcaccagccttctccagcctctggtggcctccaataaacgatctatccatatgagtataaactttacttgtatgaaagatcaactcgagcacccctctgcccagaacgggcttttcaatatgacccttgtatcgccctctctcatcttatacttaaatgatacctccgcccaggcctaccacagctggtattcccttcattataaaagaaggccatcccagggaccagatcaggagcgctccctctcagcttatccagtcggggaggaagcggctgaagatggtcggtcctcgcaccatcggcaccgtaggggccaggagacagtgtcgtcagaactgaaaaaaccattaggccctgcctcatttaacctttcagagtattttcgccaatttctgctaccccagaatgaatgtgaattacacgacttcagactctccttttctcaattgaaatgggataattggatcgtagcgccacacaggtacaatcctagatattgcaaaggggactgcccccgagccgtggggcaccggtatgggtcccctgtgcacactatggtgcaaaatatcatctacgagaaactggatagcagcgtacctcggcctagctgcgtaccagcgaagtatagtcccttgagtgtcctcacgatagagccagacggctccattgcctacaaggagtacgaagacatgatcgctactaagtgcacttgccggtag

SEQ ID NO: 10894 - DNA, 417 bp, synthetic construct
  misc_feature 1..417: note = source = /note="Description of Artificial Sequence: Synthetic coding sequence"
  source 1..417: mol_type = other DNA
atgacctggagacaggctgtcttactctcgtgcttctcagcagtggtgctcctgtccatgttgagagagggaacatctgtatcagtgggaaccatgcagatggccggtgaggaggcctccgaggacgcaaagcagaagatattcatgcaggaatctgatgcatcaaatttcctgaaaaggaggggcaaaagaagccctaagagtcgggacgaggtaaatgtggagaaccggcaaaaactgagagtggacgagctgcgtagagagtactacgaagagcagaggaacgaatttgaaaatttcgtggaggagcagaacgatgagcaggaagaaaggtctcgcgaagcagtggagcagtggcgtcagtggcactatgacgggcttcaccccagctacctgtataatagacatcatacttag

SEQ ID NO: 10895 - DNA, 729 bp, synthetic construct
  misc_feature 1..729: note = source = /note="Description of Artificial Sequence: Synthetic coding sequence"
  source 1..729: mol_type = other DNA
atggccttgaaaaataaattctcctgcttgtggattcttggcctttgtctcgtcgctactacctcctctaagattccgagcatcaccgaccctcattttattgacaactgcattgaggctcacaatgagtggaggggcaaggtaaacccccctgccgctgatatgaaatatatgatctgggataaaggtctggctaagatggccaaggcctgggcaaaccagtgcaaattcgagcataacgactgccttgacaagtcttataaatgctatgccgcttttgaatacgtgggcgagaacatctggctcggaggtatcaaaagttttacccccaggcatgccatcaccgcctggtataatgaaacgcaattttacgattttgactctttgtcctgctctcgcgtatgtggccactacacccagctggtctgggcaaattccttctatgtgggttgcgctgtggcaatgtgtcccaacctaggcggagcttccaccgctatattcgtctgcaattatggtcccgcaggaaatttcgctaatatgcccccttatgtgaggggcgaaagttgcagcttatgttccaaggaggagaaatgcgtcaagaacctatgccgcaccccacagctgatcattccaaaccagaacccttttctgaaacccactggcagagcaccacagcagaccgcttttaatcctttcagcctcggtttcctgctgctgaggatcttttag

SEQ ID NO: 10896 - DNA, 813 bp, synthetic construct
  misc_feature 1..813: note = source = /note="Description of Artificial Sequence: Synthetic coding sequence"
  source 1..813: mol_type = other DNA
atgctccggcagttgctactggcagccctgtgtttagctggacctcctgcccctgccagagcctgccagctgcccagcgaatggcggccattatccgaggggtgtcgggcagagctggccgagactatcgtgtatgccagggtgttggctctgcacccagaggcgcctggcttatataaccacctgccttggcaatatcacgcaggccagggcggtctcttctattctgccgaggtcgaaatgctgtgtgaccaagcttggggcagcatgctcgaggttccggctggctctagactgaacttgactgggttaggatacttctcatgccattcccacactgtggtgcaggattacagctacttcttctttctgcgcatggatgagaactataacctgttgccccacggagtcaacttccaggacgcgattttcccagacacccaggaaaacagacggatgttctccagcctttttcagttcagcaattgcagccaggggcagcagcttgccacattttcatccgattgggagatacaagaggacagcaggctcatgtgttcttccgtccagaaggctcttttcgaagaagaagatcacgtgaagaaactccaacagaaggtggccactctggaaaaaaggaatcgccagctgagggaacgcgtcaagaaggttaagagatctctgagacaagccagaaagaagggacgacatctggagctagcgaatcagaagctctctgaaaagttggccgcaggcgcattgccacatattaatgctcgcggtccggtgagaccaccctacctgcgaggctag

SEQ ID NO: 10897 - DNA, 438 bp, synthetic construct
  misc_feature 1..438: note = source = /note="Description of Artificial Sequence: Synthetic coding sequence"
  source 1..438: mol_type = other DNA
atggatgagaactacaacttactaccacacggcgtcaactttcaggatgccatcttcccagacactcaggagaatagaagaatgttcagtagcctttttcaattttccaattgttctcagggccagcaattggctacgttttctagtgattgggaaatacaagaagactcaagattgatgtgttctagtgtccagaaggccctcttcgaagaggaggatcatgtgaaaaagctgcagcagaaggtcgcaacattagaaaagcgcaacaggcagctgagggagcgcgtgaaaaaggttaagcgaagcttacgacaggcgagaaaaaagggcaggcatctggagttagctaatcagaaactgtcagagaaactggcagccggagccctgcctcacattaacgctagaggacctgtccgcccaccataccttcgcggatag

SEQ ID NO: 10898 - DNA, 1830 bp, synthetic construct
  misc_feature 1..1830: note = source = /note="Description of Artificial Sequence: Synthetic coding sequence"
  source 1..1830: mol_type = other DNA
atggaactcggctgctggacacagttaggccttacattcctgcagttgctgctgatatcaagcctcccgagggagtacactgtcatcaatgaggcatgccccggtgccgaatggaacatcatgtgcagggagtgttgtgagtacgaccagatcgagtgtgtgtgcccaggtaagagggaggtagtgggatataccataccttgttgcaggaatgaggaaaatgagtgcgactcttgtttgatacatccaggctgtactatttttgaaaactgcaaaagttgtcgaaacgggtcctgggggggaacattggatgacttctatgtcaaaggcttttattgcgcagaatgtagagccggttggtacgggggagactgtatgccatgcagttcgagtccttgcttccacgacgggacctgcgtgctggacaaggcaggaagttataagtgcgcctgtcttgccggatatacaggccagaggtgcgagaatctccttgaggagaggaactgtagcgatccaggcggtccagtcaacggataccaaaaaatcacagggggtccaggcctgatcaatggacgccatgctaagattgggacagtggtgtcattcttctgtaacaacagctatgtgctaagtggcaatgaaaagaggacgtgccaacagaacggtgagtggtcaggaaagcagccaatctgtatcaaagcgtgccgggaaccaaaaatctctgacctggtgcggcgacgcgtcctgcccatgcaagtacaatctagggagactccattgcaccagctctattctgctgccttttcaaaacaaaagctgcagtctgcaccaaccaagaaacccgctctccccttcggagacttaccaatgggataccagcacttgcacacccagctgcagtatgaatgcattagtccattttaccgcagattggggtcctcccgaaggacctgtctccgtactggcaaatggtctggcagggccccttcatgcatcccaatttgcggcaaaatagagaacattaccgctcccaaaacacaagggctgcgatggccttggcaggccgcaatttatcgacggactagcggggtgcacgatgggagcttacataaaggggcatggttcctagtgtgttccggagcactggtaaacgaacgaacggtggtggtggcagcgcactgtgttaccgacttgggcaaggttacaatgattaagaccgcagacttgaaagtggtgctaggaaaattttatcgtgacgacgatcgcgacgagaaaactatccaaagcctgcaaatctctgctatcatcctccaccccaattacgatcccatactcctcgacgcagacatcgctattctgaagttgttggataaggccaggatttcaaccagagtccaacccatctgcttggcagcctctagggatttatcaacttcgttccaggagtcccatatcacagttgccggttggaacgtgcttgctgatgtcagatctcctggtttcaaaaatgatacccttaggtctggcgttgtttctgttgtggacagtctgctgtgtgaagaacagcatgaagatcacggtatccctgtttcagtcacagacaatatgttttgcgcctcctgggaacctactgcccctagcgatatttgcacagcggagacaggaggtattgcagctgtctcgtttcctggcagagcgtctccggagcctcggtggcacctgatgggactcgtgtcctggtcctacgacaaaacctgtagtcacagactaagcacagccttcacaaaagtgcttcccttcaaggattggattgaacggaacatgaagtag

SEQ ID NO: 10899 - DNA, 2163 bp, synthetic construct
  misc_feature 1..2163: note = source = /note="Description of Artificial Sequence: Synthetic coding sequence"
  source 1..2163: mol_type = other DNA
atggaactgggctgttggacgcagctcgggctcaccttcttgcaactcctgctgatctccagtctacccagggaatacacggtcataaatgaggcgtgtccgggtgccgagtggaacatcatgtgccgagagtgttgcgaatatgaccaaatagaatgtgtctgtccgggaaagcgggaggttgtcgggtacaccattccatgttgtaggaatgaagagaatgagtgtgactcctgcctgatccatccagggtgtacgatatttgagaactgcaagtcatgcagaaacggatcctggggaggcactctggacgacttctacgttaaggggttttattgtgccgagtgtcgagccggttggtacgggggagactgtatgagatgcgggcaggtattaagagcacccaaggggcagatattactggagtcctatcctcttaacgctcactgtgagtggaccattcatgccaaacctggatttgtgattcaactgaggttcgtaatgctgtcactcgaatttgattacatgtgccagtatgactatgtcgaagtcagagatggggacaatcgagatggacagattatcaaaagggtgtgcggtaacgagcggcctgcccctatccagtcgattgggtccagcctgcacgtgttattccattctgatgggtctaaaaatttcgacggttttcatgcaatctacgaagaaattaccgcgtgtagttcaagcccttgctttcacgatgggacatgtgtactggataaggccggttcatacaagtgtgcctgtctggctggttacacaggacaacggtgcgaaaatctcctggaagaaaggaactgtagtgacccaggtggcccagtcaatggttaccaaaagatcactgggggacctggccttataaatggacggcacgcaaagatcggcaccgtcgtcagttttttctgcaataacagctatgtactcagtggtaacgagaaacggacctgtcagcagaatggcgaatggtccgggaagcagcctatctgcatcaaagcatgcagggagcccaaaatctcagacctggtgagaaggcgggtgctcccaatgcaggtgcagtccagggaaacccccttacatcagctctattctgccgctttttcaaaacagaagttgcagtctgccccaaccaagaagccagctctgcctttcggtgatctgcctatgggataccagcacctccatactcaactccagtatgagtgtatcagccccttttacagacggctgggaagcagtaggagaacctgtttaaggaccggcaagtggagtggacgcgcaccaagttgcatacccatttgtgggaagatcgagaacatcacggctccaaaaacgcagggcctacgctggccatggcaagccgcaatttatcgacgaacttccggggttcacgatggatctctccataagggcgcatggtttctcgtgtgcagcggcgctctcgtcaatgaaagaactgttgtagtggctgctcactgcgtgacagatctgggcaaggtcactatgatcaaaacagccgatctgaaagttgtcttgggcaagttttaccgggatgacgacagggacgaaaaaacaatccagagcctgcagataagtgctataatcctccaccccaattacgaccctattctgctcgatgctgacatcgcaatcctaaagctccttgacaaggccagaatctcgaccagggtgcagcctatatgtctggccgcttccagagacctatccacttcattccaggagagtcatatcaccgtggcaggatggaacgtgttggcagacgtgaggagccccggttttaagaacgacaccttgcgatctggggtcgtgtccgtagtggatagcctactgtgcgaggaacagcatgaagatcatggaattcctgtatcagtaaccgataatatgttctgcgccagctgggaaccaaccgctccctctgatatctgcaccgcagaaaccggaggaatcgccgcagtttcttttccaggaagagcgtccccagagccccgttggcatctcatgggcctcgtatcatggtcctatgataagacgtgtagtcataggctgtcgacagcctttacaaaggtccttcctttcaaggactggatcgaacgcaatatgaagtag

SEQ ID NO: 10900 - DNA, 1134 bp, synthetic construct
  misc_feature 1..1134: note = source = /note="Description of Artificial Sequence: Synthetic coding sequence"
  source 1..1134: mol_type = other DNA
atggaggccctcttgcttggtgcagggctcttgctcggggcatacgtcttagtctattataatctagtaaaagcaccaccatgtggcggtatggggaatctccggggtcggactgccgtggtgactggagccaatagcgggatcggtaagatgaccgccctggaattggcccgacgaggtgctcgagtcgtgctcgcatgtagaagccaggaacgtggtgaggcagccgctttcgatctgaggcaagagtccgggaacaatgaggtgatattcatggccctggatctggcgtcactggcgagcgttcgcgctttcgctactgcttttctgtcttctgaaccccgactcgacatccttattcataacgctggaatctcttcttgcggtcgtactcgggaggcgtttaatcttcttctgcgggtcaaccatatcggcccttttttgctaacacacctcctgttaccttgcctcaaagcttgtgcccctagtcgggtggtggtcgtggcttctgctgcccattgtcgagggaggctcgatttcaagcgccttgaccgacccgtggtcggctggcggcaggaactgagagcttacgctgataccaagctcgcgaacgttctgttcgctagggagctggcaaaccaattggaagcaactggggtaacttgctacgccgctcacccaggcccagtgaactctgagctatttcttagacacgtccccggttggctccggcctcttttgagaccactcgcttggttggtgctgagagcacctaggggcggtgctcagactcctttgtattgcgctcttcaggagggcattgagccactgagcggacgctactttgctaattgccatgttgaggaggtgcccccagctgcacgtgacgacagggctgcccaccggttgtgggaagcctcaaagaggttagccggactaggcccaggcgaggatgctgaaccggatgaggacccacagtcggaggattctgaggcaccatcatcactctctacccctcatccagaagaacctactgtctcccagccctacccatccccccagtccagccctgaccttagcaaaatgacacataggatccaagcaaaggtggagcccgagattcaactgtcctag

SEQ ID NO: 10901 - DNA, 381 bp, synthetic construct
  misc_feature 1..381: note = source = /note="Description of Artificial Sequence: Synthetic coding sequence"
  source 1..381: mol_type = other DNA
atgatctcattccatgtgatctttctgtcactgggcagaggcaaactgttcctgcccgtcaacttctgctttcttaagctcaagaactctcaggtcaggatccctaaggattttacctgcaacctgcatgtcctcttcaggacagtccaaggcgaggatagaaacaccatgttcagaggacactggagcatctattcccggaactttcccttggcggtagttccggcttatgtaaccgaagacgggaagaatacaagccacagagcctcaggacaattttgcaacgccctatcgcagggggaaattccctctagcctccaactcgtgaacagctatgctttagaacccaggactgacatgccctgtaactttctgacctag

SEQ ID NO: 10902 - DNA, 876 bp, synthetic construct
  misc_feature 1..876: note = source = /note="Description of Artificial Sequence: Synthetic coding sequence"
  source 1..876: mol_type = other DNA
atggctgtcaccttgagcctactgctgggtggacgcgtatgtgccgcagtgactcgttgtggatttgccacccgcggagtggccggacccggacccatcggcagagagcccgatccggatagtgactgggaacctgaagaacgcgagttgcaggaggtggaatccaccctgaagcgtcaaaaacaagcgattcggtttcaaaagattaggagacaaatggaggctcccggtgcacctcctagaacattgacctgggaggcgatggaacagatccgatatttacacgaggaatttccggaatcttggtccgtgccaagactggccgaagggttcgatgtgtctaccgatgttattcgtagggtgctgaagagtaagttccttcctaccctggagcagaagctcaaacaagaccaaaaggtgctcaagaaagccggactggcccacagcttgcagcacctgcgagggagcggcaacacttccaagctgcttccggctggacacagcgtgagtggctccctgctaatgcctggccatgaggcttcaagtaaggacccaaatcatagtaccgctctaaaagtgattgaaagcgacacccatcgcaccaatacaccccgaaggagaaaggggagaaataaagaaatccaggatctggaagaatcctttgtgcctgtcgctgctccattgggccatcctcgcgagctgcaaaagtattcaagcgatagcgagagcccaagggggactgggagcggggctctgcctagtggacagaaactggaagagctgaaggccgaggagcctgacaattttagtagcaaggtagtgcaaagaggtagagagtttttcgatagtaacgggaatttcttataccgtatttag

SEQ ID NO: 10903 - DNA, 2541 bp, synthetic construct
  misc_feature 1..2541: note = source = /note="Description of Artificial Sequence: Synthetic coding sequence"
  source 1..2541: mol_type = other DNA
atgtttaaatgttggagcgttgtgctcgtcctgggatttattttcctcgagtctgagggccgacctaccaaagaggggggttatgggctgaagagctatcaaccactgatgcggctccgacacaaagagaagaatcaggagtccagtcgagttaagggtttcatgatccaggatggaccattcgggagttgtgagaacaaatattgtggcctcggcagacactgtgtgaccagtcgagagactggccaagcggagtgtgcgtgcatggatctctgtaagcggcattacaaaccagtatgcggtagcgatggcgagttttacgagaatcactgtgaggtgcatcgtgccgcttgtttgaagaaacagaaaattacgatcgtccataatgaggactgtttcttcaagggtgataaatgcaagacgacagagtatagtaagatgaagaacatgctccttgacctccagaatcaaaaatacattatgcaggagaatgaaaatcctaacggtgatgacatctcacgtaaaaagctactggttgaccagatgtttaaatactttgatgctgactcaaatggactagttgatatcaacgagctgacccaagtgataaaacaagaggagctgggcaaagatctgtttgactgtactctctatgtgctcctgaagtacgacgacttcaatgcagacaaacacctggctctggaggagttctacagggcctttcaggtgattcagttatccctcccagaagatcaaaaactgtcgataaccgcggctaccgtggggcagtccgcagtactgtcctgtgctattcagggcaccctgagacccccaatcatctggaagcggaataacatcatcctcaataacctcgatctggaagacatcaacgatttcggggatgacggatctctgtatataactaaggtaaccactacgcatgtgggaaattacacctgctacgcagacggctacgagcaggtgtaccaaactcatatctttcaggtgaacgtgccacctgtgatcagagtctaccccgaatcacaggcccgtgagccgggagttacagcgagtctcagatgtcacgctgaaggcatacccaaaccccagctcggctggctgaagaatggtatcgatataacccctaagctgagcaagcaacttactttacaggccaacggtagcgaggtgcacattagtaacgtcagatatgaagacactggcgcatatacttgcatcgccaaaaatgaagctggagttgacgaagacatatcttctctctttgtggaggatagcgccaggaagacacttgctaacatattgtggcgcgaagaggggctggggatcggcaacatgttctacgtgttctacgaagacgggataaaggtgatccaacctattgagtgtgaatttcagcgccacattaagccctctgaaaagctgctcggctttcaagacgaggtatgcccaaaagcagagggagatgaggttcagcggtgcgtgtgggcttctgctgtcaatgtcaaagacaagttcatctatgttgcccaacctacgctcgatcgggtcttgatcgtggatgttcagtcccagaaggtagtgcaggctgtgtccacggatccagtgccggtgaagctgcactatgataaatcacatgaccaggtgtgggttctgagctggggcacccttgagaaaacaagccctaccctccaggtcatcaccttggcctctggcaacgtcccacaccacactatccatacgcaacctgtcggtaagcagtttgatcgcgtagatgacttctttattcctacaaccacgttaattattacccacatgcgctttggttttattctgcataaggatgaggcggctctccagaaaatcgacctcgagactatgagttacatcaagacaatcaatctcaaagattacaagtgcgtaccgcagtctctggcttatacacatctcgggggatactactttataggctgtaaacctgatagcacgggagccgttagtcctcaagtcatggttgatggggtgactgactccgtgattggcttcaactccgatgtgaccggcaccccatacgtgtcccccgacggtcattatttggtcagcattaacgatgtgaagggactcgtgcgagtgcagtatatcacaataagaggggagattcaggaagcgttcgatatctacacaaaccttcacatttccgatctggcctttcaaccctcctttaccgaagctcatcagtataacatttatggctcttcctctacgcaaaccgacgtcttgttcgtggagctgagtagcggaaaagtgaagatgattaagtcccttaaagaacctctgaaagctgaagaatggccttggaatcgcaagaacaggcagatccaggacagcggccttttcggccagtacttgatgactccaagtaaagattccttgttcattctggacggtaggctgaataagcttaattgtgagatcactgaagtcgagaagggtaatacagttatctgggtgggggacgcttag

SEQ ID NO: 10904 - DNA, 291 bp, synthetic construct
  misc_feature 1..291: note = source = /note="Description of Artificial Sequence: Synthetic coding sequence"
  source 1..291: mol_type = other DNA
atgcgagtgacatcagctacctgcgctctgctgctggcgttgatctgtagcgttcagctaggcgatgcttgtctggatatcgacaaacttctggccaatgtagtgttcgacgtgtctcaggacctgcttaaagaagagctcgcccgttataacccttcccctctgactgaggagagtttccttaatgttcagcagtgcttcgcaaacgtgagcgtgacagagcgctttgcacactctgtggttataaagaaaatcctgcagtctaatgattgtatagaggctgcgttttag

SEQ ID NO: 10905 - DNA, 1971 bp, synthetic construct
  misc_feature 1..1971: note = source = /note="Description of Artificial Sequence: Synthetic coding sequence"
  source 1..1971: mol_type = other DNA
atgagaaccgtggttctcactatgaaggcctccgtgatcgagatgtttctggtgttgctggtcaccggagtacactctaataaagagactgcgaagaagataaaaagacctaagtttaccgtcccacaaattaactgcgatgtaaaagccggaaagattattgaccccgagtttattgttaagtgcccagccggttgccaggaccccaagtatcacgtctacggaacagacgtctacgccagctactcaagcgtgtgcggtgctgccgtccatagcggcgtcctggacaattcaggtggcaaaattctggtgaggaaagtggcaggccagtctggttacaagggctcctatagcaatggggtacaatcattgtccctccctcgttggcgtgaaagctttatcgtgctggagagcaagccaaagaagggggtgacgtatccctctgcactcacctacagctcttcaaaaagccccgctgctcaagcaggagaaaccaccaaggcatatcagcgacccccaattccaggcacaacggcccagcctgtgaccctcatgcaactcttagccgtaaccgtggctgtggccaccccgactacactgccaagaccctcacccagcgcagcatcaactacctccatccctagaccccaatccgtcggccaccgaagccaggaaatggatctatggtccaccgccacctatacgtcttcccagaacagacctcgggcagaccccggactcgtgcctaaagaggagttatcgacacagtcccttgagcccgtcagtctgggagatcccaattgcaagattgacttaagcttcctcatcgacgggagtacatcaattggtaagcgacgattcaggattcaaaaacagctccttgcggatgtggcgcaagccctggacatcggcccagccggtcccctgatgggtgttgtgcagtatggagacaatccagcgactcacttcaatctgaaaactcatactaattcaagggatctgaagactgcgatcgagaagatcacacagcgcggtgggctgtctaacgtggggcgtgccatctcctttgtcaccaagaatttctttagtaaggccaacggtaacaggtcaggtgcccctaatgtcgtggtcgttatggtagacggatggcctaccgataaagttgaagaggccagccgcctggccagagaatctggtattaacatatttttcatcactatagaaggggctgccgagaatgaaaaacaatatgtggtcgagccaaacttcgccaacaaagccgtatgtcgaactaatggcttctattccttgcatgtgcagtcctggttcggactgcacaaaacactccagcctctggtgaaacgcgtgtgcgacactgacaggctagcttgttcaaagacctgcctcaactctgctgatataggtttcgttattgatggctcatctagtgttggcaccggcaatttccgaaccgtgctacaattcgtgaccaacctcacaaaggaattcgaaatcagcgacactgatacacggatcggggctgtgcagtatacttatgagcagcggctggagttcggatttgataagtactcttcaaagccagatatcctcaacgctattaagagggtcgggtactggtcaggcggtacatctaccggagctgcaatcaactttgctttggagcagttgttcaagaaaagcaagcccaataagcgtaaactgatgatattaattacggacggccgtagctacgatgatgtacggattcccgcaatggcagcgcacttaaaaggcgtcattacttacgcaattggcgtggcttgggccgcacaggaagagcttgaggttattgctacgcaccccgctagggaccactcttttttcgtggacgaattcgacaatctccaccagtacgtgcctcggatcattcagaacatttgcaccgagtttaattcccagccgaggaactag

SEQ ID NO: 10906 - DNA, 2082 bp, synthetic construct
  misc_feature 1..2082: note = source = /note="Description of Artificial Sequence: Synthetic coding sequence"
  source 1..2082: mol_type = other DNA
atgcgcactgtcgtcctaacaatgaaagccagtgtcatagaaatgttcttagttcttctcgtaaccggagttcatagtaataaagagactgctaaaaaaataaaacggccaaagttcactgtgccacaaatcaactgcgatgtaaaagctgggaaaatcatcgaccccgagtttatcgtgaagtgtcctgccggatgccaggatccaaaataccacgtgtatggcacagatgtgtatgcgtcttattcatcggtctgcggcgcagctgtgcattcaggtgtgttggacaatagtggagggaaaatactggtccggaaggtggctgggcagtcaggctacaaggggtcctattccaatggagttcagagtctgtcgctccccagatggcgggaaagttttattgtgcttgaatctaagccaaaaaagggggtcacatacccctctgcattgacatactcatcttccaagtccccagcagcccaggccggagaaaccaccaaggcataccaaagaccaccgatcccaggtactactgcccaacccgtgaccctcatgcagctactagccgtcaccgttgcggtggcaacacctacgacattaccgaggccttccccgtccgctgctagcaccacaagcattcctagacctcaatcggtagggcatcgttcccaggagatggatctgtggtcaaccgcgacatacacatcatctcagaacagacctcgggcagatcctggcattcagcgccaggaccccagtggggcagccttccagaaacctgtgggtgcggatgtgtcgctgggggaaatggacagttggaagccaggttccgtgctgctagatgagggcctggtgcctaaagaagaactgagcacacagagcctggagcccgtgagccttggtgaccccaactgcaaaattgacttgtctttcctgatagacggctcgactagcatcggcaaacgtcgtttcaggattcagaagcagctgctggccgatgtcgctcaggcgctggatattgggccagcgggaccgcttatgggagtcgtgcagtatggcgataacccagctacgcatttcaacctgaaaacacatactaattccagagacctgaagactgccatcgaaaaaatcacccagcgaggtggtttaagcaacgtgggacgcgcaatctccttcgtgaccaagaacttcttctccaaagccaatggaaacagatcaggggctccaaacgtggtcgttgtgatggtggatgggtggcccacagataaagtcgaggaggcctctagactggcaagggagagtggcataaatatcttttttatcaccatagagggtgctgcagagaatgagaagcagtacgttgtggagccgaactttgctaataaggccgtctgtcggacgaacggcttctattccctccacgtacagtcatggtttgggcttcataaaaccctgcaacctctggttaagagagtctgtgacacggataggctcgcttgttccaagacttgtctgaattctgccgatatcgggttcgtcattgatgggtcctcttccgtgggcactggaaacttccgaactgtacttcagtttgtcacaaatctcacaaaggagttcgaaatttccgacaccgacactcgaataggagccgtgcagtacacgtatgagcaacggctggaatttggattcgataagtactcttcaaagccggatatactgaacgccatcaaaagggtggggtactggtcaggtgggacctcaacaggggcagcaataaacttcgctctggagcaattgttcaaaaagtctaagccgaacaagcgcaagttaatgatcttaatcaccgacggcagatcttatgacgacgtgcgtatccctgccatggcagctcatctgaaaggagttatcacttacgctattggcgtcgcttgggcagcacaggaggagttagaggttattgcaacccatcctgcaagagatcattcatttttcgtggatgaatttgacaacctacaccagtacgtgccccgtattatacagaacatctgtaccgaattcaatagtcagccaaggaactag

SEQ ID NO: 10907 - DNA, 555 bp, synthetic construct
  misc_feature 1..555: note = source = /note="Description of Artificial Sequence: Synthetic coding sequence"
  source 1..555: mol_type = other DNA
atgttttgtctactgcatttgtgtttttacttagcgaattttgcctccagtatcaaacggactcacgccgttaatggatgttgcggcctccaaatgatagccctgtgggctcaaagcagtggaaatgccgatgccagggttgaggaaattttggctggggaggagagacgcctagctgctcttctcgggtctcagggcatgcgcttttgggtctgtttagcggcttgcagggcaatgtggggactggcggctcgacggggtagggcagaagattccagttcaagccccgttgacgcctctaaattcccctggcggggaggccagcatcggacaactatgatgccatgtctcctgagagtgggggtgttcaggccatgccacgtccgacccactggcgaccccagctgtgatgtccagcctcctagacttggattctccagggtgccagacactcaggtggcattctacggaagtgggcactgggatcccacacctttcagcgtgcattcctgtttctttaactttcaggtgcgtaaaataatttttttactgtag

SEQ ID NO: 10908 - DNA, 864 bp, synthetic construct
  misc_feature 1..864: note = source = /note="Description of Artificial Sequence: Synthetic coding sequence"
  source 1..864: mol_type = other DNA
atgacttcagcggctcactactatccaaaactcatgagcataatgggcaacgtcctaagattccttccagctttcgtgaggatgaagcagctgattgaagaaggctacgtgggggaacccctggtctgcgaggttcaggtccacggtggttctttgctgggcaagaaatacaactggagttgtgacgacctgatggggggaggtggcctccattctgtgggtacatacatcatcgacctgctgaccttcctcaccggtcaaaaggccgtgaaggtccatggactgctgaaaaccttcgtgaaacagactgaccatatcaagggtatacgccagataacatccgacgacttttgcactttccaaatggtgcttgagggcggagtctgttgtacagtcaccctgaattttaatgtgccaggagagttcaagcaggatgtaacagtggttggcagcgccggacgcctgctcgcagtggggacagacctgtatggtcaacggaactctgcgcctgagcaggagcttctcgtgcaggacgccacaccggtgtcaaatagcctcctgccagagaaagccttcagtgatatcccttcaccttacctcaggggtacaataaaaatgatgcaggctgtcagacaggcatttcaggatcaggacgacaggcgaacttgggacgggaggcctctgactatggctgccacttttgacgactgtctctatgcgctttgcgtcgtggacactataaagcggtccagccagacaggggagtggcagaacatcgcaatcatgacagaagagccggaactctcaccagcgtacttgataagtgaggcgatgaggcgctcccgtatgtctttgtactgctag

SEQ ID NO: 10909 - DNA, 1173 bp, synthetic construct
  misc_feature 1..1173: note = source = /note="Description of Artificial Sequence: Synthetic coding sequence"
  source 1..1173: mol_type = other DNA
atgctgcctggcgtaggagtcttcgggacaagtctcaccgctcgtgtgattatacccctgttgaaggacgaaggttttgctgtcaaagccctatggggacggactcaggaggaagccgaggaactcgcaaaagaaatgtctgtaccgttttacacctcacggatcgacgaggttctcctacatcaggatgtcgatctggtctgtattaaccttcctccacctctgactcggcaaattgcggtgaagacgcttggcatcggcaagaatgtgatttgtgaccggaccgccactcccttggacgcctttcgaatgacctcagccgctcactactacccaaagctgatgagcattatgggcaatgttcttcgattcctgcctgcctttgtgcgcatgaaacagctcattgaagaggggtatgtcggcgagcccttagtatgcgaagtgcaggtgcatggtggcagcttactgggaaaaaaatataattggtcgtgcgacgacttaatgggtgggggaggtctccactccgtggggacgtatattatcgacctcctgacgttcctgacgggacaaaaggccgtgaaggtgcacggcctgctaaagaccttcgtcaagcagactgaccacatcaaaggtataagacagataacttccgatgatttttgcactttccagatggttctcgaggggggtgtctgctgcactgtgacccttaatttcaatgtccccggagaatttaaacaggacgtgacagttgttggtagcgctgggaggttgctggccgtgggaacagatctgtacggccaacggaatagcgctcccgagcaggaattacttgtgcaggacgcgacaccagtttcaaattccctgctgcccgaaaaagccttctccgatatcccttcaccttacctgagaggaactatcaagatgatgcaggccgttcgacaagcctttcaggatcaggacgaccggaggacatgggatgggcgtccacttacgatggccgcaacctttgacgattgcctgtatgcactgtgcgtcgtcgacaccattaaacgctctagccagacaggggagtggcaaaacatagctattatgacagaagagcccgaactgagccctgcctacctaatttcagaggctatgcggagaagcagaatgtcgctctattgctag

SEQ ID NO: 10910 - DNA, 5718 bp, synthetic construct
  misc_feature 1..5718: note = source = /note="Description of Artificial Sequence: Synthetic coding sequence"
  source 1..5718: mol_type = other DNA
atgcagagtcggcttctgttgctgggggcacccggaggtcacggaggacctgcttcccggcgaatgcgcttattactgcgccaggttgtgcaacgccgtcctgggggtgatcggcagcgaccagaagttaggcttctacatgctggctctggcgcagataccggcgatactgtgaatattggggatgtcagctacaagctgaagatccccaaaaatcctgaactggtgccacagaactatatatcggacagcctggcccaatcggtggtgcagcatctaaggtggataatgcaaaaagatttacttggtcaggatgtgtttctcataggacccccaggccctctgcgcagatcgatcgccatgcagtatctggagctcacaaagagagaagtagagtacatagccttatcccgcgatacaactgagaccgacctaaaacagagacgtgaaatccgggctggtacagctttttatatcgaccaatgtgctgtgagggctgcgacagaaggaagaactctcattctggaaggattagaaaaggcagagaggaacgtgctgcccgtccttaacaacctgctcgagaaccgggaaatgcagctggaagatgggcgttttctgatgagcgccgagaggtacgataaactgctgcgcgaccacactaagaaagagctggacagttggaagatcgtccgcgtttcagaaaatttcagagtcatcgctctgggcctgcccgtaccccgatactctgggaaccctttggatcccccactccgatccaggtttcaggcccgtgacatctactacctcccttttaaagatcagctgaagttactctactcaataggcgctaacgtgagcgctgagaaggtctcccaactcctatcgtttgccacaaccctttgctcccaggagtcctcaacactgggcctgcccgattttcctcttgactctttagcggcagctgttcagatcctcgactcgttccccatgatgcccataaaacacgcaattcagtggctctacccctacagtattctgctcggtcatgagggcaaaatggcggtggagggcgtgctgaagaggttcgagcttcaggattctggttccagccttctcccaaaagaaatagtgaaagtagagaagatgatggaaaaccacgtctcacaagcaagcgtgacgatcagaatagccgacaaagaggtgaccattaaagtgcccgcaggcacgagactgttgagccagccttgcgcctctgacagatttatccaaaccctaagccacaagcagctgcaagctgagatgatgcaatcccacatggtgaaggacatttgtctgatcggtggaaagggctgcgggaagactgtgattgccaaaaactttgctgataccctgggctacaacatcgaaccgatcatgctgtatcaggacatgactgccagggaccttctccagcagaggtacacccttccaaacggagatactgcctggcgttcctctcccctcgtgaatgcagcactggagggaaagctagtgctcttagatggaattcatcgggttaacgcaggaacactggctgtccttcaacggttgattcacgatagagagctcagcctgtacgatggttctagactcctccgtgaagatcgctacatgaggttgaaggaagaactccagctgtccgatgaacagctgcagaagcgttcaattttcccgatccatccatccttccgcataattgcactagccgaaccaccagtgatcggcagtaccgcccatcagtggctaggacctgaatttctcaccatgttcttcttccattacatgaaacccctggtcaaaagcgaagagatacaggtcattaaggaaaaggtgcctaatgtccctcaggaggctcttgacaaactgttaagttttacccataaactgagggaaactcaggatcctacagcgcagtctttagcagccagcctgagtacgagacaacttctgcggatcagtcgtcggctgtcacagtaccccaatgaaaacctgcacagtgcagtgaccaaagcttgtctttccagattcctccctagcctcgcgaggagcgctctggaaaagaatctcgccgacgccacgatagagatcaataccgacgacaacctcgagccggagcttaaggactataaatgcgaggtgacatcgggcactctgcgcataggcgcagtcagcgcaccgatttacaatgcgcatgaaaagatgaaagtgcccgatgtgctattctatgataatattcaacacgtgattgtgatggaagatatgctaaaggatttcctgctgggcgagcacctgttgctggtgggtaaccagggtgtcgggaagaacaaaatagtcgatcgctttcttcatctattaaatcggccacgcgagtacatccagttgcatcgcgatacaaccgttcagaccttaactcttcagccctccgttaaggatggcctgatcgtttatgaagatagtcccctggtgaaggctgttaagctcggccacattctggtggtggatgaggctgacaaagcgccaacaaacgttacttgcatcctaaaaaccctggtggagaatggggaaatgattctggctgacgggaggaggatcgtggccaactccgcgaacgtgaacggccgagagaacgtggtcgtgatccatccagatttccgcatgatcgtgctggccaatcggccaggattccctttcctggggaacgacttcttcgggactctaggcgatatcttctcctgtcatgctgtggacaatccaaagccacattccgaattagagatgctgcgccagtacggaccaaacgtacctgagccaatactgcagaaattagtcgcggcttttggcgagctgcgctctctcgccgatcaaggcattattaattacccctactctacacgtgaagttgtcaacatcgtgaagcacctgcagaaattccccacagaggggctttcgagcgtagtgagaaacgtgttcgacttcgattcctacaacaatgatatgagggaaatcctaatcaacaccctccataagtacggaattcccataggggctaagccgaccagcgtccaactagccaaagagcttacactcccagagcagacattcatgggctactggactatcggccaggcccgatcgggtatgcagaaactcctgtgccctgttgagactcatcacattgatatcaaaggaccagctttaatcaacattcaggagtacccaatagagcggcatgaagagagatcattgaactttacagaggagtgcgccagttggcggattcccctcgacgaaatcaacatcatttgtgacatcgccacctcacacgagaacgaacaaaacacactttatgtggtgacctgcaaccccgcttcgttgtattttatgaatatgaccggcaagagcggcttttttgttgacttttttgacattttcccaaggacggcgaatggtgtgtggcatccgttcgtaactgtggcccctcttggcagcccgttaaagggccaggtcgtcctccatgagcagcagtctaatgtgatcctattgctggacaccaccgggcgagcactccacaggcttatattacccagtgagaaatttacttccaagaagcccttctggtggaataaggaggaggcagaaacatacaagatgtgcaaggagtttagccataagaattggcttgtcttttacaaggaaaagggtaattctctgaccgtgcttgacgttttggaggggcgtacacacaccatctccctccccattaacctaaaaacggtgtttttagtcgccgaagacaagtggctgctggtagaatccaaaacaaatcagaagtacctgctgacaaaacctgctcacattgagtccgaaggttctggcgtctgtcagctgtatgtgctgaaagaggaacctcccagtactgggtttggggtgacacaggagactgagttctcaatcccacacaaaatctcaagcgaccagctttcttccgagcacctatcatccgcagtcgagcagaagatcgcctctcccaatcgtattctgtcggatgaaaagaattatgccaccattgttgtcgggtttcccgacttgatgagcccctctgaggtctattcctggaaaaggccttcatccctgcataagaggtctggcaccgatacctccttttaccgaggcaagaagaagagggggacacctaaacagagcaactgtgtgaccctcctggacacaaatcaggtggtgcgcattctacctccgggtgaagttcccctgaaagacatatatcctaaagacgtgacaccaccccagacttccggctatattgaggttaccgatctgcagtctaaaaaacttaggtacataccaattcctcgctcagaatccctcagtccctataccacgtggctcagcaccattagcgatacagacgctctgctggcagagtgggataaatcaggggtagtgacagtggatatgggaggacacattaggctgtgggagacaggacttgagagattacagcggagtctaatggaatggagaaacatgatcggccaggacgaccgcaacatgcagatcactatcaaccgagacagtggagaggacgtttcctcacctaaacatgggaaggaagacccagacaatatgcctcatgtggggggaaatacttgggcaggtggaaccggcggaagagacacggccggactcggtgggaagggaggtccctaccgcctggacgctggccatacagtgtatcaagtctctcaagcggagaaggatgccgtaccagaagaagtgaagcgtgccgctagagagatggggcagcgggcattccagcaaaggctcaaagagattcagatgagcgagtatgatgctgctacttacgaaagattttcgggcgctgtaagacggcaggtccacagtctgagaattatcctcgacaacctccaggccaaaggaaaggagcggcaatggcttcgccaccaggcaaccggagagctggacgacgctaagattatcgacgggctaaccggcgagaaagccatctataagagacgcggagaacttgaaccgcagcttggtagcccccagcaaaagccaaagaggctgcgactggtggtcgacgtgagcggtagcatgtataggtttaaccggatggatgggaggttggaaaggacgatggaagcagtctgcatggttatggaggcgtttgaaaactatgaagaaaaattccaatacgatattgtcggccactcgggagacggatataatattggactcgtgccaatgaacaagatcccaaaagataacaaacagcggctggagattctgaagacaatgcacgctcacagtcagttctgcatgtccggggaccatacgctagagggaaccgagcatgcaatcaaggagatcgttaaggaagaggctgatgaatacttcgtcatcgtgctttctgacgcaaatctgtctcgctatggcattcaccctgcgaagttcgctcaaatcctgaccagagatcctcaggttaatgcattcgccattttcattggttcattaggggaccaagctactcgcttgcagcgcactctgcctgctggcagatcctttgtggcaatggacaccaaagacatccctcaaattctgcagcagattttcacaagcactatgctgtcaagcgtgtat

SEQ ID NO: 10911 - DNA, 561 bp, synthetic construct
  misc_feature 1..561: note = source = /note="Description of Artificial Sequence: Synthetic coding sequence"
  source 1..561: mol_type = other DNA
atggaagccctgccgctgctggctgccaccacaccagatcacggcagacaccgcaggctgctccttctgccactcctcctgttcctattgcctgcaggagcagtgcagggctgggagacagaggaaagacccagaacacgggaggaggaatgtcatttttacgccggaggacaggtgtatcccggagaggccagtcgcgtgagtgttgcagaccattccctacacttgagcaaagcaaagatcagtaagcccgcaccctattgggaaggcacggcggtcatagatggtgagtttaaggaactgaaattgaccgactacagaggaaagtacctggttttctttttctatcctctcgacttcacattcgtgtgtccaactgaaatcatcgccttcggagacagactagaggagttccgatcgattaatacagaggtggtggcatgttcagtagacagccagttcacccacctggcctggtccgtttcctatacatacattcgcagaaagaagaggatggacctattactgaagcacggacagatcacgttggatatgatttag

SEQ ID NO: 10912 - DNA, 816 bp, synthetic construct
  misc_feature 1..816: note = source = /note="Description of Artificial Sequence: Synthetic coding sequence"
  source 1..816: mol_type = other DNA
atggaagctctgcccttactggccgcaaccacaccagaccatggccgacacaggcgcctcctcctcctccccttgctcctgttcctgctgcctgctggagcagtgcagggatgggaaaccgaggaaaggcccagaactcgggaagaagaatgccatttctacgccggaggccaggtgtatccaggcgaagcatccagagtaagcgtcgccgaccattcgctgcatttgagcaaagccaaaatcagcaagcccgcaccctactgggaaggaactgctgtcatcgatggcgagttcaaggaacttaagctgaccgactatcgcggaaagtacctggtcttctttttctaccccctcgatttcacgtttgtctgccctaccgaaattatcgcttttggcgatcgacttgaggaatttcgatctataaacacagaagtggttgcttgtagtgtggattcacagtttacacatctagcatggatcaatacaccacgacggcaaggcggtctgggccctatccgcattcctctacttagcgatttaacccaccagatctccaaagactacggtgtatacctggaagattccggacacacactgcgcggacttttcatcatcgatgacaaaggaatcctgcggcagatcacactgaatgaccttcctgttggcaggtctgttgatgaaacgctgaggctcgtacaggctttccaatataccgacaagcatggcgaggtctgccctgccggttggaagccaggtagcgagaccatcatccccgaccccgcaggcaaactcaagtatttcgataaattaaattag

SEQ ID NO: 10913 - DNA, 558 bp, synthetic construct
  misc_feature 1..558: note = source = /note="Description of Artificial Sequence: Synthetic coding sequence"
  source 1..558: mol_type = other DNA
atggatcatcggagccgactccgaggaaccggactgaatcggatacctggtactcaatcgcgggctccgcgagtccctctgcccttccatgtccagcaagaagccagagaaggagaggactgggagcgggaaccgccacggcagagacctccaatctacgaacctccggagagcgaagaacttcccgataatgtgatggtatccaagccagccccttattgggagggcacagccgtgatcgacggtgagttcaaagagctaaagctgaccgactatagaggcaagtacctggtgttttttttctacccactggattttacattcgtctgtccaactgaaatcatcgccttcggcgacaggctggaagagttccggagcataaataccgaagtggtcgcctgtagcgtggattcacagtttacccaccttgcatggataaacaccccccgacggcaagggggtcttggccctattagaattcccctcctgagcgatctgacacaccaaatcagcaaggattacggagtctacctggaagactcagggcataccctgtag

SEQ ID NO: 10914 - DNA, 843 bp, synthetic construct
  misc_feature 1..843: note = source = /note="Description of Artificial Sequence: Synthetic coding sequence"
  source 1..843: mol_type = other DNA
atggcacgtttctgggtgtgcgtcgcaggcgcaggcttttttctggcttttctggttctgcatagtagattctgtgggagcccagtcctgaggaactttacattcgccgtgagttggagaacagagaaaattctgtacaggctggacgtcggttggcctaagcatcccgagtacttcacaggcactacgttttgcgtggcagtggactctctgaacgggctcgtttacataggacaaagaggggacaacattcccaagattcttgtattcaccgaggacggctactttctcagggcctggaattacactgttgacactccacacggcatcttcgccgcttccacactgtatgagcagagcgtgtggattaccgacgttgggtcggatttcatgatcctgtggcttcatggcgaaaacgggactggcccagccaaatttaatatccctcactccgtgacactggactctgcgggtcgcgtctgggtggccgaccgtggtaataagaggatccaggtgttcgacaaggatactggcgagtggcttggcgcatggaacaactgcttcacggaagaagggccatcttctgtccgatttaccccagacggaaagtaccttattgtcgctcagctgaacctctctcggcttagtgtggtggctgctcccccagtcgggtctataggtgagtgttccgtgatttccactattcaactcgccgaccaggttttgccccatctgctagaagtggacaggaagaccggcgcagtatacgtggccgaaattggtgcaaaacaggttcagaagtacgtccctttgaacagttacgtgccctctttcggctcgtag

SEQ ID NO: 10915 - DNA, 1044 bp, synthetic construct
  misc_feature 1..1044: note = source = /note="Description of Artificial Sequence: Synthetic coding sequence"
  source 1..1044: mol_type = other DNA
atggctcggttctgggtgtgcgtggcaggagctgggttcttcttagcttttctggttctgcacagtagattctgtggaagtccagtgctgcggaacttcacattcgctgtcagttggcgaacggaaaagatactttatcgacttgacgttgggtggcccaaacatcctgagtatttcacgggcaccactttctgcgtagctgtggattcactgaacggcctggtgtacataggccaacggggagacaacattcccaagattctggtatttactgaggatggatacttcttaagggcctggaattatacagtagacacccctcacgggatcttcgcagctagcaccctctacgagcagtccgtgtggatcaccgatgtgggatccggattcttcggccacactgtaaagaagtactcttccttcggcgatcttgtgcaggtcctggggactcctggaaagaaaggtacctccttgaatcctctgcaattcgacaatcctgccgagctgtacgtggaggacactggcgacatctacatcgtggatggcgacgggggtctgaataatcgcttaattaagctctctcaggattttatgattctttggcttcacggagagaatggcacaggcccagcgaagtttaacattccccactctgtgaccctggactccgcagggcgagtctgggtggctgatagaggaaataaaagaatccaagtcttcgataaggataccggcgagtggctgggcgcatggaataattgtttcaccgaagaagggcctagtagtgtgcgcttcacacctgacgggaaatacctgattgtcgctcaactgaatctttccagactgtctgtggtggccgcacctccagttggctcaatcggcgagtgctcggtgatttccactatccagctcgctgaccaggtgttgccccacttactggaagttgataggaagaccggggctgtttacgtggccgagatcggtgccaagcaagtacagaaatacgtcccgctaaattcgtatgtgccttcattcggatcgtag

SEQ ID NO: 10916 - DNA, 1707 bp, synthetic construct
  misc_feature 1..1707: note = source = /note="Description of Artificial Sequence: Synthetic coding sequence"
  source 1..1707: mol_type = other DNA
atggtgttgcttcactggtgtctgctgtggctgctcttccccttgagctcaaggactcagaaattacccacaagagacgaggagctgtttcaaatgcaaatccgggacaaggctttcttccacgattctagtgtcattccagacggagccgagattagcagctaccttttccgggatactcctaaaagatacttcttcgtcgtagaagaagataacaccccactctccgtgacggtgactccttgcgatgctccgctggagtggaagctttccctgcaggagctgcccgaagataggtccggcgagggatcaggcgatctggagccgctagagcagcaaaaacagcagatcattaacgaagagggcacagagttattttcctacaaagggaatgacgttgaatatttcataagttcatcgagccctagtgggctgtaccagttggacctcctgtctacagaaaaagatactcacttcaaggtgtacgccacaacaactccagaatccgaccagccataccccgagctcccatatgacccgcgtgtcgacgttacctccctcggcagaacgaccgttacactggcctggaaaccttccccaaccgcctcgctgttgaaacagcctatccagtactgtgttgtgattaacaaggaacacaactttaagagcctctgtgcagtagaggctaaactgtccgcggacgatgcattcatgatggccccaaagcctgggctcgactttagcccttttgacttcgcccatttcggtttcccatccgacaatagcggtaaagagagatcgttccaggccaaaccatcccctaaactcggcaggcacgtatatagccggccaaaagtcgacatacaaaaaatttgtatcggcaataagaacatcttcactgttagtgatctgaagcctgatacacagtactactttgatgtattcgtagtcaacataaacagtaacatgtcaacagcctacgtgggcaccttcgctcgtactaaagaggaggccaaacagaaaactgtggaactgaaagatgggaagattacagacgttttcgtgaaacgaaagggcgcaaagttcttacggttcgccccagtgagcagtcatcagaaggtaaccttcttcatccattcatgcctcgacgccgtccagatccaggtcagaagagacggcaaactgctgttgtctcaaaacgtggaaggcatccaacagttccaactgcgtggtaaacctaaagcgaaatacttagtgagattgaagggcaacaaaaagggagcttcaatgctgaaaatcctggcgactacaagaccaacaaagcagtcattcccgtcactgcccgaggacaccagaataaaagccttcgataagctacgcacttgctccagcgccacggtggcctggctgggtacgcaggagcgaaataagttttgcatctataaaaaagaggttgatgataattacaatgaggaccagaaaaaacgcgagcagaaccagtgccttggacctgatataaggaagaagagcgagaaagtgctctgcaaatatttccattcacagaatcttcagaaggccgtgaccaccgaaaccatcaaaggcctgcagcctggtaagagttacttgctcgacgtatacgtcataggccacggcggacacagcgtgaagtaccagtcgaaggtggtgaagacacgtaagttttgctag

SEQ ID NO: 10917 - DNA, 489 bp, synthetic construct
  misc_feature 1..489: note = source = /note="Description of Artificial Sequence: Synthetic coding sequence"
  source 1..489: mol_type = other DNA
atgaaagggttcaccgcgacgctgttcctctggacacttatatttccgtcctgttctgggggtgggggaggaaaagcatggcctactcatgtggtatgttccgactctggccttgaagtgttatatcagtcctgtgacccactgcaggacttcggcttctccgtcgagaagtgctccaagcagctgaaatctaacattaatatccgtttcgggatcatcctgcgagaagatatcaaggaactcttcctggatctggctctcatgtcgcaggggagctcggttctgaacttttcttacccgatatgcgaggcggcacttcccaaattttcattctgtggaagaagaaagggggaacaaatttattatgccggaccagtgaacaatcccgaattcacgattccacaaggagaataccaggtgctactggagttatataccgagaagcgaagcaccgttgcctgcgctaacgctaccatcatgtgttcctag

SEQ ID NO: 10918 - DNA, 1698 bp, synthetic construct
  misc_feature 1..1698: note = source = /note="Description of Artificial Sequence: Synthetic coding sequence"
  source 1..1698: mol_type = other DNA
atggacttcctcctagcgctagtattggtctctagcctctatttgcaagcagccgctgagttcgacggcaggtggcccagacaaatagttagctctatcggcctgtgcaggtacgggggtcgaattgactgctgctggggatgggcacgacaatcctggggccagtgtcaaccggtgtgtcagcctagatgtaaacatggagagtgcatcgggccaaataagtgcaaatgtcaccccggatatgcaggtaaaacctgcaaccaggatctgaacgagtgtggcctaaaacctcgaccctgtaagcatcgctgtatgaacacctatggatcttacaagtgttattgtctgaacggctacatgttgatgccagatggctcctgtagtagcgcgctgacatgtagtatggcgaattgtcaatacgggtgtgacgttgtgaagggtcagattcgttgtcagtgtccatctcccggactgcagttggctcccgacggaaggacctgcgtggatgtggatgaatgcgctacaggccgagcatcttgtcccaggttccgtcagtgcgtaaatacctttggaagctatatctgtaagtgtcacaagggctttgatctgatgtatattggtgggaaataccagtgtcacgatatcgatgagtgctcgctggggcagtatcagtgtagtagcttcgcccgatgctacaatattcgcggtagctataaatgtaaatgtaaagagggctatcagggagacggactgacatgcgtttatattcctaaagtaatgatcgaaccttctgggcctattcatgtgcccaaggggaacgggacaatcctcaagggcgatactggcaacaataactggataccggatgtgggctccacctggtggcctccaaagaccccatacatcccacctattatcactaaccgacctacaagtaaacccaccaccagaccgacaccaaaaccaaccccaatccccacccctccacccccaccgcctctcccaacggagctgaggactcctcttcccccaacaactcccgaacggccaacaacgggactgacgacaatagcccctgccgcaagcactccccctgggggtatcacagtggacaacagggtgcaaactgacccccagaaacccagaggcgatgtgttcattccacgtcagccaagcaatgacctgttcgagatcttcgagatcgagcgcggtgtgtcagctgatgatgaggccaaagacgacccgggagtactggtccattcatgcaactttgatcacgggctctgcggatggatcagagagaaggataatgatctgcactgggaacccatccgggatcccgctggagggcagtaccttaccgtgagtgcagccaaggcaccgggtggtaaagcagctcggctagtcctgcccttgggccgactcatgcatagtggggatctgtgcctgtcatttaggcacaaagtcacagggttgcacagtggaactctgcaagtgttcgttagaaagcatggcgcacatggcgctgccctctggggaagaaacgggggacatggctggcgtcagacgcagatcacgttgcggggtgccgacatcaaatccgtcgtgttcaaaggtgaaaagcgacgcggtcataccggggaaatcggtttggacgacgtcagtctaaagaaggggcattgctcagaggagagatag

SEQ ID NO: 10919 - DNA, 1413 bp, synthetic construct
  misc_feature 1..1413: note = source = /note="Description of Artificial Sequence: Synthetic coding sequence"
  source 1..1413: mol_type = other DNA
atgaaacgtagcgtggctgtgtggttattggttggcctgtccttaggcgtaccccaattcgggaaaggagacatatgcgatcccaatccttgtgagaacggtggtatctgcctgccagggctggctgacggctctttttcctgtgagtgccctgatggtttcactgatcctaattgtagctctgtggttgaggtggggccatgcacaccaaatccctgccataatggcggaacatgcgaaatctcagaggcttaccgaggagatacgttcattggttatgtgtgtaagtgcccccgaggttttaatggcatccattgccaacataatattaacgaatgtgaagtcgaaccgtgtaagaatggcggtatctgcaccgacctagttgctaactacagctgtgagtgtcctggcgaattcatggggaggaattgccagtataagtgcagtggccctctagggattgagggcggaattatcagtaatcaacagattacagcatcctccacccatcgcgcactgtttggactccagaagtggtacccttactatgcgcgactgaacaaaaaaggtctcatcaacgcatggaccgccgcagagaacgaccgctggccatggatccagatcaatctccagagaaagatgcgagtgactggtgtcattacccagggggcaaaacgcattggcagcccggagtacataaaatcctacaaaatcgcttacagtaacgatgggaagacttgggccatgtacaaagtcaaagggaccaatgaggacatggtgttccgaggcaacatcgataacaatacaccctacgcgaactcttttacacccccaatcaaggcacaatatgttaggttgtatccacaggtctgccgtcggcactgtaccctgcgcatggaactcttgggatgcgagctaagcgggtgttccgagcccctgggtatgaagtccggccacatccaggattaccagattacggctagcagcatattccgcactctgaatatggacatgtttacctgggagcctaggaaggccagacttgacaagcaagggaaagtcaatgcttggacgtctgggcacaacgatcaatcacagtggttgcaggtggacctgttagtgcctaccaaagtcacgggaattatcactcagggagctaaggacttcggccacgtacagttcgtcgggagttataagctcgcctactccaacgacggggagcattggactgtgtaccaggatgaaaagcagaggaaagataaagtgttccagggcaattttgataatgacactcaccgcaaaaacgtcatagatccgccaatctacgcgcgacacattcgcatcctgccttggagttggtatggcagaatcacgctgcggtcggaactcttgggttgcacagaagaggagtag

SEQ ID NO: 10920 - DNA, 1254 bp, synthetic construct
  misc_feature 1..1254: note = source = /note="Description of Artificial Sequence: Synthetic coding sequence"
  source 1..1254: mol_type = other DNA
atggcttcctacttgtatggtgtgcttttcgcggttggcctgtgtgcccctatctattgtgtaagcccggcaaatgcaccgtccgcgtatccccgtccatcatcgactaaatctaccccggcttctcaggtgtacagcctcaatactgacttcgctttccggttgtaccggagactggtactggagaccccaagccagaatattttcttctcacccgtgtcagtcagtaccagtctggccatgctgtcccttggggctcattcagttactaaaactcagatattacaaggacttggatttaacctcactcatacacccgagagcgctatacatcagggcttccagcatctggtgcactcccttacggttccctccaaggacttgaccctgaagatgggatcggctctattcgttaagaaggagctccaattgcaggcgaacttcctgggcaatgttaaaagactgtatgaggcagaggtgttctccaccgatttctccaatccatcgatcgctcaagccaggatcaattcccatgtgaagaagaagacacagggtaaggtagttgatattattcaagggctggacctattaaccgcaatggtgctggtcaatcatatctttttcaaagccaagtgggagaaaccgtttcatccagagtacactcgtaagaactttcccttccttgtgggcgagcaggtgacggtacatgttcctatgatgcatcagaaagaacagtttgcttttggtgttgacactgaactcaactgctttgtactgcagatggattacaagggcgatgcagtcgcattttttgtacttccatctaaagggaaaatgagacagttggaacaggctttgtctgcgagaactctacgaaaatggagtcacagtctgcagaaacggtggatcgaagtgttcattcccagattctcaataagtgcatcgtacaacctggagacgatcctgcctaagatgggaattcagaatgtctttgataaaaacgctgatttctccggcattgcaaagcgcgattctcttcaagtgtccaaagccacccataaagccgtattagacgtatcagaagagggtaccgaggccaccgcagcaaccaccacgaaatttatcgtgagaagcaaagacgggccttcttacttcacagtgtctttcaacaggacatttctgatgatgataactaataaggcaactgatgggatcttgttccttggtaaagtcgagaatccaaccaaatcctag

SEQ ID NO: 10921 - DNA, 486 bp, synthetic construct
  misc_feature 1..486: note = source = /note="Description of Artificial Sequence: Synthetic coding sequence"
  source 1..486: mol_type = other DNA
atgctgatgccagtccatttcctgttgctgctgctgttgttgctcgggggacccagaaccggccttccacacaaattctacaaggccaagcccatcttctcttgtctgaataccgctttaagcgaggcagagaagggacaatgggaggatgcgagcctgctcagtaaaaggtctttccattatcttcgcagtcgcgatgcctcgagcggtgaggaggaagagggcaaagagaaaaagacattcccgatttctggtgcccgtggcggagccagagggacgcgctacaggtacgtcagtcaggcacagcctcgtggaaaaccaagacaggatactgcgaagagcccccaccgaactaagttcactctcagtttggatgtgccgacaaacattatgaacctgttgttcaatattgccaaggctaagaacctgcgcgctcaggctgctgccaatgcgcatctcatggcccaaatcggtaggaagaagtag

SEQ ID NO: 10922 - DNA, 2091 bp, synthetic construct
  misc_feature 1..2091: note = source = /note="Description of Artificial Sequence: Synthetic coding sequence"
  source 1..2091: mol_type = other DNA
atggcgatggctcgactagggtcctggctgggcgaggcacagtggctggcgctggtgtccctctttgtagccgctctggccaccgttggcctgtatctggcacagtgggctctggcgagagcccgaccacagcctcaaagaagggcggtggaacccggagaggggccaagacctggctcagatgccctactctcgtggatccttactcttggttcctggcggtctcagtggcaggcagcatgggttacggctcttaatgaggaggctgaaaggaagggtgggccaccgtttctttctttcgaagaggatcccagacagcaagccttggagttggtggtgcaggaagtcagctctgtcctgagaagcgccgaagagaaggtggttgtatgccacgtcgtgggccaggcaatccagtttttagtgtcagaaacccccgcattgggcgcaggttgccggctatatgatatgaggctaagccctttccatctccaactcgaattccacatgaaagagaagagagaggatctccagattagttggtctttcatctctgttccagaaatggctgtcaatattcagcctaaagccttgggggaggatcaggtggcggagacgagcgctatgtcagatgtactcaaggacatcctgaagcacctggctggctctgccagtccctcggttgtactgataaccaaacccaccaccgtgaaggaagcacagaacctgcaatgtgctgcctcaacagcacaagagtcctgccccccaaaaccgccacgggctcacgaactgaaactacttgtccgtaatatccacgtcctgctcctgagcgagccaggcgcatctggacacattaatgccgtgtgtgttgtccaattaaatgaccctgttcaacggttctccagtacacttacaaaaaacacacctgacctgatgtgggaggaagaatttacctttgagttaaatgcaaagagtaaggagctgcatctgcagatcagcgaggcagggcgtagtagcgaaggactgcttgccaccgccacagtaccactcgacctgtttaaaaaacagccgtcaggaccacaaagctttacactgacaagcggcagcgcttgcggttcaagcgtgctggggagtgtgacggctgagttcagttacatggagcctggggaattgaagtcctggccaatacctcctcctgtgcctgcggcaaaaattgaaaaggataggacagtaatgccctgtgggaccgtggtgacaaccgtcactgcagttaaaactaaaccccgagttgacgttggcagagcatctcctctgtctagtgacagcccagtcaaaacaccaatcaaggttaaggtgatcgaaaaagacattagcgtccaggccatagcttgcagaagtgcgcctgttagcaaaactttgtcatcctcggacaccgagctgctcgtactgaatggcagtgaccccgttgcagaagtcgccatcagacagctgtcggagtcctccaaactcaagttgaaaagtccccgtaagaaaagcaccattatcattagcggaatttcgaagaccagcctgagtcaggatcacgatgccgcactgatgcaagggtatacagcgtccgttgatagtacccatcaggaggatgcccctagccacccagaacgggctgccgcttccgctccgccagaagaagctgaatccgcacaggctagcctcgcccctaaacctcaggaggacgagctggattcttgggatctcgaaaaagaaccgcaggcagccgcttggagcagccaggtgctgctcgacccagacggcgacgagcttagcgagtctagcatgtccgtcctcgagcccggaacggccaagaagcataaggggggaatactgcgtaaaggagctaaactattctttcgacgcaggcaccagcaaaaagacccgggtatgtcacagagccacaacgatctggtgttcctggaacagccggaaggcagtagaagaaagggtattaccctaaccagaatattaaacaagaaactgttgagccgccacaggaataaaaatactatgaatggggcaccagtcgagccatgcacttag

SEQ ID NO: 10923 - DNA, 669 bp, synthetic construct
  misc_feature 1..669: note = source = /note="Description of Artificial Sequence: Synthetic coding sequence"
  source 1..669: mol_type = other DNA
atgcccgcaagctcaccattccttctggctccaaaaggtccccctggcaacatggggggacccgtcagagaacccgctctgtcagtggccttatggctctcctggggagccgctctcggcgcagtagcctgcgctatggccttgctgacccagcagacggaactgcaatccttgagacgggaggtgtcaagactccagggtaccggaggacctagtcagaacggcgaaggatatccttggcagagcctgccggagcagcattctgtgctgcatctggtccccataaatgcgacctccaaggacgactcggacgtcactgaagtaatgtggcagccggcactccgacgcggacgaggtttgcaggctcagggatatggggtccgaatccaggacgcgggagtgtacctgttatactcccaggtgctgtttcaggatgtcacgtttacaatgggtcaagtcgtgagtagggagggacaggggcgacaggagacgctgtttcgctgtatccggtctatgccaagtcaccctgatagagcctacaactcatgttactccgcgggagtcttccacctacaccaaggcgatattctgagtgtaattattcctagagcgcgagcaaagctgaacctgtcaccccatggtacgtttctaggtttcgttaagctgtag

SEQ ID NO: 10924 - DNA, 2205 bp, synthetic construct
  misc_feature 1..2205: note = source = /note="Description of Artificial Sequence: Synthetic coding sequence"
  source 1..2205: mol_type = other DNA
atgtgggggctgcttctggccttggcagcctttgctcctgcagtgggcccagccctgggcgcaccgaggaactctgtgctcggactcgctcagccaggaactactaaggtgccaggcagcaccccagccctacactcatcccccgctcagccccctgctgagacagctaacggtacatctgaacagcacgtcagaattagggtgataaaaaagaagaaggtgataatgaagaagcgcaagaagcttactctgactcgaccaacgcctctggtcactgctggcccactggtaactcccacacctgccggtacattggaccccgctgagaaacaagaaaccgggtgccctcctctcggcctggaatccttgcgagtgtccgacagccggctagaggcctccagctctcagtcctttggcttaggcccacacaggggcaggttgaacatacaatcaggactggaagacggtgatttatatgatggagcttggtgtgccgaggagcaggacgcggacccctggttccaggttgacgctggccacccaacgcgcttcagcggggttatcactcaaggcagaaatagcgtgtggcgctatgattgggtgacttcttacaaggtacaattcagcaacgatagtcggacatggtggggctccaggaaccattcctccggtatggatgccgtatttcctgccaacagcgaccccgagacacccgtgctgaaccttctgcctgagccccaggtagcacgcttcatccgcttattaccccagacttggctgcagggtggtgctccttgcctgagagcagaaatactcgcttgccccgtctcagatcctaatgatctcttcctagaagcacctgcctctggtagcagcgaccctctggattttcagcaccataactataaagctatgaggaaacttatgaagcaggtgcaagaacagtgtcctaatattacgcgcatttattctatcggcaagtcctatcaggggctcaagctgtacgtcatggaaatgtctgataagcccggtgaacacgagttgggggaacccgaggttaggtacgtggccggaatgcacgggaacgaagctctgggacgagagctgctgctgctactgatgcagttcctgtgtcatgaattcttgcgtggtaacccccgagtgactcgactgttaagcgaaatgcggatccacctgttaccttcaatgaaccccgacggatacgagatcgcctaccataggggctctgaactggtgggctgggctgaggggagatggaacaatcagtccattgacctgaaccataacttcgctgacctaaacacgcctctttgggaagcccaggatgacgggaaggtgcctcacatcgtgcccaaccaccacttacctttgcctacatactatactttgccaaatgctacagtggcacccgaaacacgcgctgtgatcaagtggatgaagagaattcctttcgttctttcagctaatttgcatggtggagaactggtcgtttcctatcctttcgatatgacacgcactccttgggctgcacgggagctcactccgacccccgatgatgctgtgttccggtggctgagcacggtttacgccggttctaacctggctatgcaggatacctcccggagaccctgccattcccaagatttctctgtgcacggcaacataattaatggggctgactggcacaccgtacctggatccatgaatgatttctcttatttacataccaattgcttcgaggtaaccgtggagttgagctgtgataagtttcctcatgaaaacgaactccctcaggagtgggagaacaacaaggatgcgcttctcacatacctcgaacaggtgagaatgggaatcgcgggagtggttcgggataaagatactgagttaggcatcgctgacgccgttatagccgtggacggcatcaatcacgatgtcactaccgcttggggaggggattattggagactacttacccctggtgattacatggtaacagcatcagcggaagggtaccatagtgtcactcgcaactgccgagtcacatttgaggagggaccatttccctgtaacttcgtcctgactaaaacgccgaagcagaggcttagagaactgcttgctgcgggagccaaagttccacccgacttacggagaagactcgaaaggttgaggggccagaaagattag

SEQ ID NO: 10925 - DNA, 759 bp, synthetic construct
  misc_feature 1..759: note = source = /note="Description of Artificial Sequence: Synthetic coding sequence"
  source 1..759: mol_type = other DNA
atgcgagccccattgcttccccctgcccctgtcgtgctgtcacttctgattctcgggagtggccactacgcagctggcttggacctcaatgatacctatagcggaaagagagagcctttctcgggagaccactctgccgatgggttcgaggtgactagccgttcagagatgtcatctggctctgagatttcccctgtgtccgaaatgccctcatcctccgaacccagtagcggagctgattacgattacagtgaagagtatgataacgagcctcagatccccggttacattgtggacgatagtgtcagggttgaacaggttgtaaagcctcctcagaacaagactgagtccgagaacaccagcgacaagcccaagagaaagaaaaagggtgggaagaatgggaagaatagaagaaaccgcaagaaaaagaacccatgtaacgcagagttccagaatttctgtatccatggcgagtgcaaatatattgagcacctggaggcagtcacttgcaaatgtcagcaggagtacttcggcgagcgctgtggcgaaaagtccatgaaaacccatagcatgattgactcctcgctcagtaagatagccctcgcagctatcgccgctttcatgagcgctgttattctgactgctgtcgcggtgataaccgtgcagctccggagacagtacgtcaggaagtatgaaggcgaggccgaggagagaaagaagctccgccaggagaacggaaatgtccatgcaattgcttag

SEQ ID NO: 10926 - DNA, 8486 bp, synthetic construct
  misc_feature 1..8486: note = source = /note="Description of Artificial Sequence: Synthetic coding sequence"
  source 1..8486: mol_type = other DNA
atgcccaaaagggcacattggggggcattgtccgttgttctgatcctgttgtgggggcaccccagagtggccttggcttgtcctcacccatgcgcatgctatgtgccgtctgaagtccactgcacgttcagatctctcgcaagcgtgcccgcaggaatagctaagcatgtggagcgaatcaatctcgggttcaattccatccaggcgttaagcgagacttcttttgctggactgactaaactggagctcctgatgatccacggtaacgaaatcccttccattcccgacggtgcccttagggacttgtcgtcccttcaagtgtttaagttctcatacaacaagcttagagtgatcactggacagacactccagggcctctccaatctgatgaggctccacatcgaccataacaagattgagttcattcacccacaggctttcaacggactcacctccctgcgtcttctccacctggaagggaacctgttgcatcagttgcatccaagtacattttcaacctttacgtttcttgactacttccggctatcaacaataaggcatctgtacctggccgaaaacatggtgagaactctgccggcttcaatgctacgtaatatgccactgcttgagaatctctatctccaggggaatccctggacgtgcgactgtgaaatgagatggttcctcgagtgggacgccaaatccagaggtattctgaagtgtaaaaaagacaaggcttacgaaggcggacagctgtgcgctatgtgtttcagccccaaaaagctttataaacacgagatccataagctcaaggatatgacatgtcttaagcccagcatcgagagtcctctcagacagaacaggtcgcgctctatcgaagaagaacaggagcaagaagaagacggaggaagccagcttattctggaaaaatttcaactccctcagtggtcaatctcattaaatatgaccgacgagcatggtaacatggtgaacttagtatgtgacatcaagaagccaatggatgtttataaaatccatttaaatcagaccgatcctcccgacatcgacataaacgccaccgtcgctctggatttcgaatgtccaatgacgagagaaaactacgagaaactctggaaactgatcgcctattactctgaggtcccagtgaaactgcaccgtgaactcatgctgagtaaagaccctcgcgtgagctatcaatacagacaggatgctgacgaagaagccctatactatactggggttcgcgcacagatcctggccgagcccgaatgggtgatgcagccctcgatcgatattcagctaaacaggaggcagagcactgctaagaaggtgttactgtcttattacacacaatatagtcaaaccatcagcactaaagacacgagacaggctcgcggaagaagttgggtcatgattgaacccagcggtgccgttcagagagatcagaccgttctcgagggcggtccatgccagctgtcctgtaatgttaaagcttcagagtcgccatcgatcttctgggtcctccccgatggatccattcttaaggccccaatggatgatccagattcaaaattttctatactctcctccggctggttgaggatcaagagcatggagccctctgatagcggcttgtatcagtgtatcgctcaagtgcgcgatgagatggaccgcatggtctacagggtgctagtgcagagcccttcaacccaaccagccgaaaaggacaccgtgaccatcgggaagaatccaggtgaaagcgttaccctcccgtgcaacgctctggcaatcccagaggcacacttgtcatggatcctacctaatcggagaatcatcaacgatctcgcaaacacatcgcacgtttacatgctccccaatggcacgctcagcatcccgaaagtccaggtgagcgactcaggctactaccgctgcgtagccgtaaatcagcaaggcgctgaccacttcactgttggcatcacagttaccaagaagggctctggacttccttctaaaagggggcgtagacctggcgctaaagcgctgtccagagtcagggaagacattgtggaagacgagggtggttcagggatgggagacgaagaaaacacctcgcgcagactgttacaccccaaagaccaggaagtatttctcaagacaaaggatgatgccatcaatggagacaagaaggccaagaaaggtcgtcgcaaattgaagttgtggaagcatagcgaaaaggaacctgaaaccaacgttgccgagggacgcagggtgtttgaaagcagacgccgtataaatatggctaacaagcagattaatcctgagagatgggccgatatcctagctaaagtacgaggcaagaatttgcctaaggggacagaggtcccacctctgatcaagactacctcaccaccttcactctctttggaggttacacctccgtttcctgcgataagtccgcctagtgcgtctcccgtgcagaccgtgacttcagctgaggaatcatccgcggatgtgccactcctcggggaggaggagcatgtgctaggcacgatatcctccgccagtatgggacttgaacataaccacaatggggtaatcttggtggagcccgaggtcaccagtactcccctcgaggaagtggttgacgatttatccgaaaagacggaggagattacatcaactgaaggcgatctcaagggaaccgccgctcccacccttattagtgagccctacgagccatcccccactctgcacacactcgataccgtctacgagaaaccgacccacgaagagactgcaaccgagggctggtccgctgctgatgtcggaagcagcccggagcccacctcaagcgaatacgagccacccctggacgctgtgagtttggctgagtcagagccaatgcaatatttcgatcctgacttggagaccaagagtcagccagatgaggataaaatgaaggaggacacattcgctcacttgactcccaccccaacgatctgggtcaacgattcatctacctcccagctatttgaggatagtaccattggcgaaccaggcgtgcccggacagagccacctacagggcctaacagataatatccacctggttaagagctccttgtcaacccaggatacgctgctgataaagaaaggtatgaaggaaatgtctcaaaccctgcaggggggaaacatgcttgagggggatcccacacactctaggagcagtgagagtgaaggtcaagaaagtaagagcataaccttgcctgatagtactctggggattatgagcagtatgagcccggtcaagaagcctgctgaaacaactgttggcactctgctggacaaggacactacaaccgccactaccacgccacgacagaaagtggcaccttcaagtaccatgtcaacccatccttctcgcaggcgaccaaatggccgacgccgactccgcccaaataagtttaggcacagacacaaacagaccccaccaaccactttcgctccctccgagaccttttccactcagcctacccaagccccagatattaagattagtagtcaggttgagagctccctggtcccaacagcctgggtagacaacacggtgaatacccctaagcagttggagatggagaaaaacgcagagccaacgagtaagggcacccctaggcgcaaacatggcaagaggccaaataagcatcgttatactccatccacagtctcctccagagcctcagggagtaaaccatccccttccccagaaaacaagcacaggaacatcgtgacaccttcaagtgagaccatcctcctccctcgaacagtaagtctcaaaaccgagggtccttatgattccctggattatatgaccacaacaaggaagatctattcttcctaccccaaggtgcaggagacactgcctgtcacctacaagcccacaagtgatgggaaggagatcaaggacgacgtcgccaccaatgttgacaagcataagagcgacatcctcgttactggagagagcattaccaacgcgattcccactagtcgatcactggttagcacaatgggggagttcaaggaggagtccagtcccgttggattccctggcacgcctacttggaacccctctaggactgcacagcccggacggctgcagaccggcattcccgtgactacaagcggagagaacctcacagatcctccgcttctgaaagaacttgaggacgttgacttcacaagcgaattcctgtcttccctgactgtaagcacaccatttcatcaggaggaagccggtagcagcacaactctgtcctccatcaaggttgaagttgcctcttcgcaggccgaaaccacaacattagaccaggatcatctagaaacaacagtggccatccttctttctgagactaggccgcaaaatcatacacctacagccgcacgaatgaaagagcccgcatcttcatcgccttcaacaatcctgatgtccctaggacaaaccacgactactaagcccgcacttccatcccctaggatctcccaggctagtcgcgactcaaaagaaaatgttttcctcaactatgtgggaaatcctgaaacagaggcaacgccagtcaataatgaaggaacccagcacatgagcggacccaatgaactctcaacaccctctagtgaccaggacgcatttaatttgagcacgaagctggaacttgagaaacaggtctttggcagtaggagtctgccccgaggcccagactcccagcgccaggacggcagggttcatgcatcacaccagttgacgcgagtgcccgcaaaacctatattgcctaccgctactgtgcggctccccgagatgtctactcaaagtgcttccagatatttcgtaacatctcaaagccctcggcattggactaataaacctgaaattactacatacccatctggggctctgccagagaataagcagtttacaacaccaagactgagttcgacgacaatccccctacccctgcatatgtccaaaccctccatcccttccaaattcaccgatcgcagaactgaccagttcaacggctacagcaaggtgttcggcaataacaacatccctgaagcaagaaaccctgtcggcaagcccccatctcccagaataccacattactctaacgggaggctaccttttttcaccaataaaaccctgagcttccctcagctcggtgttacccgaagaccccagatcccaacgagcccagctcctgttatgagagagcgaaaagtgatacccggttcctataatagaattcacagtcacagcacttttcatctcgatttcggccctcctgccccacctctgctccacacacctcagacaacgggatcacctagcacaaatctgcagaatattccaatggtgtccagtacacagagcagcatctctttcattacctcatctgtgcaatctagcggtagcttccatcagagttccagcaagttttttgctggtggaccccctgccagtaaattctggtccctaggcgagaaaccacagattctcacgaagtccccacagacggtgtccgtgactgccgagactgacactgttttcccgtgtgaggctaccgggaagcccaagcctttcgtgacctggacaaaggtgtccacaggagccctgatgaccccgaatacccgcattcagcgctttgaggttttgaagaatggaacactagtaattcgaaaagtgcaggtacaggatcgagggcagtacatgtgcacagcttcaaacttacacggattggaccggatggtggtccttttatcagtgaccgtgcagcagccccaaattttagcttctcattaccaggatgtgaccgtatatctgggcgacaccatcgcgatggagtgtttagccaaaggtaccccagcgccacaaatctcgtggatattccctgatcgtcgagtttggcaaaccgtgagtcctgtcgaggggaggatcactttgcacgagaacaggaccctgtcaatcaaggaagcgtctttctctgacagaggagtttataagtgcgtggcgtctaacgcagccggagcggatagtttggccattcgcctacacgttgccgcactgccccctgtgattcaccaagagaaacttgaaaatatttcgttgcccccaggcctgagcatccacattcactgcaccgctaaggcagcaccccttccttccgtacgatgggtactaggcgacggaacacaaatccgacctagccagtttctgcatgggaatctgttcgtgttccctaatgggacgctgtatatacgtaacctggccccaaaagattctggcaggtatgagtgtgttgcggctaacctggtcggttctgctcgcagaacagtgcagttgaacgtgcagagggctgctgccaacgccaggataaccgggacctcccccaggagaacggatgtcaggtacgggggaacactgaaactggattgtagcgcttctggggatccttggccccgaattctgtggcggctgccttccaagaggatgatcgacgctctgttttctttcgattccaggatcaaagtcttcgccaacggaactctagtggttaagtcagtcaccgacaaagatgctggagactatctgtgtgttgcgcgtaacaaggtaggtgacgactacgttgtgcttaaggttgatgtagtcatgaaacccgcaaagatcgaacacaaagaagaaaacgaccacaaggtcttctatgggggtgatctcaaagtggactgcgtggccacaggcctacccaaccccgagatatcctggtcattacccgacggatcattagttaattcattcatgcaatctgacgactcaggcggacgtactaagcggtatgtggtattcaacaatggcacattatacttcaatgaagtgggaatgagggaggaaggtgactacacctgtttcgccgagaatcaggtgggtaaagatgaaatgagggtgagggtgaaggtagttactgctcccgcaactatcaggaacaagacctatctggccgtgcaagtgccgtacggcgacgtcgtaacagtggcctgtgaggctaagggtgagccaatgccaaaagtgacctggctcagtccaactaataaggtgattccaacttctagcgagaaataccagatctaccaggatgggaccctgttaatccagaaagcacaaagaagtgattccggcaattacacctgtctggtgagaaatagtgcaggcgaagacagaaagacggtgtggattcacgtgaacgtgcagccaccaaaaatcaatggcaaccccaacccgataaccactgtccgcgaaattgccgctggcggaagccggaagttaattgattgcaaggccgagggcattccaacgccaagggtcctctgggcgttcccagagggagtcgtcttacctgccccatattatggtaaccgaatcacagtgcatggaaatgggtccttggacatccgttcactgagaaagtccgatagtgtccagctggtatgtatggccaggaacgagggaggcgaggctcggctgatcctacaactcacagtgctggaaccaatggaaaaacctatctttcatgatccaatatccgaaaagataactgctatggcaggtcataccattagccttaattgtagcgccgcagggacacccaccccaagcctggtctgggtactgcccaatgggactgacctgcaatctggtcaacagctccaaaggttctaccataaggccgacggaatgctgcacatctctggactgagtagcgtggacgccggtgcctatagatgcgtggctaggaacgccgcagggcataccgaaagactagttagtctaaaggttggacttaagcctgaagcaaacaaacagtatcacaacctcgttagcatcattaacggcgaaaccctgaagttgccttgtacccccccaggtgccggacagggtaggttctcttggacgctgcccaacggcatgcacctggaaggccctcagacactagggagggtcagcctcttagataacggcaccctgaccgtgcgggaggcaagcgtattcgaccggggtacatacgtgtgccgaatggaaaccgagtatgggcctagcgtgacctcaattcccgtaatcgtgatcgcctacccccctcggatcacaagtgaacctacacctgtgatatatacccgcccaggtaacacagtcaaattgaactgtatggcgatgggaatccctaaggcggacattacctgggagctgcctgacaagtcccacctgaaggctggcgtgcaagcccgactatatggaaacagatttctccacccgcaggggtccctgacaattcagcatgccacccagcgagatgccggtttctacaaatgcatggccaaaaacattctgggtagcgattctaagacgacttacatccacgttttcta

SEQ ID NO: 10927 - DNA, 3330 bp, synthetic construct
  misc_feature 1..3330: note = source = /note="Description of Artificial Sequence: Synthetic coding sequence"
  source 1..3330: mol_type = other DNA
atgcggctgcttctcctggtgcctttgctgttggcccctgcaccaggaagctctgcccctaaagtcagacgccagtccgatacatgggggccatggagtcaatggtccccctgcagccgcacctgtggaggcggagtctctttcagagagaggccctgttactcgcagcggagagacggagggtcctcatgcgtgggcccagccaggtcgcaccgatcttgtcggacagaatcttgccccgacggtgccagagacttcagagcagaacagtgcgcggaattcgacggagctgagttccaggggagaagataccggtggctgccatattattcggcgcctaacaagtgcgagctgaattgtatcccaaaaggggaaaatttttactataagcatagggaggccgtggttgatggtacaccctgcgaaccgggaaagagagatgtgtgcgtcgatggcagctgccgggttgtcggctgcgatcatgaattggactcttctaagcaggaagataaatgcctgaggtgcggaggcgatggaacgacctgctacccggtcgccggaacatttgacgcaaatgacctctcacggggatataaccagattctgatagtcccaatgggagcaacatctatcctgatagacgaggctgccgcaagcagaaattttcttgcagttaaaaacgtacggggagagtattacctaaatggtcattggacaatcgaggccgcacgcgcattgccagctgcctctacaatactgcattatgaacgcggagccgaaggtgacctggctccggagagactgcacgcccgtgggcctaccagtgaacctcttgttatcgaactcattagccaagagcctaacccaggagttcactatgaataccacctgcctctgcggcgaccatccccagggttctcctggagtcatggtagctggagtgactgctctgcagaatgtggtggcggacatcagagccgcctggttttttgcactatcgaccatgaggcatacccggatcacatgtgtcagaggcagcctcggcctgctgataggcgctcctgcaatctgcatccctgtccagaaacgaagcgctggaaagctggaccctgggccccatgctctgcaagctgcggcggtggatcacagagtagaagcgtttactgtatctccagcgatggcgcaggcatacaggaggccgtggaagaggcggagtgcgcgggactaccaggcaagcctccagctatacaggcctgtaatttgcagagatgcgccgcatggtcccccgaaccatggggggaatgcagtgtgagttgcggcgtgggagtccgtaaacgtagtgtcacctgtaggggtgagcgaggctctttgttgcataccgccgcttgttccttggaagaccgaccccctctgaccgaaccttgcgttcacgaggattgccctctgctgtccgaccaggcctggcatgttggtacttgggggttatgtagcaaatcttgttcaagcggtacccgtagaagacaagttatctgtgctatcggcccaccctcccactgcggttccctgcagcactctaaacccgtggacgtcgagccttgcaatactcagccatgccatctgccccaagaggtgccttccatgcaggacgtgcatactcctgctagcaatccttggatgccactgggcccacaggagtcacccgctagcgactctagagggcagtggtgggcagcccaggagcacccctcggctcggggtgatcacaggggggagagaggggaccctcgaggggaccaagggactcatctctctgctctggggcctgcacccagcttgcaacagccgccatatcagcaaccactgcgatccgggagcggacctcacgactgccgccattctcctcatggctgctgtcccgacggccacactgcctctctgggccctcagtggcagggatgcccgggagcgccttgccaacagtctcgatacggatgttgtccagatagagtgtccgtggccgagggccctcaccatgcagggtgtactaaatcatatggcggagattcaactgggggaatgccaaggtctcgggcagttgcaagcacggtgcacaacacccaccagccccaggcccagcaaaacgagccatcagaatgcagagggtcccagtttggatgctgctacgacaatgtggccactgcagccggaccacttggggagggttgcgttggccagccaagccacgcttaccccgtaaggtgcctcctgccaagtgctcatggcagctgtgcagattgggctgcacgctggtacttcgtggcctctgtgggccaatgcaatcggttttggtatggaggatgccatggcaatgccaacaacttcgcttccgaacaggagtgcatgtcctcctgccagggctccctacatgggcctcggcgaccacagccaggagcaagcggaaggagtacacacaccgacggcggaggtagcagccctgccggtgagcaggagccctctcaacaccggacaggtgctgccgtgcagcggaagccatggccatcgggcggactttggcgccaggatcagcaaccgggacctggagaagccccacacactcaggccttcggtgaatggccgtggggacaggaactaggctccagggctcccggactcggtggggacgccggatctcctgctcctcccttccactcatcgtcgtatcgaatatccctggctggtgtcgaaccctctctggtccaggcggcattggggcagcttgtgcgcttgagctgttccgacgacactgcccctgaatcacaggctgcctggcagaaagatggccaaccaatctcaagtgacagacaccgactgcaatttgatggaagcctcatcatccacccactccaagcagaggatgcgggaacttactcctgtggcagtactcgtccagggagagactcccagaaaattcagctccggatcatcggaggtgatatggccgtgttaagcgaagccgagctttcaagattcccgcaacccagggatcccgctcaggattttggccaggccggagcagccggacctctgggcgcaatcccatcctctcatcctcagcccgctaaccgactgcgcctcgaccagaatcagcctcgcgtggttgacgcatcccccggtcaacgtatcagaatgacgtgtagggccgaggggttcccccctcctgccattgagtggcagagggatggtcagccagtgagctcccccagtacccatcgaccggcacagggcccttggcagggcctccgtaggcccgcacgggcaggtcaactctag

SEQ ID NO: 10928 - DNA, 405 bp, synthetic construct
  misc_feature 1..405: note = source = /note="Description of Artificial Sequence: Synthetic coding sequence"
  source 1..405: mol_type = other DNA
atgaaatctgtgctactgctcacaacacttcttgtacccgcacatctggttgccgcttggtccaataattacgccgtggattgcccccagcattgtgactcatccgagtgtaagagctcacctcgctgcaagagaacagtattggatgattgcgggtgctgtcgggtatgtgccgcaggacgtggagaaacttgttatcgcactgtttccggtatggacgggatgaaatgcggtccaggcctgaggtgccagcccagcaacggagaggatccgtttggagaggaattcggaatttgtaaggagcacgacatggcctccggagacgggaacatcgtgcgggaggaggtagtgaaggaaaacgcggcaggatctcctgtcatgaggaagtggttaaaccctcggtag

SEQ ID NO: 10929 - DNA, 555 bp, synthetic construct
  misc_feature 1..555: note = source = /note="Description of Artificial Sequence: Synthetic coding sequence"
  source 1..555: mol_type = other DNA
atgaagtctgtgctcctactgaccaccttattggtgcctgctcacctggtggccgcatggtccaacaattacgctgtggactgccctcaacactgcgacagtagcgaatgtaaatctagtcccaggtgtaagagaacggttctggacgactgtggctgttgtagggtgtgcgcggcaggaaggggggagacctgttacagaaccgttagtggaatggacggcatgaaatgcggtcctggtctgagatgtcagcctagcaacggcgaggatccctttggagaggaattcggcatttgcaaggactgcccctacggtacttttggcatggactgccgagaaacatgcaactgtcaatctggaatttgcgacaggggaaccggcaagtgcctgaagttccccttttttcagtacagcgtcaccaagtcgagcaaccggttcgtctccctgacagaacatgacatggcctccggggacggaaacattgttagggaggaggtagtgaaggagaacgccgctggcagccctgtcatgcgcaagtggttgaaccctcgatag

SEQ ID NO: 10930 - DNA, 597 bp, synthetic construct
  misc_feature 1..597: note = source = /note="Description of Artificial Sequence: Synthetic coding sequence"
  source 1..597: mol_type = other DNA
atgccaataccagctagccccttgcatccgcctctcccatccctcttactttacctactgctggagctggcgggagtcacccacgtgttccacgtccagcaaactgaaatgagccagacagtctcaaccggcgagagtatcatactctcctgttccgttcctaacacactgcctaatggccctgtcttgtggttcaaggggaccggcccaaatcgaaagcttatatacaacttcaaacaggggaatttccccagggtgaaggaaataggggatactacgaagccaggcaacactgattttagtacccgtataagggaaattagcctcgccgacgccggtacctattattgcgtgaagttcattaagggccgtgccataaaggaatatcagtccggtcgcggaacccaggtattcgtgacggccgaacagaatcctcgccctcccaaaaacaggcccgcaggacgggctggttcccgcgcacaccatgatgcacatacctgtctctctgcactaccagaaaggaacagcactaattatttcgtccagccatgctgctgcctcaggttgttgggcctgacaggcttgctgtctaaatag

SEQ ID NO: 10931 - DNA, 594 bp, synthetic construct
  misc_feature 1..594: note = source = /note="Description of Artificial Sequence: Synthetic coding sequence"
  source 1..594: mol_type = other DNA
atgcccatccccgctagccccttgcatccgccactcccatctttgttactgtacctcttattggaactcgccggagttacacatgtgtttcacgtgcagcagactgagatgtcccagacagtctcaacgggtgagtccattattttgagttgttcagtgccaaatacactccccaacgggccagtcctgtggtttaaggggactggccctaaccgcaagttgatctataattttaagcaggggaattttcctcgcgtgaaagagataggagataccaccaagcccggtaacacggacttcagcacgagaataagggagatctcgttggccgacgcaggtacatactactgtgtgaagttcatcaagggacgggcaattaaggagtaccagtcagggcgtggaacgcaggtgttcgtgaccgagcagaaccccaggccgcctaagaaccggccagctggaagagcagggtctcgcgctcatcacgatgcacacacgtgcctttccgcactgcctgagcgtaacagtaccaactacttcgtacaaccttgttgctgccttcgcttacttggacttacagggctgctgtccaaatag

SEQ ID NO: 10932 - DNA, 1563 bp, synthetic construct
  misc_feature 1..1563: note = source = /note="Description of Artificial Sequence: Synthetic coding sequence"
  source 1..1563: mol_type = other DNA
atgaccacagatgataccgaagtgcctgctatgaccctggctcctgggcacgccgcactggagacccaaacgctgtccgccgagacctctagtagagcaagtaccccggctgggcctatccctgaagccgagactaggggggctaagcgaatctcccctgccagagagactaggagtttcacaaagacctcaccgaactttatggtattaattgcaacctctgtggaaacaagcgccgcttcagggtccccagaaggagctggaatgaccacggtgcagacaatcaccgggtccgatccccgtgaggcgatctttgacaccctgtgcacggatgacatctccgaagaggccaagactctcaccatggacatcctgacgttggcccacacatctacagaggcaaaaggcctgtctagcgagtcttctgcctcctctgatggaccccatccagtaatcaccccctcccgtgcttcagaatccagcgctagctctgacggcccacatccagtgatcaccccatccagagcttctgaatcgtcagcttcttcagatggaccacaccctgtgatcactcctagccgggcttccgaatcatcggccagctctgatggtccacacccagtcataactccttcctggtctccagggtctgacgtgaccctgctggctgaagccctcgtgaccgtgacaaacatagaagtaatcaattgcagcataacagaaattgaaaccaccacgagtagcattccaggagcctcagataccgatctcattcccaccgaaggggttaaggctagttctacaagtgatccgcctgccttgcctgatagtaccaataccaagccccacattacggaggtgacagccagtgcagagactctcagtactgccggtaccaccgagagtgctgctcctgacgcgacaatcgggacgccactgcccactaatagtacgatcgagagagaggtcacagctccaggcgcaacaacactcagtggggcactcgccacaggaaatcctctcgaagaaactagtgccctgtccgtagagactccatcatacgtgaaggtgagtggtgctgctcctgtctccattgaggcaggctctgccgtaggaaagactaccagttttgcgggatccagcgcctcctcctacagccccttagaggctgcgttgaaaaacttcaccccaagtgagaccctgacaacggacatcgcaacaaaaggcccattcccgactagcagggaccccctcccttccgttccacctaccaccacaaactccagcaggggcacaaactcaacactggcgaaaattacgacgtccgccaagacgacaatgaaaccaccaacggccacaccgaccaccgcacgcacgcgacccaccacagatgtttccgctggggagaacggaggcttcctgctgctcagactgtctgtggccagtccagaagaccttaccgacccccgagtggcggagcggctgatgcagcagctgcaccgagagcttcatgcccatgctcctcatttccaggtgtctttgctgagggtccgcaggggatag

SEQ ID NO: 10933 - DNA, 600 bp, synthetic construct
  misc_feature 1..600: note = source = /note="Description of Artificial Sequence: Synthetic coding sequence"
  source 1..600: mol_type = other DNA
atgctctggagacagttaatctactggcagctgctggccctattctttctgcccttttgtctatgtcaggacgagtatatggagtccccccagacagggggattgcccccagactgtagcaaatgctgccaccatggaaacaatggaaacaacggtgccacaggccacaagggtgaaaaagggtaccctggcatcccgcctgaactgcagattgcgttcatggctagcctcgcaacacactttagtaaccagaacagcggtatcattttttcctccgttgagacaaacataggtaatttcttcgacgtcatgactggcaggttcggcgctcccgtttcaggagtgtacttttttacattctccatgatgaaacatgaagacgttgaagaggtgtatgtgtatctgatgcataacggaaacactgtcttttcaatgtattcttacgaaatgaaggggaagagcgatacgtccagtaatcatgcagtgttgaagttagctaagggagacgaagtgtggctgagaatgggaaacggggctctgcacggcgatcatcagaggtttagcacatttgcaggattcctgctgttcgaaaccaagtag

SEQ ID NO: 10934 - DNA, 960 bp, synthetic construct
  misc_feature 1..960: note = source = /note="Description of Artificial Sequence: Synthetic coding sequence"
  source 1..960: mol_type = other DNA
atgctatggcgacagctgatttactggcaacttttggctctgttttttctgccattttgtttgtgccaggatgagtatatggaggtctctggcagaacaaacaaagttgtggccaggatcgtccagagccaccagcagacgggacgaagcggctcccggcgagaaaaggtgcgcgaacggtctcatcccaagaccgggaccgtggacaacaatacctccacagaccttaagtcactccgccctgatgagctgcctcaccccgaagtcgacgatttagcacagataaccactttctggggccaatcgcctcagacaggtggcctgccacctgactgctcaaagtgctgccacggcgattattccttccggggataccagggacctcctggccctcccggaccgcctggaatccccggaaaccacggaaacaatggtaacaacggggcaaccggccacgaaggggctaagggggagaagggggacaagggggacctgggcccacgtggcgagagaggtcagcacggcccaaagggagagaagggctaccctgggattccgcctgaattacagattgcttttatggcgagcctagccacccatttttccaaccagaattccggcatcattttctccagtgttgaaacgaacattggcaatttctttgacgtcatgactggcagattcggcgctcctgtctccggtgtttacttttttactttttcaatgatgaagcatgaggacgtggaagaagtgtatgtttatctcatgcataatgggaatacggtcttcagcatgtattcctatgagatgaaaggcaagtctgacacatcgtccaatcatgccgtgctgaagctggcgaagggcgatgaggtctggctgagaatggggaatggcgctctgcacggagatcaccaacgtttttctacttttgccggttttctattattcgaaaccaagtag

SEQ ID NO: 10935 - DNA, 855 bp, synthetic construct
  misc_feature 1..855: note = source = /note="Description of Artificial Sequence: Synthetic coding sequence"
  source 1..855: mol_type = other DNA
atgactaaatcttctctccgcccattgcagaagcagagcccacagaccgggggtctccctcctgattgctccaaatgctgccatggcgactatagctttaggggataccagggtcctcccggacctccaggcccacccggaattccgggtaatcatgggaataacggcaacaatggcgcaaccgggcacgaaggcgcaaaaggagagaagggcgacaagggcgacctgggtccacggggagaacgcggacaacacgggccaaaaggcgaaaagggataccccggaattcctcctgagctgcagatagcctttatggcctccttagccactcacttctcaaaccagaattcaggcattattttcagttcagtagagactaacattggcaatttcttcgacgtcatgacaggacggttcggcgctcccgtgtcgggagtttacttttttaccttctccatgatgaaacatgaggatgtcgaggaggtgtatgtatatctgatgcacaacgggaacactgtatttagcatgtactcctacgaaatgaaagggaaaagcgacacttcttccaatcacgctgttctgaagttagcaaaaggggacgaggtttggctgcgcatgggcaacggagctctccatggggaccaccaaaggttcagcaccttcgccggattcctgctgttcgagactaaatgccacggagagacaccagccggacctagggacagcgcagctgggaaatctaaagcctatctttgtcaggctgagtggatttggccagttcgcaagctgttacccgtgtcctggcccaggtatcagctctttggatttgtccgatggaaggagcaacatatctag

SEQ ID NO: 10936 - DNA, 234 bp, synthetic construct
  misc_feature 1..234: note = source = /note="Description of Artificial Sequence: Synthetic coding sequence"
  source 1..234: mol_type = other DNA
atggccactcggtctgttctccttgccctggtggtgttgaacctgctcttttatgtgcctcccggtcggtcaggccctaatgtttacatccagaagatttttgcctcatgctggcgcctccagggaacgtgccggcctaagtgcctgaaaaatgagcagtatcgaatactctgcgacacaatccacttgtgctgtgtcaacccaaagtacctccccatcctgacaggaaaatag

SEQ ID NO: 10937 - DNA, 237 bp, synthetic construct
  misc_feature 1..237: note = source = /note="Description of Artificial Sequence: Synthetic coding sequence"
  source 1..237: mol_type = other DNA
atgaacttatgcctatctgcactgctcttcttcctggtcatcctgcttccctctggaaaggggatgtttgggaacgacggagtgaaagtcaggacttgcacatcccagaaagcggtttgcttctttggatgtcctccaggctatagatggatcgctttctgtcacaacatcctgagctgttgcaaaaatatgactcggttccaaccaccccaagcaaaggacccttgggtgcactag

SEQ ID NO: 10938 - DNA, 627 bp, synthetic construct
  misc_feature 1..627: note = source = /note="Description of Artificial Sequence: Synthetic coding sequence"
  source 1..627: mol_type = other DNA
atgggggcacaaggagcccaggagagtattaaagccatgtggagagtgccgggaaccactcgacgtcctgtaaccggcgaaagcccgggaatgcatcgccctgaagctatgcttcttctgctcacactggctctgctggggggaccgacttgggctgggaaaatgtacgggccaggcggaggtaagtatttcagcacaacagaagactacgaccatgaaatcaccgggctgagagtgtccgtgggactgctgctggtgaagagcgtgcaagtgaagcttggagattcttgggacgtgaaacttggggctctgggtggaaatacacaagaagttaccttacagcccggtgaatatattaccaaagtgtttgtggccttccaggcctttctgcggggaatggtcatgtacactagcaaagacaggtacttttactttggaaagctggacggccagatttccagtgcgtacccttctcaggaggggcaggtcttagtggggatttacgggcagtatcagttgctcgggatcaagagtatcggattcgaatggaattatccacttgaagaacccacgaccgaaccaccagtgaatctcacctacagcgctaacagtcctgtcgggcgatag

SEQ ID NO: 10939 - DNA, 288 bp, synthetic construct
  misc_feature 1..288: note = source = /note="Description of Artificial Sequence: Synthetic coding sequence"
  source 1..288: mol_type = other DNA
atgaagttcttgctgctagtgctggcagccttgggctttctgactcaggttattcctgcgagcgccggtggctctaaatgcgtttccaacacgcccggttattgccgcacttgttgccattggggggagactgcactgttcatgtgcaatgcgtcacgcaagtgttgcatatcttactcattcctccctaaacccgatctgccccaactgattggcaatcactggcagagcagaagaaggaatactcagaggaaggataaaaagcaacagaccacagttaccagttag

SEQ ID NO: 10940 - DNA, 339 bp, synthetic construct
  misc_feature 1..339: note = source = /note="Description of Artificial Sequence: Synthetic coding sequence"
  source 1..339: mol_type = other DNA
atgttcgtgctactatatgtaactagttttgcgatatgcgctagcggccagcctagaggtaatcagctgaaaggcgagaactactctccacgctacatatgctcaatacctggccttcccggtccccctggccctcccggagccaatgggagccccggtcctcacggccgaattggtctgcctggcagagacggtagagacggaaggaaaggggagaaaggggagaagggaactgccggtctgaggggcaaaactggcccattgggcctggctggcgaaaaaggtgaccagggggagactggcaagaagggtccgatcggacccgaaggtgagaaatag

SEQ ID NO: 10941 - DNA, 300 bp, synthetic construct
  misc_feature 1..300: note = source = /note="Description of Artificial Sequence: Synthetic coding sequence"
  source 1..300: mol_type = other DNA
atgggcctgtttatgattatcgccatcctactgttccaaaagccaactgtcaccgagcagttaaagaagtgttggaataattacgtacagggacattgccgcaaaatttgtcgggtgaatgaagtgccagaagccttgtgcgagaatggccgttattgctgcctgaacatcaaggagctggaggcctgtaagaaaatcaccaagcctcccagacccaagcctgccactcttgcactgactctgcaggactatgtgacaatcatagagaactttccgagtttaaagactcagtccacatag

SEQ ID NO: 10942 - DNA, 336 bp, synthetic construct
  misc_feature 1..336: note = source = /note="Description of Artificial Sequence: Synthetic coding sequence"
  source 1..336: mol_type = other DNA
atgaaaagcctgctatttacactagcagtttttatgctgttggcacagctggtgtcaggtaactggtacgttaaaaaatgcctgaacgatgtgggaatttgtaaaaagaaatgcaagcccgaagaaatgcatgtcaagaatgggtgggctatgtgcggcaagcagcgcgattgttgtgtgcctgccgaccggagggcgaattaccccgtattttgtgtccaaactaagaccacacgcatctccacagttacagctactactgctacgacaaccctcatgatgactacagcctctatgtcatccatggcccctaccccggtatcccccaccggatag

SEQ ID NO: 10943 - DNA, 1698 bp, synthetic construct
  misc_feature 1..1698: note = source = /note="Description of Artificial Sequence: Synthetic coding sequence"
  source 1..1698: mol_type = other DNA
atggaggattctgattccgcagctaagcaactcggcctggccgaggcggcagcagtagccgcagctgccgctgtcgcggctgcggcagctgctgctgccggaggcgaagccgaggagccagtgttgtcccgcgatgaagactctgaagaggacgctgatagcgaggctgaacgggaaaccccccgagttacagctgtcgccgtaatggccgcagagcccggtcatatggatatgggagccgaagcactgccgggtccggacgaagccgcagccgcagccgctttcgctgaagtcaccactgtgacagtggccaatgtgggagcagccgctgataacgtgtttaccacttcagtggcaaacgctgcctcaatcagtgggcacgtgctgagcggcagaacagctctgcaaatcggcgattcactgaataccgagaaagcaacactgatcgtcgttcacacggacggctctattgtggaaacaaccgggcttaaaggacccgctgctcctctgactcccggaccacagagtcctcctacacctttagcaccagggcaggagaagggcggaaccaagtataattgggacccttccgtgtacgacagcgagctgcctgttaggtgtaggaacatttctggaactctttataagaaccggctcgggagtgggggacggggaaggtgtatcaagcaaggcgaaaattggtacagccccaccgagtttgaagccatggcaggcagggcaagctctaaagactggaaacggtccatccggtatgctggcaggccactgcaatgtctgatccaggacgggatactcaacccacacgccgcaagttgcacctgtgcggcatgctgtgacgacatgacactgagcggtccggtaagattattcgtcccttacaaaagaaggaagaaagaaaatgaactgccaactacccccgtgaaaaaggacagtcctaagaacatcactctcctgcctgcaacggccgcaacaacgtttaccgtgactccttctggccaaatcacgacctccggagcactcacctttgatcgggcaagcactgtagaggccacagctgtgattagcgagagccccgctcaaggagacgttttcgctggggctacagtccaggaagcaagcgtacagcccccttgtcgcgcatcccatcccgaaccacattatccaggttatcaggatagttgccagattgccccattcccagaggctgccctccccacctctcatccaaagattgtgcttacttctcttccagccttagcagtgcccccacctacaccaacaaaagcagctcccccagccctagtaaacggtctggagctgtcagagcctcggtcatggctctatttggaggaaatggtgaactctctgctgaacacagcccagcagctgaaaacgctttttgaacaagccaagcatgccagcacctaccgggaggccgcaacaaatcaggctaaaatacatgccgacgctgaacgcaaagagcaaagctgcgttaactgtgggagggaggctatgtctgaatgcaccggctgtcacaaagtgaactactgttcgaccttctgtcagcgcaaagattggaaggatcaccagcacatctgtggtcagtcagccgctgttactgtgcaagcagacgaggttcacgtggccgaaagcgtgatggaaaaggtgaccgtgtag

SEQ ID NO: 10944 - DNA, 471 bp, synthetic construct
  misc_feature 1..471: note = source = /note="Description of Artificial Sequence: Synthetic coding sequence"
  source 1..471: mol_type = other DNA
atgaatattctcatgctgacctttatcatttgtgggttgctgacacgggtcacgaaaggatcctttgagccccagaaatgctggaagaacaatgtaggccactgccgcagacggtgtcttgacactgaacggtatattctgctgtgcaggaacaaattgtcatgctgtatctccatcatatcccatgagtatacaaggaggcccgcttttcccgtcattcatctggaggacattaccttggattactccgatgtcgacagtttcaccggtagccccgtgtcgatgttgaacgacctaataacatttgacaccactaagttcggcgaaactatgacaccagaaacgaatacccccgaaaccactatgcccccatcagaagctacaactccagaaacaaccatgcccccatctgagaccgcaaccagcgaaacaatgccacctccaagccaaacggctctgacccacaattag

SEQ ID NO: 10945 - DNA, 837 bp, synthetic construct
  misc_feature 1..837: note = source = /note="Description of Artificial Sequence: Synthetic coding sequence"
  source 1..837: mol_type = other DNA
atggggggaccaagggccctgttggccgctctctgggccctggaggccgcagggacagccgctcttcggataggagcatttaacatacaatccttcggtgactctaaagtatccgacccagcttgcggaagtatcattgccaagatcctagcgggatacgatttggctctagtgcaagaagttcgggatcccgatttgtccgccgtttcagctctcatggaacagatcaattcagttagtgaacatgagtactcattcgtgtccagtcaacctcttgggagagaccagtacaaagagatgtatctgtttgtctaccgcaaggatgcagtgagtgttgtggatacctatctatacccggatccagaggacgtgttcagcagagagccctttgtggtgaaattttctgccccaggcacagcccaaaatttagtgctcatccccctgcacgctgcaccacaccaagccgttgcagaaatcgacgcattgtacgacgtgtatctggatgtgattgataagtggggtactgacgacatgctattcctgggcgacttcaatgccgattgtagttacgtcagagctcaggactgggcagccatccgactgcgctctagtgaagtttttaagtggctcattccagactcagcggacaccacggtcggaaacagtgattgtgcttatgacaggatcgttgcctgtggagcccgtcttagaaggtccctgaagccccaaagtgcaaccgtccatgatttccaggaagagttcggcttggaccagacccaggccttggccattagcgatcacttccccgttgaggtgactctgaagttccaccgctag

SEQ ID NO: 10946 - DNA, 3039 bp, synthetic construct
  misc_feature 1..3039: note = source = /note="Description of Artificial Sequence: Synthetic coding sequence"
  source 1..3039: mol_type = other DNA
atggctgaagcggctctggaggctgtacgctctgagctgagggaatttccagccgctgccagagagttgtgcgtgcccctggccgtcccctacctggataaacctccaacaccactccatttttaccgagactgggtatgtccaaacagaccgtgtattatccgaaatgcgctgcagcattggcccgcactgcagaaatggtcactgccttactttcgggctacagttggttcaactgaggtttctgtggcagtgacacccgacggctatgccgacgctgtcagaggcgatcgctttatgatgcccgcagagagaagactgcctctgtccttcgtactcgatgtactggagggccgtgctcaacacccgggagtcctgtacgtccaaaagcagtgctccaaccttcccagcgagctccctcaacttctacccgacctagagtcccatgttccgtgggcatctgaagcactgggcaagatgcccgatgcagtaaatttctggttgggcgaagcagcagccgttacaagccttcacaaggatcattacgagaacttgtactgcgtggtatccggtgagaagcactttttattccacccgccttccgacagaccgttcattccctatgagctctacactccggctacttaccagctgacggaagagggtaccttcaaagtggtggatgaagaagcgatggaaaaggccgaggtgtctcgcacgtgcctcctcacagtgcgggtactgcaagcccaccgactgcctagtaaggatctggtaaccccgagcgactgctatgttaccctctggttgccaaccgcctgttctcacaggctccaaacccgtacagtcaaaaattcatcgtctccagtgtggaatcagagttttcacttcagaatccaccggcaactgaagaacgtaatggagctgaaggtttttgaccaggatctggtaacaggcgacgaccccgtgcttagcgtgctttttgacgcaggcactcttcgcgcaggggagtttagacgagaatccttctccttgtccccacagggagaaggcagactggaagtggagttcagactgcagtctctggccgaccggggagaatggctcgtgtctaacggagtgctcgtggctcgcgaacttagctgtttgcacgtgcaacttgaggaaacgggtgaccagaagagtagtgaacaccgtgtccaactggtggtgcctggcagttgcgaaggtccccaggaggcatccgtggggaccggaacattcaggtttcactgccccgcttgttgggagcaggagctttccatacgcctccaggacgctcccgaagaacagctgaaggctccactgagcgctcttccatccgggcaggtcgtgcggctagtgttcccaaccagccaggagccactgatgcgtgtcgaacttaagaaggaagccggactcagggagttggctgtccggctggggtttggtccttgtgccgaagaacaggcatttctatcacgtagaaaacaggtagtcgcagcagccttgcgacaggctctgcagttagacggcgacctccaggaggatgagatccctgttgtggctattatggcaactggaggaggcatacgcgctatgacctctctctatggtcagctggctgggttgaaggaactgggcttgctagactgtgtttcctatatcactggcgcatccggatcaacatgggccctggctaatctttatgaggatcccgagtggtcacagaaggaccttgcagggccaaccgagctgctcaaaacacaggtgacaaaaaataagcttggggtgctcgccccaagccagctccagcgctatcggcaggaactcgccgagagggcacggctggggtaccctagttgtttcactaacttgtgggcgctgattaacgaagctttattgcacgatgagcctcacgatcacaagctatccgaccagagagaggccttgtcccatggccaaaaccctcttcctatctactgcgctttgaacactaaaggccagtcactgacaactttcgaattcggcgagtggtgcgaatttagcccatacgaagtcggtttccccaaatatggcgcattcattccttccgagctgtttggctctgagttttttatgggtcaactcatgaaacggctccccgagtcacggatctgctttctggaaggcatttggtctaacctctatgcggcaaacctgcaggactccttatattgggcctctgagccaagtcagttctgggatagatgggtgagaaaccaggctaacctggataaggagcaggtgcctttattgaaaatcgaggaaccaccatcgactgccggtaggattgcggagtttttcaccgacctgctgacatggcggcctcttgcacaggctacccacaatttcctacgtggactgcactttcacaaggattattttcaacacccgcacttctccacctggaaagccaccaccctggatggcctcccaaatcaactgaccccaagcgagccacatctgtgtcttttggacgtcggatacctgatcaatacctcatgtcttccattgctccaacccactcgggatgtagacctaattctctccctggattacaatcttcatggcgcttttcaacagcttcagcttctgggccgattttgtcaggaacagggaatccccttcccccctatctctccaagtcctgaagaacagctgcagcccagagaatgccacacattctcagatccaacctgtcctggagctcctgccgtgcttcattttcctcttgtgtctgactcatttagagaatacagcgcccctggagtgcggcgtactcccgaggaggccgcagccggtgaagtcaacctttccagcagcgacagcccttatcattatactaaagtcacctacagccaagaggacgtggacaagctgctccacctcacacactataatgtatgtaataaccaggagcagctgctcgaggctctgcgacaagctgttcagagacgtcgccagcggcgaccccactag

SEQ ID NO: 10947 - DNA, 1548 bp, synthetic construct
  misc_feature 1..1548: note = source = /note="Description of Artificial Sequence: Synthetic coding sequence"
  source 1..1548: mol_type = other DNA
atggcctggccatactttctggactgccacaggtactttactcgggaagacgaaggttgttatgaccctctagagaaactccggggaggcctggaagcagatgaagctctcccaagtggactgccgcctactttcatccgtttctcacaccacagttatgcgcaaatggtgcgagtcttgagacgaacagcctctcgatgcgcacacgtggcacggacttatagcatcggtcgcagtttcgacgggagagaattgctcgtgattgagttttcttcccgccctggtcagcatgaattgatggaacctgaggtgaaactgattgggaatatacatggcaatgaagtggcaggccgagaaatgctcatttacctcgcacagtatctgtgttccgagtatttgcttgggaatcccagaattcagcggctgctgaacacaaccaggatacatcttttgccatccatgaatcctgacgggtacgaggtggcagctgctgagggagcgggttacaacggctggacttcaggaagacagaacgcacagaacctcgatttaaatagaaactttccggacttgacttccgagtactaccgcttggccgagacgagaggcgctcgcagcgaccatatccctattccacagcactactggtgggggaaggttgcacccgagaccaaggcaattatgaagtggatgcagacgattcctttcgtgctgagcgcatctctccatggaggagacctcgtggtatcttaccccttcgatttcagcaaacaccctcaggaagagaaaatgtttagcccaacacctgacgagaagatgtttaaacttctgtcacgggcttatgccgatgttcacccaatgatgatggaccggtctgaaaacagatgtggcggaaactttctcaaacggggtagtattatcaacggagcagactggtactccttcacaggaggcatgtcagacttcaactacctacatacgaattgcttcgagattacagtagagctggggtgtgtgaagtttcctcccgaggaagccctctacatactttggcaacacaataaggagtctctgcttaacttcgtagaaaccgtgcatagaggaattaaaggggtggttaccgacaaatttgggaagccagtgaaaaacgccaggattagtgtgaaggggatcaggcacgatatcacgacggcccctgacggggattactggcgcctgttaccgcctggcatccatatcgttattgcacaggctccgggatacgccaaggtgatcaaaaaggtgattattccagccagaatgaaacgcgcagggcgtgttgattttattctccaaccactgggcatgggtccaaaaaacttcattcacggactgcgcaggactggaccccatgacccgttggggggagcgtcctcccttggggaagcaaccgagccagatcctctgcgtgcgagacggcagccctctgccgatggtagtaaaccatggtggtggtcttacttcacctctctatccacacacaggccacgttggctgctgaagtattag

SEQ ID NO: 10948 - DNA, 285 bp, synthetic construct
  misc_feature 1..285: note = source = /note="Description of Artificial Sequence: Synthetic coding sequence"
  source 1..285: mol_type = other DNA
atgcgcactctagctattttggcggcaatcctgcttgtggcactacaagctcaagccgagccactgcaggcacgagccgacgaagtcgcggctgctcccgaacagatagcggctgacatccctgaggtggtggtgagtctggcctgggacgagagcctggcccctaagcatcccggttctcgtaagaacatggcatgctactgtcgcattccagcatgtatagctggtgagaggaggtatgggacttgtatctatcaaggaaggctttgggccttttgttgctag

SEQ ID NO: 10949 - DNA, 420 bp, synthetic construct
  misc_feature 1..420: note = source = /note="Description of Artificial Sequence: Synthetic coding sequence"
  source 1..420: mol_type = other DNA
atggggaatcccggaggagtcggcagcgaacggatgagagttgctcgcaggacgcgtaacgtttgtcgatgtcccagggctgccggacctggcgtacctgagccccgtgccgcacctctgcctttactcgcaatggcacctcccccagcctgccggtcaccaatgtcgccgccacctcctcccctgctgttgctattgctgtcgctcgctttacttggcgcaagggctagagctgaacccgcaggctctgccgtaccagcccaaagcagaccctgtgttgactgccatgcattcgagttcatgcagagagccctgcaggacctgcgcaaaacagcttgttccctcgacgcacggactgagacactgctgttgcaagcagaaaggagggctctttgtgcgtgctggcctgcaggccattag

SEQ ID NO: 10950 - DNA, 471 bp, synthetic construct
  misc_feature 1..471: note = source = /note="Description of Artificial Sequence: Synthetic coding sequence"
  source 1..471: mol_type = other DNA
atggccccagccgttacccgtcttctgttcttgcaactcgtcctgggtcccacactcgtgatggacattaagatgcagattgggagccgcaatttttacacactgagtatcgattaccctcgcgtgaactaccctaaggggtttcggggatattgtaacgggttgatgtcttatatgagaggtaaaatgcagaacagcgactgtcccaagattcactatgtgatacacgctccctggaaagcgatacaaaagttttgcaagtactccgattctttctgcgagaattacaacgaatattgtacactcacccaggattccttaccgattaccgtgtgtagtctttcccaccaacagcctccaacttcctgctattacaattccacactgacaaatcagaaactttacctcctttgcagtcgtaaatacgaagccgatcctatcggcattgcaggcctctactctgggatttag

SEQ ID NO: 10951 - DNA, 444 bp, synthetic construct
  misc_feature 1..444: note = source = /note="Description of Artificial Sequence: Synthetic coding sequence"
  source 1..444: mol_type = other DNA
atgatcattatggtgattatctttttggtgcttctcttctgggagaacgaagtgaacgacgaggctgttatgagtaccctggagcaccttcacgtcgactaccctcagaacgacgtccctgtccccgctagatactgtaaccacatgataatccaacgggtcattcgggaaccagaccatacgtgtaagaaagaacatgtcttcatacacgaacggccaagaaagattaacggtatctgcatctctccaaaaaaggtggcatgtcagaatctaagcgccattttttgctttcagtccgaaacaaagtttaagatgactgtttgtcagctgatagaaggaactaggtatcctgcatgtcgataccattatagcccaacagaaggatttgtgctggtgacttgcgatgatctgaggcctgattcattcctcggttatgtcaagtag

SEQ ID NO: 10952 - DNA, 453 bp, synthetic construct
  misc_feature 1..453: note = source = /note="Description of Artificial Sequence: Synthetic coding sequence"
  source 1..453: mol_type = other DNA
atgagatttatggccggacccgcaggatcacaatccctgggacccctgtgttttcactcctcccctcaggcactgtacacagttctcttaatcgtgcttgttatgatgtcactggtttttgggaaatttgtgccggtgaactgggagccccctcaaccactgccctttcccaagtacctgcgctgctaccgctgtctactcgaaacaaaagaactgggatgtcttctggggagcgacatctgtctaacccccgctggtagttcttgcatcactttgcataagaagaactctagcggctcagacgtaatggtgagcgactgtcgctctaaagagcagatgtctgattgttcgaacacaaggacctccccagtgagtggattttggatcttttctcagtactgcttcctggacttttgcaatgacccacagaaccgcggattgtatactccctag

SEQ ID NO: 10953 - DNA, 2742 bp, synthetic construct
  misc_feature 1..2742: note = source = /note="Description of Artificial Sequence: Synthetic coding sequence"
  source 1..2742: mol_type = other DNA
atgggccctgaggccctgagttctctgttgctgttgttgctggtcgcgagtggagacgccgatatgaagggacactttgacccggctaagtgccgctatgccctcggcatgcaggaccgcaccattcccgacagtgatattagcgcatctagctcctggtccgactcaactgcagcacgccattctcggttggagtcttccgatggcgatggcgcttggtgccccgctggttccgtgtttcctaaagaagaagaatacttacaggtggacctgcagcggcttcaccttgtggccctcgtcgggactcagggccgacatgctgggggattgggcaaagagttctcccggtcataccgcttaagatactcaagagacggaagacggtggatgggctggaaggacagatggggacaggaggtgatcagcggcaacgaagatcccgaaggggtggtattaaaggacctgggcccacccatggtcgcacgcctcgtccggttctacccgagagcggatcgggtgatgtccgtgtgtttaagagttgagctttacgggtgtctatggcgcgacgggctgctttcttatacagctccagtgggacagactatgtatctgtccgaggctgtatatctgaacgatagcacgtatgatggacacacagtggggggtttgcagtacggaggtctaggacagctggctgatggagtcgtgggcctggatgatttcaggaagtcccaagaattgcgcgtttggccaggctatgattatgttggctggtccaatcacagcttcagctcaggttatgttgagatggagtttgagtttgacaggctcagagctttccaggctatgcaggttcattgcaacaacatgcataccttgggagctaggctcccgggtggagttgagtgtcggttcaggcgtgggccagccatggcttgggagggcgagcccatgcgccataacctgggtggtaacctaggagatccgagggcgagggccgtctccgtcccccttggcggacgggtggccagattcttacagtgtaggtttcttttcgctgggccatggctcctgttttccgagatttcctttattagcgacgttgttaataattccagcccggcactcggaggtacctttcctcccgctccgtggtggcctccgggaccgcctccaactaatttcagctctttggaactcgaaccacggggacagcaacctgtggcgaaggcagaaggatcccctactgctattctgattggctgtctggtcgctataattctcttattactgctcatcattgccctcatgctctggcggttgcattggagaagactgctcagcaaggcagaaaggcgagtgctcgaggaagaacttactgtgcacttgtctgtgcctggagacacaatcctgattaataacaggcctggccctagagaaccaccaccatatcaggagccccgtcctagaggtaacccaccacactccgctccgtgcgtgccgaacggatcggccctcttgctgtccaatccggcataccgcctgttattggcaacttatgcgaggccaccgcgtgggcctggaccaccaacccccgcatgggcgaaacccaccaacacgcaagcatattctggcgactacatggaaccagaaaagcccggagccccactgctacccccacctccgcagaactcagtaccccactacgcagaggccgatattgtgaccctacagggcgtaacagggggaaatacttatgccgttcccgcactgccccctggcgctgtgggagacgggcctcccagggtcgactttccacgctctcgattaaggtttaaagagaaactcggggaaggccagttcggtgaggtccacctgtgtgaggtcgattcccctcaggatttggtgtcactagactttccactgaatgtgcggaaggggcacccactgctggtcgctgtgaaaattctgagacccgatgctaccaagaacgcacggaacgacttcttaaaagaagtaaaaatcatgagccggctgaaagaccccaatattatccgtctcctgggtgtctgtgtccaagacgaccccttgtgcatgatcaccgactacatggaaaacggcgacctgaaccagtttctgtctgcccaccagttagaagacaaagccgcagagggcgcaccgggagatggtcaggccgctcaaggacctactatttcttaccctatgctcctgcacgtcgccgcacagatcgctagtgggatgcgatacctcgctactttgaacttcgtccaccgtgatcttgcaacaagaaattgcctggtgggagaaaacttcacgattaagatagcagacttcggcatgtcccgcaatttatatgcgggagactactacagagtacaggggagagctgttctgccaattagatggatggcctgggagtgcatcctgatgggaaagtttactacagcgtctgacgtgtgggcttttggagtgaccctgtgggaagttctcatgttatgtagagctcagccttttggccaattgacagatgaacaggtgattgagaacgccggagagttctttagggatcagggacgccaggtgtatctctctcgccctcctgcctgcccacagggactgtatgagttaatgctccggtgttggtcaagagaatccgagcagaggccgccattctcccagctgcaccgctttctggccgaggacgcgctgaacacagtctag

SEQ ID NO: 10954 - DNA, 453 bp, synthetic construct
  misc_feature 1..453: note = source = /note="Description of Artificial Sequence: Synthetic coding sequence"
  source 1..453: mol_type = other DNA
atgcggttcatggctggtcccgctgggagccagtccttgggtcccctgtgctttcattcctctccccaagcgttatacactgttctgctcatcgtgctggtaatgatgtcgctggtcttcggaaagtttgtgcccgtcaattgggaacccccacagccactgcccttccccaaatatctcagatgttatcgttgcctgctggagactaaggagctgggctgtctgttggggtctgacatatgtctgaccccagctggcagctcctgtattactctgcataagaaaaattcttccggcagtgacgtgatggtgagtgactgtcggtccaaggagcaaatgtctgactgtagcaatacacgcacttcccccgtctccggtttttggatcttcagccagtattgcttcctcgatttctgcaatgaccctcagaataggggcctctacactccttag

SEQ ID NO: 10955 - DNA, 567 bp, synthetic construct
  misc_feature 1..567: note = source = /note="Description of Artificial Sequence: Synthetic coding sequence"
  source 1..567: mol_type = other DNA
atgtttcatcagatctgggccgcacttctgtacttctacggaataattctaaattccatttaccagtgtcccgaacacagtcagctgactaccctgggcgtcgatggtaaggaattccctgaggtgcaccttggacagtggtatttcatcgccggtgccgcaccaactaaggaggaacttgcaacttttgacccagtggataacattgtcttcaacatggcagcaggctctgctcccatgcaactccatctgcgggcaacaataaggatgaaggacggactgtgcgtgcccaggaaatggatctatcacctgacggagggctctaccgatctcagaaccgaggggcgacccgacatgaaaaccgagctcttctcatcttcctgcccaggcggaatcatgttgaacgaaacaggtcaaggatatcaaagattcctgttatataatcggtccccccatccgccagagaagtgcgttgaggaattcaaatctcttacgtcctgcctcgacagtaaggccttcttacttacccccagaaatcaggaggcctgcgagctgagcaataattag

SEQ ID NO: 10956 - DNA, 2535 bp, synthetic construct
  misc_feature 1..2535: note = source = /note="Description of Artificial Sequence: Synthetic coding sequence"
  source 1..2535: mol_type = other DNA
atggggccaggagcaccgttcgcccgagtgggttggcctctgcccctgctggtggttatggccgctggtgtggcccctgtttgggcgtcacactcccctcatctgccaaggccacacagccgggtcccaccccacccttcatccgaaaggcgagctgtgtacatcggagccttatttccgatgtccggcggttggcccggtggccaggcttgccagcctgctgtagagatggctctggaggatgtgaatagtcggcgagacattctccctgactatgagttgaaactgatccatcacgactctaagtgcgatccagggcaggcaacaaaatacctttacgaactgctgtataacgaccctatcaagataattcttatgccagggtgttccagtgtgagtacactggtcgctgaggcagctcggatgtggaatctcatcgtgctgagctacggttcttcctctcctgcactaagcaaccgacaacgcttcccgactttttttcgaactcatccaagcgcaacgttacacaaccctaccagagttaagctgttcgaaaagtggggatggaaaaagattgctacaattcagcagaccacggaggttttcactagtacactagatgatctggaggagagggtcaaagaagctggcattgagataacttttcgacaaagctttttcagtgatcctgctgtgccggtaaagaatcttaaaagacaggacgccagaataattgtgggactattctacgagacggaggcacgaaaagttttctgcgaagtatacaaggagagattgtttgggaagaagtatgtctggtttcttatagggtggtatgccgacaactggtttaaaatctatgacccctctatcaattgtacggttgatgaaatgactgaggctgtggaagggcacattactactgagatcgtgatgctgaaccccgctaatacccgatcaatcagcaatatgacctctcaagaattcgtcgaaaagttgaccaaacgcttaaagcgccacccggaggaaactggcggatttcaggaggcccctctggcctatgatgctatatgggccctcgcacttgctttgaataaaacttccggaggcggaggacgatcaggagtccgcttggaggacttcaactacaacaaccaaaccatcaccgatcagatctaccgagccatgaatagctcgagcttcgagggagtttcgggtcacgtcgtatttgacgccagtgggtcaagaatggcctggaccctgatcgaacaactgcagggcggttcctataaaaaaattggatattatgactccacaaaggatgatctgtcctggtctaagacggacaagtggataggcggatcaccccctgccgatcagacccttgtgatcaaaacttttcgatttctgagccaaaagctgtttatttccgtgtccgtgctgagctccctgggcattgtcctcgctgtagtctgcctctccttcaacatatacaactcgcatgtccgatacatccagaattcacagccaaacctcaataacctcaccgcagttggatgctccctggcccttgccgctgtcttccctctggggctggacgggtatcacattgggcgaaaccagttcccatttgtttgtcaggctcgcctatggttgctgggcttaggcttcagccttggctatggttctatgtttaccaaaatctggtgggtgcataccgtattcaccaagaaagaagagaagaaagaatggcggaagactctggaaccatggaagttatatgcgaccgtgggactcctcgttggcatggatgtcctgaccctggccatctggcagatagtggacccacttcataggactatcgaaacattcgccaaagaggagcccaaggaggatatcgacgtgtctatattgcctcagcttgagcattgctcttccagaaagatgaacacttggttggggattttctatggatacaaaggtctgcttcttcttctgggcatcttcttggcctacgaaacgaaaagcgtgagcacggaaaagatcaacgatcaccgcgctgtggggatggccatttacaacgtcgccgtcctgtgcctgattacagccccagtgaccatgatcctctcctcacaacaggacgccgcattcgccttcgcgagccttgcaattgtattctccagttatatcacactcgtcgtgctgttcgtcccaaaaatgcggagattgatcacccggggtgaatggcagtccgaggctcaggataccatgaaaaccggctctagcactaataacaacgaggaagagaaatcccgactgttggagaaagaaaaccgagagttggaaaaaatcatagctgagaaggaggaacgcgtgagtgagctcagacatcagctccagagtcgacagcaacttcggagcagacgccacccacccactcctcccgagcctagcggtggactcccccgtggaccacccgaacctcccgacaggctttcctgcgacggcagcagggtgcatctcctatataaatag

SEQ ID NO: 10957 - DNA, 237 bp, synthetic construct
  misc_feature 1..237: note = source = /note="Description of Artificial Sequence: Synthetic coding sequence"
  source 1..237: mol_type = other DNA
atgggctctgggttgcccctcgtgttgctgctgactctgctcggatccagtcatgggaccggaccagggatgaccctccaactcaagttgaaagagagttttcttaccaactcaagctatgaatcctctttcttagaactgctcgagaaactgtgtctgctgttgcacctcccatccggaacttcagtgaccttgcaccacgccaggagccagcaccatgtggtctgtaacacctag

SEQ ID NO: 10958 - DNA, 2700 bp, synthetic construct
  misc_feature 1..2700: note = source = /note="Description of Artificial Sequence: Synthetic coding sequence"
  source 1..2700: mol_type = other DNA
atgctgttgctgctgctactggccccactgttcttgcgcccacccggagccggaggggcacaaacaccaaacgccacttcagaaggctgccagatcatccatcccccatgggaaggtggaattcgctatcgaggtctcacgagagaccaggtcaaggcaattaactttctcccagtggattacgaaatagaatacgtttgcagaggggaaagagaggtcgtaggaccaaaagtcagaaagtgcttagctaacgggagctggactgacatggacactcctagccggtgtgtgaacagaaccccacatagcgaaagaagggctgtgtacatcggcgcactgtttcctatgagtggcggttggccgggtggccaggcttgtcagcctgctgtggagatggctttagaagatgtcaatagtcgtcgcgacatactgcctgattatgagctgaaattaattcatcatgacagcaaatgcgaccctgggcaggccaccaagtatctatacgagttactctataacgatccgatcaagatcattctgatgcccggatgctcctccgtcagcaccctcgtggcggaagccgctcgaatgtggaacctgatcgtgctgtcgtacggaagctctagtcctgcgttgtccaaccgacagcgattccctaccttctttcgcacgcacccttccgccaccctgcacaatcctacccgagtgaagctttttgagaaatggggatggaagaagatcgcaaccatccagcagacaacggaggtgtttaccagcaccctggacgacctggaagagagggtgaaagaggcaggcatcgaaattacattcaggcagagcttttttagtgatcccgcagtgccagtgaagaacctcaagagacaggatgcacgcataatcgtgggcctgttttacgaaacagaggcccgtaaggtcttctgtgaagtgtataaagagagactgttcggaaaaaagtatgtgtggtttcttataggctggtacgcggacaactggttcaagatttatgatccctcgatcaattgtaccgtcgacgagatgacggaggcggtcgagggccacattacaacggaaatcgttatgctcaacccagccaacacacggtcaatatctaacatgaccagccaggaatttgtggagaagttgaccaaaagactgaaaagacacccggaagaaaccggtggattccaagaagctcctttggcatatgacgctatttgggctctggctctagccctgaacaaaacttccgggggtggcggacggtctggggtgcggctcgaggattttaattacaataaccagactatcaccgaccaaatctatcgtgccatgaacagctccagcttcgagggcgttagcggccatgttgtatttgatgcgtccggaagcagaatggcatggaccctgatagaacaacttcagggcggttcctataagaagatcggctattacgactctaccaaggatgatctgtcttggagtaagactgacaaatggatcggcggatctcctccggcagaccagacgctcgtgataaaaaccttccggtttctcagtcaaaagctctttatttctgtgtctgtgttgtcaagccttggcatagtgttggccgtggtttgcctgagctttaacatatacaactcacatgtgaggtatatccagaatagtcagcccaacctgaacaatctcacagccgtgggatgcagcttggccctggccgcagtgttccctctgggcctggatggttaccacattgggcgtaatcagttcccttttgtgtgccaggccagactgtggctgctcggactcgggttcagcctgggatacggaagcatgtttacaaagatttggtgggtgcatacagtctttacaaaaaaagaggagaaaaaagagtggcggaagacattagaaccatggaaactgtacgccactgtgggtctgctcgttggaatggatgttctgacactggctatctggcaaatcgtggaccccttacataggaccatcgagacatttgcaaaggaggaacccaaggaggacattgatgtatcaatcctgcctcagttagaacactgtagcagcaggaaaatgaatacctggcttgggatcttttacggctataagggcctgctgctattactaggcattttcctcgcctatgagacgaaaagcgtttccacagagaaaatcaacgaccaccgggctgtgggcatggccatctacaacgtggcggtgttgtgtctgatcaccgctcccgtcacaatgattctaagcagccagcaggacgctgcattcgccttcgcctcgctcgctattgtcttctcctcctacataacacttgtcgtgctgttcgtgccaaagatgagacgactcattacacggggagaatggcagagtgaggcccaagatactatgaaaaccggatctagcaccaacaataatgaagaggaaaaaagcaggctgctggaaaaagagaatcgcgagctggaaaagattatcgctgaaaaggaagaacgcgtgtccgaactgcgtcaccaattgcagtcccggcagcagttgcgatctagacggcatccccctactccacctgaaccttcggggggactgccgcgtggaccgccagaaccacctgatagactgagttgcgatggcagcagagtccacttattgtataagtag

SEQ ID NO: 10959 - DNA, 2886 bp, synthetic construct
  misc_feature 1..2886: note = source = /note="Description of Artificial Sequence: Synthetic coding sequence"
  source 1..2886: mol_type = other DNA
atgctgctactgctgctgcttgccccactcttcttacgcccacccggagctggcggagcacagacccccaacgccacaagtgaaggctgccagattattcatcctccctgggaggggggaattagatacagagggctaacgagagaccaggtgaaagcaatcaattttcttcccgtggactatgagatagagtatgtgtgtagaggagagagagaagtggtcggccctaaagtcagaaagtgccttgcaaacggctcctggactgacatggacactccatctcggtgtgtacgtatttgttcaaagagttacttaaccctagaaaatggcaaggtgttcctgaccggtggggatctccccgctctggacggagctcgagtcgacttccgctgtgaccccgactttcacctggtgggatcctcccgtagtatttgttcccagggacagtggtctactcctaagcctcactgccaggttaaccggacccctcatagcgagaggcgcgctgtgtatattggggcattgttcccaatgagtggcggatggccaggtggccaggcgtgtcagccggcagtcgagatggcactagaagacgtaaattccaggcgggatattctgcctgactatgagctgaaactcattcaccacgattcgaaatgtgacccagggcaagccaccaaatacctgtacgaattgctttacaatgaccctatcaaaattatcctgatgccaggctgcagtagcgtttctacgctggtggccgaagccgctcgcatgtggaatctaatcgtcctgagctacggatcttccagcccagctctcagcaatcgtcaacgcttcccgacattttttcggactcatccttctgcgactctgcataacccaacccgagttaagttattcgagaagtgggggtggaagaaaatcgcaacgatccagcaaacaaccgaggtatttacctctactctcgatgacctggaggaaagagttaaagaggcgggtatagaaatcacattccggcagtcctttttctccgatcccgcagtcccagttaaaaatttgaagcgacaggatgctcgcatcattgtgggcttgttttacgaaactgaagccagaaaggtattttgcgaagtctacaaggaaagactgttcggcaagaaatatgtgtggttcctgatcggttggtatgccgataattggtttaagatctacgatccgtcaatcaattgcactgtcgacgagatgaccgaagctgttgagggacacatcactacggagattgttatgttgaatcctgctaacacgcgcagcatctctaacatgacctctcaagagttcgtagaaaaactgactaaacgcctgaaaagacaccctgaagagacaggaggttttcaagaagcgcctctcgcctacgacgcaatttgggccctggcgttagctctaaacaaaacatctggtggaggcggtaggagcggggtgaggttggaggattttaactacaacaaccagaccattacagaccagatttaccgagctatgaattctagctcgttcgagggtgtgagcggacatgtggtgttcgatgcctctgggtcacgtatggcctggacactgatcgagcaactccagggcggtagttataaaaaaatcggttactatgacagcactaaggatgatctgagctggagcaagacggacaagtggatagggggatcccctcccgcagaccagacattggttataaagaccttccggtttctgtcccaaaagctcttcatctcggtgtctgtgttgagttccctcggaatcgtattagcagtggtttgcttgagcttcaatatttacaacagtcacgtgcgttatatccagaatagccagcccaatcttaacaatttgactgctgtaggatgtagccttgcgctggccgcagtgtttcccctcggtctcgatggctatcatataggaagaaatcagttcccatttgtgtgccaggccagactctggcttctgggactggggttttctctaggatacggatcgatgttcacgaaaatttggtgggtacacaccgtgttcacaaaaaaagaagagaaaaaggaatggcgcaaaaccctcgagccttggaagctctatgctacagtgggtcttttggtcggcatggatgttcttaccctcgctatctggcagatcgtggatcccttacacagaaccattgaaactttcgccaaggaagagcctaaggaagatattgatgtttctatactaccccagctggaacattgctcctcgcggaaaatgaacacatggttgggcatcttttatggctataaggggctgttattgctgctgggcatctttctcgcgtacgaaaccaaaagcgtaagtacggagaagataaatgaccatcgagcagtcggtatggctatctacaacgttgccgtgctttgtttaatcacggcccctgttactatgatcttgagttctcagcaggacgctgcgttcgcatttgcgagcctcgccattgtgttcagctcttatattactctcgttgttctgtttgttcccaaaatgcgacgcctgatcacccggggagaatggcagtccgaggcccaggacacaatgaagactggttcctcaactaataacaacgaggaagagaagagtcgcctgctcgagaaggagaacagggaactcgaaaaaatcatcgctgagaaggaagagagagtttccgagttaagacaccaactgcaatctcgccagcagctgcggtcccggagacaccccccaacacctcccgagccgtcaggagggctcccgaggggtcctccggaaccacctgacagactctcatgcgatggaagcagggtccatctgctgtacaagtag

SEQ ID NO: 10960 - DNA, 2535 bp, synthetic construct
  misc_feature 1..2535: note = source = /note="Description of Artificial Sequence: Synthetic coding sequence"
  source 1..2535: mol_type = other DNA
atgggaccaggggctccttttgctcgagtggggtggccactgccactgttggtagtcatggcagcaggggtcgcgcctgtttgggcctcacattccccccatttacctcgcccacattcccgggtcccaccccatccatcttccgagaggagggctgtttacataggtgcactgtttccaatgtccggaggctggcctggcggtcaagcctgccagcctgccgtggaaatggccctcgaagatgtgaactcccgcagagatatcctgcccgactatgagttgaaactgatacatcatgactcaaaatgcgatccagggcaagcgactaagtatctgtacgagttgctgtacaatgatcccattaagattatcctgatgccaggatgctccagtgtgagcaccctggtcgcggaagctgccagaatgtggaacctgatcgtgttgtcctatggttcttcgtcacccgcattgtcgaacaggcagaggttcccaactttttttcggacccacccctctgccacgttgcataaccccacacgtgtcaaactctttgagaagtggggatggaagaagatcgcaactatacagcaaacaaccgaggtgttcacttcaactctggatgacctggaggagcgggtcaaggaagccggtatagaaatcacatttagacaatcctttttttctgacccggcagtgccggtcaaaaatctaaagaggcaggatgcacgcatcatagtgggtctgttctacgagacagaagcaaggaaggtgttctgcgaagtttataaagagaggttgtttgggaagaaatatgtgtggttcctaattgggtggtatgcagacaactggtttaagatttacgacccgtcaatcaattgcacggtggacgaaatgactgaggccgtcgagggccacattaccacagaaatcgttatgctgaatccagctaatacacggtctattagcaacatgacctcccaagagtttgtggaaaagctgaccaagaggctcaagcggcacccggaggagaccggaggatttcaggaggcgccattggcatacgatgcaatctgggctctcgccctcgcgttaaacaaaactagcggtggagggggaagaagcggtgtgcgactcgaagatttcaactacaataatcagacaataaccgatcagatatatagggccatgaacagcagctcatttgagggggtgtctggccatgtggttttcgacgccagtggctctcggatggcctggacactaatcgaacaactccagggtggctcatataagaagatcggttattacgatagcaccaaggacgacctaagctggtcgaagacagacaaatggataggaggatcccctccggctgatcagaccttagtgatcaaaaccttcaggtttctgtcacagaagcttttcattagtgtgagtgtactctcctctctggggattgtgctggccgttgtgtgtttatccttcaatatatacaactctcatgtgaggtatatccaaaattctcaaccaaacttaaataacctcaccgcagtgggatgctctcttgccctggcggctgttttcccacttggcctggacggataccacataggtcgtaaccagtttccttttgtttgtcaggcaagattgtggctgttgggcttgggcttctccctgggatacgggtcgatgtttaccaaaatatggtgggtgcacacagtgttcaccaaaaaggaagaaaagaaagaatggcgcaaaactctggaaccctggaagttgtatgctacggtcgggctcctagtgggcatggatgtgctgacgctggccatctggcagatcgtggacccactccatcggacaatcgaaacatttgcaaaggaagaacctaaagaggacatcgacgtgagtatactccctcagttggagcactgtagcagcaggaagatgaacacctggctgggaatattctacgggtataaaggactattgctgttactgggtatattcttggcttacgaaaccaagagcgtgagcaccgagaagattaacgaccaccgggcagtgggaatggccatatataatgtggccgttctctgcctgattacagcccctgtgaccatgatcttatcttcccaacaggacgcggcattcgcgtttgcaagtctcgcgattgtgttttcctcctatatcacgttagtggtgctgttcgtgccaaaaatgcggcgtctcattactcggggtgagtggcagagtgaggctcaagacactatgaaaacaggcagcagcaccaacaataatgaggaggaaaagtccaggctcttggagaaggagaaccgggaactggagaagatcatcgccgaaaaggaagagcgcgttagcgaactacgacaccagctgcagagccgacagcagttacgttcaagacgccacccacctacgcccccagagccctccggcggtttacctagaggccctcctgaaccacccgatcgtctgagctgcgatgggtctcgtgtccacctgctatataaatag

SEQ ID NO: 10961 - DNA, 2535 bp, synthetic construct
  misc_feature 1..2535: note = source = /note="Description of Artificial Sequence: Synthetic coding sequence"
  source 1..2535: mol_type = other DNA
atgggcccaggggctccttttgctcgagttggatggccacttccactgctcgtggtcatggcagccggagtagctcccgtctgggcctctcactcacctcacctgcctagaccgcactcacgggtgccacctcatccgagttccgagcgtagggcagtgtacatcggggcactcttcccgatgagcggcggttggcccggagggcaggcctgccaacccgctgtggaaatggccttggaagatgtgaattcacgtcgggacattctgccggattacgaactcaaactcatccaccacgattccaagtgcgatcccggtcaggccaccaaatatctctacgagctactgtataatgatccaattaagatcattctgatgccgggatgtagcagcgtctcaacgttggttgccgaggcagccaggatgtggaatttaattgtactttcctatgggtcttcatcaccagcactgtcaaacagacagaggttcccaacgttcttccgtacacatcccagcgcaacactacacaaccctacaagagtgaaactcttcgagaagtggggttggaaaaagatcgccacaatccagcaaacgacagaagtgttcacctctacattggacgacttggaagagcgggtgaaagaggcaggcattgaaatcacttttagacaatcctttttctccgaccccgctgttcccgttaagaatctaaaaaggcaggacgcgagaattatcgttggcctattttacgagacagaagccagaaaagtgttttgtgaggtctataaggagcgcctgttcgggaaaaagtacgtttggttcctgattggctggtatgccgacaattggttcaagatatatgacccgtccatcaattgtactgtagacgagatgaccgaggcggttgaggggcatatcactactgaaattgtcatgctgaatccagccaatactagatctattagcaacatgacaagccaggaatttgtggagaagctaactaagaggctgaagcgacaccctgaggaaactggcggattccaggaggcccctctggcttacgacgccatttgggcactcgctttagctctaaacaaaacatccggaggcggtgggagatcaggagtgaggctggaggatttcaactacaataaccagacaatcactgaccagatttatcgcgcaatgaatagctcatccttcgagggcgtatcagggcatgtggtgttcgacgccagtgggtcccgaatggcgtggacactgatcgagcagcttcagggcggatcttacaaaaagattggatactatgattcaacaaaagatgacttgagttggagcaaaaccgataagtggattggcggttctccacccgcagaccagaccctggttattaagacgttccgcttcctcagccagaagctcttcattagtgtctctgtattatcatctctgggcatcgtgctggccgtagtctgcctgtcctttaatatttataattctcacgtgagatacatacagaattcccaacccaacctgaataatctgaccgccgttggatgttccctcgccctcgcggcagtcttccccctgggactcgatgggtatcacatcggtcgcaaccagttccccttcgtttgccaagcgagactatggctattaggtctgggcttctccctcggttacggaagtatgttcaccaaaatttggtgggtgcacacggttttcacgaaaaaggaagagaaaaaggaatggcgaaaaacgcttgaaccttggaagttgtatgcgaccgttgggttgctggtgggtatggatgtccttactctggctatttggcagattgtcgaccctctgcacagaactattgagacctttgctaaagaagagcctaaggaggacattgacgtgtcaatcctcccacaacttgagcactgctcatcacgtaagatgaatacctggctgggtatattctacggctacaaaggacttcttttgctacttggaattttcctggcctatgaaaccaaatcagtcagcactgaaaaaataaacgatcatcgcgcagttggcatggccatatacaacgtggccgtattatgcctgattactgcgcctgttactatgatcctgtcctcacaacaagacgctgcatttgccttcgcctctctggctattgtgttctcgtcatatatcactctcgtagtgttgttcgtccccaagatgcgcagactgattacaaggggggagtggcagagtgaagctcaagacactatgaagacaggttcttccacgaataataatgaggaggagaagtctaggttactcgaaaaagaaaatcgagaattggagaagatcattgccgaaaaggaggagagagtcagcgaactacgccaccagctgcaatctcgccagcagctcagatcacgccgtcacccccctactccacccgagcctagcggtggcctgcccaggggccctccagagcccccagatcgcctcagttgcgacggctcacgagtccatctgctgtacaagtag

SEQ ID NO: 10962 - DNA, 2700 bp, synthetic construct
  misc_feature 1..2700: note = source = /note="Description of Artificial Sequence: Synthetic coding sequence"
  source 1..2700: mol_type = other DNA
atgttactgttactccttctggcaccattgtttctaaggccacccggagccggaggagctcagacgcctaacgccacctctgagggatgccaaatcattcacccaccctgggaaggcggtatcaggtaccggggacttacccgggaccaagtcaaggccatcaattttttgcctgtcgactatgaaatcgagtatgtatgtcgaggagagagagaggtcgtcggcccaaaagtgagaaagtgtctcgctaatgggtcttggacagatatggacactcccagccgctgtgtgaaccgcacccctcattctgaacgacgtgctgtatatattggggctctcttccccatgtctggtggctggcctggcggacaagcctgtcaacctgctgtcgagatggccctggaagatgttaacagtaggagggatatcctgcccgattacgaacttaagctgatccaccacgattccaagtgcgaccctgggcaggcgactaagtatttatacgaattgctctataacgatccaatcaagataatcctgatgccgggatgcagttctgttagcaccttagtggccgaagcagcacgcatgtggaacctgatcgtgttatcctatggatcctcatctcctgcactctccaatcggcagagatttcccacctttttcagaacccatcctagtgcaaccttgcacaatcccacccgtgtgaaactgtttgagaagtgggggtggaagaaaatcgccaccatccagcagaccacggaagtcttcacctctacactggatgatctggaagagagggtgaaggaggctgggattgaaatcacattccgacagtcttttttctctgatccagccgtgcccgtgaagaatctgaagcggcaggatgccaggatcatcgttgggctgttctacgaaacagaggccaggaaggtgttttgcgaggtgtacaaagaacgcttattcggcaaaaagtacgtttggttcctgattgggtggtacgccgataattggttcaaaatctacgatcccagtattaactgtacagtagacgaaatgaccgaggcggttgagggacacattaccactgaaattgtcatgctcaatcccgcaaacactagaagtatctccaacatgacttctcaggagttcgtggagaagcttacgaagcggctgaagcgccacccagaggagaccggtggttttcaagaggcacctttagcctacgatgcaatttgggcgttagctttggccttgaataagaccagcgggggtggaggtagaagcggggtacgcctggaggactttaactataataatcagaccattaccgaccagatatacagagctatgaattcgtctagcttcgagggagtatccggtcatgtggtttttgatgcaagcgggtccagaatggcctggactctcatagagcagctgcagggaggatcttacaagaagatcggctattacgattcaaccaaggatgacttgagctggagtaagacggacaaatggataggcggatctcctccagcggaccaaaccctggtgatcaagacctttcggttcctgagccagaaactgtttattagtgtttccgtgttgtcctccctcgggatcgtgctggctgtcgtgtgtctgtcctttaacatttataacagtcacgtgaggtacattcaaaactctcaacccaatctcaacaatctaaccgcagtggggtgttcgctcgcacttgccgctgtgttcccattaggtctggacggctaccatataggtagaaaccagttcccattcgtctgccaagcccgactgtggctgctgggcctgggtttttctttgggctacggctccatgttcacaaagatatggtgggtccataccgtgtttaccaagaaagaagaaaaaaaagaatggagaaaaactctggagccttggaagctgtacgccactgtggggctgctggtgggaatggatgtcctgactttggcaatctggcagatagttgacccccttcaccgaaccatagagacatttgcaaaagaagagcccaaagaggatattgatgtgtctatcttaccccagctcgagcattgtagctctagaaaaatgaatacctggctcggcatattctatggatataaagggctgcttcttttactcggcattttcctggcgtacgaaacgaagtcggtgagcacggaaaagattaatgatcaccgcgctgtcgggatggccatctataatgttgctgttttgtgcctaatcaccgctcccgtgaccatgatcctgtcatcccagcaagacgccgctttcgcctttgcctctcttgccattgtgttcagcagttacattaccctcgtcgtgctatttgtgccaaaaatgaggaggttaatcactcggggagagtggcagagcgaggcccaggatacaatgaagactgggtctagcacaaacaataatgaggaggagaagagcagactgctagagaaagagaaccgagagctggagaaaatcatagctgaaaaggaagagcgggtgtcggagctccggcatcagctacagtcacgtcagcagctgcggagccggaggcaccctccaactccaccagaaccctctggcggattgcccagaggaccacccgagccgcctgacaggctatcttgcgacggaagccgagttcatctgctgtacaaatag

SEQ ID NO: 10963 - DNA, 2886 bp, synthetic construct
  misc_feature 1..2886: note = source = /note="Description of Artificial Sequence: Synthetic coding sequence"
  source 1..2886: mol_type = other DNA
atgcttcttctgttactgctggccccactgtttcttcggcctcctggagccggaggcgcacagactccaaacgcaaccagcgaggggtgccaaatcatccaccctccctgggagggcggtattcgctaccgcggacttaccagagaccaggtgaaagcaatcaacttccttcctgtagattatgaaatcgaatatgtttgtcggggtgagcgagaagtggtgggcccaaaggtccgtaagtgcctcgcaaatgggagctggaccgatatggacacgccctcccggtgtgtgaggatttgctctaaatcatatctaacgctggagaatggcaaagtgttcctgactggtggtgatctgcctgccctcgatggggcaagggtggactttcgctgcgatcctgattttcacctggtaggatcctcccgctctatttgctctcagggacagtggtcaacaccaaaaccgcactgccaagtgaatcgaacaccacattctgagagaagagctgtgtacatcggggcactgtttcccatgagcggtggctggccaggcggacaagcctgtcaaccagccgtcgagatggcactggaagacgtgaattcccgaagagatattctcccagactacgagctgaaactgattcaccacgacagcaaatgcgatcccggacaagctactaagtacctttacgaactgctgtataatgacccgatcaaaattatcctgatgcctggttgctccagcgtgtcaactttggtggccgaggcggctcggatgtggaatcttatagtactgtcgtacggcagctccagcccggcattgtctaataggcagcggtttccaacgttcttcagaacacacccaagcgctaccttgcacaaccctacccgcgtgaaactgtttgaaaagtgggggtggaaaaagattgcgacaatacagcagaccacagaagtcttcacaagtaccttggacgatctggaggaacgtgtcaaggaagccggtatagaaataaccttccgtcagtctttttttagtgatcccgctgtgcctgttaagaatcttaagcggcaggacgctcgaataatagtcggcttgttttacgaaacagaggcacggaaggtgttttgtgaagtgtacaaagagagattgtttggtaaaaagtacgtctggttccttataggctggtatgcggataactggtttaagatctacgatccctcgattaattgcaccgtcgatgagatgacggaggccgttgagggtcacatcaccactgaaattgtgatgctcaacccagcaaatactcggagcataagcaacatgacttctcaggagttcgtcgagaaactcactaagagattgaagcggcatccggaagagacgggtggctttcaggaggcccctctggcctatgacgccatttgggctctggcactggcactgaataaaacaagcggaggtggcggtcggtcaggagttcggctggaggacttcaactacaacaaccagactattactgatcaaatatacagagccatgaactcatctagcttcgaaggggtttccggacatgtggtttttgatgctagtgggtccagaatggcatggacactcatcgagcagcttcaggggggatcatacaagaaaattgggtactatgacagtacaaaggatgacctgtcatggagtaagacagataagtggatcggaggtagcccacccgctgatcagacactggtcatcaagacatttagatttttgagtcagaagctgttcatttcagtcagcgttctcagcagtctaggcatcgtcctcgccgtcgtttgtctgtcgttcaatatctacaattcacacgtgagatacatccaaaactcccagcccaatttgaacaatcttactgcagttggatgtagtttggccctggctgccgtttttccattagggttggatggctaccatatcggacgaaatcaattccctttcgtgtgccaagctcgcttatggctgctgggcctgggcttctctttggggtacggctctatgttcacgaagatttggtgggttcataccgtgtttactaagaaagaggaaaaaaaggaatggcggaagactctggaaccctggaaactttatgccactgtggggttgttggttggcatggatgtgctgacgcttgctatttggcagatcgtcgaccctctccatcgaacgatagaaaccttcgccaaggaggaacctaaggaagacatagacgtgagcatcttgccacagttggagcactgctcgagccgaaaaatgaatacctggcttggaatcttttatggctataagggactgctgctgcttttggggatttttctcgcctacgagacaaaaagcgtgtcaactgagaaaatcaatgaccacagggccgtgggtatggccatatataacgtagcagtgttgtgccttataaccgcccctgttacgatgatcttaagctcccagcaagacgccgctttcgcctttgccagcttagcaattgtgttctcttcatatataacattggtcgtgctctttgtgccaaagatgaggcgattgataacgagaggggagtggcagtcagaggctcaggataccatgaaaacaggttcaagtaccaataacaacgaagaagagaagtcgagattgcttgagaaagaaaaccgagagctggaaaaaattatcgccgagaaagaagaacgggtttcagagctgcgtcaccagctgcagtcgcggcagcagctgagatcccgcagacatcctccaacacctccggagccgtcagggggactccccagagggccacccgagccgccagaccggctgtcttgcgacggtagcagagttcatctcctgtataaatag

SEQ ID NO: 10964 - DNA, 2535 bp, synthetic construct
  misc_feature 1..2535: note = source = /note="Description of Artificial Sequence: Synthetic coding sequence"
  source 1..2535: mol_type = other DNA
atggggccaggggctccattcgcgcgtgttggatggccactgcccctcttagtggtgatggccgcaggggtcgctccagtgtgggctagtcacagccctcacctgcctcgaccacacagtagggtgccaccacacccatcatctgagaggcgcgctgtctatatcggagctctcttccccatgagtggcggttggcctggcggacaggcctgccagcccgcagtcgagatggccctggaagacgttaacagccggagggatattctccctgattatgaattgaagctgattcaccatgattcaaagtgtgatccaggacaggccaccaagtatctctatgagttgctctacaatgacccaattaaaattatcctgatgccgggatgctcctctgtgagcaccctggtcgctgaggccgctaggatgtggaatcttatcgttctctcctatggcagttcctcaccggctcttagcaataggcagcgcttcccaacgttctttcggacccacccatcagcaaccctgcataaccccactagagttaaactcttcgagaaatggggttggaagaaaatcgcaaccatacagcagaccacagaagtcttcacaagtacgcttgacgacctggaggagagggtcaaggaagctggcatagaaattacattccggcaaagcttcttcagcgaccctgccgtcccggtcaaaaacctgaagaggcaggacgctcgcatcatagtggggctcttctatgaaaccgaggcacggaaagttttttgcgaggtgtacaaggagcggctgtttggcaaaaagtatgtgtggttcttgataggctggtatgcagataactggttcaaaatttacgatccaagcatcaattgtacagtcgatgagatgacagaagcagtggaaggacacattacaaccgagatcgtgatgctgaaccctgcaaacaccaggtccattagtaatatgactagccaagaattcgtcgagaagctgactaagcggttgaagcggcacccagaagagaccggcggatttcaagaagctcccctggcttacgacgcgatttgggcccttgccttggcactgaacaagacctctgggggaggaggacgatctggagtacggctggaggactttaactataataatcagaccatcacagaccagatttaccgagccatgaattcttcctcctttgagggcgtttccggccacgttgtttttgacgcctcaggtagtcggatggcctggaccctgatcgagcagctccagggagggtcttataaaaaaatcggctattatgattccaccaaggacgatctttcctggagcaaaacagacaaatggatcggcggatccccgcctgccgatcagactctcgtgattaagacgttcagattcctaagccaaaagctcttcatcagcgtctccgtcctaagctccctcgggatagtgcttgccgtcgtgtgtctctcctttaatatttacaactcccatgtgagatacatacagaacagtcaaccaaacctgaataatctaaccgctgttggatgctcacttgctcttgccgcagtgtttcctctcgggctggatgggtaccatattgggaggaatcagttccccttcgtgtgtcaagctcggctgtggctgctggggctcggcttctctctgggttatggatcaatgttcacaaaaatctggtgggtccacactgtcttcaccaaaaaggaagaaaaaaaagaatggcgtaagacccttgagccatggaaactatatgctacggtgggactgcttgtgggcatggacgttctgactctggccatttggcagattgtggaccccctccaccgtaccatcgagactttcgctaaggaggagcctaaagaggatatcgacgtatcaatattgccgcagttagagcactgctccagcagaaagatgaacacctggctgggcatattctacggatacaagggcctgctgttgctcttgggaatcttccttgcttatgaaacgaagtcagtgagcacagaaaaaatcaatgatcatagagccgtggggatggccatttataacgtcgccgtgctctgcctcatcacggccccagtcacaatgatcctttcttcccagcaggacgcagccttcgctttcgcctctctagctattgtgttttcaagttatatcacacttgtcgtgctttttgtgcctaaaatgcgaaggctgatcactcgaggagagtggcagagtgaagctcaggatactatgaagaccgggagttccactaacaacaacgaggaggagaagagtaggctcctggaaaaagaaaaccgcgagttggaaaaaatcatcgccgagaaagaggagagggtgtccgaactgaggcatcagcttcagtctcgccaacagctgcgcagcagaagacacccaccgacaccgccagagccctccgggggtctacctcgaggccctcctgaacctcctgatcggctctcctgcgacggctcaagagtacacctcctttataagtag

SEQ ID NO: 10965 - DNA, 3090 bp, synthetic construct
  misc_feature 1..3090: note = source = /note="Description of Artificial Sequence: Synthetic coding sequence"
  source 1..3090: mol_type = other DNA
atgccaccaacaaaatctgtgtctgagccagtaccattcgaaaccgaggcccctagtatgaccatcgtccccacaaccgacatcgaacctgtcacagtaagaacagaggccaccgtcactactctcgctccaaagacgtctcagcgaactagaacccggagaccaaggcccaaacacaaaaccaccccgcgaccagagaccttacagacaaagctggacttcggtcctattacgccgggaacctcctccgcacccacgactactactaagagaacccgccgacctcatcctaagcctaagacaacaccccatcctgaagttccccaaacaaagctggtgcccgctacaattctggaacccgtgctcaggaccgaggcctcgggcaccacagccgtcccagccacgatttttgagcctgtttcccccattaaggaggcacctgggaccaccttcgtccctgtcaccgatctggaacccgttacatttcgcacagaaatcccagcaacgacgctcgcaacaaagaccagcaaacggacgagacctccgaggccccgaccgaaaacaactcctagtccgcaggcacctgaaaccaagccagtccctgccaccgtgcttgaaccagtaaccctaagacccgaggcttctaccacattagcgagcaaaaccagccaacgaacccgcagacctcggctcagaactaagacgacgcccaggcctgaggccccagaaagtaaacccgtccctactgccgagttgaagccggtgacgctgaggacagaaacttgggttaccacccaggcaccaaaaaccagccagcggaccaggcgacctaggcctaagacgaaaaccactcccagccccgaagtgccccagacaaagctggtcccctcaaccgatctggagccaggaacactgcgtactgaggcacctaaaactatggtagtcaccacagtgctcgaaccagatacattccggactaagtttccggagactacccttgctcctaagacccagcggacgagacgccctaggccacgtcccaagacgacttctagccctgaggtgccgcaaaacaagagtgtgtcagtgactggttttgagccggtagtccactcaaccgatgcaccgggaactactttcgcactcacagagctgcagacactgatcttgaagccggtgacatccccatcactggagatgaccgagagtcagcccgtgagcgatgtgctggagtccgtcaccttgtccaccgaatcacctaaggagacaattgcaccagccaagacagattacgtttacccaactgcgaaggccccactgtggccggaggaaccaaaaacagaggtcgtcgaatctataacttacgtgtccgaacccccagagactaccttggagacctcgcctctgccatctcagtccatcacactgcctagccccgatgagccccagacagagcccgcaccgaaacagaccccacgtgctccccctaagccaaaaacttcacccagacctaggattccgcagacccagcctgtaccaaaagtgccccagcgcgttaccgcaaagcccaagacttcaccaagccccgaggtcagttacaccacgcctgcacctaaagacgtcctccttccccacaagccctatcctgaggtttcacagagtgaacctgccccactcgaaacccggggtatcccgtttatcccgatgatcagtccctctccaagccaggaggaacttcagaccacgttggaagaaaccgaccagagcacccaggaaccattcacaaccaaaatacctcgaactacagaactggctaagacgactcaggcaccacataggttttataccacagtgcgcccacgcacatcagacaagccacacatccgtccaggcgtgaagcaagcgccaagacccagcggcgctgatcggaacgtctcggtggacagtacccacccgacaaaaaaaccgggaaccagacgaccgccactccccccacggcctactcaccctcgtagaaagcccttacctcctaataacgttaccgggaaacctggatccgcagggatcataagctcaggcccaatcactacacccccactaagatctacccctaggcccactgggacaccccttgaacgaattgaaaccgacatcaagcaacctaccgtccctgcgtctggagaggagctggagaatattacggacttctctagttcccccacccgcgaaaccgaccctctcggaaaaccgaggtttaagggtccccacgtgcgctacattcagaaaccggataattctccctgttcgataacagactctgtaaagcggttcccaaaagaggaagcgactgaaggaaatgccacctctcctccacagaacccccctaccaacctcactgtcgttactgtcgagggctgtccatccttcgtgatcctggattgggagaaacccctgaatgacacagtgaccgaatatgaggtgatatccagagagaatggatccttttcgggcaaaaacaagtcgatccagatgaccaatcagacatttagcaccgtcgagaacttgaaaccaaatacatcttatgagttccaggtaaagcctaagaatcctcttggggaaggacccgtgtccaatacggtggcctttagcactgagtctgccgaccccagggtgtctgaacctgtgtccgcagggagagacgcaatatggaccgagagacccttcaactccgatagctatagtgaatgtaagggaaaacagtatgtaaaaaggacctggtataagaagtttgtgggcgtacaactatgtaactccctgagatacaagatctatctctcggactctctgacgggcaagttctacaacatcggcgatcagcgcggacatggagaagaccactgccagttcgtggatagtttcctggatgggaggactggtcagcaactcacctccgatcagctgccaattaaagagggctatttcagggctgtgcggcaagaacccgtccagttcggcgagatagggggtcacacccagattaactatgtgcagtggtatgaatgtggtactactatccccggaaaatggtag

SEQ ID NO: 10966 - DNA, 2355 bp, synthetic construct
  misc_feature 1..2355: note = source = /note="Description of Artificial Sequence: Synthetic coding sequence"
  source 1..2355: mol_type = other DNA
atgacaatcgtgcctaccaccgatatcgaacccgtgacggtacgaaccgaggctacggtcactaccctggccccaaaaacctcccagagaacccgcactcgccgtccaaggcccaagcacaaaactactcccagacccgaaacactgcaaaccaaattggactttggacctatcaccccaggaacctcatctgcacctacaacgacaacaaaacgaactcgtagaccccatcctaaaccaaagaccaccccccaccctgaggtgccccagaccaaactggctcctaaagtgccacaaagaactcatagaccccacccaaaaccaaagaccaccctgtccccagaagagctgcagaccgagctggtccctgttacagacttagagcccgtcacctttagaacggagattcccgcaaccaccctggctacaaaaacatccaaacggactcgccctcctcgcccacgtcctaagaccaccccgtcacctcaggccccagagaccaaaccggtgcccgcaaccgtccttgagccagtgacactaaggcctgaggctagcactacactcgcttccaagacgtcacaaagaacacgccgtccccgattaaggactaaaacaacacccaggcctgaggcacctgagagtaaacctgccccaaagcagactcctcgagctccaccgaagcctaagactagtcctcgacctagaatccctcagacccaaccagtgcctaaggtgcctcagagggtcaccgcgaaacccaaaactagcccgtctccagaagtgtcgtacaccacacctgctccaaaggacgtcctcctccctcataaaccctatcccgaggtgagccagtccgagcccgctcctctcgagacgcgcggtattccatttatacccatgattagcccttctccctcccaggaagagctgcagacaactctagaggagacagaccagagtacccaagaaccctttactactaaaattccacgaaccacagaactcgctaaaaccacacaagccccacataggttctataccaccgtgcgtcctcgaacttcggacaagccacacattagacctgtgttaaaccggaccactactcgccctactaggcctaagccctccgggatgccctcgggcaatggagtggggacaggggtcaagcaagcgccacggcctagcggtgctgaccgtaatgtaagcgtggacagcacacatcccaccaaaaaaccagggaccagaagacctccactaccaccacgcccaacccaccctagaaggaagcctttaccccctaacaacgtcacaggcaaacctggcagtgctggtatcatctctagcggtcctattacaacccccccactgcgatctacccctcggcctactggcacccccctcgagaggattgaaacagatatcaagcagccaacagtgcctgcatcaggtgaagaacttgagaacatcaccgactttagctccagccctacaagggaaacagatcccctcggaaaacctcgattcaaaggccctcacgtgaggtatatccagaagcctgacaattccccatgcagtatcacagatagtgtgaaaaggttccccaaggaggaagctacagagggcaatgctacgagcccgcctcagaaccccccaacaaatttgaccgtggtgaccgtggaaggctgccccagttttgtaatactcgactgggaaaagccgttgaatgacacggttaccgagtacgaagtcatcagccgtgaaaacggaagcttttccggtaagaacaagtccatccagatgaccaatcagacattctcaaccgtagagaatctgaagccaaacactagttatgagtttcaagtcaaaccaaaaaaccctctgggtgaaggcccagtgagcaacaccgtggcattttctaccgagtccgccgatccgagggtaagcgagcctgtgtctgccggtagggatgctatttggaccgaacggccttttaatagcgacagctactccgaatgtaaaggcaagcaatatgtgaagcggacttggtacaagaaattcgtgggggttcagctctgcaacagcctaaggtacaaaatttatctgtccgacagcctcaccggaaagttttacaacattggggaccagcggggacatggtgaagaccattgccagttcgtcgattctttcctggatggtcgtacagggcagcagctaaccagtgaccagctccccatcaaggagggctacttcagggccgtgcggcaggagcctgtccagttcggcgagattggcggtcacactcagattaattacgtacagtggtatgagtgtggcacaacaatcccgggaaagtggtag

SEQ ID NO: 10967 - DNA, 1584 bp, synthetic construct
  misc_feature 1..1584: note = source = /note="Description of Artificial Sequence: Synthetic coding sequence"
  source 1..1584: mol_type = other DNA
atgctgatgctgttcgtgtttggggtgctactgcacgaggtatctctatctggtcagaacgaggcccctccgaatacgcacagcatcccgggagagccattatataattacgcttcaattcgacttccggaggagcatatcccattctttctccataacaacaggcacatagcgactgtctgcagaaaagatagcctgtgcccgtacaaaaagcaccttgagaagctgaaatactgttgggggtacgagaaaagttgcaagcctgagttccgctttggatacccagtttgctcgtatgtagacatgggctggacagataccctggagtctgccgaggatattttttggaagcaggccgacttcggctatgccagagaaaggctggaagaaatgcacgttctgtgccagcccaaggaaacctctgattcatccttagtgtgcagccggtatcttcagtactgtagagctactaacctgtacctggatcttcgtaatatcaagagaaatcatgatcgattcaaagaagactttttccagagcggcgagattggaggtcactgtaaactagacattcggacgcttacgtcggaaggacaacgaaaatcaccattacagtcctggttcgcagagctccagtcctatacccagttaaatttccgtcctattgaggacgcaaaatgcgatattgtcatagagaagcccacgtacttcatgaagctcgatgccggtgttaacatgtatcatcacttctgtgacttcataaatctctatatcacccagcacgtgaataactccttctctaccgacgtatacatcgttatgtgggatacgtccagttacgggtacggagacttatttagcgacacctggaacgcctttacggactacgacgtgatccatctgaaaacctatgacagcaagagggtgtgcttcaaggaggcagtgttttcactcttgccaagaatgcggtacggtcttttctacaacaccccgctgatcagcggttgccagaatacaggcctctttcgagccttcgcccaacacgtgctccaccggcttaacatcacgcaggaagggccaaaggatggaaaaataagagtgactattttggcaaggtctaccgagtaccgcaagatcctcaaccagaacgaactagtgaacgcactgaagacagtgtcgacgttcgaggtgcagatagtggattataagtaccgggaattaggcttcctcgaccaacttcgtatcactcacaataccgacatttttatcggcatgcacggggctggcctgacacatctcttgttcctcccagattgggcagccgtgttcgaattatataattgcgaggatgaaaggtgttatcttgacctggcgaggctgcggggagtgcattacataacctggagacgccagaacaaggtgttcccacaggacaaggggcatcatccgaccctgggggaacacccaaagttcaccaactactcatttgacgttgaggagtttatgtatctggtgctccaggcagctgatcacgtcctgcaacaccctaaatggcccttcaaaaaaaaacacgacgagctttag

SEQ ID NO: 10968 - DNA, 2004 bp, synthetic construct
  misc_feature 1..2004: note = source = /note="Description of Artificial Sequence: Synthetic coding sequence"
  source 1..2004: mol_type = other DNA
atgggatctagcagattagccgctctgctccttcctctactgctgattgtgatcgacctgagtgacagcgcagggattgggtttcgacacttgcctcactggaatacccggtgccccttggccagtcacaccgacgatagctttaccggcagttcagcatatatcccatgccgcacgtggtgggccctgttctccactaagccctggtgtgttcgcgtgtggcattgctccaggtgtctgtgtcaacatctgctctctggcggaagcggcctgcagcgcggtctgttccatctcttggtgcagaagagtaagaagtcttctaccttcaagttttatcggagacacaagatgccggcaccagctcagcgcaagctcctcccccgtaggcacttgagtgagaaaagtcaccatatcagtatcccctcgcccgatatctcccacaaggggctgaggagcaaaaggacccagccctcagatcccgagacttgggaatccttaccgagattagatagccagcgccacggcggtccagagttttcattcgacctgctcccagaagcccgagctataagggtgacaataagcagcggcccagaagttagcgtccgtttgtgtcaccagtgggcccttgagtgcgaagagctttctagcccttacgacgtacagaaaatagtgtccgggggtcacaccgtggagttgccctatgagttcctgctgccgtgtctgtgtattgaagctagctatctgcaagaggataccgtgcggagaaagaaatgcccgttccagagctggccagaagcttacggatctgatttttggaagagtgttcatttcaccgactattcgcagcatacgcagatggtgatggcacttaccctgcggtgcccgctcaagttggaagcagctctttgccagagacatgactggcataccttatgtaaagatctgccaaatgctacagcacgagaatctgatggctggtacgttttagagaaagtagacttacatccacaactttgcttcaaatttagttttggtaactcttctcatgtcgagtgcccgcatcaaactggttctctgacttcatggaatgtcagcatggacacgcaagctcagcagctgattttgcacttctcttccagaatgcatgccactttctcagccgcatggagcctgccaggtcttgggcaggacactctggtgcctccagtctacactgtgagtcaggcccgtggatccagccctgtgtccctggacttgatcatacccttccttaggcccggttgctgcgtcctcgtgtggcgatccgacgtccaatttgcatggaaacatttgctatgtcccgacgtgtcttatagacatctgggccttcttatacttgccctgctggctcttctcaccctgctcggcgtagtgctagccctcacctgtaggaggcctcagtctgggcctggacccgctaggcccgtgctgctcttacatgccgcagactctgaagcacagcgcagattggtgggcgcactggctgaactgctacgggctgctctggggggtgggcgagatgtgattgtggacctgtgggaaggaagacacgtcgcaagggtaggccctctaccctggttgtgggctgctagaacaagggttgccagggaacaaggcacagtgcttcttctgtggtccggtgctgacctgcgcccagtgtcagggccagatccgagagctgccccactgctcgccctgctccacgcagcaccacgtccactcctattgctcgcttacttttcgaggttgtgcgctaaaggtgatataccccctcctttacgggcactgcccagatatcgtcttctccgagacctccccaggcttttaagagccctggatgcacggccttttgcagaagcgacaagttggggtagactcggagcacggcaaagacgccaatccagactggaactctgttcccgcctggaacgcgaagcggcaagactggctgatttgggctag

SEQ ID NO: 10969 - DNA, 1101 bp, synthetic construct
  misc_feature 1..1101: note = source = /note="Description of Artificial Sequence: Synthetic coding sequence"
  source 1..1101: mol_type = other DNA
atgcctatgattagtgtcctgggcaaaatgtttctctggcagagggagggacccggtggcagatggacttgtcagacaagccgacgagtgagttcagacccggcttgggctgttgagtggatagaacttccccgtggtctgagtctctccagtctgggctctgcacgcaccctgagaggatggtcaagatcttctcgcccatccagtgtcgattctcaggacctgcccgaagttaacgtgggagatacagtggccatgctgccaaaatctaggcgtgctttaactatccaagaaatcgctgcattagccaggtcatcgctgcacggaatatcgcaggtggtcaaggaccatgtcacaaaacccacagccatggcccagggccgagttgctcacctgatcgaatggaagggatggtctaaaccatctgacagtccagccgcactagaaagtgccttctcttcctacagtgatctttccgaaggcgagcaggaagcgagatttgcagcgggagtggcagagcaattcgcaattgctgaggctaagttgcgggcttggagttcagttgacggtgaagactcaaccgacgattcttacgacgaggattttgctggaggtatggatactgacatggccggtcaactgccgctcgggcctcacttacaggatctatttaccgggcatcggttttcacgacctgtgagacaaggatctgtggagcccgagtcagactgtagtcagaccgtatcacccgacactttgtgctcctctctgtgctcacttgaagatgggctgcttggttcccctgcaagacttgcctcacagctactgggagacgagctgctgttagccaaactgccacccagtcgagagagtgcctttaggagtctagggcctctggaggcacaagacagcctctataattcccccctgacagaaagctgccttagccccgctgaagaggagcccgcaccttgcaaggactgtcagcccttgtgtccgccactaacaggctcatgggagcgtcagaggcaggcctcagatctggcgtcctcaggagtagtctcgttagacgaggatgaggccgagcccgaagagcagtag

SEQ ID NO: 10970 - DNA, 5171 bp, synthetic construct
  misc_feature 1..5171: note = source = /note="Description of Artificial Sequence: Synthetic coding sequence"
  source 1..5171: mol_type = other DNA
atgcagttccagctgaccctgttcctccacctcggctggctgtcatacagtaaagcacaggacgactgtaaccggggtgcatgccaccccacaacgggcgacttgctggtgggtaggaacacacaactgatggcatcttccacttgtggtctgtcccgggcacaaaaatattgcatacttagttacttagagggggagcagaaatgttttatctgtgatagtcgcttcccgtacgatccttacgaccagccgaactcccacactattgaaaacgttatcgttagttttgagcccgatagagagaaaaagtggtggcagtctgaaaacggtttggatcatgtgtcaattcggctcgacctcgaagcactgttccgtttctctcacctaatcctgacgttcaaaacattcagacctgcagctatgctggtggagcgttcaacggattatggacacaattggaaagtttttaagtatttcgctaaggactgtgcaacatctttcccaaatatcacttccgggcaggcgcaaggcgtgggcgacattgtctgcgactcaaagtattccgacatcgagcctagcaccggcggtgaagtggtgctcaaggtcctcgatccaagctttgaaattgagaacccatacagcccttatatccaggatttggtgacgttgactaacctgcgcattaacttcaccaagctgcacactctgggcgacgccctccttggtagacgacagaacgactccctggataaatactattacgcactgtacgaaatgatagttagagggagctgcttttgtaatggtcacgctagtgagtgccggccaatgcagaaaatgcgcggagatgtgttttccccacccggtatggtgcatgggcaatgtgtgtgccagcataataccgatggcccaaattgcgaacgttgcaaagacttctttcaggacgcaccttggaggcctgccgctgaccttcaagataatgcttgccggagctgttcctgcaatagccactcctcaaggtgtcacttcgacatgactacttacctggcctcggggggactgagcggtggagtgtgcgaggactgtcagcataatacagaaggccagcattgtgatcggtgcaggccgctcttttaccgcgatcctctgaaaaccatctctgatccctatgcctgtatcccttgcgaatgcgatccagacggcaccatctccggaggcatctgcgtcagtcattcggacccagccctcggcagtgtcgccggtcagtgtctctgcaaggagaatgttgagggcgcaaaatgtgaccagtgtaaacccaatcactatggcctcagcgccacagaccctcttgggtgccagccttgcgactgcaacccactgggatccctgccttttcttacttgcgacgttgataccggccagtgcctctgcctctcttacgttaccggcgcacattgtgaagaatgtaccgtagggtactggggactggggaaccatcttcatggctgttcgccctgtgactgcgatatcggtggggcatatagcaatgtttgtagccctaagaacggccagtgtgagtgccgcccacacgtgaccggccgatcttgttcagagcccgcaccagggtactttttcgctccactcaatttctatctttacgaggctgaagaggcgactactttacaagggctggccccactcggctccgagacctttggacagtcacccgcagtacatgtggttctgggggaaccagtgcccggaaatcccgttacctggacagggccaggtttcgcgagggtcctccctggggctggcctccggttcgctgtgaacaatatacctttccctgtggatttcaccatcgcgattcattatgagacgcagtctgccgctgactggacagtccaaatcgtggtcaacccccctgggggatctgaacattgcattcctaaaaccctccaatctaagcctcagtccttcgcattgccagcagccacccgcatcatgctgttacccacccctatttgcttggaaccggacgtgcagtacagcatcgacgtgtacttctctcagcctctgcagggagagagtcacgcccactcacacgtgttggtggactcattaggcctcatcccgcagattaacagcttggagaatttctgttcaaaacaggatcttgatgagtatcaactgcacaattgcgtggagatcgcctcagccatggggccacaagtcctgccaggcgcttgtgagagactgattatcagtatgtctgccaaactgcatgatggggcagtggcatgtaagtgccatccccaaggtagtgttggttcaagttgtagccggttagggggtcaatgccagtgcaaaccactagtagtgggaaggtgctgtgatagatgctcgaccggttcatacgacctgggccatcatggatgccacccttgccactgtcatccgcagggaagtaaggacactgtgtgtgaccaggtaacaggccagtgtccgtgccacggtgaggtgtcaggaagacgttgtgaccgatgcttggcagggtactttggcttcccttcatgccacccgtgtccctgtaacagattcgcagagttgtgcgacccagagacagggtcctgttttaattgcggcggatttactacagggagaaactgtgagcgttgcattgacggttactatggcaacccatctagcggacagccttgtcgaccttgcctgtgtccagatgatccgtcatccaatcaatacttcgcccattcatgttaccagaacctatggtcttcagatgtaatctgcaactgcctgcaaggatataccggtacgcagtgtggggagtgttcgaccggtttctatgggaatccaaggatatccggagcaccctgccagccatgcgcctgcaacaacaacatcgacgttaccgatccagaatcttgcagcagagtgacaggcgagtgcctgcgctgcctacacaacacccagggcgctaactgccaactgtgcaaacccggtcactatgggtcagctcttaaccagacctgtcgacggtgctcgtgccatgcttcaggtgtgtccccgatggaatgtccccctggcggtggcgcttgtctgtgcgatcccgttactggggcttgtccttgtctccctaacgtgacagggctcgcttgcgacagatgcgccgacgggtactggaacctggtccctgggaggggttgccagagctgtgactgtgatccacgaacaagtcaaagtagtcattgcgatcagctaaccggccaatgcccatgcaaactgggctatggcggaaagagatgcagcgagtgccaagagaattactacggtgacccacctgggaggtgcataccatgcgactgcaatagagcagggactcagaaacccatctgtgatcccgacaccggcatgtgtcgctgcagggagggggtgtctggccagcggtgcgacagatgcgccaggggacacagtcaggaattccccacttgcttacagtgccatctctgcttcgatcagtgggaccacaccatctcttccctcagtaaggccgtccaggggcttatgagactcgctgctaatatggaggataagcgggagaccctcccggtctgcgaggccgatttcaaagatctgcggggaaacgtttcagagatcgagcggatactcaaacatcccgtctttccttccggcaagtttctcaaggtgaaagactaccatgatagcgtccgccgtcagatcatgcaacttaatgaacagctaaaggctgtgtatgagttccaggaccttaaggacactattgagcgagcaaaaaatgaggctgatctgcttctcgaagacttacaggaggagatcgacctgcagagtagtgtgctgaatgcctccattgctgatagcagtgagaacatcaagaaatattaccatatatcctcatcagctgaaaagaagataaatgagacctcttctacaattaacaccagtgccaacacgcggaatgatcttctgacgattttagatacactcacaagcaaaggcaatctcagcttagaaagattaaaacaaatcaagatccccgacattcagattttgaatgagaaggtttgtggcgatcctggtaatgtgccttgtgtgcctctaccctgcgggggagcactgtgtaccggtagaaaaggtcatagaaaatgtcggggtccaggatgtcacgggagtctgaccctgtctacgaacgccctgcagaaggcccaggaggcaaagtctatcattcgcaatctagataagcaggtgcggggtctgaaaaaccagatagaatctattagtgaacaagccgaagttagtaaaaacaatgccctccagctgcgcgagaagctcggcaatattcggaatcaaagcgatagtgaggaggaaaatatcaatttgttcatcaaaaaggtcaagaactttcttctagaggagaatgtccccccagaagacatagagaaggtggctaacggcgtgttggacattcatctgcccatcccctcccagaatcttacagatgaactggtgaaaatccagaaacacatgcaactgtgcgaggattatagaacagatgagaaccggctcaacgaggaagccgatggcgcacagaagctcctcgtgaaggcgaaagctgctgaaaaggccgcaaacatcctgctgaatctggacaaaactctgaaccagctgcaacaggcgcagattactcagggcagggctaatagcacaataactcagctgactgcaaatatcacaaagatcaaaaagaacgtcctgcaagcagagaatcaaactagggaaatgaagtcagagttagagctcgcgaaacaacgctctgggcttgaggatggtcttagtctgctgcagactaaactgcaaagacatcaggatcacgcagtgaacgctaaagtgcaagccgaatctgcccagcatcaagcgggaagcctggagaaggaatttgttgaactgaagaagcaatatgccatccttcagcgaaagaccagcaccacgggcttgaccaaagaaaccttgggtaaggtgaagcagcttaaggacgctgccgagaaactggcaggcgacaccgaggccaagattaggaggatcacaggatgcttccagaattcagctcgata

SEQ ID NO: 10971 - DNA, 5285 bp, synthetic construct
  misc_feature 1..5285: note = source = /note="Description of Artificial Sequence: Synthetic coding sequence"
  source 1..5285: mol_type = other DNA
atgcaatttcagctcaccctgttcttgcaccttggctggcttagttattcgaaagcccaggatgattgtaatcggggagcctgccatccaacaactggcgaccttttagtaggtcgcaatacccagctgatggcctctagcacgtgtgggctttctagagctcagaagtactgcattctttcctatctggaaggggaacagaaatgcttcatttgtgatagtcggtttccctacgacccctacgaccagccgaattcgcacaccatagaaaacgtgatcgtgagcttcgagccggacagagaaaagaagtggtggcagtcagagaatggtctagaccacgtcagcattcgcctggacctagaggctctctttagattttcacacctgatacttacattcaaaacttttcgtcccgctgccatgctcgtggagcgaagtactgattatgggcataactggaaggtttttaaatacttcgccaaggattgtgctacctccttccctaacattacaagtggccaggcccagggggtgggcgatatcgtttgtgatagtaaatattcagatatcgaaccttccacagggggagaagtggtgctcaaagtacttgacccatcttttgaaatcgagaacccatacagtccttatattcaggatctagtcacactgaccaacctgagaataaactttaccaagcttcatacccttggggacgcactcctgggcagaagacagaacgattccctggataagtactattacgcgttgtatgagatgatagttcgaggtagttgtttctgtaacggccacgcctcggaatgcagacccatgcagaaaatgcgcggagacgtgtttagccctcccggtatggtccacggtcaatgcgtgtgtcaacataatactgacggacctaattgcgaacgttgtaaggattttttccaggacgctccatggagacccgctgccgatctacaggacaacgcatgtagaagttgcagttgcaatagtcatagcagccggtgtcacttcgatatgacaacatacctggcaagtggaggccttagcggaggggtatgtgaggactgtcagcataacaccgaaggtcagcactgtgatcggtgcagacctctgttttaccgcgacccacttaaaacgataagcgacccatatgcgtgtattccatgcgaatgcgaccctgacggaactatatcggggggtatttgtgtgagccattccgatcctgcgttgggatctgtggcgggtcagtgtctctgtaaggagaacgtcgaaggggcaaagtgcgatcagtgcaaacccaaccactacggattatcggctacagacccactgggttgccagccttgcgattgtaatccattgggatcattaccttttctgacgtgcgatgtagacaccggacagtgcttatgcctgtcatacgttaccggcgcacactgtgaggaatgtaccgttggatattgggggctgggtaatcaccttcacggatgcagtccatgcgactgcgacatcggcggagcctatagcaatgtttgctctcccaaaaatggccagtgcgaatgcaggccacatgtgacagggaggtcgtgtagtgagccagcccctggatacttttttgcgccactcaatttctacttgtacgaggcagaggaggcaactaccttacaggggctggccccattgggctctgaaacatttgggcagtctcctgcagtgcacgtggtgctgggagagcccgtgcccggaaacccagtgacctggacaggaccaggattcgctcgcgtgcttcctggtgcaggcctccggtttgccgtgaataacatcccgtttccagtcgatttcacaatcgccatccactatgagacacagtctgcagcggattggacagtccagatagtggtgaatccaccagggggttctgaacactgcattcctaagacattacaatctaagcctcagtcattcgcactgcctgctgccactcgaatcatgttgttgccaacccccatttgtctcgaaccagacgtgcagtactctatcgatgtctacttctcacaacccttacagggtgaatcccacgcccactcccatgttttagttgattctttaggactgattcctcagatcaatagcctcgaaaacttctgctccaagcaggacctggatgagtaccaactccacaattgcgttgaaattgccagcgccatgggccctcaggtactgcccggtgcttgtgaacggctgataatctctatgtccgcgaaacttcacgatggggctgtggcttgcaaatgccatccccagggatctgtggggtcatcttgctcccgtctcggaggacagtgtcagtgcaagcccctggtcgtggggaggtgctgcgatcgctgttccaccggctcctatgatctcggacaccatggttgtcatccctgtcattgtcacccgcagggaagcaaggacacggtctgtgaccaggtcacgggacagtgtccttgccatggagaggtgagtggtcgtcgctgcgacagatgccttgccggatactttggcttcccaagctgccacccttgtccttgcaataggtttgcagagctgtgtgatcccgagaccggttcctgtttcaattgtggcggattcaccacgggccgaaactgtgagcggtgtatcgacgggtattacgggaatcccagcagcggccagccatgtcgcccttgcctgtgtcccgatgacccctcttccaatcaatactttgctcactcttgctaccagaatctctggtccagtgacgtgatttgcaattgcctgcagggatacaccggaactcagtgcggtgaatgttctactgggttctacggaaacccacgaatctccggagcaccgtgccaaccctgcgcttgcaacaataatatcgacgtgaccgacccagaaagctgttcccgcgtcaccggtgaatgcctgaggtgtctgcacaatacacagggagccaactgtcaattatgcaagcctggtcactatggcagcgctttgaaccagacctgtagaagatgttcttgtcacgcctcaggcgttagtcctatggaatgcccccctgggggtggcgcatgcctgtgtgacccggttactggagcgtgcccctgcttgcccaatgtaactgggctggcttgtgaccgatgcgccgacggctattggaatcttgtgccagggagaggctgtcagtcctgtgactgtgaccccaggaccagccagagtagccactgcgatcagctcaccggacagtgtccgtgcaagctcgggtacggcggtaaaaggtgcagcgaatgccaggagaattattacggagatccccctgggcgatgcattccttgtgattgcaatcgggctggcactcagaagccaatttgtgatcccgacactgggatgtgcagatgtcgggagggtgtgagtggtcagaggtgcgaccggtgtgccagggggcacagtcaggagttccctacatgccttcagtgtcacctttgctttgaccagtgggatcacaccatttctagcctcagcaaggcagtgcaaggtctgatgcgcttggccgcaaacatggaggacaaacgagagacactgcctgtttgcgaggccgattttaaagacttgagggggaacgtatctgaaattgagaggatccttaagcaccctgtgttcccttcggggaagtttcttaaggtgaaggactaccacgattctgtgaggcgacagatcatgcagttgaatgaacagttaaaggcagtgtacgaattccaggacctcaaggatacaattgagcgtgccaagaacgaagccgaccttctccttgaggatctgcaagaggagatcgaccttcagtcttccgtactcaatgcctcaatagctgactcctccgagaacatcaaaaaatactatcacatttcatcctcggccgagaaaaagatcaatgaaacatcttcgaccattaatacctcggcgaacacccgaaacgatctgttaactatactcgacaccctgaccagcaagggaaacctgagccttgaacgactgaagcagatcaagatccctgacatacagatacttaacgagaaagtgtgtggcgacccagggaacgtgccctgtgtgccactgccctgcggcggtgccctctgcacaggccgtaagggccatcggaaatgcaggggaccagggtgccacggtagcctgaccctatccaccaatgccctgcaaaaagctcaggaggctaagagcatcatccgaaatcttgacaagcaagtgaggggactcaaaaatcaaatcgaatccatatctgagcaagctgaggtgtcaaaaaacaatgccctgcaacttcgcgagaagctcgggaacattcgtaaccagtcagactccgaggaagagaatattaacctttttattaagaaggtgaaaaacttcctgctggaggaaaatgtgccgccagaggacatcgaaaaggtggctaacggcgtgctggacatccacctgcctattcccagtcagaacctgacggatgagctggtgaagatacagaaacatatgcaactgtgtgaagattatagaactgacgagaatcgccttaacgaagaagcagatggcgctcagaagcttttggtcaaggcaaaggctgccgaaaaggccgctaatattctcctcaacttggataagacattgaaccaactgcagcaggcccagattacccagggacgggctaattccacaatcacccagctcaccgctaatatcacgaagatcaagaagaatgtcctccaggccgaaaaccagacacgtgaaatgaagtccgagcttgagctcgcgaaacagcgtagcggcctggaagacggactgtcgctgctgcagacgaagttgcaaaggcaccaggaccacgctgtcaacgctaaggtacaggcagagagtgctcagcaccaggcaggctcacttgagaaggaattcgttgaactgaaaaaacagtatgctatcctgcagcggaagacatccacaaccgggctgacaaaagagaccctgggaaaggtgaagcagctcaaagacgctgccgagaaattggcgggagataccgaagcgaagatacgcagaattaccgacctggagcgcaagatccaggacctcaatctctcccgccaggcgaaggcggaccagctacgcatcctcgaagaccaagtggtcgccataaaaaatgaaatcgttgaacaggagaaaaagtatgccagatgctactcgta

SEQ ID NO: 10972 - DNA, 1455 bp, synthetic construct
  misc_feature 1..1455: note = source = /note="Description of Artificial Sequence: Synthetic coding sequence"
  source 1..1455: mol_type = other DNA
atgggggctgaagcactcccaggacctgacgaagccgcagcagccgctgcgtttgccgaagtcactaccgtgactgtggcaaacgtcggtgcagccgcagataacgtcttcactacctccgtagctaatgccgcatctattagtgggcatgttctctcagggaggactgctctgcagattggtgatagcttgaatactgagaaagccacactgattgttgtacacactgatggttctattgttgaaacgaccggtctcaagggccctgcagctccgctcactcctggcccacagagcccgcctactcccctggcgcctggtcaggaaaagggagggaccaaatacaactgggatccctctgtatacgactccgagctgcccgtccggtgcagaaacatcagcggcacgctttataagaacagactcggtagcggtgggagggggcgatgtattaagcagggcgaaaattggtacagcccaacagaatttgaggcgatggctggacgggcttccagcaaagattggaaaagaagtatccgctatgccggacgcccactgcagtgtcttattcaggatggcatactcaacccacatgctgccagctgcacttgtgcagcatgttgtgatgacatgactctaagcggcccagtgcgacttttcgtgccgtacaagcgccgtaaaaaagaaaatgagctgcccactacaccagtgaaaaaggactcccccaaaaacatcactctactccccgctaccgccgcaaccacattcaccgttacgccctctggccaaataaccacatcaggagcactgacctttgaccgtgctagtacggtggaagcgacagcagtcatctcagaatcaccggctcagggggacgtcttcgccggagcaaccgtgcaggaggcgtctgttcaacctccatgccgggcttcacaccctgagccgcactacccaggatatcaggacagctgccaaattgctccctttcccgaagcggcactgcctaccagccatccgaagattgttctcaccagtttgccggctttggcagtgccaccgccaacccctacgaaggccgctccacccgctttagtgaatggactcgaactcagtgagccccgttcctggctttacttggaggaaatggttaactcccttctaaataccgctcagcagctcaaaaccctgttcgaacaagccaagcacgcctccacgtaccgcgaggccgcaacaaatcaggccaagatccacgccgacgctgagcggaaggaacagtcttgtgttaactgtggccgagaagccatgtctgaatgcactggttgccacaaagttaattactgtagtactttctgccaaagaaaaaggtggtctctcactatgctgacgtcactggtgtctatctcatggctgcgggctatcctgccatgccagcctccaaaagtcctgggactatag

SEQ ID NO: 10973 - DNA, 1512 bp, synthetic construct
  misc_feature 1..1512: note = source = /note="Description of Artificial Sequence: Synthetic coding sequence"
  source 1..1512: mol_type = other DNA
atgtctggagcgttactttggcccttacttccgctacttctactcctgctgtccgcgagggatggagtgagagccgcacagccgcaggctccaggctacctcatcgcggctccaagtgtattccgcgcaggagttgaggaagtcattagtgtgaccatatttaatagtccccgtgaggtcaccgtgcaggcgcagttagtggctcagggtgaacctgtggtgcaatctcagggggctatcttggacaagggaacgatcaagctgaaagtacccactggtctccgtgggcaagcactcctgaaggtatggggtagaggttggcaggccgaagaagggcctctgtttcacaatcagacctcggtgactgtggatggtcgcggagcctctgtgtttatccagacagacaaaccagtatacagaccccagcacagagttttgatctccattttcaccgtaagccccaacctgcgccctgtgaatgagaagctcgaggcctatattctggatcctcgaggttcccgcatgatcgagtggaggcacctcaaacctttctgctgcggtattacaaacatgtccttcccactttccgaccagcccgtcctaggggagtggtttatcttcgtagaaatgcaggggcacgcctacaataagagctttgaagtgcaaaaatatgtgctccctaaattcgaactgctaatcgacccccctcgctatattcaggatctggacgcgtgtgagactggtaccgtccgcgctaggtataccttcgggaagccagtggccggtgccctcatgattaacatgactgtcaacggagtgggctactacagccatgaggtgggccgaccagtgctgagaactacgaaaatcctcggctccagggattttgacatctgcgtgcgggatatgatcccggcagatgtgcctgagcattttcggggtagagtttcaatatgggcgatggtcacttcagtggacggctctcagcaggtggccttcgacgacagcacccctgttcagcgacagcttgtggatataaggtactctaaagatacacgaaaacagtttaagccaggcctggcttatgttgggaaagtagaattgagctacccagatggttctcctgcagagggggtcaccgtgcaaataaaggccgaactaacccctaaggataatatctacacatcagaggtggtctcccagagagggcttgtgggcttcgagattccctctatccctacttccgcccaacatgtgtggctggaggtgttccaggaactcgaggactatgacgtcagtgattcgtttggtgtgagtcgggaagatggcccattctggtgggccggattaaccgcccagcgacggagacgcagtagtgtctttccatggccatgggggatcaccaaggacagtggattcgctttcaccgtgcgtcgtggaaacgggacaggtggggacgatcgaccaagcgaacctgagcctccagctggtaggtggcctttacaccgatag

SEQ ID NO: 10974 - DNA, 144 bp, synthetic construct
  misc_feature 1..144: note = source = /note="Description of Artificial Sequence: Synthetic coding sequence"
  source 1..144: mol_type = other DNA
atgaaactgtgtgtaactgtcctctccctgctagtgttagtggccgcattctgctccctagctctgtccgccccaaaagccagtaagagtgccctgacccctgtttcccctggatcccgaagcacgtgcatgacttggaattag

SEQ ID NO: 10975 - DNA, 861 bp, synthetic construct
  misc_feature 1..861: note = source = /note="Description of Artificial Sequence: Synthetic coding sequence"
  source 1..861: mol_type = other DNA
atggaggtgtatatcaggcacttggaaaaagtgctgagaaggtacgtgcaacgtctgcaatggctgctaagcggacctgttctctgctctcgaacttggtatcgacagtccatggacagaggcgtgatgatgactgccgcttcaggctcaagacggctttttggcactgttctcgaaagcaaagtttgcatattgctcgacacatcaggctcaatgggcccatatctgcagcaggtgaagacagaactggtcctcctcatttgggaacagctgcgtaaatgttgtgattcattcaacctactaagtttcgcggaaagtttccagtcatggcaagataccctagttgaaactacagatgcagcttgtcacgaggctatgcagtgggtgacccatctgcaggcacaggggtccacgtccatcttacaggcattattaaaggcattttcttttcacgacctggagggcttgtaccttctaactgatgggaaacctgataccagctgtagcctggttctgaatgaggtgcagaagttacgcgaaaagagagacgtcaaagtgcacacaatctccttgaactgttctgatagagcagcagtggagtttctacggaagctggccagcttcactggtggcaggtaccactgtccggtcggggaagacactttatctaaaatacatagcctcctgaccaaagggttcataaatgagaaggaccccacactgcctccttttgagggagacgatctgcgcattttggcccaagagataacaaaagctagatccttcctgtggcaggcccagtcttttcgcagtcagctgcagaagaaaaacgatgctgagcctaaggtcacactgtcatag

SEQ ID NO: 10976 - DNA, 3555 bp, synthetic construct
  misc_feature 1..3555: note = source = /note="Description of Artificial Sequence: Synthetic coding sequence"
  source 1..3555: mol_type = other DNA
atgaaaaaatatcggaagatatcaattggctgctttgccatggccacccagacaagtcatgtgtttcatggccaggagaacatgtttctcgagaatcactgtattcggaggaacactggcagagacagtaaaaagccactgaagcagaagaatatgaatggattgggtcagaattccgataatggcctgctcgtgacacacgtcaaccagacacaggacctcctccggcttcagggctccgagacccaatcatccgactgggaggatagtgaggactggctttctgcccactccctcaagtgtcagaaacttactctggcagacctcatctctcaaggaaccgaggtgctggaggagggaaccaatgtggtgcaaaagatctgcttctcaacacagatcatacggcactttgaatccaagttgtcagacacaatcgaagtgtaccaggagcgcatacaatggttgactgaaaactctaaaaaggcattcgggcttattaagggagcgagagtctcaatcctgatagatgtgtcagccatctcctcaggaccacagaaggaggaatttcagaaggaccttatgagccttatagacgaacagttgagccacaaagaaaaactgttcgtgctgagctttggaacaaacgctggcagcctgtggcccgaccctatggaggtatccgcttcaaccctacaggagctgaaactttgggtgaaaacgctacagcccgatggaggatcaaacctgttgcaggcccttaagaagatttttaccctaaaggggctcgacagccttgtggcgattatgaggtcctgccctgaccagcctagcgagatcctgtctgattacatccagcagagtacgatgggtcgggacctgatcatccacttcattacttatagatgcgacgaccagatgccccctgctgtgttgaaaaacttggcggaggccgtgagaggctactaccattgctattctccaaagatggaacattacacctctcgcgatatggatgaacttctggccgagattcagaaagcacagtccctgctatcccacgtccaggctttacaacactcatctccgtgtgaggccctgacatgtacaatggaggaaattagcacagagatcactaacggtcctctcatcagcctgcttccgaaacccccaaagcatgacgcccctctgactatcgagttcccgaacctggacaaaacatccgccgaatggctgaaagtcaatggcttgaaggctaagaaactgtcgctgtaccaggtactggcccctaatgcgtttagccctgtggaagaattcgtgcccattttgcaaaaaaccgtgtcatcaaccattcacgaaaaggccatgatccagttcgaatggcatgacggaactgtgaagaacatccacgtggatccgccattcctgtataagtaccaacaacaactgtcacgggcaatgcgcatgtatgagaggcgcattgagtggctgagcttggcttcacggcgtatttggggcacagtctgtgagaagcgggtggtggttctccttgacatttcagctaccaattctatgtacatcatccatatccagcattcactgaggctgctcctggaggagcagttgtctaacaaggactgctttaatttgatcgcctttggcagcaccatcgaatcatggcggcctgagatggtcccggtgtcacacaataatctgcagtcagcatggcgctgggctctgaacttgcggtgcagagggtcgcgtaatgtgctgtcggcgctacggaaggctgtggaggtggatttcaaggataaggacaaacatcagtcccaaggaatttatcttttcacaggcggaatccctgaccaagacatgccaactttgtcagcttacatggcggaggcctgtggcggatgcgacctacagctcaacgtgtgccttttttacgtcggtgagcctaaaatggacactacaccgccagccaggtatgcctctcatacagatacagctgctgcttataaggaggtgacaagagccgcaggtggtcggtttcactggtttggagatactggaatctatgaatcggatgacattaacagcatcatgagtgaaatggagaaggccttgaactactctcagaaatgcgctttcctgatggcttcccttaagaatcacagcgggaaggtgctgggaagctccgccctacctaaagaaaaacctaagacactgcagctgagatcccagccaaagaagctgtgtccccctcggcctacagttccgctgggtgctagaatgtcaatcaaggacgaccccgaccgggaaaaaagcccacccttgaagtcactgaagtggcgcccattatcctctagggtcgggatctctcccgctgccgcacaaccaaccaaggaaggtatgatggagcttaggcgcaaaacaaaaagcagagaagcagagacgtctcttttgctgttttataccgagaaaggtaatgatgtgggatccgtgtacaaaaaatatcctcagggaagggggctacggagaacctcaagctctatagatttgcctcgcaaggatactgtgtgctcctcccaggaatgggtggccaagtatgggctgaaaaaacttaagcttgagatatcccgatgtatggggccaaattgcactcatcagaagagcggtcagcgctctgcctccgcaaaacactgttcgattttcccttccgtggagatacacggggtggtgagacacattcaatggaccccgcgagaaatggaagtctacattcgtcacttagaaaaggtgcttcggaggtatgttcagagactccagtggctgctgtctggcagccgccgactctttggaacagtgctggagtcaaaagtgtgcatcctcctggacaccagcggcagcatggggccatacctgcagcaggtaaagaccgagttagtgctcctcatctgggagcagctgcgcaaatgctgtgactccttcaaccttctgagctttgccgaatcattccaaagctggcaggacactctcgtcgagactaccgacgccgcatgccacgaagccatgcagtgggtgacccacttacaggcacaaggtagcacttcaatcttgcaggccctgttaaaggcattttcctttcacgacttagagggtctgtatctgctcacagatggtaagccggacactagttgtagccttgttcttaatgaagtccagaagttgagagaaaaaagagacgtcaaggtccacacaatctctcttaactgttctgaccgagccgcagtagagtttctgcggaagctcgcatctttcacagggggacggtaccactgtcctgtgggagaagacacgctctccaagatccatagtctgctgacgaaggggtttattaatgaaaaggatcccactttgcctcctttcgaaggagacgatttgaggattttggctcaggagattactaaagccaggagtttcttatggcaagcgcaaagcttccggagtcagctccagaagaagaatgacgctgagccaaaggttaccctaagctag

SEQ ID NO: 10977 - DNA, 906 bp, synthetic construct
  misc_feature 1..906: note = source = /note="Description of Artificial Sequence: Synthetic coding sequence"
  source 1..906: mol_type = other DNA
atgcttccactgaccatgaccgtgttgattcttctccttttacctaccggccaggcagctccaaaggacggggtcactcgcccagactccgaggttcaacatcagctgttaccaaaccctttccagccaggacaggagcagttagggctcctgcagagctacttgaagggattaggcaggaccgaagtacagctagaacacttgtctagggaacaggttctgctgtacctgttcgccctccatgattacgatcaaagcggacaattagacgggctcgagcttctgtctatgctgaccgcagccctcgccccaggcgctgccaactcaccaactaccaaccccgtgatactgattgtggacaaggtgcttgagacacaggatcttaacggcgacgggctcatgacacccgctgagctgatcaatttcccaggtgtggcactgcggcatgtggaaccgggagagcccctggccccatcgccccaggaaccacaagcggtagggagacagagtctgttggccaaaagcccattgcggcaggagacacaggaagccccaggtccaagggaagaggccaaagggcaagtggaggccaggcgcgagtcactcgatcctgttcaagaacccggaggtcaggccgaggcagacggtgacgtgcctggtccaagaggcgaggcagaaggccaagctgaagcaaaaggcgacgcccctggcccaaggggggaagctggcggacaggccgaagctgaaggggacgctcccggacccaggggggaagccggaggacaggcagaggctagagaaaacggagaggaggctaaggaactgcccggtgaaaccctagagagtaaaaatacacagaacgacttcgaggtccacatcgttcaagtcgagaatgatgaaatctag

SEQ ID NO: 10978 - DNA, 4722 bp, synthetic construct
  misc_feature 1..4722: note = source = /note="Description of Artificial Sequence: Synthetic coding sequence"
  source 1..4722: mol_type = other DNA
atgcgggttctagcctgtctgctcgcagcgctagtgggcattcaggccgtggagcggctgcgactagccgacggccctcacgggtgcgccggaagacttgaggtgtggcatggtgggaggtggggaacagtctgcgacgatggctgggatttacgcgacgcagctgttgcctgtagacaactgggctgcgggggtgccctggctgcgcctggaggggctttttttggagagggagccggacccgtctggcttagcgagctggcttgccgtggtaatgaaggacaattgggcctgtgtcaccaccggggttggaaagcacacatttgttcccatgaggaggatgcaggggtggtgtgcgctggccagcgcgtggccaattcgcgtgatgactcaacatcgccgctggatggtgcaccatggccaggccttctgctcgagctgtctcccagcacagaagagccactggtgacacatgctccacgccctgccggaaatccacaaaacgcgtcgagaaaaaaaagtcctaggcccaagcaggcaaagagtactcgtgcccctctgttaactaccggggctccacgccaggagcgcttgcgattggtgagtggaccccatcgctgcgcgggacgcctggaggtatggcacggaggccgatggggaacggtgtgcgatgatggctgggacctgcgggatgccgctgtcgcatgtagagagctaggctgcggcggagcgctggctgcgccaggtggagcaagattcgggcctggagccggaccagtttggatggacgatgtcggctgcggcggtggagagcaggccctgcgggactgcccaagatctccttggggtaggagtaactgcgaccatagtgaggacgctggactggtgtgcaccggtcccgctcccaggctgaggctagccgacggtccccacggctgcgccggacggctggaggtgtggcatggagggaggtgggggagcgtctgtgacgacgcatgggatttgcgggatgcagccgtggcgtgcagggaactgggatgtgggggagctttggccgcaccaggcggtgcatttttcggcgaaggttctggtcctatcatcctcgacgacctaagatgcagggggaacgagacggccctacgattctgcccggcacggccatggggccagcacgattgccatcatcgtgaagacgcaggcgcagtgtgtgatggcatgccactaggatatgttcctccgactgctcccactgatagcaataattccaccccaagagaggctgcctcccggccaccatctactatgacctctcaggccccaggcactgccggagtttcccccccaccggcatcaccaacagtgctgtgggaacccggacctgaagcaggctcccctcagcttcggcttgtcgccggaccctccaaatgcagcgggagattggaggtttggcacgatcagcgatggggtacagtctgcgatgatagctgggacatgcgcgactcagccgtagtctgtagggagctcggttgtggcggtcctcagcagcctgaccccgcagcagggaggttcggctggggtgcaggcccaatctggctagatgacgtgggttgcgttgggaccgaagcctcactgagcgattgtcctgccgctccatgggggaaacataactgtgctcacaatgaggacgttggggttacgtgcaccgggcctcccggtctcgatagtataagtgatcctttcagctggtcttggatacccggtctgggacgcgaccgcgacgcgtggctgcctggggagcttgcaacaaaaccaagtgcgtctgtcaccgcttctgtactggagaagactactactaaggctccaggcaagatgcccaagtccaccaaaaaatgggtgaccaaaaacgccaagagacctactactcaacctcctgtgatgccaaccactaagcactctagagcccagagtcctcccgacctcacatctcaaacaaccgctgccctgactaccgaggccagccggaggcccacatcagaattcacccgccgtcctaccacagaggctcctcagaggtggacgtcacatacaacagccacattgaccccccaggctccccgagaaagaactaccaaaactatggcgatgttaacaacacagggccctcaggaaatgacaagcgagtctactattaagtcaatacctcaggcctctctggagccttccgcggagattccagagggctctcccgaatctcccaaggatcctgccccatccccaagtgtcagcaccacaggggagtccggcctgttccgagtgcgcctggcagacggacctaataggtgtgcgggaagattggaagtttggcatgccggaaggtggggcaccgtctgcgacgacaattgggacctgcgagacgccactgtggcgtgctgggagctcggctgcggtaaagtgcgccctagagtgggaaaaacgcactacggaccaggaactggccctatctggctggacgacatgggctgcaaagggtctgaggcaagcctttctgattgtccgtccggcgcatgggggaagcacaactgcgaccacgaagaggatgttggcctgacctgtaccggatacaccgattatgacgattacccaccctggacgtgggatcctactagtagagaggacctggccaagggtactactaccgccggtgtaccgggacatacgttgccgtggagaaccacccgcagacccggatcctcaagtcctgctattagacgcctgccagataccggatccaaagacggctataagctcccatggacttgggatacgccttccgggcgaggcctggctgagggtaccccgacggcagggaaattaggccctactctgggagcaggcactacacgttcccctgggtctcctccgacattgcgtgtgcacggagatactggaagccctaggaagccctggcccgagagaaggcctcctcggccagcagcgacgcggaccgctccacccactccttcccccggacccagtgcctcacctgggccacccggacctgctcttacctccgactcatcccgcgaattaactccgcactcagccctgacatccgaggcgaccagcgatgctccagatacatccccccctacacccgaccccgcttccaggactaaccccgatttgatattaacgtcccccgattttgccctgtcaacacccgatagtagcgttgtcccagccttgacgcctgagccgagtcctaccccactgcctaccctacctaaagaattgacatcagatccctcaacaccatctgaggtgacaagcctgagccccacttccgagcaggtgcccgagtctgataccacacctgacctggacacgaccccttactcaagtactgtttcagaatattcccgttctcccgatccttcgcctagcccacatccaactacaacgcccgaccccaccatggctcccgatccaatcactacactaaacccaacagtaaccccacatttccccacaaccccccatcctacaacaacaccgcatccaaccacaatcacgcatagcaccatgatccccgatccaactaccactccacagccttttactaccattactcatagtaccatgataccggaccccactaccaccccacaacccttcactacaatgcagccgacaacaacccctcactcaaccactcctcaccctaccacaaccccgcaccctaccaccataacacatagtaccatgattcctgacccgactacaacaccgcagcctttcacaactatgcaacccacaacaatgccacatcccactactaccccacatccaaccactacaccccatccaacaacaactccccatccaacaaccacaccacatccgacgatgactcccgatccaacaactactccttaccccacgacgacacccgatccgacaacaacccctcatccaaccaccccagatccttcatctacccctgtgatcacaaccgtgtccctccccacatcgttgggaaccgagttgagttccccaaccctggctcctacagtaaagccgtctctgcaccctcagttgacttttacagctccggcaccccatacatccacttcacagattcccaccttggagccgtcccccgctttggaatctagtcctagcaggtctagcaccgccactagcatggatcctttgtcaacagaagactttaagccgccaaggtctcagagccctaatctgactccgcctcccacccacacccctcactccgcctctgatctgaccgtgtcacctgaccccctcctctcccctaccgcacaccctcttgaccacccgccattagatcctctgaccctgggcccaacacccggacagtcgcccggaccgcacggaccttgcgtcgcccctacccccccagtgcgcgtgatggcgtgcgagcctcccgcattggttgagctcgtggccgcagtgcgggatgtggggggacagctgcagcggttgacacaggtggtcgaacaagagcggcaggagcgccaagctcttcttctgggcctcacacagttagttgaggccgcacgagggttgggccaactgggggaagcagttaagagactggccgagatggcgtggacaacatcgatgcccgctccaaccacaactactccagaggaggaagaacgtcccctcaggggcgatgtctag

SEQ ID NO: 10979 - DNA, 1911 bp, synthetic construct
  misc_feature 1..1911: note = source = /note="Description of Artificial Sequence: Synthetic coding sequence"
  source 1..1911: mol_type = other DNA
atgaccacttggagccttcgccgaagacctgctcggacccttggtctccttctcctcgtggtgctgggctttctagtgcttcgcagactcgattggagtactctggttccgctacgcctgaggcacagacagttagggttgcaggcgaagggatggaattttatgcttgaggattctaccttttggatatttggcggaagtattcattatttcagggtgcctcgagagtattggagggaccgcttactgaagatgaaggcctgtggcctaaataccctaaccacatacgtgccatggaatcttcacgagccggagagggggaagttcgacttctcggggaatttggatctcgaggcattcgttttgatggctgccgagataggcctgtgggtcattctgaggcctggaccgtacatctgctccgagatggatctcggcggactgcccagttggctcctgcaagaccccggaatgcgcttgcgcacaacatataagggattcaccgaagccgtagatttgtacttcgaccatctgatgtcccgagtagtgccccttcagtacaagaggggcggtccaatcattgctgttcaagttgagaacgagtacggcagctacaataaggatcctgcttacatgccgtatgtgaaaaaggccctggaggatcgcggaattgttgaactgctactcactagtgataacaaggatgggctgagcaagggtattgtgcagggcgtcctcgccacaatcaacctgcagtcaacccacgaactgcaactccttacaacctttctctttaacgtgcaggggacgcagcctaaaatggtcatggaatattggactgggtggtttgattcctggggcggtccgcacaatatccttgattctagtgaggtgcttaaaaccgtctctgccatagtagatgctggttcaagtattaacctgtacatgtttcacgggggaacgaattttggttttatgaacggcgctatgcactttcatgattacaaatccgatgtcaccagttatgactacgatgcagtgcttacggaggcaggagactatacagcgaaatacatgaaactccgtgatttttttggaagtatctctggcattccattaccaccacctcccgaccttttacctaagatgccatatgaaccgttgactccagttctatacctgagcctctgggacgcattgaagtaccttggggagccaataaagagtgaaaaaccaattaacatggaaaacctgcctgttaatgggggaaatggtcaatcgtttggctatattctgtatgagacaagcattacgagcagcggtatactatccggtcatgttcatgatagaggacaggtctttgtcaacaccgtgtccatcggcttcctggactataagacgactaaaatcgctgtgcccctaatacaaggatataccgttctgcggatccttgtggagaacagaggcagagtgaactacggggagaacatcgatgaccagagaaagggtctgatcggcaacctttatctgaatgatagcccattaaaaaattttcggatttattctttagacatgaagaagtccttcttccaacgctttgggcttgacaaatggagctctctgcccgaaacacccactctacctgctttcttcctgggatccctctccatcagtagcacaccatgtgatactttcttaaagttggaggggtgggaaaaaggcgtcgtattcataaacggccagaacttgggcagatactggaacataggcccacagaaaaccctttatctacccggtccctggctgtcaagcggaataaatcaggttattgtgttcgaggaaaccatggcaggcccagcactccaatttaccgagactccacatctcggcaggaaccaatatatcaaatag

SEQ ID NO: 10980 - DNA, 2037 bp, synthetic construct
  misc_feature 1..2037: note = source = /note="Description of Artificial Sequence: Synthetic coding sequence"
  source 1..2037: mol_type = other DNA
atgcgaacggtggtgctgaccatgaaggcctcagtcatcgaaatgttcctggtgctgctggtcactggtgttcacagtaacaaggagacagccaagaagattaaacgccctaaatttactgtccctcagattaactgtgacgtcaaggccggaaagatcatcgaccccgagtttatcgtgaaatgccctgccggttgtcaagaccctaagtatcatgtgtacggcactgacgtgtatgcgtcctattcatctgtttgtggagcggctgttcattcaggggtattggacaattccggcggtaaaatactagtgcgaaaagtggctgggcagtcgggatacaagggctcctacagcaacggcgtgcagagtctgagcttgccacggtggcgggagtcattcatcgtccttgagtcgaaaccgaaaaaaggtgttacttacccatctgctctcacctattcatcatccaaatctcccgctgcccaggctggcgaaactaccaaagcttaccaacggcctcccatccccggtaccactgcacagcctgtcaccctgatgcagctccttgcagtgacagtcgccgtagctaccccgaccactttacctcgcccatcaccctccgccgcttctaccacaagcatccccaggccccagagcgtaggacaccgttcccaagaaatggatttgtggagcacggccacctataccagctcacagaaccggccaagagccgaccccggaatacagcggcaggatcctagcggagcagcctttcagaaacctgtgggggctgacgtgtctcttgggctcgtaccaaaagaagaattaagcacgcagagtctggagcctgtgtccttgggggatccaaattgcaagattgatctgagcttcctgatagacggctctacttccatcgggaagaggagatttcgcatccagaaacagctgctggctgatgtggcacaagccctggacatcggccctgcaggaccgcttatgggcgtggtgcagtacggagacaaccccgcaacacatttcaatctaaagacccacacaaatagcagagatctgaaaaccgcaatcgagaagatcacacaacgcggaggtctctccaatgttgggagggcaatttctttcgttaccaaaaatttcttcagtaaggccaatggcaatagatctggagcgcctaatgttgtggtggtgatggtcgacggatggcctactgacaaagtggaagaggcctcaaggttggcccgtgaatcaggcatcaatattttcttcattactattgaaggcgcagctgagaacgagaagcagtatgtcgtggagcctaattttgccaataaggcagtgtgccgaacaaacggcttctactccctgcacgtccagtcatggtttggactgcataaaaccctgcagccgttagtgaaaagggtatgtgacacagaccggctggcctgtagcaaaacgtgcctgaatagcgccgacataggctttgtgatagatggaagctctagcgtaggcacaggaaacttcaggacagtcttgcagttcgtgactaacttaactaaagagtttgagatctcagataccgacaccaggattggagctgttcagtacacatatgagcagaggcttgaattcggttttgataaatattctagcaagcccgatatcctgaatgctatcaaacgcgttgggtactggagtgggggaacctcgactggcgctgccatcaactttgcactagagcagctcttcaagaaatctaagcccaacaaacgcaagcttatgatcctaattacagacgggaggagctacgatgatgtgcggatccccgctatggccgctcacctgaaaggcgtgataacatacgcaatcggtgttgcctgggccgctcaggaagagttggaagttattgcaacacatcctgctcgtgatcatagcttttttgttgatgaattcgataatctgcaccagtatgtgccgagaattattcaaaatatctgcacagaatttaacagccagccccgaaattag

SEQ ID NO: 10981 - DNA, 324 bp, synthetic construct
  misc_feature 1..324: note = source = /note="Description of Artificial Sequence: Synthetic coding sequence"
  source 1..324: mol_type = other DNA
taaactgttgctgcacccagcgtttttattttccctccgagtgacgagcagcttaagtcaggtaccgccagcgtcgtctgtctcctaaataacttttatcctagagaggccaaggtgcagtggaaggttgacaacgccttgcaatctggcaatagccaggaaagcgtcactgagcaagactctaaggactctacgtactccctgagttcgacgctgacactgtcaaaagccgattatgaaaaacacaaagtgtacgcatgcgaggtaacacatcaggggctgtcaagcccggtcactaagtcctttaacaggggcgaatgctag

SEQ ID NO: 10982 - DNA, 366 bp, synthetic construct
  misc_feature 1..366: note = source = /note="Description of Artificial Sequence: Synthetic coding sequence"
  source 1..366: mol_type = other DNA
atggttttgcagacgcaagtatttatcagcctgttactttggatttcaggagcatatggtgacattgttatgactcagtcgcctgattccttagcagtgtcactgggggaacgcgcaactattaattgcaagtctagccaatcggtactgtattcctctaacaataagaactatttagcctggtaccaacagaaacctgggcaaccccctaagctcctgatttactgggccagcactcgcgagagcggcgtgcctgaccgcttttctggaagtggttccgggaccgatttcacgctaactataagctctctgcaggcagaggacgtggccgtttactattgtcaacagtactacagtactccatag

SEQ ID NO: 10983 - DNA, 984 bp, synthetic construct
  misc_feature 1..984: note = source = /note="Description of Artificial Sequence: Synthetic coding sequence"
  source 1..984: mol_type = other DNA
gccagcaccaaggggccaagcgtcttcccactagcaccgtgctctaggagtacatccgagtctacagccgcactggggtgcctcgtgaaagattacttcccagaaccggtaaccgtgtcatggaactccggcgctctgacttctggtgttcacactttccccgctgttctgcaatcatcaggtttgtatagcctgtcatccgttgtcacagtccccagcagctccttggggaccaagacctatacttgcaatgtggatcataaacccagcaatactaaggtcgataagagggtggagagcaagtacggccctccatgccccagctgcccagctccagaatttcttggtggtccttcggtgttcctgtttccacccaagcctaaggataccctcatgatctctagaactccagaggttacctgtgtggtggtggatgtgtcccaagaggatcccgaggtgcagtttaactggtacgtggatggtgtggaggtacataatgctaagacgaagcccagagaagagcaattcaacagtacataccgcgtggtgagcgtactgacagtacttcaccaggattggctgaatggtaaggaatataagtgtaaagtgtctaataaaggactgccaagctccattgagaaaaccatatctaaagcaaagggacagcctcgcgagcctcaagtctatactttgccaccctcccaagaggagatgacaaagaaccaggtgtccctgacatgtcttgtcaaaggtttctatccgtctgatatcgctgtggagtgggagtccaatggccagccagaaaacaactataaaaccacccccccagtgctggatagtgatggctcctttttcttgtatagcaggctgaccgttgacaaatcccgttggcaagaggggaacgtgttttcatgctccgtgatgcacgaagccctgcataaccattatactcagaagtcgctaagcctgagcttgggtaagtag

SEQ ID NO: 10984 - DNA, 981 bp, synthetic construct
  misc_feature 1..981: note = source = /note="Description of Artificial Sequence: Synthetic coding sequence"
  source 1..981: mol_type = other DNA
gccagcacaaaaggtccatccgtcttccctctcgcgccttgcagccgaagcacatctgaaagtaccgcggcactgggctgcctcgttaaagattacttccctgagccagttactgtgtcttggaactctggagccctaacgtctggagtgcacacctttccagctgttcttcagagtagcgggttgtacagcctctcttcagtagtgaccgtgccatctagcaactttggaactcagacctacacttgtaacgtggaccacaagccatccaatacaaaggtggataagaccgtggagagaaaatgctgcgtcgagtgtcccccatgccctgccccacccgtggccggaccgagtgtttttctgtttccccctaaacctaaggatacactgatgatctctaggaccccagaagttacttgcgtggtggtggatgtcagccacgaggaccctgaagtacagtttaactggtatgtggatggcgtggaggtccataacgccaaaaccaagcccagggaagagcaattcaacagtacctttcgagtggtgtccgtgctaacagtggttcatcaggattggttgaatgggaaagagtacaaatgcaaagtgtcaaacaagggtctgcccgctcccatagaaaagacaatttcaaaaacaaaggggcagcccagagaacctcaggtgtacacactgccaccatctcgggaagaaatgacaaagaatcaagtgtctctaacttgtctggtgaaagggttttatccatctgatatttctgtcgagtgggaatccaacgggcaacccgagaacaactacaaaactacgcccccaatgctggactccgatgggagcttttttttgtactccaagctcactgttgataaaagcaggtggcagcaggggaatgtgttttcttgtagcgtgatgcatgaagcattacataaccactacacccaaaagagcctttcactgagtccaggaaaatag

SEQ ID NO: 10985 - DNA, 993 bp, synthetic construct
  misc_feature 1..993: note = source = /note="Description of Artificial Sequence: Synthetic coding sequence"
  source 1..993: mol_type = other DNA
gcttccactaagggcccatcagtgtttccgctggcaccatcatcgaagagtacctcagggggaaccgccgcacttgggtgcttggtgaaagactactttccagagcctgtgacagtttcttggaatagcggcgctctgacttcaggagtccataccttccccgctgtcctgcagagctccgggctgtattctcttagttcagtggtaactgtgcctagctcgagcttgggcacacagacatacatatgcaacgtgaatcacaagccatcaaacacgaaggtggataagaaggttgaacccaaaagttgcgacaagacccacacctgcccaccatgccctgcccctgaactcctaggcggaccgagtgtgtttctcttccctcctaagccaaaggatactctgatgatcagccgcacaccggaggtcacctgcgtcgtcgtggatgtgtctcacgaagacccagaggtaaagttcaactggtacgtggacggagtggaagtccacaatgccaaaactaagccccgtgaggagcaatacaactccacctacagagtggtgtctgttttgactgtcctccaccaggattggctaaatggtaaggagtataaatgcaaagtttcaaataaggccttgcccgctccaatcgagaagacgatctcaaaggccaaaggccagcccagagaaccgcaggtatacactttgcctccttcacgtgacgagctgactaagaatcaggtgtccctgacctgtctcgtgaagggcttttaccccagcgacatcgcagtcgaatgggagagtaacgggcagcctgagaacaactacaaaactactccgcctgtgctggattccgatggaagcttcttcttatactccaagctgacggtagacaaaagccgctggcagcagggcaatgtgttttcctgttctgtcatgcatgaggccctacataatcactacactcagaagtctctgagcctgtcccctggcaagtag

SEQ ID NO: 10986 - DNA, 651 bp, synthetic construct
  misc_feature 1..651: note = source = /note="Description of Artificial Sequence: Synthetic coding sequence"
  source 1..651: mol_type = other DNA
atgggagcagtgatgggcaccttcagcagcctgcagactaagcagagacgccctagcaaagacaagattgaagatgagctggagatgactatggtctgtcacagacccgagggcctggagcaactggaagcacagactaattttacaaaacgggagttacaagttctgtaccgcggatttaaaaacgagtgtccttccggcgttgtgaatgaagacacgtttaagcagatatacgcacagtttttcccgcacggagatgcaagtacatatgcccactatctgtttaacgccttcgacactacgcaaaccgggtcagtgaagttcgaggacttcgtgacggcactgagcatcttactgagaggaacggtgcacgagaaattgaggtggacattcaacctttatgatatcaacaaggatggctacatcaataaggaagagatgatggatatagtgaaggccatctacgatatgatggggaagtatacgtaccccgtcctaaaagaagacacaccccgacagcacgtggacgtgttctttcagaaaatggacaaaaacaaggatgggattgtcacactggacgagttcctcgaaagctgccaggaagatgacaacattatgcgctcgcttcagttgtttcagaatgttatgtag

SEQ ID NO: 10987 - DNA, 762 bp, synthetic construct
  misc_feature 1..762: note = source = /note="Description of Artificial Sequence: Synthetic coding sequence"
  source 1..762: mol_type = other DNA
atggccaggtcattactcctacccctgcagatccttctattgtctctggccctagagacggcgggtgaagaagcacagggggataaaataattgatggagcgccatgtgcacgaggtagccatccttggcaggtggctcttctgtctggaaaccagctgcattgcggaggtgttctcgtgaacgaaagatgggtactcactgccgcacattgtaagatgaacgagtacaccgtacatctgggctctgacactctgggggacagacgagcgcagagaatcaaggcctctaagtctttccggcatcctggctatagtacgcagacgcatgtaaatgacttaatgcttgtgaagctcaactcccaggctaggctgagttcaatggtcaaaaaggtgagactcccaagcaggtgtgagccacccggtacaacctgcactgtgtccggatggggaaccaccacctcacctgatgtcacatttccatctgacttaatgtgtgtggatgtcaagctgatctctcctcaggattgcaccaaggtctataaagacctgttagaaaatagcatgctttgtgcaggcatacccgactcaaagaagaacgcttgcaacggggattcaggagggccacttgtgtgtaggggaactttgcaggggctcgtgagctggggaacctttccatgcggtcaacccaacgatcccggagtgtacacgcaggtctgtaagttcactaaatggattaacgacaccatgaagaagcacaggtag

SEQ ID NO: 10988 - DNA, 468 bp, synthetic construct
  misc_feature 1..468: note = source = /note="Description of Artificial Sequence: Synthetic coding sequence"
  source 1..468: mol_type = other DNA
atgttccagcgattgctgctgctacttctcctgtcaatgggaggaacgtgggccagcaaggagccccttcgcccaagatgtaggcccattaacgcgacattggctgtggaaaaagagggttgcccggtttgtattactgtgaatacaacaatatgtgccggttactgtccaacaatgacccgagttctccagggcgtactcccggctctgccacaggtggtttgcaattatagggacgtcaggtttgaatccatacgcctacctggatgtcctaggggcgtgaatccagtggtctcctacgctgtcgcattgtcatgccagtgcgccctgtgccgacgctcaacgacggattgcgggggaccaaaagatcaccccttgacttgtgacgacccgagattccaagactctagctcatcaaaggcacctccgccaagcctcccaagcccctctcgactgcccggtccctag

SEQ ID NO: 10989 - DNA, 1554 bp, synthetic construct
  misc_feature 1..1554: note = source = /note="Description of Artificial Sequence: Synthetic coding sequence"
  source 1..1554: mol_type = other DNA
atggctgtaagccgaaaagattggtccgctctaagttccctagcaagacagcgaactctggaagacgaggaagaacaggagcgggagcgccgacgtcgacaccgtaacctgagttctacaacggacgacgaggcccctcgccttagtcagaacggggatcggcaggcttccgcctccgagagactgccgagtgtggaagaagccgaagtgccgaagcccctccccccagctagcaaggatgaggacgaggatatacagtctattctgcgcacccggcaagaacggcgacaaaggagacaggttgtggaggctgcccaagcacccatccaagagcggctggaggctgaggagggcaggaatagcctgtctcccgtccaggctacgcaaaaacccctcgtgagtaagaaagaactcgaaatacctcctagaaggcgtctgtctcgggagcagcgcggtccatgggcgctggaagaagaatctctcgtgggcagggagccagaggagcgcaagaagggcgtgcctgagaagagccccgtactcgagaaatcatctatgcccaagaagacagccccagaaaagtcccttgtctcagacaagactagcatttcagagaaggtcctggcttccgaaaagacatccctgtctgaaaagattgccgtttccgagaagcggaattcttctgagaaaaaatcagtactggagaaaacgtctgtctcagaaaagtccttagcgccagggatggccttgggctctggaaggcggctcgtcagcgaaaaggcttccattttcgagaaagccctggctagtgaaaagagccccaccgctgatgccaaacctgcacctaagcgcgctacagcttccgagcaaccgctggctcaggaaccgcctgcgtcgggtggctcccctgccaccacaaaggaacagcggggaagggcattacccggaaagaacctcccgtccctagccaaacagggcgcttccgacccgcctacagtggcgagcagattaccacctgtaacactacaggtgaagattcccagtaaggaagaggaagcagatatgtccagtcctactcagagaacctactcttcctcattaaagaggagcagcccacgtacgataagcttcagaatgaaaccgaaaaaggaaaatagcgagaccacccttacacgaagcgcttctatgaagcttcccgacaacactgttaaactcggagaaaaactcgaaagatatcacacagcgattaggcggtcagagagcgttaaaagcagaggcctcccttgtactgagctgttcgttgcacctgtgggggttgctagcaaaagacatctttttgaaaaggaactagccggacaaagtagggctgaacccgctagttcgcggaaagaaaatctgcggctttctggagtagtaacgagccgcctgaacctgtggatcagtcgcacccaagaaagtggtgaccaggatccacaggaggcacagaaggccagctcagctacagagcgaacccaatggggacaaaagtctgactcctccttagacgccgaggtctag

SEQ ID NO: 10990 - DNA, 270 bp, synthetic construct
  misc_feature 1..270: note = source = /note="Description of Artificial Sequence: Synthetic coding sequence"
  source 1..270: mol_type = other DNA
atgcaggcctgcatggtgccgggtttggctctctgcctcttgctcgggcctcttgccggtgctaaaccagtgcaggaggaaggagacccttatgccgaactgccggctatgccttactggccattctccaccagcgacttttggaactacgtacaacacttccaagccttgggggcttatccccagattgaggacatggcacgcacgttttttgcacactttcctttaggttctactttgggctttcatgtgccatatcaagaggattag

SEQ ID NO: 10991 - DNA, 1302 bp, synthetic construct
  misc_feature 1..1302: note = source = /note="Description of Artificial Sequence: Synthetic coding sequence"
  source 1..1302: mol_type = other DNA
atgggcaatgcatgttgggagctgtactgtttagagcatggaatccagcctgacggacaaatgccctcagataaaactatagggggaggggacgactcatttacaacgttcttttgcgagacaggcgctggtaaacacgtgcccagagccgtgttcgttgatctggagccaacagtgatagatgaaattcgcaacgggccttataggcaattatttcatcccgaacagctaattacaggcaaggaggacgccgctaataattatgcccgaggccactacaccatcggtaaagaaatcatagaccccgtgctggatcggatccgaaagctaagcgatcagtgcacagggcttcaaggctttttggtgtttcactcattcggcggtggcacaggcagtggtttcacaagcctgcttatggaacgcctctccgttgactacggcaagaagtcaaaactggaattttctatataccccgctcctcaggtgtcaacagcagtggtagagccctacaactcaatacttacgacacacactacacttgaacattcagattgtgcatttatggtcgacaacgaagccatatatgatatttgtcgtcgcaaccttgacatcgaaagacctacctataccaacttgaaccgcctgatctctcaaatcgtgtcctctattaccgctagtctccgcttcgatggcgctttaaatgtggacttaaccgagttccaaactaatctcgttccctatcccaggattcattttcccctggccacctacgctcccgtgatctcagcagagaaggcgtaccacgaacaactgtctgtggccgaaatcaccaacgcttgtttcgaacccgcaaaccagatggtcaaatgcgatccacggcacggcaagtatatggcttgctgtctgctctaccgcggagatgtggtaccgaaggacgtaaatgcagccatcgctgcaatcaagaccaaacggtcgatccaatttgtggattggtgcccaaccggcttcaaggtgggcatcaactatcagcccccaactgtagtgccaggcggagacctggccaaggtccaaagagctgtctgtatgctctcaaataccactgccattgccgaagcttgggccagactggatcacaagtttgatctgatgtatgccaaacgtgcattcgtccactggtatgtgggcgaggggatggaggaaggtgaattcagcgaggctcgcgaggatatggcggcactcgaaaaagattacgaagaagtcggaattgatagttacgaggacgaggacgagggcgaagagtag

SEQ ID NO: 10992 - DNA, 1965 bp, synthetic construct
  misc_feature 1..1965: note = source = /note="Description of Artificial Sequence: Synthetic coding sequence"
  source 1..1965: mol_type = other DNA
atggctcccaagaagctgtcttgtctccgctccctactgctcccactcagtcttacactgcttttaccacaggctgatacgcgctctttcgtggtggatcggggacatgatcgatttcttctcgatggcgcacccttccgctatgtgtcaggatcacttcattatttccgggtgcctagggtgttatgggctgatcgtctccttaagatgcgctggtcaggactcaatgcgatccagttctacgtgccgtggaactatcatgagccccagcctggtgtgtacaactttaatggtagtagagatctcatcgcatttctcaacgaggccgctctcgccaacttactggttatcctcagacctggaccatatatttgcgccgaatgggaaatgggaggccttccctcatggctccttagaaagcccgagatccacttacgcacttctgatcctgactttctggccgctgtagattcatggttcaaggtgctactccccaagatttatccctggttgtaccataacggaggcaatattataagcattcaggtggaaaatgagtacggttcttacagggcctgtgacttctcttacatgagacacctggcaggcttgttcagggcactgttgggagagaagatcctgttgttcaccaccgatggaccagaaggtctgaagtgcggctcgctgcggggactgtatactaccgtcgactttggtccggcagataatatgacaaagatcttcaccctactcaggaaatatgaaccgcacggtcctctagttaattcggaatactacacaggatggctggattattggggacagaatcatagtacaaggagcgtgagtgccgtcacaaagggcctggagaacatgttgaaactgggtgcttctgtgaatatgtacatgtttcatgggggtactaatttcggctactggaatggcgcagacaagaagggacgcttcttgccgattactactagttatgactacgatgcgccaatctccgaggcgggagacccgaccccaaagctttttgctctccgcgacgtcatttccaagtttcaggaagttccactgggccctcttccccctccatcacccaagatgatgctcgggcctgtgacccttcaccttgtcgggcacttgttagcgttcttagatctgctctgcccccgagggccaattcactccatactcccgatgacctttgaagcagtcaagcaggaccacgggtttatgctatacagaacctatatgacccacaccatatttgagcctaccccgttctgggtgcctaacaacggagtgcacgaccgggcatacgtgatggttgatggggtttttcagggtgtggtggagcgcaacatgcgagataaactgtttttgactggcaagttaggcagcaagctcgacatactcgtagaaaacatgggcagactgtctttcgggtccaattcgtccgacttcaaaggactgctgaaacctcccattctcgggcagaccattcttacccagtggatgatgtttcctttgaagatcgataatctcgtgaaatggtggtttccattacaactgcctaagtggccctatccccaagccccatccggtccaacattctattccaagacctttcccatcctcggtagtgtcggggatacttttttgtacctccccggatggacaaaaggacaggtttggataaatggcttcaacctgggaaggtactggacgaagcagggcccacagcagaccctttatgttcctcgtttccttctgtttccaagaggtgcgttgaacaaaataacattgctggagctggaagatgttccactacagccacaggtgcaatttctggataaaccaattctgaacagcacctccacactccaccggacccacataaattccctgagcgccgacaccctgagcgcatccgagcctatggaactgagcggccattag

SEQ ID NO: 10993 - DNA, 1173 bp, synthetic construct
  misc_feature 1..1173: note = source = /note="Description of Artificial Sequence: Synthetic coding sequence"
  source 1..1173: mol_type = other DNA
atgaaatttcagggccctctggcatgtctgctgctggctctctgcttgggctcgggcgaagccggaccccttcagtctggagaagagtctactggcaccaacatcggagaggcactgggacacggactcggggacgctctgtctgagggggtgggaaaagccataggtaaggaggcaggaggtgccgcaggctccaaagtgtcagaagccctggggcaggggacaagggaagccgttggcacaggggtccgccaggtgcctggatttggagtggcagatgccctgggcaatcgagttggcgaggccgctcacgccttagggaacacgggccacgaaattggccgacaagccgaggatgtaatccggcacggcgcagacgctgtacgcggatcctggcagggtgtgcctgggcacaatggggcttgggagacgtctggtggccatggcatctttggctcgcaagggggtctcggcggacagggccaggggaacccaggcggactgggcacaccgtgggtccatggctaccccggaaactcagctggcagcttcggcatgaatccccagggcgctccatggggccaaggagggaatggcggtcctcccaatttcggaacaaatacccagggcgcagttgcccagccgggttatggctccgtgcgtgcctccaatcagaacgagggatgcacaaatcctccaccctcaggctccggcggaggatcatcaaactcaggtggcggtagcggctcacagtcaggtagtagtggatccggttccaatggggataataataatggctcttcatctgggggatcttcctcaggctcaagctccggcggaagcagtggcggaagctctggtggcagctctggcaacagcgggggaagcaggggagatagcggaagcgaaagttcatggggctcgagcaccggttcttcatccggaaaccacgggggttccgggggaggtaacggtcacaaacccggatgtgaaaagcctgggaacgaggcacggggaagtggcgagtctggtattcagggttttagaggacagggggtgtcatcgaatatgagaaacagtgagactagccctggaatgtttaattttgataccttttggaaaaacttcaagagcaagctggggttcattaactgggacgccattaacaagtag

SEQ ID NO: 10994 - DNA, 846 bp, synthetic construct
  misc_feature 1..846: note = source = /note="Description of Artificial Sequence: Synthetic coding sequence"
  source 1..846: mol_type = other DNA
atgggctcccgtggtcagggcctcctgctggcatattgccttctgctagccttcgccagtggactggtgttgagtcgggtgccgcatgtccagggagagcagcaggaatgggagggaacggaggaactccccagcccacccgaccatgccgaacgggctgaagagcagcacgaaaagtatagacccagtcaagaccagggcttgcccgcatctaggtgccttagatgttgcgaccccggaacttctatgtaccctgcgaccgctgtgcctcagataaacatcacgattctgaaaggggagaagggagatcggggagaccgagggctgcagggaaaatacggcaagaccggcagtgctggcgctcggggacacacaggccctaaagggcagaaagggtcgatgggagctccgggagagcggtgtaagtctcactacgccgcattttccgtggggagaaaaaagcctatgcatagcaatcactactatcagaccgttatctttgataccgaatttgtaaatttatacgaccattttaacatgtttacaggcaagttttactgttatgtgcccggactgtacttttttagcctaaacgtgcacacttggaaccagaaggagacctacctccacatcatgaagaacgaggaggaggtcgtaatcctgtttgctcaggtgggggacagaagcatcatgcagtcccaaagtctcatgctggaactccgcgaacaagaccaggtgtgggtacggctttataagggagagcgcgagaatgctattttttctgaagaactagacacgtacattacattcagcggttatctggtgaagcacgccactgaaccctag

SEQ ID NO: 10995 - DNA, 876 bp, synthetic construct
  misc_feature 1..876: note = source = /note="Description of Artificial Sequence: Synthetic coding sequence"
  source 1..876: mol_type = other DNA
gtgttgagtgctagcggccctgggaggaagatgggctcccgaggacagggtctgttgcttgcctattgtctgctgcttgcatttgctagtggcctcgtcttgtctcgtgttccccatgttcaaggcgagcagcaggaatgggagggcacggaagaactgcctagcccacccgaccatgctgagcgggctgaggagcaacacgagaagtatagaccatctcaagaccaagggttgcccgcttcacggtgcttgcgatgttgcgatccaggaacaagcatgtatccagccaccgctgtaccccagattaatattactatcttaaaaggtgaaaaaggcgatcggggagaccggggtttgcagggcaaatatggaaagactggctctgccggtgcaagagggcatactggccctaagggtcagaaagggtcaatgggagccccaggtgagcggtgcaaaagccattacgccgctttcagcgttgggcgaaaaaagcctatgcactccaaccactattaccagacagttatatttgacactgagtttgtaaatctgtacgaccactttaacatgtttactgggaagttctattgctacgtccccggactgtacttctttagcttgaatgttcacacgtggaaccagaaggaaacttatttacatattatgaagaatgaggaagaggtggtgattctgtttgcacaggttggcgacagaagcatcatgcagagccagagtctgatgttagagctgcgagaacaagatcaagtatgggtgagactctacaagggagaacgggagaacgccatcttttccgaagagctagatacatatatcacgttttctggttacttggtgaagcatgccactgagccatag

SEQ ID NO: 10996 - DNA, 1002 bp, synthetic construct
  misc_feature 1..1002: note = source = /note="Description of Artificial Sequence: Synthetic coding sequence"
  source 1..1002: mol_type = other DNA
atggtctcgaagagccgctggaaactcctggcgatgctggctctcgtcctggtcgtgatggtctggtattcaatttccagagaggatcgatacatcgaacttttttacttccccattcccgagaaaaaggagccctgcctacagggcgaggctgagtcaaaggccagtaagttgtttggcaactacagtagagatcagcccatcttcctccggctggaggactacttctgggtaaaaaccccaagcgcatatgaactgccatacggcacaaagggatctgaggacctccttctcagagttctcgccattacctctagcagcatccccaaaaacattcagtccctaagatgcaggcggtgtgtggtggtcggtaatggtcaccgcctgaggaatagcagtctaggtgacgccataaataagtacgatgttgtgatccgattgaacaacgctccggtcgctgggtatgagggcgatgtgggatctaaaaccacaatgaggctgttttatcccgagagcgcccactttgacccgaaagtggaaaacaatcctgacactttactggtactagtcgccttcaaagccatggacttccattggatcgaaactatcctgagcgacaaaaaacgcgttaggaaggggttctggaaacagccacctttaatctgggatgtgaatcccaagcagatacgaatcctgaatccctttttcatggagattgccgctgacaagctcttaagtttaccgatgcaacagccgaggaaaatcaaacagaagcccaccaccggtctactcgcgataactctcgccctccacctttgcgatctggtgcatattgcaggctttggatatcccgatgcttacaataaaaagcagacaatccactattatgagcagatcaccttaaaaagtatggccggatcagggcacaacgtctcacaggaggcattggccatcaagcggatgctggagatgggagccattaaaaacctcacaagtttctag

SEQ ID NO: 10997 - DNA, 312 bp, synthetic construct
  misc_feature 1..312: note = source = /note="Description of Artificial Sequence: Synthetic coding sequence"
  source 1..312: mol_type = other DNA
atgagcggtaggggcaaggggggaaaaggactggggaagggtggggcaaagcgacaccgcaaggttttacgggacaacattcaaggtatcaccaaaccggctatccggaggctggccagacgtgggggagtcaaacggatctctggcctcatatacgaagagactcgaggtgtactgaaggtgtttctcgaaaacgtcatccgcgacgccgtgacttacactgagcacgcgaagagaaaaacagttacagcgatggatgtggtttacgccctgaagcgtcagggcagaacactttacggtttcgggggatag

SEQ ID NO: 10998 - DNA, 312 bp, synthetic construct
  misc_feature 1..312: note = source = /note="Description of Artificial Sequence: Synthetic coding sequence"
  source 1..312: mol_type = other DNA
atgtctggacgcggaaagggcggtaaaggcctgggaaaggggggagccaaaaggcaccgcaaagtgctccgggacaacatacagggtattacgaagcctgcaattcgacggctggccagacggggaggagtgaagcgcatatctgggttgatttacgaggaaacccgcggagttctaaaagttttcttagagaacgtgattagggacgccgtgacctataccgagcacgctaagagaaagactgtcacagccatggacgtggtatacgccctgaaaaggcagggcagaacactttatggtttcggcggttag

SEQ ID NO: 10999 - DNA, 312 bp, synthetic construct
  misc_feature 1..312: note = source = /note="Description of Artificial Sequence: Synthetic coding sequence"
  source 1..312: mol_type = other DNA
atgtctggtcggggaaaagggggtaaagggctgggaaagggaggcgctaagaggcacagaaaagtgctcagagataatatacagggaatcacaaagcccgctattcggagactggcgcgacgcggaggtgtcaagagaatcagcgggctgatctacgaggagacacgtggcgtactgaaggtgttcttggagaacgtcatcagggacgctgttacgtacacagagcacgctaaacgcaagaccgttacggccatggatgtggtgtatgcattaaaacggcaagggcgtaccctgtacgggtttgggggttag

SEQ ID NO: 11000 - DNA, 312 bp, synthetic construct
  misc_feature 1..312: note = source = /note="Description of Artificial Sequence: Synthetic coding sequence"
  source 1..312: mol_type = other DNA
atgagtggacggggaaaggggggaaagggcctcggcaaaggaggggctaagcgccacagaaaggtgctcagggacaacattcagggaattactaagcccgctatacgacggcttgcaaggcgcggtggggtcaagaggatctccggattgatatatgaagagacgagaggcgtgctcaaggtattcctcgagaatgtaatcagggacgcggtcacttacaccgagcacgccaagcgtaaaacagttacagccatggacgtggtgtatgcactgaaaaggcaaggcaggacactgtacgggttcggcggatag

SEQ ID NO: 11001 - DNA, 2268 bp, synthetic construct
  misc_feature 1..2268: note = source = /note="Description of Artificial Sequence: Synthetic coding sequence"
  source 1..2268: mol_type = other DNA
atgcccccattcctcctcctggaggctgtgtgcgtctttttgtttagcagggtgcccccttctctgcccctccaagaagtgcacgtttccaaggagactatcgggaaaattagcgctgcttctaaaatgatgtggtgttctgctgcagtagacatcatgtttttgctagacggcagtaactcggttgggaaggggtctttcgaaagaagcaaacatttcgccattacggtatgtgacgggctggatattagcccggagcgagttcgggtcggcgcttttcagttcagctcaaccccccacctggaattccctctcgatagcttctccacccagcaagaggtgaaagccagaattaagagaatggttttcaaaggtggtaggactgagactgagctggccctgaaatacctgctgcatcggggtctacccggaggcagaaatgcaagtgtgcctcagatcttgatcatcgtaacggatgggaagtcacagggcgacgtcgccctcccttcaaagcaactcaaggagcgtggggtcacggtgttcgcagtcggggttaggtttccgaggtgggaggagttgcacgccctagccagcgaacccaggggtcagcacgtcctgctagccgaacaggtagaggacgccactaatggcctatttagtactttgtcctcaagcgcaatttgctcatcagctacccctgactgcagagtggaggcccatccttgtgagcataggacgctggagatggtgcgggaatttgcaggaaatgcaccatgttggaggggcagtcgcaggacactggcagtccttgccgctcactgcccattctactcctggaaaagagtgtttctgacgcacccagcaacatgttatcggaccacttgccctggaccctgtgatagccagccctgccaaaacgggggaacatgcgtcccggaaggactggacgggtatcagtgtctgtgcccgctggcatttgggggtgaagccaattgtgctctaaagctctctctggagtgtagggtcgatctgttgttcctgcttgactccagcgcagggacaacccttgacggatttctgcgcgcaaaagtgtttgtaaagcggttcgtgcgtgctgtattgagtgaagactccagagctagagtgggtgtggcaacgtacagccgcgagctgctggtggctgtgcccgtgggcgagtatcaagacgttcctgatcttgtctggtcgcttgatggcatcccttttcgtggagggccaaccctgactggttctgctctccggcaggccgctgaacgtggcttcggcagtgccaccagaacaggccaggaccgcccacggagggttgtggtgctgctaaccgagagtcacagcgaagatgaggtagcgggtcctgcccgtcatgccagggctagagagctcctgctgctgggagtgggttcagaagccgtgagagcagagctggaagagatcacagggagccctaaacacgttatggtttactccgatcctcaggacctgttcaaccagataccggagctgcagggtaagctgtgctccagacagcgacccggttgtaggacgcaagccctggatttggtctttatgctcgacacttccgcctccgttggccctgagaactttgctcagatgcagtcttttgttcgctcttgcgctttgcagttcgaggtcaatcccgacgtgacgcaagtggggctcgtggtgtacgggtcacaggtacaaacggctttcggactggatacaaaaccaaccagagcagcgatgctccgtgctatatcccaggctccctacctgggcggtgtgggatctgcaggtaccgctcttctgcacatttatgacaaggtgatgacagttcagcggggtgctaggcctggagtcccaaaagccgtggtggttctgactgggggacgcggtgctgaggacgctgcagtcccggctcagaagcttcgaaacaacgggataagcgttctggtggtcggtgttggccctgtcttatctgagggcctgcgtcgactggctggcccacgggactccctgatccacgttgccgcatacgctgacctccgttatcaccaggacgtgcttatcgagtggttgtgtggagaggccaaacagccagtaaacttgtgtaaaccaagcccttgtatgaatgagggcagctgtgtactgcagaatgggtcatacagatgcaaatgccgcgatgggtgggaaggtcctcattgcgagaatagattcctccgcaggccttag

SEQ ID NO: 11002 - DNA, 816 bp, synthetic construct
  misc_feature 1..816: note = source = /note="Description of Artificial Sequence: Synthetic coding sequence"
  source 1..816: mol_type = other DNA
atgataacgggtgtgtttagcatgagactgtggacccctgtcggcgtactcacgagcctggcatattgcttgcaccagcgcagagtggctcttgccgaactgcaggaggccgatggacagtgcccagtcgaccgctctcttctgaaacttaaaatggtgcaggtggtgttccgccatggggctcgctccccactgaagccactcccactggaggagcaggtggaatggaaccctcagctcctggaggtcccaccacaaactcagttcgattacactgtgacaaacctagcagggggtccaaagccatacagcccctatgacagccagtatcatgaaactaccttaaaagggggaatgtttgcaggccagctaacaaaagtgggcatgcagcagatgttcgctctcggtgagcgcttgcgcaaaaattacgtcgaagatatccccttccttagtcccacattcaatccgcaggaggtgttcatcaggagcacaaacatttttcgcaacctggagagcaccagatgtcttctcgccggattgttccaatgccagaaggaagggcctataatcatacatactgatgaggccgattccgaggtgttatacccaaactaccaatcttgttggtcattacgacaaagaacaaggggacgacgccagaccgcgtctctgcagccagggatctctgaagatctgaaaaaggtgaaggatagaatgggaatagatagtagtgataaggtcgatttcttcatcctactggataacgttgccgctgaacaagagaagatgggttcctgtcggttccacggctcttag

SEQ ID NO: 11003 - DNA, 1395 bp, synthetic construct
  misc_feature 1..1395: note = source = /note="Description of Artificial Sequence: Synthetic coding sequence"
  source 1..1395: mol_type = other DNA
atggagcatagcgtgtgccctagctccgcggtgcatctcattcccgtgagcacccccaaaaacgggatgtctagtaagtcaagaaagagaatcatgccggacccagtcacggagccccctgtgacagatccagtttacgaggccctgctgtactgcaatattccttcagtggccgagcgcagcatggaggggcatgcaccacaccattttaagctggtctccgtgcacgtttttatcagacacggtgatcgataccctctgtatgtaatccctaaaacaaaaagacctgagattgactgtaccctggtggcaaatcgaaaaccttaccatcctaaactagaggcattcatatctcatatgtctaagggctctggcgctagttttgaatccccgctgaactccctaccactttaccctaatcaccccctgtgtgagatgggtgaactgacgcaaactggtgtcgtgcagcacctgcagaacggtcaactgttacgtgacatatacctgaaaaagcacaagctgctgccgaacgactggagcgccgatcagctgtatctcgagaccaccggcaaaagccgaacgctgcaatcaggcctggctctgctgtatgggttcttaccagactttgactggaaaaaaatttatttccggcaccagccaagtgccttattctgctcaggatcatgctattgccctgtgcggaaccagtacttggaaaaggagcaacgacggcaatacctgctgaggttgaaaaacagccagctggaaaaaacatatggagagatggccaaaatcgtggacgtgcccacaaagcagctgcgggctgcaaatccgattgacagcatgctgtgtcatttttgccacaatgtaagctttccttgtacacggaatggctgcgtcgacatggaacattttaaggtaattaaaacccatcagatcgaggatgagagagagcggcgtgagaagaaactgtacttcggatattctcttttgggcgcacatccaattctgaatcaaacgattggcaggatgcagcgggctacagagggcagaaaggaagaactgtttgccttatatagcgcccacgacgtgacgttgtcccctgtcctgagcgctctcggtctctcagaagctcgctttcctcggtttgccgctcgccttatctttgaactttggcaggaccgggaaaagccctctgaacattccgtgcgcattctatacaacggcgttgacgtgacatttcatacgtcattctgccaagatcatcacaaacgatccccgaagcccatgtgccccttggaaaatctggtcagattcgtcaagcgggacatgttcgttgctctgggaggctctggtacaaattattatgacgcatgccatagagaagggttctag

SEQ ID NO: 11004 - DNA, 1443 bp, synthetic construct
  misc_feature 1..1443: note = source = /note="Description of Artificial Sequence: Synthetic coding sequence"
  source 1..1443: mol_type = other DNA
atgctattccgaaaccgatttctcttattgctggcactggccgctctgttagcgtttgtgagtctgagcctgcagtttttccacctaattccggtatcgacccccaaaaatggtatgagcagcaaatcacgtaaacggatcatgccagaccctgtcacagaaccacccgtcacggatccggtttacgaagctcttttatattgtaatattcctagcgtggccgagagaagcatggaaggtcacgcccctcaccattttaagcttgtttcagtgcatgtgttcatcagacacggcgatcgataccccctgtatgtcatccctaaaacaaagaggcccgagattgattgcacactggtcgctaatcggaagccctaccaccccaagctggaggcttttatctctcatatgtccaagggcagcggcgcaagctttgaaagtcccttgaactctttaccattatacccaaatcatcccctgtgtgaaatgggggagcttacccagacaggcgtcgttcaacacctccagaacggacagctgctccgcgatatatatttaaaaaagcataaactgctgccaaacgattggtctgcagaccaactttacttggaaactaccggcaaaagtcggactcttcagagtggattggctctgctctatggttttctacccgacttcgactggaagaaaatatatttccggcatcaaccaagcgctttgttctgtagcggctcatgctattgtcctgtgcgaaaccagtacctcgagaaggaacagagaaggcagtacctacttcgcctgaagaattctcaacttgagaaaacgtacggagagatggccaaaatagtggacgtacccactaaacagcttcgagccgctaaccctattgattcaatgctgtgccacttttgccataatgtctcttttccttgcacaaggaatggctgtgttgacatggaacatttcaaggtgatcaagactcatcaaatcgaggacgagagggaacggagagaaaaaaaactttatttcggttacagtctgctcggggctcatccgatcctgaaccagaccatcgggagaatgcagagggctacagagggaaggaaagaggagctgtttgcactttatagcgctcatgacgttacacttagccccgttctaagtgcattgggacttagcgaagccaggtttcctagattcgcagcgagactgatcttcgaactctggcaggatagggagaagccgtctgagcactcagttagaattttgtacaatggagtcgatgtgacttttcacacaagcttttgtcaggaccaccataagagatcacctaaaccgatgtgtccacttgaaaatttggtgcgcttcgtgaaacgagacatgttcgttgcactgggcggatctgggaccaattattatgatgcctgtcatcgggaaggcttttag

SEQ ID NO: 11005 - DNA, 1311 bp, synthetic construct
  misc_feature 1..1311: note = source = /note="Description of Artificial Sequence: Synthetic coding sequence"
  source 1..1311: mol_type = other DNA
atgcagggcaccccgggtggaggaacgaggccaggaccttccccggtcgacagacgcaccctgctggtgttctcttttatactcgccgcagctctggggcagatgaatttcacgggagatcaggtccttagagtgctggcgaaagatgagaaacagctctctctcctcggagacttggagggactcaaacctcagaaggtagacttctggagggggcctgctagaccttccctcccagtggatatgcgcgtcccattttccgaactcaaggatataaaggcctacctggaatcgcacggtctcgcttactcgattatgatcaaggatatacaggtactgctcgacgaagaaaggcaagcgatggcaaaaagccgcagactcgagcggtctactaatagtttctcttactcgtcttatcataccctggaggaaatttactcgtggattgataattttgtaatggagcattctgacatcgtgtcaaagatccagatcgggaatagcttcgaaaatcagagcatcttggtgctgaagttcagtactggagggtctcggcatccagccatatggatagacaccgggattcattctagggagtggatcacacatgcgaccggaatttggacggcaaacaagattgtttctgattacgggaaggaccgggtccttaccgatatccttaacgcgatggacatttttatcgagcttgtgaccaaccccgacggattcgctttcacccatagcatgaacaggttgtggagaaagaacaaatcgatccgcccaggcatcttttgcattggcgtcgatctgaacaggaactggaaaagcggcttcggaggaaacggatccaattctaacccttgctctgaaacttaccacgggccttcacctcagtccgagcctgaggttgccgctattgtcaattttattaccgctcatggaaatttcaaggcactcatttctatccactcctacagtcagatgctcatgtacccatacgggagactgctggagcccgtctccaatcagagggagttatacgatttggcaaaggatgccgtggaggctctctataaggtgcacggaatcgagtacatcttcggaagcatctctaccacactgtacgtagcctcaggaataaccgtagactgggcatacgatagtgggatcaagtacgctttctcgtttgaactcagggacacagggcagtatggcttcctgttacccgctactcagatcatacccaccgctcaggaaacgtggatggccctgaggacgatcatggagcatactctaaatcacccgtattag

SEQ ID NO: 11006 - DNA, 1161 bp, synthetic construct
  misc_feature 1..1161: note = source = /note="Description of Artificial Sequence: Synthetic coding sequence"
  source 1..1161: mol_type = other DNA
atggcacagtggcattgttctcagcgtactcaggccggaggacacggggtgggagagagattagcgcagtgccaggaccagtcttctcggcacgccgctgaacttcgtgattttaagaataaaatgctgcccttactggaggtggccgaaaaagagagagaagctctgcgcactgaagccgacactatctctggccgagtggaccgtctggaacgcgaagtcgattacctggagactcaaaaccctgcccttccctgtgttgaatttgatgaaaaggtgaccgggggacctggaaccaaaggaaaaggaaggcgcaacgagaaatatgacatggttaccgattgcggatacaccattagccaggttcgctcaatgaaaatcctgaaacggtttggaggaccagccggtctgtggactaaagaccccctggggcagactgagaagatctacgtgctggatgggacacagaatgacaccgcatttgtattcccacggctccgggacttcacgctcgccatggctgcgaggaaagcctcacgagtcagggtcccatttccctgggtgggcacaggtcagttggtgtacggcggtttcctatatttcgcacggcgtccacccggaaggcccggtgggggtggcgagatggaaaatacattgcagctgatcaaatttcacctggcaaaccgtaccgtggtggactccagcgtattcccggctgaaggtctcattccaccctacggcctcaccgcagacacctacatagacttggcggcagatgaggaaggcctttgggccgtatacgccacccgtgaggacgaccgtcacctgtgtttggctaaacttgaccctcaaaccctggacacagagcagcagtgggataccccctgccctagggagaacgcagaagcagcattcgtgatctgtggaaccctgtacgtggtctacaacacgaggccagcttccagggctagaatccagtgttcttttgatgcctcgggaaccctgactccagagcgcgctgctctgccgtatttcccacgcagatacggggcacatgcctctcttagatacaatccgagagaaaggcagctctatgcctgggacgatgggtaccagatcgtgtacaagctcgagatgcgaaaaaaagaagaagaggtgtag

SEQ ID NO: 11007 - DNA, 990 bp, synthetic construct
  misc_feature 1..990: note = source = /note="Description of Artificial Sequence: Synthetic coding sequence"
  source 1..990: mol_type = other DNA
atgcgcccacccccagccctggccttagccggactgtgccttctcgcgctgccggctgctgcagcctcatactttggcctgactggccgagaagtgctcacaccattccccggacttggaaccgcagcggctcctgcgcagggaggagcacacctaaaacagtgcgacctattgaagctcagccgtcggcagaagcaactgtgtcgacgtgaaccaggcctggctgagacattgagagatgcagcacatctcgggctcttggaatgccaattccagttcagacacgagcggtggaattgttcattggagggcaggatgggtttactgaaacgcggattcaaagagacagcattcctttacgccgtgtcttccgctgcacttactcacacccttgctagagcgtgttcagccggaaggatggagcgctgtacatgtgatgacagccctggtttggagtccagacaggcctggcaatggggggtgtgcggcgacaatctgaagtacagcacaaaattcctgtcgaatttcttgggttccaagcggggaaacaaggatctgcgggcacgggcagacgcccataatacccacgtgggcatcaaagctgtcaaatccgggctgagaaccacctgtaagtgccacggagtctcagggagctgcgccgtgagaacttgttggaaacagctcagcccctttagggagacgggccaggtcctgaagcttcgctacgattccgccgtgaaagtgagcagcgcaacgaacgaggcactcggcaggctggagctctgggcccctgctagacaggggtcactgaccaaaggcttagcacctcgctccggagatctagtgtacatggaagactcgccatccttctgccgcccatctaaatattcaccaggaacagcgggatggtctgctgtcgctaggagtcaactgatcacgacgtcaaccagtaggattcaagctatcttgccctcccaactgccggaatag

SEQ ID NO: 11008 - DNA, 579 bp, synthetic construct
  misc_feature 1..579: note = source = /note="Description of Artificial Sequence: Synthetic coding sequence"
  source 1..579: mol_type = other DNA
atgagactggccggtccagaatcttctgttaccgcagcgcctcgagctcgcaagtacaaatgcggtctgccccaaccgtgtcctgaggagcaccttgcattcagggtcgtgtccggggctgcaaatgtgatcgggcctaaaatctgtctcgaggacaagatgctcatgagctcagtgaaagataacgtcggccgaggccttaacatagcacttgtaaacggagtgagtggtgagcttattgaagcacgcgcattcgacatgtgggctggcgatgtgaacgacctgttaaaatttatcaggccgctgcacgagggcactctggtattcgtcgcaagctatgacgatccggctaccaagatgaatgaggagacacgcaagcttttctcagagttgggatcccgcaatgcaaaagagctggcattccgggattcctgggtgttcgtcggagccaagggagtgcagaataaaagcccattcgaacagcacgtgaaaaactctaaacatagcaacaaatatgaaggttggcccgaggccctcgaaatggaagggtgcatcccccgaagatctacagcctcatag

SEQ ID NO: 11009 - DNA, 1053 bp, synthetic construct
  misc_feature 1..1053: note = source = /note="Description of Artificial Sequence: Synthetic coding sequence"
  source 1..1053: mol_type = other DNA
atgaagtgctccctgcgagtgtggttcctctcagtggcattcctgttggtgtttatcatgtcactgcttttcacatactctcatcacagtatggcaacactcccttatttagactcaggcgcactggacggcacccatagagtcaaattggtgcctggctacgccggacttcagagacttagcaaagaacggttatccggaaagtcctgtgcctgtagacgttgcatgggagacgctggagcttcagactggttcgattctcattttgatggcaacatcagccccgtgtggactcgtgagaacatggatctgccaccggatgtgcagaggtggtggatgatgttgcagccacagtttaagtcccacaatacaaacgaggttctcgagaagctcttccagatcgtgcccggtgagaacccatatagattccgggacccccaccagtgccggcgatgtgccgtggttggcaattccggaaatctgcgcggttcgggatacggccaggatgttgacgggcacaacttcatcatgcgtatgaatcaggccccaacagttggttttgaacaggacgtgggatctaggacaacccaccactttatgtaccccgagtccgctaaaaacctcccggcaaatgtcagctttgttctcgtaccttttaaggtgctggacctcctatggatcgccagcgccttaagcaccgggcagattcgcttcacatacgcccctgtcaagagtttccttcgggtggataaagagaaggttcagatttataaccccgctttttttaagtacatccacgataggtggaccgaacatcacggacggtacccatccaccggcatgctggtcctgttctttgccctgcacgtgtgcgatgaagtaaatgtctatggcttcggcgcagactcacggggaaactggcaccattactgggagaacaataggtacgcaggagaatttcgaaagacaggcgtgcatgatgcagactttgaggcccatatcatagacatgttggcaaaggcctccaagattgaagtgtatcgtggcaattag

SEQ ID NO: 11010 - DNA, 189 bp, synthetic construct
  misc_feature 1..189: note = source = /note="Description of Artificial Sequence: Synthetic coding sequence"
  source 1..189: mol_type = other DNA
atgaaaattcagttgttcttttttattctccatttctgggtgaccatactaccagccagatcgaattttgaaccaaagtaccgctttgagcggtgcgagaaggtccgcggaatctgtaagactttctgcgacgacgtggaatacgactacggatattgtatcaagtggcgcagccaatgttgtgtttag

SEQ ID NO: 11011 - DNA, 738 bp, synthetic construct
  misc_feature 1..738: note = source = /note="Description of Artificial Sequence: Synthetic coding sequence"
  source 1..738: mol_type = other DNA
atgacgctcttcccagtgctgttgtttcttgtggccggtctgctccccagtttccccgcaaatgaagacaaggacccagcatttaccgccctcctaacaactcaaacgcaggtccagcgcgaaattgtgaataaacacaacgaactgcgaagagccgtgtctcctcctgcccgtaacatgctgaaaatggagtggaacaaggaggcagcggcaaatgcccagaaatgggccaaccaatgtaactacagacactccaacccgaaagatcggatgacatcactcaaatgtggagagaacctgtatatgtccagtgctagcagctcatggagtcaggctatccagtcttggtttgatgaatacaacgatttcgactttggcgttggcccaaagacccccaacgcagttgtcggacactacacccaggtcgtgtggtactcgtcgtacctcgtcggatgtggtaacgcctactgcccaaatcagaaagttctgaaatattactacgtttgtcagtactgcccggcagggaactgggccaaccggctttatgtgccctacgagcagggggcaccttgcgcgagctgtccagataattgtgacgacggtctgtgcaccaatggctgcaaatacgaggacctgtactcgaactgcaagtccttaaagctgaccctgacctgtaaacaccagttggtgcgagatagttgtaaagctagctgcaactgctcaaacagtatctactag

SEQ ID NO: 11012 - DNA, 1341 bp, synthetic construct
  misc_feature 1..1341: note = source = /note="Description of Artificial Sequence: Synthetic coding sequence"
  source 1..1341: mol_type = other DNA
atgctgcaccctgaaactagtccagggagaggacacttactggccgtactgctggcactcttgggtacggcttgggcagaggtctggcctcctcagctccaagagcaggcccctatggctggggctctgaatcgcaaggagtcttttctgctgctaagtcttcacaaccgcctgaggagctgggtgcaaccaccagcagcggacatgcgaaggctagattggtctgactctttggcccagcttgcccaggccagggcggctctatgcggaacaccgaccccctccctcgcctctggactttggcgcacacttcaggtgggatggaacatgcaattactgccggctggactggtgtcctttgttgaagtggtctctctgtggttcgcagagggacaacgatactctcacgcagccggagaatgcgccaggaacgccacctgcactcactacactcagctcgtgtgggccacatcttctcagctcgggtgtgggcgtcatttgtgttctgctggccaggctgccattgaagcattcgtatgcgcctactctccacgcggtaattgggaggtgaatgggaaaactatcgtgccatataagaaaggggcatggtgcagcctgtgcactgcatcagtcagtggatgttttaaagcgtgggaccacgccggtggcctctgcgaggtccctaggaatccatgccggatgtcatgtcagaaccacggcaggctgaacatatctacttgtcactgtcactgcccgcctggctacacaggaaggtattgtcaggtgagatgtagtctacaatgtgtgcacggcagatttcgagaggaagaatgttcctgcgtctgcgacattggctatggcggagctcagtgtgccaccaaagttcacttccccttccatacatgcgatctgaggattgacggagactgtttcatggtcagttcagaggctgatacatactaccgggcacgtatgaaatgtcaacgaaaggggggtgtgctcgcccagatcaagtctcagaaggttcaggatattctggcattctatctgggacggctggaaaccaccaatgaagtgatcgattccgacttcgaaacgagaaatttttggatagggctgacgtataaaacggctaaggactccttccgttgggccaccggcgaacatcaggccttcacttcttttgccttcggtcagccagataatcatgggttcgggaattgtgtcgagctgcaagctagcgctgcctttaactggaatgatcagaggtgcaagacacgcaataggtacatctgccagttcgcacaggaacacatcagccgctgggggccaggcagctag

SEQ ID NO: 11013 - DNA, 585 bp, synthetic construct
  misc_feature 1..585: note = source = /note="Description of Artificial Sequence: Synthetic coding sequence"
  source 1..585: mol_type = other DNA
atgactatgcgacataattggacccccgatctttctcctctctgggtgctgctgctttgtgcccatgtggtgactctgctcgttcgggctacacccgtgagtcaaaccaccactgccgctaccgccagtgtgaggtccactaaagatccttgcccttcacagcccccagtgttccctgccgctaagcagtgccccgctttagaggtcacatggccggaagtggaggttcctttaaatgggactctgtccctcagttgtgtagcctgtagcaggttccctaattttagcatcctctactggcttgggaatggctccttcattgaacacttgccaggccgattgtgggagggcagtacatcccgcgagaggggctctaccggtacccagctttgcaaggctttggtgctggaacagctcacaccagccctgcatagtactaatttctcgtgtgtgctggtcgatccggaacaggtcgtacagaggcatgtggtgctggcccagctctgggcaggactcagagcaacactgcccccaacccaggaagcattgccaagctctcactcatccccccaacagcagggatag

SEQ ID NO: 11014 - DNA, 585 bp, synthetic construct
  misc_feature 1..585: note = source = /note="Description of Artificial Sequence: Synthetic coding sequence"
  source 1..585: mol_type = other DNA
atgactatgagacataattggaccccggatctgtcccccctatgggtcctactgctttgcgcacacgtcgtgactctcctagtaagggcgaccccagtgagtcagacaacaacagcagcaacggcctccgtgcgatcaacaaaagacccctgcccttctcagccccctgtgttccccgctgccaaacagtgccctgctttagaagtcacctggccagaggtggaagtgcctctcaacggtactctttccctttcctgtgtggcctgttctcgctttccaaattttagcatcttgtactggcttggtaacggcagtttcatcgagcacctgcccggtcggctgtgggaggggtctacttcgagggagaggggatcaaccggtacacagctctgtaaagctctggttttagaacagctgacccctgccctgcatagcactaatttcagctgcgtattggtagatccggaacaggtggttcagcgacacgtggttttagcccagctatgggctggattaagagccaccctgccccctactcaagaggccctgccctctagtcatagctccccccagcagcaggggtag

SEQ ID NO: 11015 - DNA, 348 bp, synthetic construct
  misc_feature 1..348: note = source = /note="Description of Artificial Sequence: Synthetic coding sequence"
  source 1..348: mol_type = other DNA
atgaccatgagacataactggacccccgatttgagtcccctttgggtgcttttactgtgtgcccacgtggtgactctgctggtccgtgcaactcccgtcagtcagacaaccacggctgcaaccgcaagcgtccggagcaccaaagacccatgtccaagccagccacccgtgttccccgcagcgaagcagtgccccgcactggaagtgacgtggcccgaagtggaagttcctctcagttgggcagaaggtaatttagcgcctcatcctcggtcacctgctcttcaaccccaacagtccaccgccgctgggttaaggttgtcgacaggccctgcggctgcacagccatag

SEQ ID NO: 11016 - DNA, 528 bp, synthetic construct
  misc_feature 1..528: note = source = /note="Description of Artificial Sequence: Synthetic coding sequence"
  source 1..528: mol_type = other DNA
atgctgccaccaatggcattaccctcagtcagctggatgctactgagttgccttatgttgctttcacaggttcaaggggaagaaccccagcgagagcttccatctgctcgtatccggtgccctaaggggtccaaagcgtatggcagccactgttatgcactctttctttctcccaaatcttggaccgatgcggaccttgcctgccagaagcggccatctggcaatctggtgtccgtcctatccggcgctgaaggcagtttcgtgtcgagtttggtgaagagcattggaaatagctactcatatgtgtggattggtctgcacgatccaacacagggtacagagccgaatggggagggttgggagtggtctagtagcgatgttatgaactactttgcctgggagcgcaaccctagcaccatttccagtcccggacattgcgcaagcctgtctaggagcactgctttcctgcggtggaaggactacaactgtaacgtgcggcttccttatgtttgcaagttcactgactag

SEQ ID NO: 11017 - DNA, 993 bp, synthetic construct
  misc_feature 1..993: note = source = /note="Description of Artificial Sequence: Synthetic coding sequence"
  source 1..993: mol_type = other DNA
atgggcaaattgtgtcttgggccaaccctgtgccctgccgcagccgctgaggagtcccgggatgctgagcccaggcgagagttactctgttctggccgtccttggacctggcgcgcagctgcacgcgtgaccactatgattccatgggtactgctcgcatgtgcactaccctgtgccgcagacccactgttgggggctttcgccagaagggattttagaaaaggtagccctcagctcgtatgcagtctgccaggcccacagggccctcccggaccacctggcgctcctggaccctctgggatgatgggcagaatggggtttcctggcaaggacgggcaagacggccacgatggcgaccgcggtgactctggagaggaaggccctcctggtcgcactgggaatcgcggtaagccgggacccaaaggcaaggctggggctattggacgcgctggaccgcgagggccaaaaggggttaatggaacacccggaaaacatgggacgccaggtaagaagggcccaaaaggaaagaaaggagaaccaggactgcccggaccatgcagttgcggctccggccataccaagtcagctttcagcgtggctgtcactaaatcttacccccgagagagacttccaattaaattcgataagatactgatgaacgagggcggtcactacaatgcctctagtgggaagttcgtgtgtggagtcccagggatatattacttcacatatgatatcacgctggcaaataaacatttggccattggattggtgcacaacggccaatatcgaatccggacatttgatgcaaacactggtaaccatgatgtcgcgtctggaagcactattctcgccctaaaacagggagatgaggtttggttacagatcttttactccgaacaaaacggcctgttctacgacccctactggactgactctcttttcactgggttccttatttatgcagatcaggacgatcccaacgaagtttag

SEQ ID NO: 11018 - DNA, 390 bp, synthetic construct
  misc_feature 1..390: note = source = /note="Description of Artificial Sequence: Synthetic coding sequence"
  source 1..390: mol_type = other DNA
atgcgactcctgctgcttgtacccctcttgcttgcacccgctccgggatcgagtgcccctaaagtgagaagacaaagcgacacctggggcccatggtcccagtggtctccttgtagccgcacttgtgggggaggtgttagcttcagggagaggccttgttattctcagagaagagacggcggtagctcctgtgtaggaccggcacgctcacacaggagttgtcggaccgagagctgtcccgacggcgctagggacttccgggcagaacagtgtgctgaattcgacggcgcagaatttcagggaagacggtatcgctggctcccgtattactctgccccaaataaatgcgaactgaactgtattccgaaagggctcgggttgcagggttag

SEQ ID NO: 11019 - DNA, 1227 bp, synthetic construct
  misc_feature 1..1227: note = source = /note="Description of Artificial Sequence: Synthetic coding sequence"
  source 1..1227: mol_type = other DNA
atgttctccaatgcaaacagtagaagcaaaatgtggctgctgctgacaatggcctccttgatcagcgtcctggggactacccatggcctgttcggaaagttgcaccctggaagcccagaagtgactatgaatatctctcaaatgattacctattggggataccctaacgaggagtacgaagtggttacagaggacgggtatatcctggaggtaaatagaattccatacggcaagaagaactctggcaatactggacagcgccctgtggtgttcttacagcacggtttacttgctagcgcgaccaattggatttccaacctgcccaacaactcgttagcttttatccttgcagatgctggctatgacgtctggttggggaactcaaggggcaatacatgggcgagaaggaatttgtactattcccctgattccgttgaattttgggctttcagctttgatgagatggctaagtacgatcttccagcaactatcgattttatcgtaaaaaaaaccggccaaaaacagctccactacgtgggacactctcagggaaccaccatagggtttatcgccttctcaaccaacccatcactggccaagaggatcaaaactttctacgcattagcacctgtggccaccgttaaatacactaaaagcctgattaacaaactgcggtttgtcccacagagcctgtttaagtttatttttggcgacaagatcttttatccccataatttctttgaccagtttttagcaacggaggtgtgctcgagagagatgttaaatctgctgtgttcaaatgcactcttcatcatctgtggctttgacagtaagaatttcaatacaagtagactggacgtatatcttagtcataatcccgctggcacaagcgttcagaacatgtttcattggacgcaggctgtgaaaagcggtaaatttcaagcctacgattgggggtcgcccgtccagaacaggatgcactatgaccagagccagccaccttactacaacgtcaccgccatgaacgtacccattgccgtatggaatggcggaaaagatttgctggcagatccacaggatgttgggctgctgctgcccaagctccctaaccttatttatcataaagaaattcccttctacaaccatttggacttcatctgggccatggatgcaccccaggaagtctataatgacattgtgagcatgatatcagaagataagaagtag

SEQ ID NO: 11020 - DNA, 393 bp, synthetic construct
  misc_feature 1..393: note = source = /note="Description of Artificial Sequence: Synthetic coding sequence"
  source 1..393: mol_type = other DNA
atggcatctgatttgatcaggactatactcgccgttgcactcatctccaagttggggactgccgtggacgccgagctgatgcctagtggggctattctgcagaataaacgcgaaaacttacccagagtgtgccatgcccttgcttttttggggatggcaagatgtcaggacctgttcctcgtccggctgcagggttggaaactaggaacgcggttccaggatgggcctagatccaccccccaggaggaaggcggatcccctcaacgcaagaggggcatgcccgtgcagatccactttcttctcaagtcattcctgtcttctccaattaccttcgccttcataagtctagccagaaccgttagtcttgccacagctatctgtaagattgtctag

SEQ ID NO: 11021 - DNA, 393 bp, synthetic construct
  misc_feature 1..393: note = source = /note="Description of Artificial Sequence: Synthetic coding sequence"
  source 1..393: mol_type = other DNA
atggcttcagatctcatcaggacaatcctcgcggtggctctgatttccaagctcgggacagccgtcgatgcggagctcatgccctcaggcgctattctccagaataagagagagaatctccctcgcgtctgccatgcactggctttcctggggatggcccgatgccaggatttgtttctcgtcagacttcaggggtggaagctcgggacacgtttccaggatggcccaagaagcacgccgcaggaggaaggtgggagccctcagcgcaagaggggaatgcccgtccagatccattttcttttgaaaagtttcctgtctagtccaattaccttcgcgttcatttccctggcacggaccgtaagcctggccaccgcgatttgcaagatcgtgtag

SEQ ID NO: 11022 - DNA, 1731 bp, synthetic construct
  misc_feature 1..1731: note = source = /note="Description of Artificial Sequence: Synthetic coding sequence"
  source 1..1731: mol_type = other DNA
atgatcgtcttcgggtgggctgtgtttttagctagccgctccctcggacagggcctgctactgacacttgaagagcacatagcccacttcctcgggaccggtggggctgcaacaacgatggggaattcatgtatctgcagggacgattcaggaacggatgattccgtggacacacagcagcagcaggccgagaattccgctgtgccgacggctgacacgagatctcagccacgggaccccgttcgacctcccagaaggggcaggggcccacacgagcctcgtaggaagaagcaaaacgtcgacggcctggtgttggataccctggctgtgattcgtactttggtcgacaacgaccaggagcccccatactccatgatcaccttacacgaaatggccgaaacagacgagggatggctggatgtcgtgcagtcgctcatccgcgtgatccctttagaggatcctctgggacccgcagtcattaccctgctgttggacgaatgcccactccccaccaaagatgcgctacagaaactgacagaaatcctgaacctgaatggggaggtggcctgccaggattccagccaccctgctaaacatcgaaacacatcagccgtgctaggttgccttgccgaaaagttagccggtcctgccagcatcggactcttgagtcccggtatacttgagtacttgctgcaatgtctgaaactgcagtcccaccctacggtgatgttgtttgccctaattgcccttgaaaaatttgctcagacatccgagaataagcttaccatttccgagagttctatctccgatagactggtgactttggagtcctgggctaatgaccccgattacctcaagcgccaagtggggttttgtgcccagtggtctcttgataacctcttccttaaggagggccgtcaattgacttatgagaaagtgaacctgagtagtattagggcaatgctcaactctaatgatgtatctgagtatctgaagatttcaccgcacggcctagaggcaagatgcgatgccagcagcttcgagtcagtaagatgtaccttctgcgttgacgccggagtctggtactatgaagtaaccgtcgtcacatctggagtgatgcagattggctgggccacccgagattcaaaattcctcaaccacgagggctatggcattggtgatgatgaatattcttgcgcttacgatggttgcaggcagctgatctggtataatgctcgctccaaacctcacatccatccttgctggaaggagggagacacggtggggttcttgcttgacctcaacgaaaagcaaatgatcttcttcctaaacggaaatcagctgcctccagaaaagcaggtcttcagcagcacagtgtcaggatttttcgcggcagcttcattcatgtcatatcaacaatgtgaattcaatttcggtgccaagcctttcaagtatcccccttcaatgaagttctccaccttcaatgattatgctttcctgacagctgaagagaagatcattctccctaggcaccgccgtcttgctctgcttaagcaagtttctatacgggagaattgctgttctctatgctgtgacgaagtcgccgacacacagcttaagccatgtggacattcggatctgtgtatggattgtgccttgcagctggagacttgccctctctgccgcaaggaaatcgtctctcgtatacgccagattagtcacatctcgtag

SEQ ID NO: 11023 - DNA, 360 bp, synthetic construct
  misc_feature 1..360: note = source = /note="Description of Artificial Sequence: Synthetic coding sequence"
  source 1..360: mol_type = other DNA
atggcgcgacccggtatggagcggtggagggacaggttagcactggttaccggagccagcggcggaatcggcgctgcagtggcaagggccttggtccagcagggtttgaaggtggttggatgtgccaggactgtcgggaacatcgaagagctggccgctgaatgtaagtccgctggataccctggcaccctgatcccttaccgctgtgatttgtctaacgaggaggacattctgtccatgttttccgccatcagaagccagcacagcggagtagatatctgcatcaataatgccggattggctagacctgacacactattgagcggttctacaagtggatggaaggacatgtttaattag

SEQ ID NO: 11024 - DNA, 144 bp, synthetic construct
  misc_feature 1..144: note = source = /note="Description of Artificial Sequence: Synthetic coding sequence"
  source 1..144: mol_type = other DNA
atgcaagtttcaactgctgctctggccgtcttactctgtaccatggctctgtgcaatcaggttctttccgccccacaggctgggaggagtgtgctcacgcctgtcagatccgggagccgaaataccagcgtgacctggagttag

SEQ ID NO: 11025 - DNA, 159 bp, synthetic construct
  misc_feature 1..159: note = source = /note="Description of Artificial Sequence: Synthetic coding sequence"
  source 1..159: mol_type = other DNA
atgcaggtctcaacggccgctctcgccgtgctgttgtgtaccatggccctttgtaaccaggtgctctcagcccctttgagccgaccacgagaggcaggcaggagcgtgcttacacccgtgaggtctggctcacgaaatacctcagttacttggtcttag

SEQ ID NO: 11026 - DNA, 1272 bp, synthetic construct
  misc_feature 1..1272: note = source = /note="Description of Artificial Sequence: Synthetic coding sequence"
  source 1..1272: mol_type = other DNA
atggaattagagcttatgccattcaatgtcctgttaagaacaacactggacctgttacaagaaaaggaccctgcccatatttttgcggagccagttaatctgagtgaagtgcctgactatctcgagttcattagtaagcccatggattttagtactatgagacggaagcttgaaagccatctatataggactctggaggaattcgaagaggacttcaacctaatcgtgaccaactgtatgaaatataatgcgaaggataccatttttcaccgagcggcagtacgattgagagacctcggcggtgccatcctgagacacgcccgacggcaggccgagaacatcgggtacgatcccgaacggggaacacacctgcctgaatcacccaagctcgaagatttctaccggtttagctgggaagatgtggataatatcctcatcccagaaaatcgggcacatctgtcccctgaggtgcagctgaaagagctcctcgaaaagttagatctcgtgagcgctatgaggtcatcaggagccaggacacgacgcgtgcggctcctcagacgggagatcaatgcacttcgacagaagctcgcccagccgccacccccacagcctccaagccttaataagaccgtgtccaacggggagctaccagctgggccacagggagacgccgctgtgcttgaacaagctcttcaagaggagccagaggatgatggtgatcgagatgacagcaagctacctcctccacctaccctcgagccgacaggacccgcaccttctctgtccgagcaggagtcgcccccagagcctccaacgctgaagcccatcaacgatagtaaacctcctagcaggttcctgaaaccacgcaaggtcgaggaggatgagttactagagaagagtccactgcagctcggcaacgagccgcttcagagactcttgagcgacaacggcatcaatcgtttgtctctcatggccccagataccccagccggaactcctctctccggcgttggcagaaggacgagtgtcctgtttaagaaagctaagaacggagtaaagctccaacggtctcccgatagggtgctggagaatggcgaggaccatggggtggcagggtctcccgcaagccctgctagtattgaagaggagaggcacagtcgcaagcggcctcgtagtagatcctgcagtgagagcgaaggcgagaggtcaccccagcaagaggaggagaccggaatgacaaacgggttcgggaagcaccgcaagagagtctag

SEQ ID NO: 11027 - DNA, 3030 bp, synthetic construct
  misc_feature 1..3030: note = source = /note="Description of Artificial Sequence: Synthetic coding sequence"
  source 1..3030: mol_type = other DNA
atgggtagcggccgagtccccggactatgcctactggtgctgctagttcacgcacgcgctgcacagtattctaaggcagctcaggacgtggatgaatgtgtggagggaaccgacaactgccatatcgatgcgatctgccagaacaccccacggagttacaaatgcatttgcaaaagcggttatacgggcgacgggaaacattgcaaggacgtggacgagtgcgagcgcgaggacaacgccggatgtgtacacgactgtgttaacataccagggaactacaggtgcacctgttacgacgggttccatctcgctcatgacggccacaattgtcttgatgtggacgaatgtgccgaaggcaacggtggttgccagcagtcttgtgttaatatgatgggcagctacgagtgccattgtcgcgaaggcttcttcttgagcgataatcaacacacctgtatacagcggcctgaagagggcatgaattgtatgaacaaaaatcacggctgcgctcacatatgccgtgagactcctaaggggggtattgcgtgtgaatgtcggccagggtttgaacttaccaaaaaccagagggattgcaagctcacatgtaattatggaaacggcggttgtcagcacacatgtgacgatacggaacagggtcccagatgtggctgccacatcaaatttgtactgcacaccgacggaaagacctgcatcggcgagaggcggttggaacagcacatccctacacaggccgtgtcaaacgagacctgtgccgtcaataacggcggatgtgactcaaagtgccacgatgccgcaacgggtgttcattgtacttgccctgtagggttcatgttgcaacctgaccgtaagacctgtaaagacatcgacgaatgccgacttaataacggtggctgtgatcacatctgtagaaataccgtcggttcattcgaatgttcttgtaaaaaggggtacaagctgctgataaacgaacgcaactgccaggacatcgacgaatgctcatttgatcgcacctgtgatcacatctgcgtgaacacacccggttcctttcagtgtttgtgccacaggggttacctcctgtacgggatcacacattgtggcgacgtcgatgagtgttcaataaatagaggcggatgccgcttcgggtgtattaacacacccggaagctatcagtgcacatgcccagccggacagggaagattacactggaatggcaaggactgcaccgagccgcttaaatgccagggaagccctggggcatccaaagcgatgctcagctgcaatcgttccggaaagaaagacacctgcgctttaacttgcccctctcgggcacgcttcctcccagaatcggaaaacggatttactgtgtcttgcggcacccctagcccgagagcagccccagcgagggccggtcacaacggcaattcaaccaattcaaaccattgtcatgaagcagctgtgctctccataaaacagagggcatcttttaagattaaagacgcaaagtgtcgactgcatctgcggaataaggggaaaaccgaggaagccggaagaatcacaggtccaggtggggctccctgctctgagtgccaagtgacttttatccatctcaagtgcgattcctcccgaaagggcaaaggtcggagggcgaggacaccacctgggaaggaagttacacgtctgacactcgagctggaagccgaggtacgggcagaggaaaccaccgcttcatgcgggctgccatgtctcagacaacggatggagaggcggctgaaggggtccctcaagatgctgaggaaaagtattaatcaagaccggttcttattgcgcctggcgggacttgattatgagctggcccacaaaccaggcttggtagccggagagagagcggaacccatggaatcatgccggccaggacaacatcgcgcagggacaaagtgtgtgagctgtcctcaggggacatattatcacggccaaactgagcagtgtgtaccctgccctgctgggacctttcaagagcgtgagggtcagctgtcttgcgacctgtgtcccggatccgacgcacacggtcctctgggcgcaaccaacgtaaccacgtgcgctgggcaatgtccaccgggtcaacactcggttgacgggttcaagccctgtcagccgtgtcctcgcggaacataccaaccagaagcgggacgcacgttatgctttccttgtgggggtggactcacaaccaagcatgagggcgcaatctcattccaggattgcgacactaaagtgcaatgctctccaggccattactacaacactagcatccatcgttgtatacgttgcgccatgggtagctaccagcccgattttcgtcagaacttttgctctagatgtccagggaacacttcaaccgattttgacgggtccacgtcagttgcacagtgcaagaatagacagtgtggcggagagttgggggagttcacggggtacatcgagtcccccaactacccaggcaactacccagcaggggtcgaatgtatatggaatatcaacccaccccctaagcggaagatactcatcgttgtgcccgaaatttttctgccgagtgaagacgagtgcggggatgtactggttatgcgaaaaaactcatcaccctctagcatcacgacttacgaaacttgtcagacctacgaacggcctattgccttcaccgctcgatctcggaagctgtggattaatttcaaaacgagcgaagcaaatagcgccagaggttttcagattccttatgtcacctacgacgaggattatgagcagttggtggaggacattgtaagagatggtcggctttacgccagtgagaaccaccaagagatccttaaagataaaaaactgattaaggccttctttgaagtattggcacaccctcaaaactattttaaatataccgagaagcacaaagagatgctgccaaaatcgtttattaagcttctgagatcaaaagtgtcttcctttctcaggccttataaatag

SEQ ID NO: 11028 - DNA, 984 bp, synthetic construct
  misc_feature 1..984: note = source = /note="Description of Artificial Sequence: Synthetic coding sequence"
  source 1..984: mol_type = other DNA
atgacagctctagagctcgcacgacgaggcgctcgagtcgtgctggcatgtagatctcaggagagaggcgaagctgctgcattcgatctgcggcaggagtcaggaaacaatgaggtcatcttcatggcgctcgatctagctagcctggctagcgtcagggcattcgcaactgcctttctttcttcagagcccaggctcgacatcctgattcataacgctggcatctcttcttgtgggagaacacgcgaggctttcaacttgctcctgcgggtcaatcacatcgggccatttttactgacccatttgttgctaccctgcctgaaggcatgtgccccatcccgggtggttgtagtggcaagtgctgcacactgtagagggaggctggatttcaagcgacttgacaggccagttgttggatggaggcaagaattacgagcttatgcagacacaaagctcgctaatgtcctattcgcgcgagaattggctaatcagctggaggctacaggtgttacatgctatgccgctcaccctggccctgtgaactccgagctgttcttaagacatgtgcccggatggctgagaccactgctcagaccacttgcttggctcgtgctgcgcgctccaaggggtggtgcccagactcctctgtactgtgctctccaagagggcattgagcctctgtcaggcagatacttcgccaattgccacgtggaggaagtcccaccagcggctcgggatgatcgtgccgcacatcggctgtgggaggcaagcaaaaggctggcaggcctcggtcctggcgaggacgcagagcccgatgaagatcctcagtccgaagactccgaggcaccgtcaagcctatccaccccccaccccgaggaacctacagtgagtcagccctacccatcgccacagtcttcccccgatcttagtaagatgacgcatagaatccaagctaaggtggaaccggaaatccagctctcctag

SEQ ID NO: 11029 - DNA, 1320 bp, synthetic construct
  misc_feature 1..1320: note = source = /note="Description of Artificial Sequence: Synthetic coding sequence"
  source 1..1320: mol_type = other DNA
atgccagctatcgccgtactggcagccgcagcagctgcctggtgttttctgcaggtggagtcaaggcatttggacgcattagcgggaggcgcaggacccaaccacggaaactttctggataatgaccagtggcttagtaccgtgagtcagtacgatcgcgacaagtactggaaccgattccgtgacgacgactacttccgcaattggaatcccaacaaaccatttgatcaggccctggatccgtccaaggatccctgtctgaaggttaaatgttcacctcacaaggtctgtgtcactcaggactatcagacagccctctgcgtaagtaggaaacaccttctcccgagacagaagaagggaaatgtcgctcagaagcactgggtaggcccatctaatttggtgaaatgtaaaccatgtccagtggcccaatcagccatggtgtgtggctctgatggacactcttacacttccaagtgtaaacttgaatttcatgcgtgctcaaccggaaagtccttagctacactgtgtgacggcccatgtccctgtttacccgagccggaacctcctaaacataaggctgagagaagcgcatgcacagacaaggaactgcggaacctcgccagtcggctgaaagactggtttggcgcactgcacgaggacgccaatagagttatcaaacccactagctcaaatacggcacaaggaagatttgacacctctatcttacctatctgcaaggatagtctgggctggatgtttaacaaactcgacatgaactatgatttgctgttggatccttcggagatcaatgctatttatctggataagtatgagccatgtatcaagccgctgtttaactcctgcgacagttttaaggacggaaagctctccaataatgaatggtgctactgtttccagaaacccggtggattgccttgtcaaaacgaaatgaataggatccaaaagctctctaagggaaagtccctcctgggtgcctttatccctcggtgtaacgaagagggctactacaaggctactcaatgtcacggatccactggacagtgttggtgtgtagacaaatacgggaatgaactcgcaggttctaggaagcaaggcgcagtcagctgtgaggaagaacaggagacttcaggcgacttcgggagcggtgggtcggtggtcctactggatgacttggagtatgagagggagctgggccctaaggacaaagaagggaagctccgggtgcacacaagagctgtaactgaagatgatgaggatgaagacgacgacaaggaagacgaagtaggctacatttggtag

SEQ ID NO: 11030 - DNA, 3687 bp, synthetic construct
  misc_feature 1..3687: note = source = /note="Description of Artificial Sequence: Synthetic coding sequence"
  source 1..3687: mol_type = other DNA
atgaaaggcgcaagactgtttgtccttctgtccagcctgtggagcggtggcattggcctcaacaacagtaagcactcgtggacaattcctgaggatgggaattcacagaagactatgccaagcgccagtgttcctcctaacaagatccaatcacttcaaatcttaccaacaacacgcgtcatgagcgctgagatcgccactaccccagaagcacgtaccagcgaggatagccttctaaaaagtacccttcccccaagcgagacaagcgctccagctgagggcgtcaggaaccagactcttaccagcactgaaaaagctgagggcgttgtcaagctgcaaaatctcaccctgcccactaacgcttccatcaaatttaaccccggtgccgagagcgtcgtcctttccaactccacactgaaattcctgcagagcttcgccagaaagtcaaacgaacaagccacctcgctaaataccgtcgggggtacaggaggtatcgggggagtcggcggtacaggcggagtgggaaacagggctccacgggaaacctaccttagcagaggtgactcctccagttcacagcgcactgactaccaaaagagtaattttgaaactactcggggaaaaaactggtgcgcttacgtccatactaggttgagccccacagttattcttgataaccaggttacgtacgtgcctggcggaaaaggcccatgcgggtggaccgggggaagttgccctcaacggagccaaaagatctccaacccagtttatcggatgcaacataaaatagtgacaagcttagattggagatgctgccctggatactctgggcctaagtgccagctccgggcacaggagcagcaatctctgatacacactaaccaggccgagtcacacacagcagtggggaggggcgttgcagagcagcagcaacagcagggatgtggcgaccccgaagtgatgcagaagatgaccgatcaggtgaactaccaggcgatgaagttaactctgctccaaaaaaaaatcgataatatctccctgactgtgaacgatgtcagaaatacctattcgagcctggagggcaaagtatctgaggacaaatcaagagagtttcagagtctgctgaaaggcttgaaaagtaagtctatcaatgtgcttataagggacatagtccgcgagcaattcaagattttccagaatgacatgcaggagacggtggcacaattgttcaaaacagtcagcagcctttccgaagatctagagtcaactaggcaaatcattcagaaagtgaatgagtcagtcgtctcaatagctgcccagcaaaagttcgtgttagtacaggaaaatcggccaacccttaccgacatagttgaacttcgtaatcacatcgtgaatgtccgccaggagatgacactaacctgtgagaaaccaattaaggaattagaggtgaaacagactcatctcgaaggggcactggaacaggagcattctcgatctattctgtattacgagtctctcaacaagaccctaagcaagctgaaggaggtgcatgagcagctgttgtcaacggagcaggtttctgatcagaaaaatgcccctgcagctgaatccgtgtctaacaacgtgactgagtatatgtccaccttgcatgaaaatattaaaaaacagtcccttatgatgctgcagatgttcgaagatttacacatccaggagtcgaaaattaacaatctgacagtgagcctggaaatggaaaaggaaagcctccgaggggaatgcgaagacatgctaagtaaatgcagaaatgacttcaagttccagctcaaggacactgaggagaacctacacgtgctgaatcaaacgctcgcggaagtgctgtttcctatggacaataagatggataagatgtcagaacaattgaatgacctcacatacgacatggagatcctgcagccgctcctggagcagggagcttctctgcggcaaacgatgacctatgagcaacccaaagaggcaattgttatccgtaagaaaatagagaatctgacatctgctgtcaatagcctgaatttcataattaaagaattgactaagaggcacaacctgttacggaatgaggtgcagggcagagatgatgcattggaaaggaggattaatgagtacgcacttgaaatggaagatggtttgaacaagactatgactattatcaataacgcaattgactttattcaggataattacgcactcaaagaaactctgtcaacaatcaaggacaacagcgaaatccaccataaatgtacgagcgatatggagaccatcctcaccttcattcctcagttccacagactcaatgacagtattcagacgctagtgaacgacaatcagcggtataactttgtgctgcaggtagctaagacactggcagggatcccacgtgacgaaaagctgaaccagagtaattttcagaaaatgtaccagatgtttaatgagactacctcacaggtgagaaaatatcaacaaaacatgtcccacctcgaagaaaagcttctactgaccaccaaaatatctaaaaattttgagacacgcttacaggatatcgagtctaaggtcactcagacactgattccctactatatttctgtgaaaaaggggagtgtggttacaaacgagagagaccaggcactgcagcttcaggttctcaatagcagatttaaggccctcgaggccaaaagcatccacttgtccataaactttttttccctgaacaagacacttcatgaggtgctgactatgtgccataacgcctcgacttccgtgagcgagctgaatgccaccatccccaaatggataaagcacagtttaccagacattcaactgttacaaaaaggactgacagagttcgtggaacctattatccagatcaagacgcaggcggcattgtcgaatcttacctgctgtatagatcggtccctgccaggctctctcgccaatgtggtgaaaagccagaagcaggtgaagtcattgccaaagaaaattaacgctctcaagaagcccacagttaacttaacaacggtgttgattgggaggacacagagaaatactgacaatatcatatatcctgaagagtactcttcttgcagccgacacccgtgccagaacggagggacttgcatcaatgggagaacatcgttcacttgcgcctgcagacatccattcaccggcgacaattgcaccattaaactcgttgaggaaaatgccctagccccagatttttcgaaagggtcttaccgctacgcaccaatggtggccttttttgcatcccacacttacgggatgaccatccccggacctatcctgttcaataacctggatgtgaactatggcgcaagttatactccacggactggaaagttcaggattccatatttgggtgtgtatgtgttcaaatatacaattgaatctttttctgcacacatctctgggttcttggtcgtcgacggcatagacaagctggcatttgaaagcgaaaacatcaatagtgagattcattgtgatcgcgtgttaaccggcgacgcacttcttgaactcaattatggtcaggaagtctggctgcgactagcgaaagggaccatccctgctaagttcccaccggtcactacgttttccggttatctcctttaccgcacatag

SEQ ID NO: 11031 - DNA, 1596 bp, synthetic construct
  misc_feature 1..1596: note = source = /note="Description of Artificial Sequence: Synthetic coding sequence"
  source 1..1596: mol_type = other DNA
atgaaaggcgcacggttgttcgtgctgctttctagcctgtggtcagggggtataggactcaacaactctaagcactcttggacaataccagaggacgggaacagccagaagaccatgcctagcgcttctgttcctccaaacaagattcagagtctgcagatcctgccaacaaccagagtgatgtcagcggaaatcgccactactcctgagaaggccgaaggtgttgtgaaacttcagaatctgacgctgccaaccaatgcttctataaagtttaatccaggtgccgaatccgtggtgctttccaatagcacgctcaagtttctgcagtctttcgcgcgtaagtctaacgagcaggccacctctctaaatacggtggggggtaccggaggcatcgggggtgtcgggggaacaggcggtgtgggcaatcgagcaccccgtgaaacctatctctctcggggagactcatcctccagtcagaggaccgattatcagaagtccaactttgagacaacccgcggtaagaattggtgtgcttatgtgcatacacggctgtctcccacagtgattctggacaatcaggtcacctatgtacccggtggcaagggaccctgcggctggactggaggctcctgcccgcagcgatcccagaagatttctaacccagtctatagaatgcaacacaagatcgtcacatctcttgattggcgttgctgtccagggtattccggaccaaaatgtcagcttagagctcaggaacaacagagtctgattcacaccaatcaggccgagtctcacacagcagtgggccgaggagtggccgagcagcagcagcagcagggctgtggcgaccccgaagtaatgcagaaaatgaccgaccaagtcaactatcaagcaatgaagctgacgttgcttcagaaaaaaatcgacaacatttctctgaccgtcaacgacgttcgcaacacgtactcttccttagagggtaaggtgtccgaggataaaagcagggaattccagagtctactgaaggaggaatacagctcatgttcacggcacccctgccagaatggaggtacttgcatcaatggccgtactagcttcacttgcgcatgtcgccatccttttaccggcgataattgcacaatcaagctagttgaggaaaatgccctggctccagacttttccaaaggcagttacaggtacgccccaatggtggccttcttcgcttcccatacgtacggcatgactatccccggtcctatcttattcaataatctggatgtcaattatggggcatcctataccccgaggacaggcaaattccgcatcccatacctaggcgtatacgtgtttaaatacaccatcgaatcctttagtgcccacatttcaggattcttggtggtggacgggatagacaagctcgcgttcgagagcgagaatataaattcagagattcactgcgaccgcgtattgacaggtgatgctttgctcgagttaaactacggtcaggaggtctggctcagactcgctaaaggcactatcccggctaagttcccaccagttactacattttcaggatacctgctttatcggacctag

SEQ ID NO: 11032 - DNA, 942 bp, synthetic construct
  misc_feature 1..942: note = source = /note="Description of Artificial Sequence: Synthetic coding sequence"
  source 1..942: mol_type = other DNA
atgagcgatttactgctgctgggcttgataggcggtttgacactgcttctcttgttgaccctgttagctttcgcaggatattccggtttgctcgccggagtagaggtgagtgcaggtagcccccctattaggaacgtaacagtggcgtataaattccacatgggactgtatggagagacagggagactgtttaccgagagctgctctatctcccctaaacttcgcagcattgccgtttattacgataatccgcacatggtgccgcctgacaagtgcagatgtgcagtgggatccattctgagcgagggcgaagagagccccagcccggagttaattgacctgtaccagaagttcggatttaaagtgttctcatttcccgcaccctcacatgttgtcactgcaaccttcccatatacgacaatcctgagcatctggctggcaacccgccgtgtgcatcccgcactggatacatacattaaggaaaggaaattatgtgcctatcccagactggagatttatcaggaggaccaaatccactttatgtgtcccttggcccgacaaggagacttttacgtgccagagatgaaggagacggagtggaaatggagggggctggtggaggccattgacacacaggtcgatggcactggagcggatacaatgtccgatacctcatccgtttcactcgaagtgtcccccggtagtcgcgagacgtccgccgctacattaagccctggtgccagcagccgcggttgggacgacggagatactcggagcgagcatagctattcggagtctggcgctagcggttcctccttcgaggaactcgacctggaaggagaggggccactgggcgagtcccggcttgaccccggaactgagcccctcggaactactaagtggctgtgggagccgacagctcctgagaaagggaaggagtag

SEQ ID NO: 11033 - DNA, 834 bp, synthetic construct
  misc_feature 1..834: note = source = /note="Description of Artificial Sequence: Synthetic coding sequence"
  source 1..834: mol_type = other DNA
atgtgcacagttgtggatccgagaatagtgcgcaggtatttgctcagacggcaactgggccagggggcatacgggattgtgtggaaggcagtagataggagaacgggagaagttgtggcaatcaagaagatcttcgatgccttccgggacaagacagatgcccagagaacgttccgggagatcaccctgctgcaagaatttggagaccaccccaacatcatcagcctgctcgatgtgatcagagctgaaaacgatcgggatatttacctagttttcgagttcatgggctgccctccttctcctccccctcccaccgcggtgcgcacgttgtcagcagataccgatcttaacgcagtgattcgaaagggcggtctgctgcaggacgtgcacgtcagaagcatcttctaccagcttctccgcgctactcggtttttacattcaggtcatgtcgtgcaccgggaccagaaaccaagcaatgtactgttagacgcaaactgcacggttaagctgtgtgactttgggcttgccagaagtctcggcgatctgcccgagggtccagaggaccaagcggtcacagagtatgtggcgacacgttggtaccgagcgccagaggtgctgctcagttctcaccggtataccctcggggtggacatgtggtccttggggtgcatcctgggggagatgctgcgcggaaggcctctcttccccggaacctcaacattacatcaactggaactcatactggagacaataccacccccttctgaggaagacttactcgctttgggatctggttgtcgggcatcagtactgcatcagttgggctctaggtag

SEQ ID NO: 11034 - DNA, 765 bp, synthetic construct
  misc_feature 1..765: note = source = /note="Description of Artificial Sequence: Synthetic coding sequence"
  source 1..765: mol_type = other DNA
atgtgtaccgtagtagatccccgtatagttcgtagatatctactgaggcggcaattggggcagggcgcatacggcatcgtttggaaggcagtggatcgtcgtaccggggaagtggtcgccattaagaaaatttttgatgccttcagagacaaaacggatgcccagaggactttccgagaaatcacacttctgcaggagttcggcgaccaccccaatatcatctctctgctggatgtcatcagagcagagaacgatcgggatatctacctggtgttcgagttcatggataccgacctgaacgcagttatcaggaagggcggactcctgcaggatgtccatgtgcggtcgatattctaccagctgctgagagcgactcggtttttacatagcggacacgtcgttcatcgggaccaaaaacctagcaatgttctgcttgacgccaactgtacggtgaagctttgtgactttgggctggctcgctctcttggcgaccttcccgaaggccctgaggaccaggccgtgacagaatatgtagccactcgatggtaccgcgctcccgaagtgctgctttcctcgcaccgttatactcttggcgtggacatgtggtccctcgggtgcatacttggagagatgttgcgaggccgaccactcttccccggaactagcaccctgcaccaactggaacttatcctggagactatccccccaccatccgaggaaggagcacaaactgcctgtagatccggaaccggggcttctacatag

SEQ ID NO: 11035 - DNA, 474 bp, synthetic construct
  misc_feature 1..474: note = source = /note="Description of Artificial Sequence: Synthetic coding sequence"
  source 1..474: mol_type = other DNA
atggccctcctcctgtgcttggtatgcctgaccgctgcactggcgcacgggtgtcttcactgtcactcaaatttctcgaagaagttctcattctatcgacatcacgttaactttaagtcgtggtgggtgggtgatattcccgtttctggcgctttgctgaccgactggagcgatgataccatgaaggaactgcacctcgctattccagctaagattacgagagaaaaactagaccaggtcgcgacagccgtctaccagatgatggatcagttgtaccagggcaagatgtacttccccggatatttccccaatgagttgcgtaacatttttagagagcaggtgcatctgatccagaatgctatcattgagaggcacttggcaccagggagctgggggggaggccagctatcccgggagggtccatctcttgcgcctgaaggctcaatgccctccccacggggtgatttaccctag

SEQ ID NO: 11036 - DNA, 699 bp, synthetic construct
  misc_feature 1..699: note = source = /note="Description of Artificial Sequence: Synthetic coding sequence"
  source 1..699: mol_type = other DNA
atggccctcctgctgtgtttggtgtgcctaaccgccgctctcgcccacggctgtctacattgccatagcaattttagcaaaaagtttagcttctatcggcaccatgttaactttaagtcttggtgggttggggatattcctgtatccggagccctgctgacggattggtctgatgatacaatgaaagagctacacttagccattcctgcaaaaattacccgagagaagctggatcaagtcgccacagcagtgtatcagatgatggatcagctttaccaaggcaaaatgtacttcccaggttacttcccaaatgaacttaggaatatctttcgtgaacaggtgcatctgattcaaaacgcgattattgagagtaggatcgattgtcagcatcgctgcgggatcttccagtatgaaacaatttcttgtaataactgcactgacagccacgtggcgtgctttggctataattgtgaaagctcagcccagtggaagtccgctgtgcagggactgctgaattatatcaacaattggcataagcaagatacatcaatgagacccaggtccagtgccttcagttggcctggaactcaccgggcaaccccagcctttctggtgagccctgccctcaggtgcctcgagcctcctcacctagcgaacctgactctggaagacgcagctgagtgtctgaaacaacattag

SEQ ID NO: 11037 - DNA, 396 bp, synthetic construct
  misc_feature 1..396: note = source = /note="Description of Artificial Sequence: Synthetic coding sequence"
  source 1..396: mol_type = other DNA
atggggggtgacggaaggtacgtccttaatggccattgggtggtgtcccccccaggaacatacgaggcagccggtacgcacgtggtctacacccgcgatacgggacctcaggagacactgcaggcagctggtcctacgagtcacgacctattgttacaagtcctcttacaagaaccgaaccccggtattgagtttgagttttggctaccgagagagcggtactctcccttccaagccagggttcaagcgcttggttggcccctgcggcagccccagccccgtggcgtggagccacagccccctgccgctccagccgtgactcccgctcaaactccaactctggctcctgggccaagcgctgggccacctcctcctggacccggtgatccactttag

SEQ ID NO: 11038 - DNA, 447 bp, synthetic construct
  misc_feature 1..447: note = source = /note="Description of Artificial Sequence: Synthetic coding sequence"
  source 1..447: mol_type = other DNA
atggccagaattcccacggctgcccttggttgcattagtttgctgtgcctccagctacctgggtctctgtctagatccttaggaggagatccaaggcccgtgaagcctcgggagcctcccgctcgatccccttccagctcgctacagcctagacacccagcaccgcgtccagttgtatggaaactgcatcgtgccctgcaagcccagaggggtgctggcctcgcacccgtgatgggccagcccctacgcgatggtgggcgtcagcacagtggtccgaggcgccactccggaccacgcagaacccaggcccaactcttaagagtcggatgtgtgctcgggacatgccaggtgcagaatctgtcccatcggctttggcagctgatgggacctgccggacgtcaggactctgcccctgtggacccatccagcccacactcctatgggtag

SEQ ID NO: 11039 - DNA, 447 bp, synthetic construct
  misc_feature 1..447: note = source = /note="Description of Artificial Sequence: Synthetic coding sequence"
  source 1..447: mol_type = other DNA
atggctaggattccaaccgccgcactcgggtgcattagtctgctatgtctccagttgcccggttccctatcaaggagcctgggtggtgaccctcgcccagtgaagcctcgcgaaccaccagccagatccccatctagttcactgcagcctcgccaccccgcaccacgtcccgtggtttggaagcttcacagggccctccaggcccagcgcggagcgggactggctcctgtcatgggccaaccgctgcgagacggtgggcgacagcattcaggtccgagaagacactcaggtcctcgtcgtacccaggcccaactattaagggttggctgcgttctggggacctgtcaggtccaaaatctttcccatcggctttggcaacttatgggcccagcaggccgacaagacagtgcgcctgtggatcccagcagtcctcacagttatggatag

SEQ ID NO: 11040 - DNA, 537 bp, synthetic construct
  misc_feature 1..537: note = source = /note="Description of Artificial Sequence: Synthetic coding sequence"
  source 1..537: mol_type = other DNA
atggaccgcgctgcccgttgctccggcgctagctctctcccactgttgctggccctggcattagggctggtgatccttcactgcgtggttgctgatggcaacagtacacgatcccctgaaaccaacggtctcctctgtggcgacccagaagagaactgcgcagccaccactacccagtccaaaaggaaggggcacttttcccggtgccccaagcagtataaacactactgcattaagggacggtgccgcttcgttgtggcagagcagaccccatcctgcgtgtgcgatgaggggtacatcggcgcacggtgcgagcgggtggacctgttctacctgcggggagatcggggacagattttggtgatttgtctcattgctgtaatggtcgtgtttattattctggtgataggagtctgcacttgttgtcaccccttgagaaagcgcagaaaacggaagaagaaggaggaggagatggagactctcgggaaggacatcacaccaataaacgaggacattgaagagacaaacattgcttag

SEQ ID NO: 11041 - DNA, 1251 bp, synthetic construct
  misc_feature 1..1251: note = source = /note="Description of Artificial Sequence: Synthetic coding sequence"
  source 1..1251: mol_type = other DNA
atgagtatcagtctaagctcattgatcctgctgcccatctggattaatatggcccagatacagcagggcggacccgatgagaaagagaagacaaccgcgctcaaagacctactgtcccggatcgaccttgacgagctcatgaagaaggacgaaccgcctctggatttccctgacaccctggaggggtttgaatacgccttcaatgaaaagggccaactgagacatataaaaaccggggagccattcgtgttcaactaccgcgaggatttgcatcggtggaaccagaaacgttatgaggcactgggtgaaattattacgaagtatgtgtatgagcttctcgaaaaggactgtaatctcaaaaaagtaagtatcccggtggacgctaccgagtctgaaccaaagagctttatattcatgtcagaggatgcactaaccaacccgcagaaactgatggtgctgatccacggctcaggcgttgtccgagctggacaatgggccagaagattgatcatcaatgaggatctggactcaggtacacagattccattcatcaaacgcgcagtcgctgaaggatacggggtaatcgtgctaaaccccaacgagaactatattgaggttgaaaaaccaaaaatccatgtgcagagttcatccgattctagcgacgagccagccgagaagagagaacgaaaggacaaggtcagtaaagagacaaaaaaacggcgagacttttatgagaagtaccgcaatccccagcgcgagaaagaaatgatgcaattgtacattcgggagaatggctctcccgaagagcatgctatatacgtgtgggatcacttcatcgcccaggctgccgcagaaaacgtgtttttcgtagcccacagttacgggggattggcctttgtggagcttatgatacagagagaggccgacgttaaaaataaagtaaccgccgtggccctcaccgacagcgtccacaacgtctggcatcaggaggccggaaaaacaatacgggaatggatgcgagagaattgctgcaactgggttagtagcagtgaaccactggacacctcagtcgagtccatgctgccagactgccctagagtctccgctggaaccgaccgtcatgagctgacgtcttggaagagtttccccagcatctttaagtttttcaccgaagcctcagaggctaaaacctcctccttgaagcctgccgtgactcggaggagtcacaggatcaagcacgaggaactttag

SEQ ID NO: 11042 - DNA, 840 bp, synthetic construct
  misc_feature 1..840: note = source = /note="Description of Artificial Sequence: Synthetic coding sequence"
  source 1..840: mol_type = other DNA
atgaagataatcatactcttggggttcttgggcgctactctcagcgctccccttataccacagcggttgatgagcgcatctaacagcaacgagctgctgctcaatctgaacaacggccaactcttgccactgcagttacagggccctctcaattcgtggattcctccgttttccgggatcctgcagcaacagcagcaggcacagatccctgggctgtctcagttcagcctgtcagctctcgaccaattcgcagggctgctgccaaaccagatcccactcactggagaggcctcctttgcccagggagcccaagctggacaagtggaccctctccagttgcagacacctccacaaacccagcctggtcctagtcacgtgatgccctacgtctttagcttcaaaatgccccaagagcaaggacaaatgttccagtactatccggtgtatatggtgctaccgtgggaacaaccgcagcagaccgtgcccaggagccctcagcagacccggcagcagcaatacgaggagcagatccctttctatgcacagtttggttatatacctcagctggcagaacccgctatctcagggggtcaacagcagctcgcctttgacccacagctggggacagcacctgaaattgccgtgatgtctacaggcgaggagataccttacctacagaaagaagctatcaactttcggcatgactctgccggagtcttcatgccatccacgtctccgaagccaagcactactaacgtgtttacgtcagccgtagaccaaacaatcactcccgaactcccagaggagaaggacaagacggatagtttaagagaaccttag

SEQ ID NO: 11043 - DNA, 444 bp, synthetic construct
  misc_feature 1..444: note = source = /note="Description of Artificial Sequence: Synthetic coding sequence"
  source 1..444: mol_type = other DNA
atggggcctgaagcactgagctcattgttattgctgcttctcgtcgcttcaggcgatgcagacatgaagggccacttcgaccccgcaaaatgcagatacgccttgggcatgcaggatcggacaatcccggactccgacatatcagctagctccagctggagtgactcaaccgcagccaggcatagtaggctggagtcatcagacggagacggtgcctggtgcccagctgggtccgtgttcccaaaggaggaagagtacctccaagtcgatcttcagcggcttcacttggtggctctagtggggacccagggcagacacgccggaggtttgggaaaggaattctctcggtcgtaccggttgcggtactcacgggacggtagaagatggatgggctggaaggatagatgggggcaggaagtcatcagtggtaacgaagacccatag

SEQ ID NO: 11044 - DNA, 618 bp, synthetic construct
  misc_feature 1..618: note = source = /note="Description of Artificial Sequence: Synthetic coding sequence"
  source 1..618: mol_type = other DNA
atgggtggcccagtccgcgagccagccctgtccgtggctctctggctgagttggggtgccgctctcggagcagtggcatgtgcgatggctctgctgacgcagcagacggagctccagtcactacgaagggaagtcagtcggttacaggggacgggcggtcccagccaaaacggcgaaggctatccatggcagagcctccctgaacagcacagtgtgttgcacctagtaccaattaacgctacctctaaggacgattccgatgtgaccgaggttatgtggcaaccggctttacggaggggacgcggtctgcaggcccagggctacggcgtcaggatccaggacgccggtgtgtacttgctgtactcacaggtgctgtttcaggatgtcacattcaccatgggacaggtcgtgagccgggagggtcagggaagacaggagaccctgtttaggtgcatccgctctatgccgtcccatccagatagagcatacaactcatgctattcagctggagtgtttcacctccaccaaggcgacatactgagcgtgatcatccctcgtgccagggctaagctcaacctgtctccccacggtacttttttggggttcgtgaagttgtag

SEQ ID NO: 11045 - DNA, 744 bp, synthetic construct
  misc_feature 1..744: note = source = /note="Description of Artificial Sequence: Synthetic coding sequence"
  source 1..744: mol_type = other DNA
atgcccgcatctagcccatttctcctcgctcctaaagggcctcctggaaatatggggggtcctgttagggaaccagctctgagtgtcgccctgtggttaagctggggcgctgcgctcggcgcagtcgcctgcgctatggccctactgacccaacagacggaattacaatcactgcgccgagaggtgagcaggctgcagggcacgggaggtccttctcaaaacggcgaaggatatccctggcagtccctgcccgaacagtcgtcagatgcactcgaagcttgggagaacggcgaacgcagcaggaagcgaagagccgtcttaacccagaaacagaaaaaacagcactccgttcttcacttggtgcctattaacgcaaccagcaaggatgacagtgacgtcacggaggtgatgtggcagccagcgctcagaagggggcgtgggctgcaagctcagggctatggcgttagaatccaggacgccggtgtgtacctcctgtatagccaggtgctgttccaggacgtaacctttaccatgggccaggtcgtgagccgagagggccagggacggcaagagaccctgtttaggtgcatacgcagcatgccctcacacccagacagagcctataactcgtgctatagtgccggagtgttccatcttcaccagggcgacatattgagcgtgattatccctagagcccgagcaaagctgaatctgtcaccccacgggacatttctgggcctttag

SEQ ID NO: 11046 - DNA, 39 bp, synthetic construct
  misc_feature 1..39: note = source = /note="Description of Artificial Sequence: Synthetic coding sequence"
  source 1..39: mol_type = other DNA
atggggaagagcgagtctttacagagcctccagagatag

SEQ ID NO: 11047 - DNA, 4266 bp, synthetic construct
  misc_feature 1..4266: note = source = /note="Description of Artificial Sequence: Synthetic coding sequence"
  source 1..4266: mol_type = other DNA
atgatgctcccacagaattcgtggcacatcgacttcgggaggtgttgttgccaccaaaatctctttagcgccgtggttacttgcatcctgctactaaattcttgtttccttatatccagctttaacggcacagacctggagttgcggctcgtgaatggcgatggcccttgcagcggcacggtcgaggttaagtttcagggtcagtgggggaccgtctgtgacgatggttggaacacaaccgccagtacagtggtctgtaagcagctcggatgccctttttcgttcgccatgttccggttcggccaggctgtgactcgacacggaaagatttggcttgatgatgtctcctgttatggaaatgagtctgctctgtgggagtgtcagcaccgagagtggggctcacacaattgctaccacggagaagacgtgggcgtgaactgttacggcgaggcaaatctcgggctcagactagtggacgggaacaattcatgttctggaagagtggaggtaaaattccaagaacgttggggtaccatatgcgacgatggctggaacttaaacaccgctgcggttgtttgcaggcaacttggatgtccatcttcttttatcagtagtggggtcgtgaactcccctgcagtccttcgaccgatctggctagacgacattctttgccaggggaatgaactggcactgtggaactgcaggcaccggggatggggaaatcacgattgtagtcataacgaagacgtaacactgacatgttatgattcctccgacctagaactacgactggtaggtggaacgaacaggtgcatgggccgagttgaactgaagatacaaggcagatgggggactgtgtgccaccacaaatggaataacgctgctgccgatgttgtgtgtaagcagcttggctgtggcacggctttacattttgctggcttgccccatctgcagtccggctcagatgttgtgtggctggacggggtgtcatgtagcggcaacgagagctttctctgggattgcaggcattctggaactgttaattttgactgtctccaccagaacgacgtgagtgtgatctgctccgatggagccgacctcgagctgcgccttgctgatggctcaaacaactgctctggaagagtggaagttagaatccacgagcagtggtggacaatttgtgatcaaaattggaagaacgagcaagccctggtggtctgcaagcagctcggatgcccattttccgtgttcgggtcaaggcgggctaaaccgtccaatgaggctagagacatctggatcaactcaatctcttgcactgggaatgaatccgccttatgggactgcacttacgacgggaaggcgaagcgaacttgctttcggaggtcagacgctggtgtgatctgttccgacaaggcggatcttgatcttagactggttggcgctcattccccatgctacggacgcttggaagtgaaatatcagggagaatggggcactgtctgtcacgacagatggagcacccgaaacgccgctgtggtgtgtaaacagctggggtgcggcaaaccgctgcatgtgttcgggatgacctactttaaggaggctagtggccctatttggctggatgatgtttcttgcattggcaacgaaagtaatatctgggattgtgagcattctgggtggggcaagcacaattgtgtccaccgagaggacgtcattgtcacatgctccggcgacgccacatggggcctgcggctcgtgggcggatctaaccgctgctccggacgactcgaagtctactttcagggtaggtggggtactgtgtgcgacgacggctggaactccaaagctgccgctgtggtttgcagtcagctggactgtccttctagcatcatcggtatgggactgggcaacgcttccaccgggtacgggaaaatttggctcgacgacgtcagctgtgatggtgacgaaagcgacctgtggtcttgccggaactccggatggggcaacaacgattgttcccatagtgaggatgtcggcgtgatatgctccgatgccagcgacatggagctgaggctcgttggcggttcttccagatgtgccggaaaggtggaagtcaatgtgcagggagccgtggggattttatgtgccaatggatgggggatgaatatcgccgaggtggtgtgcagacagctggagtgcggtagcgcaatccgggttagccgggagccccacttcaccgaaaggacactacatattttaatgtctaattccggatgtaccgggggtgaagcctctttgtgggattgcatcagatgggagtggaaacaaaccgcctgtcacttaaacatggaggcctctcttatctgctccgcacaccggcaacctcggctggttggagcggatatgccgtgctccggacgagtagaggtcaaacatgcagacacctggaggagtgtctgtgactccgattttagcctgcacgccgctaatgtgctttgtcgtgaattaaactgtggcgacgcgatcagtctaagtgtcggagaccattttgggaagggtaatggtctgacctgggccgagaaatttcagtgtgagggctcagaaacccacctggctctgtgtcccattgtgcagcatcccgaggatacctgcatccactccagagaggttggtgtggtctgctcaaggtatacagatgtgagactagtcaatggcaagtcccaatgtgacggccaggtcgaaattaacgtcttaggccactggggctccctctgtgacacgcattgggatccagaggacgctcgcgtcttgtgcaggcagctgtcttgcggtacagccctttcaaccactggagggaagtacattggggagaggagtgtaagggtctggggccaccgcttccactgtctcggtaatgaatcgctgctggacaactgccagatgacagtgctgggcgcacctccgtgtatacacgggaatacagtttctgtcatctgtactggctcactcacccagcccctgttcccatgtctggccaacgtttcagatccttacttatcagccgtacccgaggggagtgcactgatctgccttgaggataagagattgagacttgtcgacggagactctcgctgtgcaggcagagttgaaatataccatgacggcttttggggaacaatttgtgacgatggctgggacctctcggacgcccatgtggtttgtcagaagttggggtgcggagtcgcattcaacgcaactgtgtcggctcacttcggcgagggaagcggcccaatctggctggatgatctgaattgtactgggatggaatcccatttgtggcagtgtccatcccgaggttggggccagcacgattgccggcacaaggaggacgcaggtgtcatctgctctgagtttacagccctgcgcctttatagcgagaccgagacagagagctgcgctggcaggcttgaggtgttctataacggcacttggggtagtgtagggaggagaaacatcactactgcaatcgctggaattgtctgtcgccagctaggctgcggagaaaacggagtcgtgtctctggccccattatcgaaaacgggatccggctttatgtgggtcgatgacatccagtgtcccaagacacatatctcaatatggcagtgcctcagcgcaccttgggagcggcgtattagctctcctgctgaggagacctggataacctgcgaggaccggatcagagtgcgtggaggggatacagaatgctcaggtagagtcgagatctggcatgctggctcttggggaacagtgtgcgacgatagctgggatcttgcggaagccgaagtggtgtgtcagcagctcgggtgcggctccgccctagcagccttacgggatgcctcttttggtcaggggacaggcactatctggctggatgatatgcgctgcaaaggcaacgaatcgttcctgtgggattgtcacgccaaaccgtgggggcagtccgactgcggccataaggaggatgctggcgtgcggtgtagcggacaaagcctgaaatccttgaatgcaagttccggacatcttgccctaattctgtcctcaatcttcggtctcttactgctggttctgtttatcctgttcttgacctggtgtcgggtgcagaagcaaaaacatctacccctgcgggacgatactcccaaccacggatgtgaagacgcatcagacacctccctcctgggagtcctcccagcctctgaggcaacaaagtag

SEQ ID NO: 11048 - DNA, 1410 bp, synthetic construct
  misc_feature 1..1410: note = source = /note="Description of Artificial Sequence: Synthetic coding sequence"
  source 1..1410: mol_type = other DNA
atgattacagaaggggcacaagcaccacgcctcttactgccccctttgctgctcttactgactctaccagcgacaggcagtgaccctgtcctttgctttactcaatacgaggaatcaagtggaaagtgtaaggggctcctgggcggtggcgtgagtgtggaggactgctgtctgaatacagccttcgcataccagaaaaggagcgggggactttgtcagccatgcagaagcccaagatggtccctctggtccacttgggctccatgcagtgttacctgcagcgagggttcccagttgcggtatcggcgttgcgtgggatggaatggccagtgcagtggtaaagttgcgcctgggacactggagtggcagctgcaggcctgcgaggaccagcagtgctgtcccgaaatgggtggctggtcgggctgggggccttgggagccttgttcagtgacgtgttctaagggaacgagaactcgccgaagagcttgtaaccaccctgctcccaagtgcgggggtcactgccccggtcaggcacaggagtccgaggcctgtgacacccaacaagtctgtcctacgcacggggcatgggctacatggggaccttggaccccttgctccgcttcttgtcatggtggccctcatgaacctaaggagacccgaagcagaaagtgcagtgccccagaaccgagtcagaagccacctggaaaaccttgcccaggcctggcctatgaacaaagacgttgtactgggcttcccccttgcccggtggccggaggttggggtccatggggcccagtgtccccttgccccgtcacctgtggcttaggacagacaatggaacagaggacgtgtaatcaccctgtgccacaacacgggggaccattttgcgcaggtgatgccacgagaacgcacatttgcaatacggccgtcccatgtccggtcgatggagagtgggatagttggggggagtggagcccctgcatcagacgcaatatgaagagcatcagctgtcaggagattccaggtcaacagagtcggggacgcacgtgtagggggaggaaattcgatggacaccgttgcgctggccagcagcaggacattaggcactgctacagcatccaacactgcccccttaaaggcagttggtccgaatggagcacgtggggtttatgcatgcctccttgtggacctaaccctacgcgtgctaggcagcgtctgtgtacacccctcttgcccaagtacccccctacagtaagtatggtggagggccagggcgagaaaaatgtgacattttggggcagaccactccctcgctgtgaagaactgcaagggcaaaagctcgtcgtggaagagaaacggccatgcctgcacgtccccgcttgcaaggatcccgaggaggaggaattatag

SEQ ID NO: 11049 - DNA, 837 bp, synthetic construct
  misc_feature 1..837: note = source = /note="Description of Artificial Sequence: Synthetic coding sequence"
  source 1..837: mol_type = other DNA
atgcagtggcttcgcgtgagagaatctccaggcgaagcgaccgggcatcgagtgaccatggggactgctgctttgggcccagtatgggcagctctgttactgtttctgctcatgtgcgagattcccatggtggagctgacctttgaccgagccgtcgcctcaggctgtcagaggtgttgcgactctgaggacccacttgatccagctcacgtaagcagcgcaagttccagcggcaggccacacgccttgccagaaatcagaccctatattaacattaccattctcaaaggagataagggcgatccaggccctatgggcctgcctggatatatgggacgggaagggcctcagggagaacctggaccgcagggcagtaaaggagataaaggcgagatgggctcacctggcgcaccttgtcagaagagatttttcgcattcagtgtgggtaggaaaaccgccctgcactccggtgaggattttcagactctcttgttcgaaagagtctttgttaatctggatggatgtttcgacatggcaactgggcagtttgctgcaccactccggggaatctattttttttcattaaacgtgcattcctggaattacaaagagacttatgtacatataatgcataatcagaaagaagccgtaattctgtacgcgcaaccgtcagagcggagcattatgcagtcgcagtctgtaatgctcgatctagcatacggcgacagggtctgggtccggctgttcaagagacaaagagagaatgctatttatagcaatgacttcgatacttatattaccttcagtgggcaccttattaaggccgaagacgattag

SEQ ID NO: 11050 - DNA, 1128 bp, synthetic construct
  misc_feature 1..1128: note = source = /note="Description of Artificial Sequence: Synthetic coding sequence"
  source 1..1128: mol_type = other DNA
atggaatttgaaattacctttcgcccagattctggtgacggcgtcctactctactcctacgacaccggaagcaaagatttcctgtcaataaatctggccggaggacatgtggagtttagattcgactgtgggtccggcacaggtgtcctgaggtctgaagatcccctcactcttggcaattggcatgagctgagagtgagcaggactgccaagaatggcattctgcaggtggacaaacaaaagattgtggaaggtatggccgaggggggatttacccagatcaagtgcaatactgatatatttatcgggggagtacccaactacgatgatgttaaaaagaatagcggggtattaaaacccttcagcggtagcatacagaagattatcctgaacgaccgtacaatacatgtgaagcacgactttacatcaggtgtgaacgtcgaaaatgcggcacacccctgtgtgcgtgctccatgtgctcatggcggaagctgtcgacctaggaaggaaggctacgattgcgactgtccactcggctttgagggtttgcactgccagaaagccatcatcgaggccatagagatcccacagttcataggccgtagttatttgacgtatgacaacccagatatcctgaaacgggtctccgggtcacgctcgaatgtgtttatgcgcttcaagactactgccaaggacgggcttctgctgtggcggggtgattcacccatgcgccctaatagtgactttatttcccttggtttgcgtgatggcgctctggttttcagctacaacctgggtagcggcgtagcttccattatggtaaacggatcattcaatgacggtcgctggcatcgagtgaaggctgtgagagacgggcagtccggcaagatcacagtggatgattacggggctcgtacgggcaagagtccaggcatgatgaggcaattgaacattaatggtgctctgtatgtggggggtatgaaggagatcgcactgcacactaatcgccaatatatgcgcggactggtgggatgtatctcccactttaccttatcaacggactaccacatcagcctagttgaggatgccgtcgacggaaagaatatcaatacatgcggagcaaagtag

SEQ ID NO: 11051 - DNA, 459 bp, synthetic construct
  misc_feature 1..459: note = source = /note="Description of Artificial Sequence: Synthetic coding sequence"
  source 1..459: mol_type = other DNA
atgcggtttaaaactactgccaaggacgggcttctcctgtggcggggtgattcaccaatgcggcctaacagcgattttatcagcttgggcctgagggacggagccttggtctttagttataatctcgggtcaggcgttgctagtatcatggtcaacggatcctttaacgacggcaggtggcatagagtcaaagctgttagagatggccagtccggcaaaatcaccgtggatgactacggtgcacgcactggcaaatcacctgggatgatgcgtcagttgaacattaacggagcactctacgtcggtggcatgaaagaaattgcattacatacaaatagacagtatatgcgcggattagtggggtgtatctcgcactttaccctgagtactgactatcacatcagtctggtggaggacgctgttgacggtaaaaacatcaacacctgtggtgccaagtag

SEQ ID NO: 11052 - DNA, 1050 bp, synthetic construct
  misc_feature 1..1050: note = source = /note="Description of Artificial Sequence: Synthetic coding sequence"
  source 1..1050: mol_type = other DNA
atgaccgctttaccgggtccactttggctgctgggtctggccctctgcgccctgggtggtggtggacccggactccggccaccgcctggctgtcctcagcgtcgcctgggggcaagggaaagaagagatgttcaacgtgaaatactggctgttctgggactaccgggaagacctcggccaagggcgcctcctgcagctagtcgcctgccagcttccgcaccacttttcatgcttgacttgtaccatgcaatggccggtgatgatgatgaggatggtgcaccagctgagagacggttgggacgggctgaccttgtgatgagttttgtcaatatggtcgagcgtgaccgcgctctgggacatcaggagccacactggaaagagttccgttttgatctgacacagatccctgccggagaagccgtgactgcggcagagttccggatctacaaggtgcccagcattcacctacttaatcgcaccctgcacgtgtcaatgtttcaggtcgtgcaggagcagtcaaatagagagtccgacttgttcttcttggatctacagacgctgagggcaggtgacgagggatggcttgtgctggacgtcaccgcagccagcgactgctggctgctgaaaaggcacaaggatctgggcctccggctgtacgtggaaaccgaagacggagagacttggactggatggggttggactaaggattcccgcctacagatgtggaagctgcggttgtctaggactccctgggtgctgagcttgcatgctcctggcccagcccaagcgccagccgaacggcctctgctgtgtctgttgcagggacattgtccagcatccccaagcccaatccgcacccccagggccgtgaggcctctccgcagacggcagcccaagaagtccaacgaactgccccaggcaaataggctcccaggaatcttcgacgacgtccatggctcccacgggaggcaggtgtgccgtcggcacgagctgtacgtgagctttcaagacctggggtggctcgttattgctgatagtagctgtttctag

SEQ ID NO: 11053 - DNA, 1617 bp, synthetic construct
  misc_feature 1..1617: note = source = /note="Description of Artificial Sequence: Synthetic coding sequence"
  source 1..1617: mol_type = other DNA
atgagtttctcggcgacgattctgttctctcctccaagcggctccgaggccagatgctgctgctgcgcctgtaagtctgaaactaatggagggaacaccggatcccaggggggaaatcctcccccaagtacaccaataaccgtaactggacatggacttgctgttcagtcctcagaacaattgctgcatgtgatctatcagcgcgtggacaaggcagtaggcttagcagaagctgccctgggcctggccagagccaacaatgaactactcaaacgtctgcaggaggaagttggtgatctgcgacaaggcaaggtaagcatcccagacgaggacggcgagagtagggctcactcctcaccccctgaggaaccgggtccactgaaggagagccctggggaagccttcaaggcgctgagcgctgttgaggaagaatgcgactcggtagggtcgggggtgcaggtggtcatcgaggagcttcgccagcttggtgcggcttccgtgggaccaggtcctctgggtttccctgcaacccaaagagacatgcgactgcctgggtgtactctcgcggcttccgaggccgcaccacttctgaacccactggtggacgactatgtcgcatccgagggcgctgttcagcgagttctggtgcccgcatatgccaagcagctgtctccagctactcagctcgctatccagcgcgctacacctgaaacgggcccagagaatggcactaaactcccccctccgaggcctgaagacatgctgaatgcggctgccgctctggactccgctctagaggagagcggcccaggaagcacaggggaactaagacactctctcgggctgacggtgtccccgtgccgcaccagaggtagtggacagaagaacagccgcagaaagcgggacctggtcctctctaaactggtccacaatgtgcacaaccatattactaacgataaacgattcaacggctccgaatcgatcaagagctcttggaatatcagtgtggtaaagtttcttctcgaaaaattgaagcaagagctggtcacgagcccccacaactataccgacaaggaactgaaaggggcttgcgtggcatatttcctgacaaaaaggcgtgaatatcgaaactctttaaatccatttaaaggccttaaggagaaggaagaaaagaaactcaggtcacggagataccgcctgtttgccaaccggtcgagcattatgcgccatttcgggcctgaggaccagaggctgtggaatgatgtaaccgaagaactcatgtccgatgaagaagactcactgaacgaaccaggagtttgggtagcgcgacctccacgattcagagcccagaggctgaccgaactgtgttatcacctggatgctaactcgaagcatgggactaaagctaacagagtgtacggtcccccatctgaccgtctgccgagtgccgaagcacaattgctgccccctgagctgtataaccccaacttccaggaggaagaagacgaaggtggcgatgagaatgcgccagggagcccaagctttgatcagcctcacaaaacctgttgccctgacctcaattcatttattgagataaaagtggaaaaagatgagtag

SEQ ID NO: 11054 - DNA, 630 bp, synthetic construct
  misc_feature 1..630: note = source = /note="Description of Artificial Sequence: Synthetic coding sequence"
  source 1..630: mol_type = other DNA
atgagcttctctgcaacaatcctgttttcccccccatctggaagcgaagcccgttgttgttgctgtgcttgtaaaagcgagacaaacggcggtaacaccgggagccaaggcggaaacccccctccgagcacccctattactgtcaccggacatggcctggcggtgcagtcttccgagcagttgctccatgtgatctatcagcgcgtcgataaggcggtgggcctagcagaggcagctctaggactggcccgagcaaacaatgaacttctcaagcggctgcaggaggaagtaggggatttaagacaaggcaaagtctccattcccgacgaggacggagaatccagagcgcactcatcgccccctgaggagcctgggccactgaaagagagcccaggcgaagcgttcaaggcactgtcggctgtggaggaggagtgtgattctgttggcagcggggtccaagtggtgattgaggaactgcggcagctaggtgcagcctcggtcggacctggccctctgggctttcccgcaacccagcgtgacatgcgactgcccggttgtacgcttgccgcatctgaagcagcgccattgctaaatcctctggtcgacgattatgtcgcctcagaaggatag

SEQ ID NO: 11055 - DNA, 1617 bp, synthetic construct
  misc_feature 1..1617: note = source = /note="Description of Artificial Sequence: Synthetic coding sequence"
  source 1..1617: mol_type = other DNA
atgtccttctccgcgactattttatttagtccacccagtggaagcgaggccaggtgctgttgctgtgcatgtaagtcggagactaacgggggaaacaccggatctcagggcggtaatccacccccttcaactcctatcactgtgaccggacatggtctggctgtccaatcttctgagcagctcttacatgttatttatcaacgcgtagacaaagcagttgggctagctgaagctgcactggggctggccagggctaataacgaacttctaaagagactgcaggaggaggtgggggatctaaggcaaggcaaggtgagtataccagacgaagatggagaatctcgggcacatagttcgccaccagaagagccagggcctctgaaagaatctcctggggaggcctttaaggctctttcggcagtcgaagaggagtgcgattccgtgggctctggcgttcaggtggtgattgaagaactcagacagctgggggcagctagcgtcggcccaggtccattaggcttcccagctactcagagggacatgagattacctgggtgcactctggctgccagtgaggcagcaccactccttaacccgctggtcgacgattatgtggcatccgaaggggcagtacagagggttcttgtgccagcctacgccaagcagctttctccggctactcagcttgccattcagcgggctaccccagaaactggccctgagaacgggacgaagctgccgccacctcgaccggaagacatgttaaacgctgcagctgctctggattcagctctcgaggagagcggcccaggctccacaggagaattgcgacacagcctggggctgactgtgtctccatgtcgcacacggggtagcggtcagaagaactctaggcgcaagagggatctggtgttgagcaagcttgtgcacaacgtgcacaaccatatcaccaacgacaaacgatttaatggctcggagagcattaagagcagttggaatatcagcgtggttaaattcttgctggagaagttaaaacaagagctggtgaccagcccgcataattacaccgataaggagctgaaaggggcatgcgtcgcttacttcctcacgaaacgcagggagtaccgtaatagtttgaacccctttaagggactgaaagagaaagaagaaaaaaagctcagatctaggcgctaccgcctattcgctaacagatccagcatcatgaggcattttggaccagaagatcagcgcctctggaacgatgttacagaggaactcatgtccgacgaggaagattcactcaacgagcccggagtatgggtggctagacctccccgtttcagggcgcagcgcctcacagagttgtgctatcacctcgacgccaactctaagcacgggaccaaggctaatcgggtgtatggcccaccatccgatagattaccttccgctgaggctcagcttttgcctcctgagctgtacaacccaaatttccaggaggaggaggacgaaggaggagatgagaatgcgcctggttctcccagctttgatcagcctcacaagacctgctgccccgatctgaactctttcattgagatcaaggtggaaaaagatgagtag

SEQ ID NO: 11056 - DNA, 1524 bp, synthetic construct
  misc_feature 1..1524: note = source = /note="Description of Artificial Sequence: Synthetic coding sequence"
  source 1..1524: mol_type = other DNA
atgtgcaccaagactatcccagtgctgtggggttgttttctcctatggaatctctacgtatcatcatctcagacaatctatcctggtattaaggcccgtataactcaacgagctttggactacggggtccaggccggaatgaagatgatcgagcagatgctaaaggagaaaaaattgcctgacctatcaggtagcgaatctttggagtttctgaaggtcgactatgttaactataacttttctaacatcaagatctccgcatttagtttcccaaatacatctttggccttcgtgccaggcgtaggcatcaaggcactgacaaatcacggaactgctaacatcagtacagattggggctttgaatcacctctgttccaggacactggtggcgctgatcttttcctctccggggtgtactttaccggaattatcatcttaactcgaaatgattttggacacccaactttgaagcttcaggattgttacgctcagctgtcccacgctcacgtgagcttttcaggtgaactttctgtgctgtataacagcttcgcagagcccatggagaagcccatcttgaagaatctcaacgaaatgctctgtcccatcatcgctagtgaggtcaaggctctcaatgctaacttaagtacgttggaggttctgacgaagatcgataactatacgctcctagactactcgttgatctcctctccagaaatcactgaaaactacctggacttgaatttgaagggcgttttttaccccttggagaatctcaccgacccacccttctctccagtgccctttgtgctgcctgagcgttctaactccatgctgtacatcggaatcgctgagtatttttttaagtcagccagcttcgcccactttacagccggagttttcaacgtcaccttgtccacggaagagatatccaaccacttcgtgcagaattctcagggactgggcaacgtgctgagccggatcgccgaaatttatatcctgtcccagccctttatggtacggatcatggctacagagcctccaataataaaccttcagccagggaatttcacactggatatccctgcaagcattatgatgctgacacagccaaagaattccacagtggaaacaatcgtgtctatggactttgtggccagcacatccgtcggtcttgtgatcttgggacagcgcctcgtctgcagtctgtctctcaatcgcttcagactcgcgctgcccgagtccaatagaagcaacatagaagtcttacggtttgaaaatattctgtcaagcatcttacacttcggcgttctaccgctggcaaatgctaagcttcagcaagggtttcccctcagcaacccccacaaattcctgttcgtaaactcagatatcgaggtcctcgagggcttcctgctgattagcacagacttaaagtacgaaaccagttcaaagcaacagccttcttttcatgtatgggaaggccttaacctgatttctcgccagtggcgtggtaaaagcgccccttag

SEQ ID NO: 11057 - DNA, 753 bp, synthetic construct
  misc_feature 1..753: note = source = /note="Description of Artificial Sequence: Synthetic coding sequence"
  source 1..753: mol_type = other DNA
atggcaagtgaacgactgccgaaccgccctgcttgtctgctggtcgctagcggggctgccgagggggtttcagcgcagagctttctgcactgcttcaccatggcttcgacagccttcaatctgcaagtggcaaccccaggcggaaaagcgatggagttcgtggatgtcactgagtcaaacgcaaggtgggttcaggattttcgcttaaaagcgtacgcttctcctgctaaactggaatcaattgatggagcacgttatcacgccttgctgataccctcttgtccgggtgcactgactgacttggcaagcagcggttcattggccaggatccttcaacactttcattccgagagcaagccaatatgtgccgtgggccacggcgtcgctgccctttgttgcgctacgaacgaagacagatcttgggtcttcgactcctattcactgactgggccttccgtgtgcgaattggttcgcgcacccggatttgctcgcctccctttggtggtagaggatttcgtaaaggattccggcgcatgtttttccggggctgcggctagctgccctaaagccgatcggcactggcagcatttccctgttgaggaaatcttcctggcgtgtggcttcaaggtggcgggactcggggctgccccaggatgggggagaggaggcaagcaagaagataggcctcccgaggaacagagacgcgctggggaagattttcctatatatcaatgcgtctttatttatccctag

SEQ ID NO: 11058 - DNA, 1386 bp, synthetic construct
  misc_feature 1..1386: note = source = /note="Description of Artificial Sequence: Synthetic coding sequence"
  source 1..1386: mol_type = other DNA
atgagcttagacattcagagccttgatatccagtgcgaagaactgtctgatgcacgctgggcagagctgctgcctttactacagcagtgtcaagtcgtgaggctggatgattgcgggctcactgaagctagatgtaaggacatttcctcagcactgagggtgaacccagctctggctgagctcaatttgcggtcgaacgagctgggcgatgtcggggtccactgcgtgctccaaggcctccagaccccgtcctgcaagatccagaagctttcccttcagaattgttgccttacaggcgctggatgcggggtgctctcatccactcttcggactcttcctacactacaagagctgcacctgtccgataatctgctgggagacgccggactgcagctgctctgtgagggcctgctggatcctcagtgcagacttgaaaagttgcaactggagtattgcagtctttcagctgcctcctgtgaaccactggcgtctgtgttgcgcgctaagcctgacttcaaagaactgacagtcagcaacaacgatatcaacgaagcaggcgttagagttctgtgccagggtctgaaggatagcccatgtcagctggaagctcttaagctcgagtcatgtggggtgacttccgataactgcagagatctctgcggaatagtggcctcaaaggcgtccttgcgtgaactggctctggggagcaataagttaggggacgtgggcatggcagagctttgcccaggtctgttgcatccgtccagccgtttgaggaccctctggatctgggagtgcggcatcacagccaaaggctgtggggacttgtgtagggttctgcgggcaaaggagagcttgaaggagttgtcactggctggcaacgagctgggagatgagggagccaggttgctgtgcgagaccctgctggaacctggttgccagctggaatcactctgggtcaaaagctgctcctttactgccgcttgttgttctcatttttcctctgtgcttgctcagaaccgattcctgctggagctgcaaatatctaataacaggttggaagatgcaggggtacgggagttgtgccagggcctgggacaaccgggtagtgttcttcgagttctgtggctggctgactgtgacgtgtcagattccagttgctccagcctagcggcaactctgctcgccaatcatagccttcgggaactcgacctgagcaacaactgtctcggagacgcaggcatcctgcaactagtcgaaagcgtgagacagcccggatgcctcttggagcagttggtgctatatgacatatattggagcgaggaaatggaagaccgcctgcaggcgttggagaaagacaaaccttccctgagagtgatttcttag

SEQ ID NO: 11059 - DNA, 1386 bp, synthetic construct
  misc_feature 1..1386: note = source = /note="Description of Artificial Sequence: Synthetic coding sequence"
  source 1..1386: mol_type = other DNA
atgagtcttgatattcagagcctggatatacagtgtgaggagctgtcggatgctagatgggcagaactcctccctttgttgcaacagtgtcaggtggtgagactggatgactgcggactcactgaggctaggtgtaaggatatctcctcggcactgcgggtcaaccctgctctggccgaactcaatctgaggagcaacgaactcggggacgttggagtgcactgtgtgttgcaaggactccagacgccctcctgtaaaatccagaagctgagcctacaaaattgctgtctgactggagccggttgcggggtgctatcctccacccttaggactctccccaccttgcaggagttgcacctctctgataacttactgggagacgccggtctacagctgctgtgcgagggcctgctggatccccagtgcaggctggaaaagctgcagcttgaatactgttctctatccgcagcctcatgcgagccactagccagcgtgttgagggctaaacccgactttaaggaactgactgtcagcaataatgatatcaacgaggctggggtgagagtgctgtgtcaaggcctgaaggatagtccctgtcagttagaggccctgaagctggaatcatgtggagtgacctccgacaactgcagggatctgtgtgggatagtggccagcaaagccagtctgcgcgagctggccctggggagcaacaagctgggcgacgtcggtatggccgagctctgccctggccttctgcaccctagttctcggcttaggacattatggatttgggaatgtggaattactgcaaaagggtgtggggatctttgtagagtgctgagagctaaggagagcttgaaagaactgtctctggccggaaacgagctgggggacgaaggcgcacgtctcctgtgtgagacgctactggagccgggttgccagctggagtcgctttgggtgaagtcctgcagcttcaccgctgcctgctgcagtcattttagctccgttctggcacaaaacagatttctcctcgagcttcagatatcgaataatcgccttgaagacgccggtgtccgtgagctgtgccagggtctggggcagccaggcagcgtgttacgcgtactctggcttgcagactgtgatgtctctgacagcagctgtagtagtctggccgcaacacttttagccaaccattccttgagagaattagacctgtctaataattgcctcggcgatgctggcatcctgcagctggtcgagtctgttcgacagcctggctgtctcctcgagcaactggtcctgtatgatatctactggtctgaagaaatggaggaccgcctgcaggctctggaaaaagacaaaccctctcttcgtgttatcagctag

SEQ ID NO: 11060 - DNA, 1386 bp, synthetic construct
  misc_feature 1..1386: note = source = /note="Description of Artificial Sequence: Synthetic coding sequence"
  source 1..1386: mol_type = other DNA
atgagtctcgacatccagtcgctagacatccagtgcgaggaacttagcgatgcgagatgggccgagctcctgcccctactgcaacaatgccaggtcgtgcggttagatgattgtggattgaccgaagccagatgtaaggatatcagttccgctctccgagtgaatccggctttggcagagttaaatctccgaagtaacgagctcggggacgttggggtccactgtgtcctccaagggctgcagaccccttcctgtaaaatacagaaactgtccctgcagaattgttgcctcaccggggcaggctgtggcgtgctttcttccacccttcgcacactcccaacccttcaggagctgcacctgagcgataacctgctgggggacgctggacttcagcttctttgcgaaggcttactcgatccacagtgtagattggaaaagctccagctggaatattgtagcctgagcgcggcatcttgcgaacccctggctagcgtgctcagagccaagcccgatttcaaggaacttactgtctccaacaatgacattaacgaagcgggagtcagagtgctgtgtcaagggcttaaggacagtccatgccagttggaagcgctaaaattagagagttgtggagtgacatcagacaactgtagggatttgtgtggcatcgttgcttctaaagctagtctgagagaactggctttaggaagtaacaaactcggggatgtcggtatggctgaactctgtcctggcctattgcacccctcttccagactccgcacgttgtggatttgggagtgcggcataactgcaaagggttgcggagacctgtgccgagtgcttagggctaaagaatctctgaaagagctctccctggcgggaaatgagctcggcgacgagggcgctcggctcctgtgcgaaaccttgctggaacctgggtgtcagctggaaagcttatgggtcaagagttgtagctttacagccgcttgctgcagtcacttctcatctgtgctcgcccagaacagattcctgctggagttgcagataagtaataaccggcttgaggacgcaggcgtgcgcgaactgtgccaggggctgggacagccaggtagcgttcttcgcgtactgtggcttgcggactgcgacgtgtccgactctagttgcagcagtctggcggctacccttctcgccaaccattctttgcgcgagctggatctgtcaaataattgcctcggtgacgccggaattctgcagcttgtggagagcgtgcggcagccaggatgcttgctagaacagcttgtactatatgatatttactggagcgaggagatggaggatcggctgcaagcactggaaaaagacaagcccagccttcgagtgatttcttag

SEQ ID NO: 11061 - DNA, 1452 bp, synthetic construct
  misc_feature 1..1452: note = source = /note="Description of Artificial Sequence: Synthetic coding sequence"
  source 1..1452: mol_type = other DNA
atgattacagcacattgcagcctggatcttcttggctctgtagctgtactttgcgtgtgtgacctgtccccagcacaatgtgatataaactgttgttgcgatcctgattgtagctccgtcgatttctccgttttctccgcctgcagtgtccccgtggtcacaggagatagccagttttgctcgcagaaagctgtgatctactccttgaactttaccgccaaccctcctcagagggttttcgagctggtagaccagatcaacccctcaattttttgtatccatatcacaaactataagcctgccctgtctttcattaaccctgaggtgccagatgaaaacaattttgacacactgatgaagaccagcgacggattcaccctcaatgccgagtcctatgtcagcttcacaaccaagctggatatcccaacagctgccaagtacgaatatggagtgcccttacagacaagcgattctttccttagattcccctcctccttgacatcctccttgtgcaccgataacaatcctgccgcttttctggtgaatcaggctgtgaagtgcactcgcaaaataaacctggagcagtgcgaagaaatagaagccctctccatggcgttttatagctcccccgagatactacgagtgcccgatagcagaaagaaggtgcccatcactgtgcagtccatcgtaatccagtcgcttaataaaaccctgactaggagggaggacactgacgtcttgcaacctacactggtgaacgctgggcattttagcttgtgcgttaatgtggtcttagaagtaaagtatagcctgacttataccgatgctggcgaggtaacaaaggctgatctgtcatttgtgctagggacggtaagttcagtcgtggtgcctctccagcaaaagttcgagattcattttctccaggagaatacacagccggtgcccctttctggtaaccccggttacgtcgttggcctccctctggctgccggtttccaacctcataagactggtgctctgccttgccagctggtggctcaaaaggtgaaatctctcctgtggggtcaggggttccccgattatgttgccccattcggaaattcccaggcgcaggacatgctagactgggtgcccatacacttcataacgcagagctttaacaggaaacatttcgttctgcaggacagctgccagttgccaggcgcactcgtgatcgaagtgaagtggacaaaatacggaagtctgttgaatccacaagccaagatagtaaatgtgacagcgaaccttatatcctcctcattcccagaggcaaatagtggcaatgagcggaccatattgatttcaacagccgtcacattcgtggatgtgtccgctcccgcagaggctggatttcgggctccccctgctatcaatgctcgactgccttttaacttcttctttcccttcgtgtag

SEQ ID NO: 11062 - DNA, 1596 bp, synthetic construct
  misc_feature 1..1596: note = source = /note="Description of Artificial Sequence: Synthetic coding sequence"
  source 1..1596: mol_type = other DNA
atgtgtcaactcctggagagcactgtcatacaacctcaaggcgattctcccgttgcagtcctgtgcgtttgcgatctgtcccccgctcaatgtgacatcaattgctgctgtgaccctgattgttcatctgtcgattttagcgtgttcagcgcatgtagcgttccagttgtgactggtgactctcagttctgtagtcaaaaagctgtgatctactctctgaatttcaccgcaaatccccctcagagagtgttcgaactcgtggatcaaattaatccttccattttctgtattcacatcacaaactacaagcctgccctctctttcattaaccccgaagtgcctgacgagaataatttcgataccctgatgaaaacttccgatggcttcacccttaatgccgaatcatacgtttcattcaccacaaagctcgatatccccaccgcagccaagtatgagtatggcgtgccactgcagacctccgattccttcttgcgcttcccgtcctctcttacttccagcttatgcaccgacaataatccagcagccttccttgtaaatcaagctgtcaagtgtacacgcaaaatcaacctagagcagtgcgaagaaattgaagctctgtctatggcgttttattctagccccgagatcctgcgggttcctgattcacggaaaaaggtgccaatcaccgtgcaatccatcgttatccagagtttaaataaaaccctgaccaggcgagaggatactgacgtcttgcagccgactttggtgaatgcgggacattttagtctttgcgtaaacgtggttttggaagtaaagtactctcttacctacacagatgcaggagaggtgacaaaagccgatttaagctttgtgctggggaccgttagttcagttgtggtgcctttgcagcagaagttcgagattcactttctccaggaaaatacgcagcctgtgcctttatcaggaaatccaggctacgttgtgggactgcccttggctgcagggttccagccgcataaaatgtccggcatcatacagacaaccaatcgatatggccaactcaccatactgcatagtaccaccgagcaagactgtcttgctcttgagggcgtgcgaactcctgtactcttcggctacactatgcagtctggatgcaaactgcgactgaccggggcactcccctgccagcttgttgcccagaaggtaaagtccctgttatggggccagggatttccagattacgtggctccattcggaaactcccaggcacaagacatgctagattgggtgcccatacacttcattacacagtctttcaataggaaagactcatgccagcttcctggcgctctggtcattgaggtcaaatggaccaagtatggatcactgttaaatcctcaagctaaaattgtgaacgtaacagctaaccttattagctcgtccttccccgaagccaatagcggtaacgaacgcactatattgatctcaaccgccgtcacctttgtggacgtcagcgcccctgcagaggctggctttagggccccaccagccataaatgcaagacttcccttcaattttttcttccctttcgtatag

SEQ ID NO: 11063 - DNA, 1722 bp, synthetic construct
  misc_feature 1..1722: note = source = /note="Description of Artificial Sequence: Synthetic coding sequence"
  source 1..1722: mol_type = other DNA
atgagaccaagaggactgccgccactactggtagtcttgttaggttgttgggctagcgtgagcgcacaaaccgatgccacccccgctgtcactaccgaggggctcaatagtactgaggcggcacttgccacctttggcacttttccctctacaagaccccctggcacacctcgggctccaggccctagttccgggcctagacccacccctgttactgatgtggccgtcttgtgcgtgtgtgacctgagtcctgcccagtgcgatataaattgttgttgtgaccccgattgttcaagtgtggacttctccgtgttcagcgcctgctctgtgccagtggtgacaggggactctcagttctgcagtcagaaggctgtgatctactcattgaactttacagcaaacccaccacagagagtgttcgagctcgtggatcaaataaatcccagcatattttgcatacacatcaccaattataagccagccctgagcttcatcaatcctgaagtccctgacgaaaataatttcgatacgctcatgaagacctccgacggattcacgctgaacgccgagagttacgtaagctttaccacgaagctggacatccctaccgccgctaagtatgagtacggagtgcccctacagaccagtgattcattcctgcgatttccatcctctctgacgtcctccctgtgcacggataacaaccccgctggccaggcctattggtttacacctgtgatccccgctctttgggaggccgaggccagaggttcactggaggtccccgactcccgcaagaaagtgcccatcacggtgcaatccatcgttatccagagcctgaacaaaacactgactcgcagggaggacaccgacgtgctacagccaacgctagtgaatgccggtcatttcagcctgtgtgtgaacgtcgtcctagaagttaaatactctcttacttatacagacgctggcgaagttaccaaagcagacctctcttttgtcttaggcaccgtatcttctgttgtggtgcccctacagcaaaaatttgaaatccacttcctccaagaaaacacacaacctgttccactgtcaggcaatcccggttacgtagttggattacccctggctgccggatttcagccgcacaagggcagcggtatcattcagacaacaaataggtacggtcagctaacaatactacacagtactactgagcaggactgtctagctctcgagggtgtgcggacaccagtgctgtttggctacactatgcagagtggatgtaagctgaggctgaccggtgccctgccttgccagctggttgctcaaaaagtgaagagtttattgtgggggcagggcttcccagattacgtggcccctttcggaaattcacaggcacaggatatgcttgactgggtgcccatccatttcattacacaaagtttcaatcgaaaggattcatgccaattgccgggtgctctggtcatcgaggtcaagtggacaaagtacgggagcttactcaacccgcaagccaagatcgtgaacgtgacagcgaatctgatatctagctctttccctgaggccaatagcggcaacgaaagaactattctcatcagcaccgctgtcacgttcgtggacgtctcggcgcctgcagaggccggattcagagcgccacccgcaattaacgctcgccttccctttaactttttctttccttttgtctag

SEQ ID NO: 11064 - DNA, 1230 bp, synthetic construct
  misc_feature 1..1230: note = source = /note="Description of Artificial Sequence: Synthetic coding sequence"
  source 1..1230: mol_type = other DNA
atgaaaacatccgatggtttcactctgaatgccgagtcgtatgtttccttcaccacaaagctggatattccaaccgctgctaagtatgagtacggagtgccgctccagacttccgattcatttctcagattcccaagcagtcttacctcaagtctgtgtacagacaataatccagctgctttcctggttaatcaggctgtcaagtgcacccggaaaattaatttggagcagtgcgaagagatcgaagctctgtcaatggccttttacagctcgcccgagatcctccgcgtgcctgattctaggaaaaaagtgcccattaccgtgcagtccatcgtgatccagtctcttaataagactctaaccagaagagaagatacagacgttctccagccaactttggtcaatgcagggcacttcagcctgtgcgtcaatgttgtgctggaggtcaagtactcgctgacctacacagatgccggagaggttacaaaagccgacctcagctttgtcctgggcaccgtctcaagtgtggtcgttcctcttcaacaaaagttcgaaattcattttctccaggaaaacacacaacccgtacccttaagcggcaacccaggttacgtggtcggattaccactggctgcagggttccagccccacaaagggagtggaatcattcagacaacaaacaggtacggacagctcacaattctacatagcacaactgaacaagattgtttggccctggagggagtgcggacaccagtgctcttcggatatacgatgcagtctggctgcaagctcaggctgacaggggctcttccctgtcaattggtggcccaaaaggttaaatccctcctgtggggacaaggcttcccagattacgtcgcacccttcggaaatagccaagcccaggacatgctcgactgggttcctatccattttatcactcaaagttttaatcggaaagacagttgtcagctaccgggagctttggtcattgaggttaaatggactaaatacggatccctcctgaatccgcaggccaagattgttaacgtcacagcaaatctgatcagctcttcgtttccagaggccaacagcggaaacgagcggactatcttgatctcaaccgcagtgacttttgtagacgtatctgccccagcagaggcagggttcagggcaccgcctgctataaacgcacggctgccattcaacttcttctttccttttgtatag

SEQ ID NO: 11065 - DNA, 1779 bp, synthetic construct
  misc_feature 1..1779: note = source = /note="Description of Artificial Sequence: Synthetic coding sequence"
  source 1..1779: mol_type = other DNA
atgcggccaaggggattaccacccctcctggtggtattactgggctgttgggcctccgtctctgcccagacagatgctactcctgctgtgaccaccgagggactaaatagcaccgaggctgccttggcaacctttggtacttttccctctacaagaccacccggaactcctcgcgctcctggtccttcttcggggcctcgcccaacccctgttaccgatgtggcagtactgtgcgtatgtgatctcagtccagcccaatgcgacataaactgttgctgtgatcctgattgctcttcggtggattttagtgtattctccgcctgcagcgtgcctgtcgttacaggcgattctcagttttgttcccagaaggccgtgatttattcgctaaactttacagcaaatccacctcagcgcgtgtttgagctggtagatcagatcaacccctctattttttgtatccacattaccaactataagccggcattgtctttcataaaccccgaagtccctgacgaaaacaacttcgatactctaatgaaaacctccgacgggttcaccctaaatgctgaaagctatgtgtctttcaccacaaaactcgacattcccactgccgctaaatacgagtatggcgtgcccctccagacctcggattcattcctgaggttcccttcaagtctgacgtcctcactctgtactgacaataaccccgcagcgttcctcgtaaaccaagccgtgaaatgcacacggaaaattaatcttgaacagtgcgaggagattgaagccctgtctatggcattctactctagcccggagattctaagagttccggactcgcgcaagaaagtgcccatcaccgtccaatcaatcgtcatccagtcactgaataaaacgctcaccaggcgtgaggacacagacgtcctccagccaactttagtgaatgctggacactttagtctatgcgtgaatgtcgtgctcgaggttaagtatagtctgacctacacggacgctggcgaggtgacaaaggccgacttatcatttgtgctgggtacggtgagcagcgtcgtggttcccctccaacagaagttcgaaatccactttctgcaggagaacactcagcccgttcctctgtccgggaaccccggttacgtggttggactgcccctcgccgctggcttccagcctcataagggctcgggaatcatccagactactaaccggtacggtcaacttacaatcctccattcaactaccgaacaggactgtctcgccctggagggagtgcggactcctgtgcttttcggctataccatgcagtcaggctgcaaattgagactgacaggggctctgccctgccagcttgtggcccaaaaggtgaaaagtctcctctggggccaggggtttcccgactacgtagccccattcggaaattctcaagcacaagacatgctggattgggtgcccatccattttatcacacagagcttcaatagaaagcattttgtgctacaggacagctgtcaactgcctggtgcattggtgatcgaggtaaaatggaccaaatacgggtccctcctgaaccctcaagccaagattgtaaacgtcaccgccaacctgatatccagtagtttccccgaggccaattctggcaacgaacgaaccatcttaatcagtaccgccgtgacgtttgtagacgtgtcagcccctgcagaagcgggtttccgtgccccacccgcaattaacgccaggctgccttttaatttcttttttccctttgtatag

SEQ ID NO: 11066 - DNA, 552 bp, synthetic construct
  misc_feature 1..552: note = source = /note="Description of Artificial Sequence: Synthetic coding sequence"
  source 1..552: mol_type = other DNA
atgatttttttgttgctcatgctgagtctggaactgcagctccaccagattgccgcactttttaccgtgacagtacctaaggagttatacattatcgaacacgggagcaacgtgacgctcgagtgtaattttgataccggaagccacgtgaacctaggggcaatcactgcgagccttcagaaagtggagaatgacacaagccctcacagggagagggcgaccttgctggaagagcagctgcctctaggcaaggcctcatttcacatcccccaggtgcaagtgcgcgatgaggggcagtaccagtgcataattatttatggcgtggcctgggactataaatatttgacgctgaaagtgaaaggtcagatggagccgcgtacgcacccgacgtggctgctccacatatttattccgttctgcattatcgcattcatatttattgccaccgtaattgctctccgcaagcagctctgtcagaagctgtatagctcaaaggataccaccaagagacccgtcactactactaagcgtgaggtgaactccgccatttag

SEQ ID NO: 11067 - DNA, 822 bp, synthetic construct
  misc_feature 1..822: note = source = /note="Description of Artificial Sequence: Synthetic coding sequence"
  source 1..822: mol_type = other DNA
atgatctttttgctgcttatgctgagtcttgagttacagttacatcagattgccgctttgttcacagtgactgtgcccaaagaactgtacatcattgaacatggctcaaatgtcacactggaatgcaattttgataccggttcacatgtgaatctgggcgctattacagctagtttgcagaaggtcgagaatgatacttcccctcacagggagagagccacactgctcgaagagcaactgcctctcggaaaggcctctttccacatcccacaggtgcaagttagggacgaggggcagtaccagtgtattatcatttacggcgttgcatgggattacaagtatctgaccctgaaggttaaggcatcataccgcaagatcaacactcacattctgaaggtgcccgagaccgacgaggtcgaattaacatgccaggccaccggatatcccctggctgaagtatcatggcctaacgtctccgtacctgccaataccagccactcaaggacaccagaggggctgtatcaggttacatccgtgcttaggctgaagcctcctcctggccgtaacttttcctgtgtgttttggaacacgcacgtgcgcgagctcactctagcctcgatagatctgcaaagtcagatggagccacgcactcatcctacatggttactgcatatctttattcccttttgcatcatcgcctttatcttcattgccactgtaattgccttgcggaagcagctctgccaaaaattgtattcttctaaggatacgactaaacgccctgtaactacaaccaaacgagaagtcaatagtgcaatatag

SEQ ID NO: 11068 - DNA, 372 bp, synthetic construct
  misc_feature 1..372: note = source = /note="Description of Artificial Sequence: Synthetic coding sequence"
  source 1..372: mol_type = other DNA
ctgggggatcgtaggggcagaagctccggggcacgcgctgctgcagtgggatcgacaggggagcgcttagagatggaagaagatatactccagctccaggctgaagccacggccgaggtgctcggtgaagttgcgcaggcacagaaggtgcttcgggactcggtccaaaggctggaggtacagctgcggagtgcgtggctgggaccagcctaccgagagttcgaggtcttgaaagcacacgcagacaagcagtcgcacatcttgtgggcgctcacaggccatgtgcagagacaaagacgggagatggttgcgcaacagcacagattacgccagatccaagagcgcctgcacacggcagcgctgccagcctag

SEQ ID NO: 11069 - DNA, 345 bp, synthetic construct
  misc_feature 1..345: note = source = /note="Description of Artificial Sequence: Synthetic coding sequence"
  source 1..345: mol_type = other DNA
atggcctccttcaagttggcagactctgtctgggaggattctttatccaagcgccaaaggaatcagggtcgcatgaagaccttacccgtgctggtactgtcgctgacccttctgaccgtcttttctgaaacttcgccaattcttacagaaaaacaagcgaagcagctgttgcgcagccgccgtcaagatcgcccttccaaacctggcttcccagatgaacctatgagagaatatatgcatcacttgctggcattagaacatcgcgctgaagagcagtttctggagcactggctcaacccccactgtaaaccacactgtgatcgcaatcgcatccatcccgtctag

SEQ ID NO: 11070 - DNA, 345 bp, synthetic construct
  misc_feature 1..345: note = source = /note="Description of Artificial Sequence: Synthetic coding sequence"
  source 1..345: mol_type = other DNA
atggccagcttcaaactagctgactctgtgtgggaggactcactgagcaagaggcagagaaaccagggaaggatgaagacattacctgtgttggtgctgtccctgacgctgctgacggtgttctccgaaacatctcctatactgactgaaaaacaggccaagcagcttctgcggtcccgcaggcaggatcggccttctaaaccaggtttccccgacgaacctatgcgggaatatatgcatcacctacttgcccttgaacaccgcgctgaggaacagtttctggagcactggctgaacccccattgcaagccacactgcgacagaaacagaatccaccccgtgtag

SEQ ID NO: 11071 - DNA, 444 bp, synthetic construct
  misc_feature 1..444: note = source = /note="Description of Artificial Sequence: Synthetic coding sequence"
  source 1..444: mol_type = other DNA
atggccctccagaggacccactccctccttcttcttctcctgctgaccctcctcgggctggggctggtgcaaccgagctatggacaggacgggatgtatcagcgatttctgcgacaacatgtacatccagaggaaaccggcggttcagatcgttactgtaatctaatgatgcagcggagaaagatgactctgtatcactgcaagcgattcaacaccttcattcacgaggacatatggaatattaggtctatttgcagcaccacaaatatccagtgcaagaatggcaagatgaattgccacgagggagtcgtcaaagtgacagactgccgggatacaggcagctccagagctcccaattgtcgctaccgggctattgcttccaccaggagggtggttattgcatgcgagggcaacccccaggttccggtgcactttgatggttag

SEQ ID NO: 11072 - DNA, 1302 bp, synthetic construct
  misc_feature 1..1302: note = source = /note="Description of Artificial Sequence: Synthetic coding sequence"
  source 1..1302: mol_type = other DNA
atggagccgcagctcggcccagaggctgctgctctcagaccgggatggcttgctctgctcttgtgggtgtccgcgttgtcttgtagctttagcctgcccgcatcctctctctcctccttggtgcctcaggtgaggaccagctataacttcggaaggaccttcctgggacttgataagtgcaacgcctgcatcgggacaagcatttgtaaaaaattctttaaggaagaaatccggagcgacaactggctggcaagccacctgggactgccccctgattcccttctatcgtatcctgccaattattccgacgattcgaagatttggcggccagttgaaatcttccggctggtcagcaaataccagaacgaaatatcagacaggcggatttgcgcaagcgcaagcgcacccaagacctgcagcatcgagcgggttctgaggaagacggagcgcttccagaaatggctgcaagcaaagaggctaactcccgacctggtgcaagggctggccagcccgctgctgaggtgcccatcccagaggctgttggacagagtggtgaggcggtacgccgaggtcgctgacgccggatcaatttttatggaccactttacggatagagataaactccgccttctttataccctcgctgttaatagtcatcccatcctgctccagattttcccgggagcggaaggatggcccttgcccaagtatttgggtagctgcgggagatttctggtaagcacatcaactcgaccactccaggagttttacgatgccccacctgatcaggccgctgacttggcctaccagctgcttggcgtgctggagtccctgcggtcaaatgatctaaattactttttctattttacacatattgacgcaggtatgtttggggtgttcaataatgggcacttgttcatacgagacgcctctgccgtgggagttatcgacaagcaagaagggagtcaggaggcaaatcgcgctggcgaaaacaaggacatcttctcctgtcttgtgtctggctgtcaagctcagttgccttcttgtgagtcaattagtgaaaaacagtctttagtgcttgtgtgtcagaagctgctccctcgacttctgcaaggtcggttcccatctccagtacaggacgatatagacagtatacttgtgcagtgcggcgattcgatccggccagaccctgaggtgctgggtgccgctagccagcttaaggatatcctccgacccttgaggacatgtgatagcagattcgcctaccgctatcccgattgcaagtataatgacaagttttag

SEQ ID NO: 11073 - DNA, 600 bp, synthetic construct
  misc_feature 1..600: note = source = /note="Description of Artificial Sequence: Synthetic coding sequence"
  source 1..600: mol_type = other DNA
atggaaacatttccactgttacttctttccctgggactcgtgttagccgaggcctccgaaagtactatgaagatcatcaaagaggagttcactgacgaagagatgcaatacgatatggccaaatccggccaagagaaacagaccattgagatactgatgaaccctattctgctcgtgaagaacacgagtctgtccatgagtaaagacgatatgtcctccacgctgctgacatttcgcagcctgcactataacgaccctaagggaaactcctctggtaacgataaggagtgttgcaacgatatgacagtctggcgaaaggtgtcagaagctaatggatcgtgtaagtggagtaacaatttcattcgaagcagcacagaggtgatgagacgggtgcatcgggctcccagctgcaagttcgtgcagaatcctggtatttcttgctgtgaatcgctggagttggagaatacagtgtgtcagtttactacagggaaacagtttcctaggtgccagtaccactccgtgacatcccttgagaaaattcttacggtgcttactggacacagtctgatgagttggttagtgtgtggaagtaaattgtag

SEQ ID NO: 11074 - DNA, 600 bp, synthetic construct
  misc_feature 1..600: note = source = /note="Description of Artificial Sequence: Synthetic coding sequence"
  source 1..600: mol_type = other DNA
atggaaaccttcccattactgctcctctccctgggtctcgtcctggctgaggcctctgagtctaccatgaaaatcatcaaggaagaattcacagatgaggaaatgcagtacgacatggcaaaatccggccaagaaaagcagactattgagattctcatgaatccaatcctgttagtgaagaatactagcttgtctatgagcaaggatgatatgtcgtccacgctgctaacctttcggagcctccactacaatgaccctaaggggaactcaagcggtaacgataaagagtgctgtaacgatatgacagtttggaggaaagtaagtgaggccaacgggtcgtgcaaatggtccaacaactttatcaggtcatctacagaggtcatgagacgcgttcatcgggctccatcttgcaagttcgtgcagaaccccggaatcagctgctgtgaatctctagagttggagaatacagtgtgccagtttaccaccggtaagcaattccctaggtgtcagtatcactcggtgacttctttggaaaaaattttgacagtcctgactggccattccctgatgtcgtggctggtgtgcggttctaagctctag

SEQ ID NO: 11075 - DNA, 291 bp, synthetic construct
  misc_feature 1..291: note = source = /note="Description of Artificial Sequence: Synthetic coding sequence"
  source 1..291: mol_type = other DNA
atgctcccctgtctggccctgctcttgttgatggagctgagtgtgtgtactgtcgccggagacggcggtgaagagcagacactgtcgaccgaggccgagacgtgggagggggctggccctagcattcagctgcagctccaggaagtcaagactggtaaagcttcccagttcttcggactcatgggtaagcgggttggcgcttaccagctagaacacacatttcaggggctgctgggcaagaggtctttattcactgaggggcgtgaggatgaggcccaaggtagtgagtag

SEQ ID NO: 11076 - DNA, 981 bp, synthetic construct
  misc_feature 1..981: note = source = /note="Description of Artificial Sequence: Synthetic coding sequence"
  source 1..981: mol_type = other DNA
atgactggcttatgcgggtactctgcacctgacatgcgcggactgcgtctcattatgatcccagtggagctcctgctttgctatctcctgctgcaccccgtcgacgctacaagttacggtaagcagaccaatgtactaatgcattttcctttgtccctggagtctcagaccccatcttctgatcccctatcctgtcagttcctccacccaaaatcactcccgggattcagccatatggctccactacctaaatttcttgtgtctctagctctgagaaatgctctggaggaggccggttgtcaagcagacgtgtgggccctgcagctgcagctgtaccggcaagggggagtgaacgcaacacaagtgctcatccagcacctgagaggcctgcagaagggacgcagcacggaacgtaatgtgagtgtagaggccctggctagcgctctccagttgcttgccagggagcagcaaagtaccggccgagtaggtcgctcattgcccactgaggattgcgaaaatgaaaaagagcaagccgtgcataatgtggtgcagctgctaccaggagtcgggacgttttacaacttaggaacagcattgtactacgctacgcaaaactgcttgggtaaagctagggagcggggaagagacggcgctatcgacttgggctatgatctcctgatgactatggccggaatgtccgggggacctatgggcttggccatctctgcggctctgaagcccgctctgcggtctggggtgcagcagcttattcagtactatcaagatcagaaggatgctaacatctctcagcccgagactacgaaggaggggctccgtgccatttctgatgtgagtgacctggaggagacaaccacactggccagcttcatctctgaggtcgtgtcctccgctccctactggggctgggctatcatcaaaagctatgatctggacccgggtgccggtagccttgaaatctag

SEQ ID NO: 11077 - DNA, 1476 bp, synthetic construct
  misc_feature 1..1476: note = source = /note="Description of Artificial Sequence: Synthetic coding sequence"
  source 1..1476: mol_type = other DNA
atgagatggattctgtgttggtcgcttactctatgcctgatggcccagactgccctgggtgcgctccataccaagcgccctcaggttgtcactaagtacggcaccctgcagggtaaacagatgcatgttggcaagacccccatccaagtatttctgggcgtgccattcagtaggcctcctctcgggatccttaggtttgccccaccagaacctcccgagccctggaagggaatccgcgacgcaactacataccccccagggtgcctgcaggaatcgtggggccagcttgccagcatgtacgtctctacccgcgaacgatacaagtggttacggttcagtgaagactgtctctatctgaatgtttacgctcctgccagagctccaggcgacccccaactgcccgtgatggtgtggtttccaggcggagcttttatcgtcggcgctgcaagctcatacgaggggagcgatttggctgcgagggagaaggtggtcctcgtcttcctgcaacacaggctgggcattttcggatttctatcaacagatgactctcatgctcggggaaattggggtctcctggatcaaatggcggcactgcgctgggtgcaggagaatatcgcagctttcgggggagatcccggaaacgtaacgctcttcggtcagagcgctggagctatgagcatatcaggattgatgatgtctcccctggcttcaggcctgttccacagggcaatttctcagagtgggaccgctctctttaggctcttcatcacttccaatccactgaaagtcgcaaagaaggtcgcccacctggccggatgcaatcataacagcacacagatcctcgtaaattgcctccgcgctctgagtgggaccaaggtgatgagagtctcaaacaagatgcgttttctccagctgaattttcaaagggacccggaggagataatctggtccatgtctccggtcgtagatggggtcgtcattcccgatgatccactagtactgctgacacaaggaaaagtttccagcgtgccctatctacttggcgttaataatctggaatttaattggttactcccttataatataacaaaagaacaggtgcctcttgtcgtggaggagtacttggataacgtgaatgaacacgattggaaaatgctgcgcaacaggatgatggatattgttcaggatgccacctttgtctatgcaaccctgcagaccgcccactaccacaggggcctcagtatgggcaaggagaaggcattaagccttcagatgatgaagtactgggcaaatttcgccagaactggtaacccgaacgacggtaatctgccatgttggcctcggtataataaggatgagaagtacctgcaactggacttcacaacccgggtgggaatgaaactgaaagagaagaaaatggctttttggatgagcctctatcagtctcagcgtccagagaaacaacgacagttctag

SEQ ID NO: 11078 - DNA, 285 bp, synthetic construct
  misc_feature 1..285: note = source = /note="Description of Artificial Sequence: Synthetic coding sequence"
  source 1..285: mol_type = other DNA
atggctgcctttccacataaaatcattttcttcctggtctgttcgactcttacccatgtcgcctttagcggcatcttcaataagagagacttcacgaggtggccaaaacctcggtgtaagatgtacatccccttggacccggactataacgcagactgccctaatgtgactgctcctgtctgtgccagcaacgggcacaccttccagaatgagtgctttttctgtgtagaacaaagggagtttcattatcgcattaagtttgagaagtatggcaagtgcgactag

SEQ ID NO: 11079 - DNA, 402 bp, synthetic construct
  misc_feature 1..402: note = source = /note="Description of Artificial Sequence: Synthetic coding sequence"
  source 1..402: mol_type = other DNA
atgagacagcggctcttgcccagcgtgacaagtctgctcctagtagcactcctttttcccggaagctcccaagcccgtcacgtaaaccactcggccactgaagctcttggagaactgcgtgagagagctcctggtcaggggaccaacggcttccagctgctgaggcatgcagtgaagagggacttattgccaccacggacgcctccttatcaaggggacgtgccaccaggtatccggaacacaatctgccatatgcagcagggcatctgccgtctgtttttctgccactctggtgaaaaaaagcgggatatctgcagcgatccatggaacaggtgctgcgtgagcaacactgatgaagaaggaaaggagaagccagaaatggatggcaggagtgggatctag

SEQ ID NO: 11080 - DNA, 564 bp, synthetic construct
  misc_feature 1..564: note = source = /note="Description of Artificial Sequence: Synthetic coding sequence"
  source 1..564: mol_type = other DNA
atgggttgttgcggctgctcaggcggttgcggatctggctgcggagggtgtggcagtggttgtggtggttgcggtagcagttgttgcgtgcctatttgttgctgtaagcccgtctgttgctgcgtgccagcatgttcttgctcaagttgcggaagctgtggaggatcgaaggggggaaggggaagctgcggaggaagtaaaggcgactgcggcagctgcggtggttctaaagggggttgcggttcatgcggctgctcacagtgtagctgctataagccttgctgttgcagcagcggttgtggtagctcgtgttgccagtcttcatgctgcaagccatgttgctcacagtctagttgttgtaagccttgcagttgctcctccggctgcggctcatcctgttgccagtccagttgctgtaaaccctgctgctctcagagttcgtgttgcaagccttgttgttgtagttcaggatgcggcagctcatgctgccagtcatcctgttgtaagccttgctgctctcaaagctcatgttgtgttcctatctgttgtcagtgcaaaatttag

SEQ ID NO: 11081 - DNA, 564 bp, synthetic construct
  misc_feature 1..564: note = source = /note="Description of Artificial Sequence: Synthetic coding sequence"
  source 1..564: mol_type = other DNA
atgcggcctctggcaggagcgccagtccccaaacgtcagaagtgcgatcattggaccccgtgcccaagcgacacatacgcctatcgcctgttgtctggaggtgggagatctaaatatgcaaaaatatgctttgaagacaacttgctgatgggggaacagcttgggaatgtcgctagaggtatcaacattgcaatagtgaattacgtcacaggaaacgtcactgcaactcggtgttttgacatgtacgagggcgataattcaggacctatgactaagtttatccagtctgccgcacccaagagcttgctattcatggtaacgtatgacgacggatcaaccaggctcaacaacgacgcaaagaacgccatagaggccttaggtagcaaagaaatcaggaatatgaaattccgcagctcatgggtctttatcgccgcaaaaggactggagctcccttctgagatccagcgtgaaaaaatcaatcattcggacgctaaaaataaccggtattccgggtggccggcagaaattcaaattgaaggatgtattcctaaggagagaagttag

SEQ ID NO: 11082 - DNA, 249 bp, synthetic construct
  misc_feature 1..249: note = source = /note="Description of Artificial Sequence: Synthetic coding sequence"
  source 1..249: mol_type = other DNA
atgaagatcttgtgcatctttctgactttcgtgtttacagtgtcttgtgggccaagtgtccctcagaagaagacaagagaagtagccgagcgaaagcgagaatgccagctggttagaggcgcatgcaagccagaatgtaattcttgggagtacgtatactattattgtaatgtgaatccatgctgtgccgtctgggaataccagaagcctatcatcaacaaaattacatcgaaactacatcagaaatag

SEQ ID NO: 11083 - DNA, 186 bp, synthetic construct
  misc_feature 1..186: note = source = /note="Description of Artificial Sequence: Synthetic coding sequence"
  source 1..186: mol_type = other DNA
atgaagattcacgtgtttctgttcgtgcttttctttttccttgttccgattgctactagggtgaagtgtgccgtgaaggacacttacagctgtttcattatgcgcggaaagtgtcgtcacgagtgtcacgatttcgaaaagcccatcgggttctgcaccaagttgaacgctaactgctatatgtag

SEQ ID NO: 11084 - DNA, 1056 bp, synthetic construct
  misc_feature 1..1056: note = source = /note="Description of Artificial Sequence: Synthetic coding sequence"
  source 1..1056: mol_type = other DNA
atgggtaatttgttcatgttgtgggctgccctgggaatttgttgtgcagcatttagcgccagcgcatggtctgtgaacaacttcctgattacagggccaaaggcctaccttacttacacaacctcagtcgcacttggagcccaaagcggaatcgaagagtgcaagtttcagtttgcttgggagcggtggaattgtccagagaatgctttgcagctgagcactcataatagacttcgcagcgctacacgggaaacctcttttattcacgccatttcatcggctggcgtgatgtatattattacaaaaaattgtagcatgggagacttcgaaaactgcggctgcgatggttcgaacaatgggaagacagggggacacgggtggatttggggcggatgcagtgataatgtagagttcggcgaaaggatctccaagctcttcgtcgattctcttgagaaaggaaaagatgccagggcgcttatgaatctacataacaatagggcaggacggctggccgttagggccaccatgaaaaggacttgcaagtgccacggaatctcaggtagctgtagtattcagacctgttggctgcagttagcagaatttcgcgagatgggagactacttgaaagctaagtatgatcaggctcttaagatagagatggacaaaagacagctgcgcgcaggaaacagcgcggaagggcattgggtccccgcagaagcctttctgccctccgctgaagctgagttaatttttcttgaggagagcccagactactgtacatgtaactcatctcttggcatttacggaacagaaggtcgcgagtgcctccaaaactcccataatacaagcagatgggagcgccgatcatgcggacgcctttgcaccgaatgtgggctccaggttgaggagagaaagaccgaagtcatttcatcctgcaactgtaaattccaatggtgttgtactgtgaaatgtgaccaatgccgccatgtcgtcagtaaatactactgcgctaggagccctggctcagcgcagtccttgggaaagggaagcgcttag

SEQ ID NO: 11085 - DNA, 1446 bp, synthetic construct
  misc_feature 1..1446: note = source = /note="Description of Artificial Sequence: Synthetic coding sequence"
  source 1..1446: mol_type = other DNA
atgcagtccagattgctcttgctgggcgcacccggtggtcacggcggtcctgcatccaggcggatgcgtctgcttctgaggcaagtcgtgcaacgaaggcccggaggagatcgccagcggcctgaggtccgcttactgcacgctgggagtggggctgataccggcgacacagtaaacattggcgatgtcagctacaagcttaagataccaaagaaccctgaattggtgccacagaactacatctccgattctttagctcagagtgtggtacaacatctcagatggataatgcagaaagacctgctgggccaggacgttttcctgatcggtcctcctggtcctctccgacggagtatcgcaatgcagtacctggagcttacaaagcgcgaagtcgagtatattgccctgagccgcgacacaactgagacagacctgaagcagagaagggagattagggctggaactgccttttatatcgatcagtgcgcggtgagggccgctacagaagggcgaaccctaattctggaagggctcgagaaggccgagcgtaatgtgctgcccgtgctcaacaacctgcttgagaatcgggagatgcagctggaagacgggcgatttttaatgagtgctgagcggtacgataagctgttgagggatcacactaaaaaggagctggacagctggaaaatcgttcgtgtctcagaaaactttcgcgttatcgccctgggcttgcccgtgccccgatacagcggcaacccattagaccccccacttcggagtagattccaagccagggacatctactaccttcccttcaaggaccagctaaaactgctgtactcaatcggcgctaacgtcagcgctgaaaaggtcagccaactcctgtccttcgcgacaacactctgctcacaagagtcatcaactctcggcctcccagacttccccctcgactccctggccgctgctgttcaaatcctagacagtttccctatgatgcccatcaagcacgctatccagtggttgtatccgtattctatactgcttggccacgaaggaaaaatggccgtggaaggtgtactgaaacggtttgagctgcaagattctgggtcttcactcctgccaaaagagattgttaaggttgagaagatgatggaaaatcatgtgtcccaggcgagcgtgaccattagaattgccgataaagaagtaaccattaaagtgccagcaggaactcggctgctgtctcagccttgtgcgtccgaccggttcatccagaccctcagtcataaacagctacaagccgagatgatgcaatcccatatggtgaaagacatttgcctcattggtggaaaagggtgtggcaagactgtgatcgccaagaattttgcggataccctgggatataacatcgaacccatcatgctgtaccagcataaggttccccacatttag

SEQ ID NO: 11086 - DNA, 786 bp, synthetic construct
  misc_feature 1..786: note = source = /note="Description of Artificial Sequence: Synthetic coding sequence"
  source 1..786: mol_type = other DNA
atggcctccctcgcggtgtctaactggccgaaacccatgcccctcatcccttgcctctcgtggagcaccgcctccggagtcttcacaactggagtgctcagcaaatcaatcaattggcgggaactggaaaagcagtactatacacagactgtctatgaggaagaaatcattcacatgcttgaatattgtggtacagactcttttaagatgggacaagaattcgtcaagcacttcacctcctcagccgataagctcactaatctgaacctcgtgagccgaactctcaatcttgatatatcaaaccaggtcgtatcccaaaagccagcggactgccacaacagctccaagacatcagtcagtgcaacatccgagggactgctgttgcaggacacctcgaaaatgaaaagattcaaccagactctgtctaccaataagagtggctacacttctcgaaacccccagtcttaccacctactgtcaaaagaacagtcaagaaattcccttaggaaggagtctcttatttttatgaagggggttatggacgaatgtacccacgttgccaacttctcagtgccggtagatccatctcttatcatagtcgtccaagccaaggaggatgcctatatccccaggacaggcgtgagaagtctgcaggaaatttggccaggatgcgaaatacggtaccttgaagggggtcatatctccgcctacctgttcaagcagggattgttcaggcaggccatctacgatgctttcgatcggtttctgcacaagtatgccaactag

SEQ ID NO: 11087 - DNA, 1245 bp, synthetic construct
  misc_feature 1..1245: note = source = /note="Description of Artificial Sequence: Synthetic coding sequence"
  source 1..1245: mol_type = other DNA
atgggcgtgagtaagctggacatcctctacagacgcttattattgacgaagcttttcattaggggatgggggcgtccggaagacctcaaacgactgtttgaattccgcaagatgataggtaaccgggaacgatgccagaacctggtgtcatccgactatcccgtgcatatcgataaaattgaagagcagtctgactgtaaaatcctggacggccacttcgttagccccatggcgcactatgtcccagacatcatgccaatcgagtcagttatcgcacgattccagttcattgtgcctaaagagtggaatagcaagtatcggccagtttgcatacacctggctggaactggcgaccatcattactggcgtcgaaggaccttaatggccaggcccatgatcaaagaagcccgaatggcttccttgctcttagaaaacccctactacggttgtagaaagcctaaagatcaagtacgctccagcctgaaaaatgtaagtgacctgttcgtgatgggtggagctctggtattagagtccgcggcactactccactggctcgagagggaagggtatggccctcttggaatgaccggaatctccatggggggacatatggccagtctcgccgtatccaactggccaaagccaatgcctctgattccctgcctctcttggtccacagcctccggggtctttacaacaaccgactccttcaagatggggcaggagtttgtaaagcacttcacatcatccgccgataagctgaccaacctaaatctggtgagcaggacattgaatctggacattagcaatcaggtggtgagtcagaaaccagccgattgtcacaatagctctaagaccagcgtgagtgccacttctgaaggactccttcttcaagatacctcaaagatgaaacggtttaaccaaaccctatccaccaataagagtggctatacttccaggaacccccagtcttaccacctgctgagcaaggaacaaagccggaattctttgagaaaagagtctctgatcttcatgaagggagtcatggacgagtgtacacacgtcgccaacttttctgtgcccgtggaccccagtctgatcattgtggtccaggccaaggaagacgcttacatcccacggaccggggttagatctctgcaagagatatggcctggatgtgagatccgttatctggaggggggtcacatatccgcttacctgttcaagcagggccttttccggtag

SEQ ID NO: 11088 - DNA, 747 bp, synthetic construct
  misc_feature 1..747: note = source = /note="Description of Artificial Sequence: Synthetic coding sequence"
  source 1..747: mol_type = other DNA
atgaagctcacctttttcttaggactcttagctctcattagctgctttaccccctccgaaagtcagcgattctcgcgccgaccctacctacctggccagcttccccctcctcccctatatagacccagatgggtaccgccttcccctcctcccccttacgattcaagactgaatagccctcttagcttgccgttcgtcccagggagggtaccccctagctcgttctctcggttttcacaggccgtgatactgagtcagctcttccccctcgagtctattcgacaaccaaggctgttccctgggtacccgaacctgcactttccactgcgcccatactacgtgggaccgataaggatcctcaagcccccatttccacctatccctttctttttggccatttacctgcccatcagcaaccctgagccgcagataaacataacgactgcagacactacaatcacaactaatcccccaacaacggccactgcgaccaccagcacatcaacgaagccaactatgacaatctctagctctacggtacccatttccagtacacccgagccggcaacctcaattagtgccgcaacccccgcagcatcgaccgagaatactacccaaatccttgcaaataggccacataccgtcctgttaaatgctaccgtgcaggtgacaaccagtaaccagactattttgtcgagtcccgcattcaagtccttctggcagaagttatttgcaatttttggctag

SEQ ID NO: 11089 - DNA, 231 bp, synthetic construct
  misc_feature 1..231: note = source = /note="Description of Artificial Sequence: Synthetic coding sequence"
  source 1..231: mol_type = other DNA
atgggtgcggctatctcccagggcgcattgatcgcaatcgtttgtaatgggctcgtcggattcctgctgctgttactttgggttatcctctgttgggcttgccatagccggagcgctgatgtcgactccctgtccgagtcctctccaaattcgagtcctggcccatgccccgaaaaagcccctccacctcagaagccatcacacgaaggcagctacttgctgcagccttag

SEQ ID NO: 11090 - DNA, 1536 bp, synthetic construct
  misc_feature 1..1536: note = source = /note="Description of Artificial Sequence: Synthetic coding sequence"
  source 1..1536: mol_type = other DNA
atgctcgtcgatggcccatcagagaggccagcactgtgctttttgctgctggcagtggcaatgagtttttttggaagcgccctcagtatcgatgagactcgggctcacctgctcctcaaggagaagatgatgagactaggcggacgcctcgtgctgaatacaaaagaggaactcgctaacgaacgtctgatgacgttgaaaatcgctgaaatgaaggaagccatgagaactctgatatttccgccatccatgcatttcttccaggctaaacacctgatagagcggtcacaggtgttcaatatcctcagaatgatgcctaagggggctgctttgcatcttcacgatattggcatcgtgaccatggattggctggtgagaaacgtgacctatcgacctcactgtcacatctgctttaccccccgtggtataatgcagtttaggtttgcccaccccaccccaaggccatctgagaagtgctctaaatggatcctgctcgaggattacaggaagagagttcaaaacgtgacggagttcgatgatagtcttcttcggaacttcactctagtcacacaacatccagaagtcatctataccaatcagaacgtggtgtggtctaaatttgaaacgattttctttaccatttccgggttgattcattacgccccagtctttcgggattacgtattccgttccatgcaggaattctacgaggacaatgtcctgtatatggagatccgggcacgactgttacctgtctacgaactgtcaggagaacaccatgacgaagagtggtccgttaaaacttaccaggaagtcgctcagaagttcgttgaaacacatccggaattcatcggaatcaaaattatctactctgatcatcggagcaaggacgttgccgtcatcgccgaaagcattcgcatggctatgggcctccgaattaagttcccaacagtcgtcgcaggctttgatctggtcggacatgaggacaccggtcactccctccacgactacaaggaggctctcatgatcccagcaaaggacggcgtcaaactcccatacttcttccacgccggagagacagattggcaggggacctccatagataggaatatcctggacgccctgatgctgaatacaactaggatcgggcacggttttgccctcagcaagcaccccgctgttcgaacctactcctggaaaaaggacatccccatcgaagtctgtcccatatctaatcaggtgctgaaattggttagtgacctgcggaaccacccagttgctacactgatggcaaccggccaccccatggtcatctcatctgatgatccagctatgttcggagcaaaagggctttcttacgatttctacgaagtgttcatgggcatagggggaatgaaggccgacctgcggacactcaaacagctagccatgaattcgatcaaatactctaccttactggagagcgagaagaacactttcatggaaatctggaaaaagagatgggataagttcatcgcagacgtcgccaccaagtag

SEQ ID NO: 11091 - DNA, 1536 bp, synthetic construct
  misc_feature 1..1536: note = source = /note="Description of Artificial Sequence: Synthetic coding sequence"
  source 1..1536: mol_type = other DNA
atgctggtcgatggtccctcggagcgtcccgctttatgttttcttcttctggctgttgccatgtccttcttcggaagcgctctgagcattgatgagactagggcgcacctcctcttgaaagaaaaaatgatgcgtctcggcggtcggttggtgctgaataccaaagaagaacttgcaaatgaacgtctaatgactctgaagatcgccgagatgaaagaggctatgagaactctgattttcccaccgtccatgcactttttccaggctaaacacttaattgagcgatctcaggtgttcaatattctccggatgatgcctaaaggggcagctctgcatctgcacgacattgggatcgtaactatggactggctggtacggaacgtcacgtatcgccctcactgccacatttgcttcacacctagaggaataatgcaatttcgtttcgcccaccctactcccaggccaagtgaaaagtgttcaaagtggatcctgctcgaagactaccgcaaaagggtgcagaacgttaccgagtttgatgactcgttgcttcgtaacttcacactggtgactcagcaccctgaagtgatctataccaatcagaacgtagtgtggtcgaaattcgagacaatattctttaccataagcggccttatccactatgccccagtctttcgtgactatgtttttaggagtatgcaggagttctatgaggataacgtgctgtacatggagatccgcgcacgcttgctaccggtgtacgagctgtctggagagcatcacgatgaggagtggtcagtgaagacctatcaggaggtggcccagaaattcgtggagactcatccagagtttatcggcatcaaaattatctactccgatcacagatctaaggatgtggccgtcattgctgagagcattcggatggcaatgggtttgagaatcaaatttcccactgtggtagcgggatttgatcttgtgggacatgaagacactggccatagcctccatgattataaggaggctttgatgattccagccaaggatggcgtgaaactcccatacttcttccatgccggtgaaactgactggcagggtacaagcatcgataggaacatccttgatgctctgatgctgaacaccacccgaatcgggcacggctttgccctttccaaacaccctgccgtgagaacctactcatggaaaaaagatatccccatcgaggtctgtccaatatcaaaccaggtacttaagctcgtgtccgacctacggaatcaccccgtcgccacgttgatggccacagggcatcctatggttatttcctcagacgatccagccatgtttggtgcaaagggtcttagctatgatttctatgaggtttttatgggcataggtgggatgaaagccgatctgcggactctgaaacagctcgccatgaactctattaagtactcaaccctcctcgagtctgagaaaaacacgttcatggagatctggaagaaaaggtgggacaagtttatagcagatgtggctaccaaatag

SEQ ID NO: 11092 - DNA, 240 bp, synthetic construct
  misc_feature 1..240: note = source = /note="Description of Artificial Sequence: Synthetic coding sequence"
  source 1..240: mol_type = other DNA
atgaagctgcactccctgatcagtgttctgttgttgtttgtgaccctcatcccgaaagggaaaaccggggttatccctggccaaaaacagtgtatcgctctgaagggcgtctgtcgagacaagctgtgttccacgctggacgatacaatcggaatctgcaacgagggtaaaaagtgctgtcggaggtggtggatcctggagccttatccaactcccgtcccaaagggcaagagcccctag

SEQ ID NO: 11093 - DNA, 351 bp, synthetic construct
  misc_feature 1..351: note = source = /note="Description of Artificial Sequence: Synthetic coding sequence"
  source 1..351: mol_type = other DNA
atggctgccggaagtgccccaatgcagctccacctgagagccacaataagaatgaaggatggcttatgtgttccgaggaagtggatttatcatcttactgagggctccacagacctgcgaaccgaaggcaggcctgatatgaaaactgagctcttcagcagctcatgccctggtggtatcatgttgaatgagaccgggcaggggtaccagagattcctgctgtacaacaggtccccgcaccctccagagaagtgtgtggaggagttcaagagcctgacttcctgtttggatagtaaagccttcctacttacccctagaaatcaggaggcgtgtgagctgagcaataactag

SEQ ID NO: 11094 - DNA, 543 bp, synthetic construct
  misc_feature 1..543: note = source = /note="Description of Artificial Sequence: Synthetic coding sequence"
  source 1..543: mol_type = other DNA
caggtgatccccattaactctggagacttgttcgtgcacccactgtggaacagaagctgtgtcgcctgtggcaacgatatagccctgatcaagctttccaggagcgcccagctgggcgacgctgttcaactggccagcctccctccagcaggagatatactcccaaacgagacaccatgctacataaccggctgggggcgattgtataccaatggaccactacccgacaaactgcaggaagccctcctccctgtagtggattacgagcattgttcgcgctggaattggtggggcagcagcgtgaagaagactatggtgtgtgctgggggtgacatccggtctggatgtaacggggacagcggaggccctctgaattgcccaactgaggatgggggttggcaggtgcacggagtcaccagctttgttagtgcgtttgggtgtaacacacgcaggaagcccaccgtgtttactcgcgtctcagccttcatcgattggatagaagagaagctgcagggaaacaaggcaccagaatctaggacttag

SEQ ID NO: 11095 - DNA, 1215 bp, synthetic construct
  misc_feature 1..1215: note = source = /note="Description of Artificial Sequence: Synthetic coding sequence"
  source 1..1215: mol_type = other DNA
atgcctccattcttaattacactatttttgtttcattcgtgttgccttcgcgctaatgggcacctccgggaggggatgactctgctcaagacagagtttgccctccatctataccagtcagtagcagcctgcaggaacgagaccaacttcgttatctctcctgccggagtcagcttgccccttgaaatcttacagtttggcgctgaagggagcactgggcaacaactcgccgacgcactcggctacactgtacatgataagagagtgaaggattttctccacgcggtgtatgccactctgcccaccagctcccagggcacggaaatggagttggcttgtagcctgttcgttcaagttggtactccactctcaccctgtttcgtcgagcatgtgagctggtgggcaaactcctctctggaaccggctgatctcagcgaaccaaactccaccgcaatacagacaagcgagggcgcttctcgggagactgccggtggcggaccatctgagggcccaggaggttggccatgggaacaggtttctgccgcattcgctcagctggtgttagtgagcacaatgagcttccaaggcacttggcgcaagcgcttttccagcactgacacccagatcctcccctttacctgtgcttacggcctggtcctgcaggtcccgatgatgcaccagacgaccgaggtgaattatgggcagttccaagacactgcaggtcatcaagtgggtgtgctggagcttccatacctgggttccgccgtctcattatttctggtccttcctcgggataaggatacaccactctcccacattgagcctcatctaaccgctagtacgatccacttgtggaccacttccctgcgcagagctcgcatggatgtgtttcttcccagatttagaattcagaatcagtttaatctgaaatccattctcaattcttggggtgttacagatttgtttgatcctctgaaggctaaccttaaggggatttccgggcaggacgggttctatgttagcgaagccatccataaagcaaaaattgaggtcctcgaagagggtacgaaagcttccggcgcaaccgcgctgttattgttgaagaggagtcgaatccccatcttcaaggcggatcgacctttcatatacttcctgcgcgagccaaacaccggtttcgtgttctccatcggcagagtgtctaacccactggactag

SEQ ID NO: 11096 - DNA, 444 bp, synthetic construct
  misc_feature 1..444: note = source = /note="Description of Artificial Sequence: Synthetic coding sequence"
  source 1..444: mol_type = other DNA
atgggtcctgaggcactgagcagtctgctcctcctgctcctggttgcatccggagacgccgacatgaagggtcacttcgatcccgcaaagtgtaggtacgcgttagggatgcaggatcgaacaataccagactccgatatcagcgccagcagcagttggagcgacagcaccgctgcccgtcactcccgattagaatcatcggacggcgacggggcatggtgcccagctggtagcgtgttccctaaggaggaggaatacttgcaggtcgacctacagcggctgcacctggtagccctggtcggcactcagggcagacatgcgggaggcctggggaaagaattcagcagatcttatcggttgcggtactcaagagacggaaggaggtggatgggttggaaggacaggtgggggcaggaggtgatctcaggtaacgaggatccttag

SEQ ID NO: 11097 - DNA, 2631 bp, synthetic construct
  misc_feature 1..2631: note = source = /note="Description of Artificial Sequence: Synthetic coding sequence"
  source 1..2631: mol_type = other DNA
atgggccctgaggcactgtctagtcttctgctgcttttgctggtagctagtggagatgcagacatgaagggccacttcgatcctgcaaaatgtaggtatgccctgggaatgcaggacagaaccatccctgattcggacatatcagcgagcagtagttggtcagacagcactgccgcacgacactcgagacttgagagcagcgacggcgacggagcctggtgccctgcaggttctgtctttcccaaggaagaggaatacctgcaggtggaccttcaacgtctgcacttagtcgcactggtcgggactcagggcaggcacgccggaggtctaggaaaagagtttagtcggtcttatcgtctgaggtactcgcgggatggccgtcgctggatggggtggaaggacagatggggacaggaagttatcagtggaaatgaggatccggagggagtggtcctgaaagacctcggacctcccatggtagctaggctggtccgattttatcccagggctgaccgggtgatgagcgtgtgcctccgcgtagagttgtatggctgcctgtggcgggatggactcctaagctataccgcacctgtgggacagacaatgtatttaagcgaagcggtgtatctgaatgacagtacttacgatggacataccgttggcggtctgcaatacggaggcttggggcagctcgccgacggggtggtcggcctggacgatttcagaaagtcacaggagttaagagtgtggccaggatacgattacgtaggatggagcaaccattccttcagctctgggtatgtggaaatggagttcgagtttgaccgactgcgggcttttcaggctatgcaggtccattgtaataacatgcacacactgggagctagactgcccggaggggtggagtgtcggttccgccgagggccagctatggcctgggaaggggagcctatgcggcataatctcggcggtaacctcggtgaccctagagccagagccgtttctgtgcccctaggcggtagagttgccaggttcctccagtgtcggttcctctttgcaggcccttggctgttgttcagtgagatcagcttcatctccgatgtggttaataactcctcgccagccctgggcggaactttccctccagccccatggtggcctcctggccctcccccaactaatttttcttcactagagttagagccacggggacagcagccagtggccaaggccgagggtagtcctacggcaatactaatcgggtgcctcgtggccataatcctcctgttgctcttgattatcgcccttatgctctggagacttcattggaggcggctgttatctaaagccgagcgccgtgtgctggaggaggagctgaccgtccatctctctgtccctggtgacacaatcctcattaacaacaggcccggacccagagaacctccaccttatcaggaacccagaccgagaggtaatcctccgcattccgccccttgtgtcccaaatggcagcgcatacagcggcgactatatggagcctgaaaaacccggagcaccactcctacctccgcctccccaaaattccgtcccccactatgcagaggccgacatcgttacgctgcagggagtgacagggggaaatacatatgctgtccctgccctgccacccggagcagtgggcgatggcccacccagagtggatttccccagaagtaggctgaggtttaaagagaagctcggagagggccagttcggtgaagtacatctgtgcgaggtcgacagtccccaggacctagttagtcttgacttcccactgaatgtgaggaaggggcacccacttttggtggcagtgaaaattctgcgaccagatgctacaaaaaacgcacggaatgacttcctcaaagaagtcaagatcatgagccggctcaaggacccaaatatcatccgcctccttggtgtgtgcgtccaagatgaccccctgtgtatgattaccgactatatggaaaacggagacttgaatcaatttttaagtgcccatcagctggaggataaagccgctgaaggggcacccggagatggccaagctgcgcagggtcccactatatcctatccaatgctactgcatgtggccgctcagattgcttctggcatgagatatttggcgacactgaactttgtgcacagagatctggcaacccgtaactgtctcgttggcgagaattttactattaagatcgcggattttggaatgtcccggaatttgtacgccggagactactatagggtccaggggagagccgtgctgcctatcaggtggatggcctgggaatgtatactcatgggcaagtttaccacagcaagcgacgtgtgggcttttggagtgacactgtgggaggtgctgatgctgtgccgggctcagccgttcggccagcttactgacgagcaggtgattgaaaacgccggagagttttttcgtgaccagggacggcaagtgtacctgtcacgccctccagcttgcccccaaggcctgtatgagctgatgttacggtgttggtcaagggagtcagaacaacgaccaccattttcacagcttcacagattcctggctgaggacgcattgaataccgtctag

SEQ ID NO: 11098 - DNA, 2631 bp, synthetic construct
  misc_feature 1..2631: note = source = /note="Description of Artificial Sequence: Synthetic coding sequence"
  source 1..2631: mol_type = other DNA
atgggaccagaagctttaagcagtttgctcttgctgctactcgtggcctcaggcgatgctgacatgaaggggcacttcgatccagctaagtgccgctatgctctgggcatgcaggatcggacaataccagattccgatatttcagcctctagcagttggagcgacagcactgccgctaggcactccagattagaatcctccgatggagatggagcctggtgtcccgcagggagtgtgtttcccaaagaggaggaataccttcaggtggatctccaacggctgcacttagtggctcttgttgggacacagggacgccatgcaggtggacttggcaaggaatttagccggagttacaggctgagatattctagggacggccgacgctggatgggctggaaagatagatggggacaggaggtgatctcaggtaatgaggaccctgaaggcgttgtcctcaaagatctggggcctccaatggtggcccgtctggtccgtttttaccctcgagctgatagggtgatgtccgtgtgcctgagggtagagctctatggatgcctctggcgtgatggcttgttatcctatacagctcccgtcgggcagacgatgtacttgtccgaggctgtctacctgaacgattcaacatatgacggtcatactgtggggggtctccagtacgggggtctgggtcagctggcagacggcgttgttgggttggatgacttccgcaagtctcaagaactaagagtgtggccgggatacgattatgttggttggtccaaccatagttttagctccgggtatgtggagatggaattcgagtttgatagactgcgggcattccaggcaatgcaggtgcactgtaacaacatgcacacacttggcgctcgtctccccggaggcgtggaatgcagatttagacgaggaccagcaatggcctgggagggcgagcctatgaggcacaacctaggcggtaacctgggcgatcctagggcccgtgcggtctcagtaccactcggcggtcgtgtggcacgcttcttacagtgccgctttctgtttgccggaccgtggcttttattctccgagatttccttcatttccgacgttgttaataattcaagtcctgcactggggggaacattccccccagccccatggtggccacctggacctccacctacaaacttttcctccctggaactagagccgagggggcagcaaccagtcgccaaagccgaggggtctcccaccgctatccttattgggtgtcttgtagctataatcctactgctcctgttgattatcgcccttatgctgtggcggctgcactggagaagactgttgtcgaaagccgaacgacgtgtactggaagaggaattgacagtgcacctctccgtgcccggagacacgatcttaatcaacaatcgtcctggccctagagagccgcctccctatcaagagccacggccacgaggtaatccaccccattctgctccatgcgtgccaaatgggtcggcatattctggcgattatatggagcctgagaagcctggcgcacccttactaccccctccccctcaaaactcagtaccacattatgccgaggctgacattgttaccctccagggcgtcactgggggaaacacctacgcggtgccagcccttccgccaggcgcagttggagatggtcccccaagggtcgactttccaagatcccggcttcggttcaaagaaaagttaggcgaaggccagtttggggaggtgcacctttgtgaggtcgacagccctcaagatctagtgtcccttgattttccattgaacgtgaggaagggccaccctctgctggtagctgttaagatccttcgcccagacgccactaaaaacgctcgaaatgactttctgaaagaggttaagattatgtccagactgaaggaccctaatatcatcagactactgggagtgtgtgttcaagacgatccattgtgcatgattaccgattacatggagaatggcgacttaaatcagttcctgtctgcccaccagcttgaggataaagccgctgaaggcgcaccaggggacggacaggctgctcagggccctactatatcttatccaatgctcctccatgtcgccgcacagatcgcgtccggtatgaggtacctagccactctgaacttcgtacacagagacttggcaacccgcaactgcttagtgggagagaatttcacgattaagatagccgactttgggatgtcaaggaatctgtacgccggagactactacagggtgcagggcagggccgttcttcctatccgctggatggcttgggagtgcatactgatgggcaaattcactacagcctccgacgtgtgggcttttggggtaactttatgggaggtgctcatgttatgccgcgctcaacccttcggacaactcaccgatgaacaggttattgaaaatgctggcgagttcttccgcgaccaaggcagacaggtatatctgtcccgccctccagcatgccctcagggactgtacgagctcatgctccggtgctggagtcgagaatccgaacaaagacctccattctcacagctacaccgcttcctggccgaggatgctctcaatactgtgtag

SEQ ID NO: 11099 - DNA, 2742 bp, synthetic construct
  misc_feature 1..2742: note = source = /note="Description of Artificial Sequence: Synthetic coding sequence"
  source 1..2742: mol_type = other DNA
atgggcccagaggccctatccagtcttctgctcctgcttctcgtggccagcggcgatgccgatatgaaaggacacttcgatccagctaagtgtcgctatgccctaggcatgcaggaccgcaccataccagattctgacatttccgcgtctagtagttggtcagatagtactgccgctaggcactccaggctagagtcctctgacggcgacggggcatggtgccctgccggttctgtgttccctaaagaggaggaatatctgcaggtggatttacagagactgcaccttgtcgccctggtcgggacccaggggaggcatgccggaggattggggaaggagttcagcaggagctatagactaaggtatagcagggacggcagacggtggatggggtggaaggacagatggggccaggaggtgattagcgggaatgaggatccagaaggcgtcgtcctcaaagatttaggacctcccatggttgccagactcgttcgcttttacccacgtgccgatagggtgatgagcgtctgcctgagggtagaactgtacggctgtctctggcgggacggactactgtcatacacggcaccagtgggtcaaaccatgtacctgtccgaagctgtctatttaaatgacagtacttacgacggccatacagtgggagggctgcagtatggcggactcggacagctggctgatggcgtcgtcggccttgatgactttcggaaaagccaggagctgagagtctggcctggctacgattatgtcggctggtcgaatcactctttctcttctggctatgttgagatggagttcgaatttgacagactgagagcgtttcaagctatgcaggtccactgcaacaatatgcataccttaggtgcgagattgccgggtggtgtggagtgcagatttaggagaggcccagctatggcctgggaaggagagccgatgcggcacaatctaggagggaatctgggggatccccgagcaagggcagtgtctgtgccattgggcggtagggtggctcgcttcctacagtgcaggttcctgttcgctggtccctggctcctgttctcggagatttctttcatttctgacgtggtgaataattctagccccgcactgggcggtacatttccgcctgcaccttggtggccaccgggaccacccccaaccaacttcagtagcctcgaactggagcccagggggcagcaacccgtggccaaggcggaaggcagccctaccgctatactgatcggttgccttgtggccatcattttgctcctcctgttgattatcgcactcatgctctggcgcctacactggcgaaggctgttaagtaaagcggagcgccgagtgttggaagaagagttgacagttcatctgtctgtgcctggagacaccatcctgattaacaaccggcctgggccacgcgagccacccccatatcaagaaccgaggccacgtgggaaccctccacactcagcaccgtgtgtgcctaacggcagtgcactcttgctgtcgaaccctgcatatagactcttacttgctacgtatgccaggcccccacggggacccggaccacctaccccggcatgggcgaaaccgacgaacacccaggcttacagtggagattatatggagcccgagaagccaggcgctccactgctgcccccaccacctcagaacagcgtgccccactacgcagaggccgacattgtgaccttgcaaggcgtaactgggggtaacacctacgccgtgcctgccctacctcccggagctgtaggtgacggcccacctcgggttgactttcctcgcagccgtctgcgtttcaaggagaaactgggtgaaggacagttcggcgaggtgcatctgtgcgaagtggactccccccaggatttggtaagcctcgattttcccctgaacgtccgtaagggccaccccctgttggttgcggttaaaatcctgcgccctgacgccaccaaaaatgctcgcaatgacttcctgaaagaagtgaagattatgtctcgcctcaaggatccgaatattatccgccttctgggcgtctgcgtgcaggacgatcctctatgtatgattacagactatatggaaaacggtgatcttaatcagtttctgtctgctcaccagctggaggacaaagccgctgagggcgcacctggggacggacaggccgcacaggggcctacaatctcctatcctatgctcctccacgtagccgctcagattgccagcggcatgcgatatttggcaacattaaatttcgtccacagggacctcgccacgaggaattgtctggtcggcgagaatttcaccattaagatagccgattttggcatgtcacggaacctctatgcaggcgattactatcgagtacaaggccgagcagtgctcccaatccgctggatggcctgggagtgcattctgatgggtaagttcaccactgcctcagatgtgtgggccttcggagtaacgctttgggaggtgctaatgctctgtcgggcacaaccatttgggcagcttacagatgagcaggtgatcgagaatgccggagaattcttcagggaccaaggcaggcaagtttacctgtcccgcccaccagcatgccctcagggactgtacgaattgatgctaagatgctggtctcgcgaatcggaacagcgccctccatttagccagctgcacaggtttcttgccgaagatgccctcaacactgtatag

SEQ ID NO: 11100 - DNA, 444 bp, synthetic construct
  misc_feature 1..444: note = source = /note="Description of Artificial Sequence: Synthetic coding sequence"
  source 1..444: mol_type = other DNA
atgggcccagaagccctcagctctcttctgctgctcttgctggtggcctccggggacgctgatatgaaaggccacttcgacccagccaagtgtagatacgcactcggcatgcaggaccgtacgatacccgacagcgacatttctgcgtcaagttcatggagtgattccaccgccgcacgccattcccgtctagaatcttcagacggcgacggggcttggtgtccagccggatcggtgttccctaaggaggaagaatatctgcaggtcgacctgcaaagactacaccttgtcgctctggtggggacccagggacggcacgccggagggctgggcaaagaattttcacgctcctacagactgagatactctcgtgacgggagacggtggatgggctggaaagacagatggggccaggaggttataagcggaaatgaagacccgtag

SEQ ID NO: 11101 - DNA, 2631 bp, synthetic construct
  misc_feature 1..2631: note = source = /note="Description of Artificial Sequence: Synthetic coding sequence"
  source 1..2631: mol_type = other DNA
atgggtcctgaagctcttagttccctgttacttttactgttggttgctagcggcgatgcggatatgaagggccactttgatcctgcaaagtgtagatatgcattgggcatgcaggatcgtaccattccagactcagatataagcgcatcgtcaagctggagtgactcgaccgccgcacggcattctcgactggagtccagtgacggggacggcgcttggtgccccgctggatcagtattcccaaaggaagaagagtatctgcaagtcgatcttcagcgtctccatctggtggccctcgtcgggacccagggcagacacgccggaggccttggcaaagagttctcacggagctatcgactgagatacagtagggatggtcgacgctggatgggttggaaagaccggtgggggcaagaggtgatctcagggaatgaggatcctgagggcgtcgttctgaaagacctgggcccacctatggtcgccagacttgttagattttatcccagggcagatagggtcatgtccgtgtgcctgagggtggagctgtacgggtgtttgtggcgagatggtcttctctcttatactgccccagtggggcagactatgtatctgtctgaggccgtatatcttaatgactctacttacgatgggcataccgtgggtgggcttcagtacggaggcctgggacaactcgccgacggggtcgtgggcctagatgactttcggaagtcccaggagctaagggtatggccagggtatgattacgtcgggtggagcaaccattcattttcttccgggtacgtcgagatggaattcgagtttgatagactccgcgcattccaagccatgcaagtgcattgtaacaatatgcacactcttggcgctcgcttaccaggtggagttgaatgtagattccggagaggccctgcgatggcttgggagggagaaccaatgagacacaatctggggggaaatcttggcgacccccgagcgagagctgtgtccgtgcccctgggtggtcgcgtcgctcggttcctgcaatgtaggttcctgtttgccggaccttggcttctgtttagtgagatttccttcatcagtgacgttgtcaacaacagctcaccagctcttggaggcacgttccccccagccccttggtggccacccggtcccccacccactaacttttctagcctcgaacttgagccacggggacagcaacctgtagccaaggcggaagggtctcccacagctatcctcatcggctgcctagtggcgatcatcttgttattgctgcttatcattgctctcatgctgtggcgactccactggcgaagactcctgtcaaaggctgaacgtagagttcttgaagaagagttgacggtacacctgtctgtgcccggtgacacaattctgatcaacaataggccaggccctagagaacccccaccctatcaggaacccagacctagagggaacccccctcactccgctccatgcgttcccaatggcagcgcctatagcggtgattatatggagcctgagaaaccgggtgctcctctattaccaccgcctccacaaaactccgtcccacattatgcggaagctgacatcgttaccctgcaaggggtgactgggggtaatacatatgctgtacccgctcttcctcccggagcagtcggcgacggccctcctcgcgtggatttccccaggtccagactgaggttcaaagagaaacttggggaagggcagtttggcgaagtacacctttgcgaagttgactcccctcaggacctggtaagtctcgacttcccgctgaacgtccggaaaggccatcctctcctggtggctgtaaaaattctgcgaccggacgccactaagaacgctcgcaatgactttctgaaggaggtgaaaatcatgtctcgcttgaaggatcccaacataattcgactcctgggagtctgcgttcaagacgacccactgtgcatgatcaccgattatatggaaaatggagatctcaaccagttcctaagcgcacatcagctcgaagacaaagccgctgaaggcgctcccggagacggccaggctgcccagggccctactatttcctacccgatgttgttgcacgtcgcagcccaaatcgcatccggaatgcgttaccttgcaactctaaacttcgtgcaccgggacctggctaccagaaactgtctagtcggggaaaactttaccatcaaaattgccgactttggcatgagcagaaatctctatgcgggagattactaccgggtgcagggtcgtgccgtcctgcccatacggtggatggcatgggagtgcatccttatggggaagttcacaactgctagcgatgtttgggctttcggggtgaccctctgggaggtgttgatgttgtgtcgagctcagccctttggccagttgaccgatgaacaggtgatcgagaacgccggtgaattcttcagagaccagggcagacaagtgtacctcagccggcctccagcatgtcctcagggcctctatgagctgatgctgcgttgttggtcaagagaaagcgagcagcgcccaccatttagccagctccaccgatttctggccgaggacgccctgaacactgtctag

SEQ ID NO: 11102 - DNA, 2631 bp, synthetic construct
  misc_feature 1..2631: note = source = /note="Description of Artificial Sequence: Synthetic coding sequence"
  source 1..2631: mol_type = other DNA
atgggacctgaagcactcagcagcttactcctgctgctgctggtggcaagcggggacgcagatatgaagggccactttgatcctgccaaatgccgatacgctctgggaatgcaggaccgtaccatcccggactccgatattagtgctagttcttcttggtctgattcgactgcggctcgacattcccgacttgaatcttccgacggtgacggtgcctggtgtcccgctggcagcgtattccccaaggaggaggagtacctgcaagtcgatcttcaaaggctccatcttgtggctttggttggtacgcagggtcggcatgctggcggactggggaaggaatttagccggagttatcggcttcgttatagcagagacggacggcgatggatgggttggaaggatagatggggtcaggaagtgatttctggaaatgaggatcccgagggggtggtattaaaagacttaggtcccccaatggtcgccagactcgtgaggttctaccctcgagcagatcgtgtgatgtccgtatgtcttagggtggaactctatgggtgcctgtggcgggatggcctccttagctacaccgcccctgtgggccagaccatgtacctgtctgaagctgtttacctcaatgattccacctatgacggccatactgtaggcggactgcagtacggtggcctgggccagctggccgatggcgttgtgggcctggacgatttccggaaatctcaggagttgagagtctggccgggatacgactacgtcggctggtcaaaccattccttttcatcgggctacgtggagatggaattcgaattcgatcggctccgcgcttttcaggcgatgcaagtgcactgcaacaacatgcacaccctgggagctaggctcccagggggtgttgagtgtcgtttcaggaggggcccagcgatggcttgggaaggggagcccatgaggcacaacctgggcggaaatttaggagaccccagagcaagagctgttagcgtacctctggggggtcgcgtggccaggttcctgcagtgcagatttctcttcgctggcccatggcttctcttctcggaaattagttttatttcagacgttgtgaacaatagctctcctgccttaggaggaacgttccctcccgcaccatggtggccacctggccctcctcccaccaacttcagttccctcgagctcgaaccacgtggtcagcaacccgtcgccaaggcagaaggtagtccaaccgcaatactgataggctgcttagtcgccatcatcctcctgcttctgctaattatcgcccttatgttgtggcgattacactggcggagattactttctaaggccgagcgccgagtccttgaagaggaactaacagtacatctgagcgtgcccggagacaccattctgatcaataacaggccaggtcccagagaaccacccccttaccaggagccacggcctcgcggtaacccaccgcattctgcaccttgcgtacccaatggaagcgcttacagcggggactacatggaaccagaaaagccaggcgcaccgctgctgccacctccgcctcaaaatagtgttccacactacgctgaggccgacattgtcactcttcaaggcgtgacggggggaaacacttatgctgtgcctgcactgcccccaggtgctgtgggcgacggccctccaagggtcgatttccctcgctcacgactgagattcaaagagaaacttggggaagggcaatttggggaggtgcacctttgcgaggttgattcgccccaggaccttgtgtccctcgattttcccttgaatgttcgtaaaggccatcccctcttggtagccgttaagatcctaagacccgatgcaactaaaaatgcccgtaacgacttccttaaggaagtgaagatcatgtcacggctgaaggatcctaatatcatacggttattaggggtctgcgtacaggatgaccccctgtgtatgatcacagactacatggaaaacggcgatttgaatcagtttctcagtgctcaccagttagaggataaggctgctgagggagcccctggagatggccaggcggctcaaggaccaactatctcctaccccatgctgctgcacgtggcggcacagatcgccagcggcatgcgttatctggcaaccctgaacttcgtgcatagagatctcgcaactcggaattgcctcgtgggtgaaaactttacaatcaaaattgcagacttcggcatgagcaggaatttatacgctggcgattactatagagtgcaggggagggctgtacttccgatccggtggatggcgtgggaatgtatcttgatgggtaagtttacaacggcctccgatgtgtgggccttcggggttactttatgggaggtgttgatgctgtgtcgagcccaaccattcgggcagctgacagatgaacaggtgatcgagaacgccggtgagttctttcgggatcaggggaggcaggtgtatctgtcacggccaccagcatgcccgcaaggcctgtacgagctcatgctccggtgttggagtcgcgaaagtgagcagcgaccaccattctcacagctgcatcgatttctagcggaggatgcattgaatacagtatag

SEQ ID NO: 11103 - DNA, 2631 bp, synthetic construct
  misc_feature 1..2631: note = source = /note="Description of Artificial Sequence: Synthetic coding sequence"
  source 1..2631: mol_type = other DNA
atggggccagaagctctctccagccttttgttgctcctgctggtggcctcaggggatgccgatatgaaaggacacttcgatcctgcaaagtgtagatatgctctgggcatgcaggaccgcacgattcctgactcagacataagcgccagcagcagttggagcgacagcacagcagccagacacagccgcttggaatctagcgacggggatggcgcttggtgccctgctgggagtgtcttccctaaagaggaagaatacctgcaggtggacctgcagagattacacctggtcgcactcgtgggaacgcagggccgacacgccggaggactcgggaaggagttcagccgttcttacaggctgcgctactctagggacgggaggcgctggatgggatggaaagaccggtgggggcaggaagtgatcagtggcaacgaggacccagagggggttgtgctgaaggatctgggaccccctatggtcgcaaggctggtccgcttttaccccagagcggaccgcgtcatgtccgtatgtctgagagtggaactttacggctgtctctggagagatggcttattgtcatacaccgcccctgtaggccagaccatgtatctatcagaagccgtgtatctaaatgattctacatacgacggacacacagtagggggattacaatacggcggactaggccaactggccgacggggtagttggactcgacgactttaggaagtcgcaagagctgcgcgtgtggcctggctacgactacgtaggctggtctaaccactcgttctcatcaggatacgtcgaaatggaattcgagttcgatcggctgagagctttccaggctatgcaggtgcattgtaacaacatgcacactcttggtgccaggctgcctggtggagttgaatgtaggttccggagaggtccagcaatggcctgggaaggagagccgatgcggcataatctgggagggaatctcggcgacccccgagcacgggcagtgtccgttcccctaggagggcgagtcgctaggttccttcagtgtagatttttattcgcaggaccgtggctcctgtttagcgaaatttcgttcatatccgatgtggtgaacaactcctctcccgctcttggcggaaccttcccgccagcaccttggtggccccctggtccccctccaactaatttcagtagtcttgagctggaacctcgaggccaacagcccgtggcgaaagctgaggggtccccaactgctatactcattggatgtctggtggcaataattctcttacttctgctgatcatagctctgatgctgtggagattacactggcggagattattatccaaagctgagagacgcgtcctcgaggaggaactcacagtgcacctcagtgtccccggagacaccatcctaattaacaatcgaccaggcccacgagaacccccaccgtaccaggaaccccgtcctcggggaaatccaccacactccgccccatgcgtcccgaacgggtccgcttactctggagattatatggaaccggaaaaaccgggtgcacctctgctacctccgcctccccagaatagcgtgccccactatgccgaggccgacatcgtgacactccagggtgtgaccggcggaaacacatacgccgtgcccgcactcccacccggagctgtcggcgacggtcctccccgagtcgattttccacggtcccggctgcgatttaaggagaaactgggcgaaggccagttcggtgaagtgcatctctgcgaggttgactccccacaggatcttgtgagtctcgatttccctctgaatgtgcggaagggccaccctctgttggtagcagtgaaaatcctgcggccagatgcaacgaagaacgcccgaaacgacttcctgaaggaagtgaagattatgtcacgcctgaaagaccccaatattataaggctgctaggcgtctgcgtgcaggacgatcccctctgtatgatcacagattacatggagaacggggacctaaatcagtttctgtcagcacaccagctcgaggacaaggcagctgaaggcgctcctggcgacgggcaagccgcacagggtcccaccatctcgtatcctatgttactccatgtagcggcacagatcgcttctgggatgcggtacctagcgaccctaaacttcgtgcacagggatctcgccacccggaactgcctggtgggagaaaatttcacaataaaaatagctgacttcggcatgtctagaaatctgtatgcaggagactactacagagtgcaagggcgagcagtcctgcccatccgatggatggcgtgggagtgtatcctaatgggtaagtttaccaccgcttctgacgtatgggcgttcggagtgaccctgtgggaggtcctcatgctctgcagggcacagccgtttggccagctgacagatgaacaggtgatcgagaacgcgggagagtttttccgggatcagggcaggcaggtgtacctgtcccgaccacccgcttgtcctcagggcctgtacgagctgatgcttcgctgctggtctcgagaatctgagcaaaggccacctttttcacagctgcaccggtttctagcagaagatgccctcaacacagtttag

SEQ ID NO: 11104 - DNA, 2742 bp, synthetic construct
  misc_feature 1..2742: note = source = /note="Description of Artificial Sequence: Synthetic coding sequence"
  source 1..2742: mol_type = other DNA
atgggacctgaagcactgtctagtcttctgctgctgttgcttgtggccagcggcgacgccgatatgaaggggcacttcgaccctgcaaaatgcaggtacgccctgggcatgcaggatcgaactatcccagattctgatatttctgccagctcttcatggagcgattctactgccgctcgccattcaagacttgagagctccgacggggatggagcttggtgtccggctggctccgtgtttcccaaagaagaagaatacctccaggtggaccttcaacgacttcaccttgtggctcttgtaggaacacaaggaaggcacgctggcggtttgggaaaagagttttcccgaagctaccgcctgcgctattctcgagacgggcgacgttggatgggatggaaggatcggtggggacaggaggtgatcagcggaaatgaggatcctgaaggagtggtccttaaggacctgggtcctcccatggttgcccgtctggtgaggttctatccacgcgctgatagagtgatgtcagtctgcttgagagtggagctgtacggctgcctttggagagatgggctgctatcctacacagcccctgttggacagaccatgtatctttccgaagctgtgtatctaaatgattcaacatatgatggccatacagtcggtggcttgcagtatggtgggcttggtcagctagcagatggtgtagtaggactggatgattttcggaagtctcaggaattgagggtatggccaggatacgattacgtggggtggtcgaatcactcattctcatctggttacgtggagatggaatttgagttcgataggttacgcgcatttcaagccatgcaggtacactgcaacaatatgcataccctcggagctcgtctacctggaggagtggaatgccgctttcgacgcggtcctgccatggcatgggagggagaacccatgaggcacaatctgggagggaacttgggcgaccctagggccagagcagtgtccgtccctctcggagggcgagtagccagatttttgcagtgtcgcttcctgttcgccggaccctggctgctgttctcagagatttcttttatctcagatgtcgtcaataattcctctccagcgcttggaggaacttttcctccagccccatggtggcctccaggaccgccacctacaaacttcagcagcctggagctcgaacccagaggccagcagcctgttgcgaaggcagaaggctctcccaccgctattctgatcgggtgtctggtcgcgattatcctgctgctactgctgatcatagcgttaatgttgtggcgtctccattggcgaaggctcctgagtaaggctgagcgtagggtgttagaggaggagctgacagtccacctttccgtgcccggagatacaatcctcatcaataatcggccaggacctcgcgagccccctccctatcaggagcccaggccaagagggaacccacctcactctgccccttgcgtccccaacggcagcgctttactacttagtaatccagcttataggctcttactcgccacctatgctcgacctcctaggggaccgggaccccctacacctgcctgggccaaaccaaccaacactcaggcctatagcggcgactatatggaacccgaaaaaccaggcgctccgctcctgccacctcccccacagaactcagtgccacactatgccgaggccgatatcgtgactctacagggcgttaccgggggtaatacctacgctgtacctgccctcccccctggagcggtgggagatggcccacccagggtcgacttccctaggtcaaggttgaggttcaaggaaaagcttggcgagggccagttcggcgaggtgcacctttgcgaggtcgacagcccacaggacttggtcagtctggacttccctctgaacgttaggaaaggacaccctctgctggtggccgtgaagatattaagaccggatgctacaaaaaacgccagaaatgacttcttaaaagaggttaaaatcatgagcaggcttaaggaccctaacattattcgactcttaggagtgtgcgtgcaggatgaccccctttgtatgatcacggattacatggagaacggagacttgaaccaatttctgtcagcccatcagttggaggataaggccgctgagggcgcacccggtgatggccaggcagcccagggacccactataagttatcctatgctcctgcacgtggcagctcaaatcgcctcggggatgcgctacctggctacattgaattttgttcatagagatctagccaccagaaactgtctggtaggagagaatttcacaataaagattgctgatttcggcatgtctaggaatctctacgccggagactattaccgggtgcagggcagagccgtgctccccataagatggatggcctgggagtgtatccttatgggcaaattcactacagccagtgacgtgtgggccttcggcgtaacactgtgggaagttctgatgctgtgccgcgctcaacctttcgggcaactcacagacgaacaggtgatcgaaaatgcaggagagttcttcagggatcagggcaggcaagtctatttgtccaggcccccagcttgcccccaggggctgtatgagttgatgttgagatgctggtctcgcgagtctgaacagcgacctcctttctcccagttgcaccgcttcctagcggaggatgccttgaataccgtgtag

SEQ ID NO: 11105 - DNA, 2742 bp, synthetic construct
  misc_feature 1..2742: note = source = /note="Description of Artificial Sequence: Synthetic coding sequence"
  source 1..2742: mol_type = other DNA
atggggcctgaggcgttgtcatctctgttactgctcctgctggttgcctcaggggatgccgatatgaaaggccatttcgaccctgccaaatgcaggtatgcactcggtatgcaagatcgaactatacctgactccgatatatcagctagctcctcttggtccgactccaccgctgctcgccattctaggctggaaagcagcgatggcgacggcgcttggtgtccagctgggtcggtcttcccaaaggaggaggagtacctgcaagtcgacctccaaagattacacctagtggcgttggtcggcacccaggggagacacgccggtggtctgggtaaggagttctctcgttcctatcgtcttcggtacagcagagatggcaggagatggatgggatggaaagaccggtggggtcaagaggtgatctccgggaatgaagaccccgagggggtggtactgaaagacttaggccctccaatggtggcacgcctcgtcagattttacccgagggcagatagggtcatgtctgtgtgtctcagagttgagctatatggctgcctctggagggatgggttgctctcatacacagcgccagttggccagacgatgtacttgtcagaggctgtgtacctgaacgattctacatacgatggccacactgtgggcggtctccagtatgggggactggggcagctggcagacggtgtggtcggcctagatgatttccggaagtcccaagaactccgtgtgtggcctggatacgattacgtgggatggtcaaaccattctttctcgtcgggctacgttgagatggagttcgagtttgatcggctacgcgcttttcaggccatgcaggtgcattgtaataacatgcacacactgggggctcgactgcctggcggtgtggagtgccgcttcagaagggggccagccatggcttgggagggcgaacccatgaggcacaacctagggggaaatctaggcgacccacgggcaagagccgtgtccgtgcccctgggtggcagagtggccaggtttctacaatgccgttttctttttgctggcccatggttgctattctctgagatttcattcattagcgatgtggtgaataattcaagcccggctctgggcggaacgtttcctcccgctccatggtggccccctggcccaccaccaacaaatttttcaagtctagagttggaaccgagaggacagcaacctgtggccaaagcagaaggatctcctacagccatattgatcggttgcctggtcgccatcatactgcttctgcttttgatcatcgccctgatgttatggcgattgcactggcgcaggctgttgtctaaggctgagaggcgtgtcctggaagaggagctcactgtgcatctctccgtgccaggtgacacaatccttattaataataggccgggaccgagggagccgccaccttatcaggagccccgtcccaggggaaacccgccacattctgctccctgcgtgccgaatgggtctgcactgctgctctccaatccggcatacagattgctgctggcaacctacgcaagaccaccccgaggcccaggtcctccgactcctgcttgggccaaaccgactaatacacaagcatatagtggtgattacatggaacccgagaagcctggagcccctctgttgccacctccccctcagaattctgtaccacactatgctgaagctgatattgtgaccctgcagggcgtaactgggggtaatacatacgccgtgcctgccctgcctccaggcgcagtgggcgatggaccgcctagggtggacttcccacgctcccgactccgatttaaagaaaagctgggggaaggtcagttcggcgaagtgcacctatgcgaagtagattcacctcaggatttggtgtccctcgatttccccctgaatgtgaggaagggccatcctttactggtggcagtcaagattctcaggccagatgccacaaaaaatgctagaaatgacttcctcaaagaagtgaagatcatgagtcgattgaaagatccaaacattatcagattgctgggggtttgtgttcaggatgatcctctgtgcatgattaccgattacatggaaaacggggaccttaaccagtttttgagtgcacaccaactcgaagacaaagccgctgaaggtgccccaggcgacgggcaggccgcacaaggtccaactatcagctatcctatgttacttcacgtggccgctcagatcgcgtccgggatgaggtacttggctacactcaacttcgtccatagagacctggccactcgcaactgcctggtcggagaaaattttaccattaagattgctgacttcggtatgagcagaaacctctatgcgggtgactattatcgggtccagggaagagccgtactgcccatccgctggatggcttgggaatgtatcttgatgggtaaattcactacagctagcgatgtatgggctttcggggtgactctgtgggaggtgctcatgctgtgcagagctcaaccatttggacagctcaccgatgaacaggtgatcgagaatgctggtgaattttttcgcgaccagggtcgacaagtatatttgtcaagacctccagcgtgcccccaggggctgtacgaactgatgttgcggtgctggtcacgggagagtgaacagaggcccccatttagccaattgcatcgcttcctggccgaggacgccctcaataccgtgtag

SEQ ID NO: 11106 - DNA, 309 bp, synthetic construct
  misc_feature 1..309: note = source = /note="Description of Artificial Sequence: Synthetic coding sequence"
  source 1..309: mol_type = other DNA
atgtccgtgatgaagccatgcctgatgacaatcgctatcctaatgattctggcccagaagacccccggtgggctgttccggtctcataatggcaagagccgggaaccatggaacccttgcgagttatatcaagggatgtgccgcaacgcctgccgagagtacgaaattcagtatcttacatgtcccaatgaccagaaatgttgtctcaagctgagtgtgaaaattacttcgagtaagaacgtgaaagaagactacgattccaatagtaatctgtctgtgactaattccagttcttattctcacatctag

SEQ ID NO: 11107 - DNA, 267 bp, synthetic construct
  misc_feature 1..267: note = source = /note="Description of Artificial Sequence: Synthetic coding sequence"
  source 1..267: mol_type = other DNA
atgctgcccgaccacttctcgcccctgagcggggatatcaaactgagcgtgctggcactcgtggttttagtggtgttagctcagacagctccagacggctggatccggagatgttattacggcactggaaggtgccgaaagtcatgtaaggagatcgaacggaagaaggagaagtgcggcgaaaagcatatatgctgtgtacctaaggagaaggacaagctatctcacatacacgatcagaaagagacctcggaactctatatttag

SEQ ID NO: 11108 - DNA, 1401 bp, synthetic construct
  misc_feature 1..1401: note = source = /note="Description of Artificial Sequence: Synthetic coding sequence"
  source 1..1401: mol_type = other DNA
atgaaaccaccactgctggtgttcatagtgtgtctcttatggctcaaagactcacattgtgcccctacttggaaggacaagaccgccatcagcgagaatctgaaaagcttcagtgaggtgggagagatcgatgccgatgaggaggtgaaaaaagccttaactgggatcaagcaaatgaaaatcatgatggagcggaaagaaaaagaacatacaaatctgatgtctacgctgaaaaaatgtcgcgaggaaaaacaggaagcactgaagctgctcaacgaagtgcaggagcatctcgaggaggaggaacggctttgtagagagagcctggccgactcctggggcgagtgtcgatcttgtctcgaaaataattgtatgcgtatatatacaacttgtcagccctcctggtcctccgtgaagaataaaattgagaggttcttccgtaaaatctatcaattcctgttcccttttcacgaggataacgaaaaggacctcccaatctcagaaaaattaattgaggaagatgcccagctgacccagatggaggacgtattcagtcaactgaccgtggacgtgaattcactttttaaccggtcatttaacgtatttcgccaaatgcagcaggagttcgaccagacttttcagtcacacttcattagtgacactgacctgaccgaaccatatttctttcctgcgttcagtaaggagcccatgacaaaggccgacctcgaacagtgttgggatattcctaacttttttcaactgttctgtaatttctccgtgagtatttatgagtcagtgagtgaaaccattacaaagatgttaaaagcaatcgaagacttaccgaagcaggacaaagcccctgatcatggcggtctcatatcaaagatgctcccaggacaggaccggggtctgtgcggcgaactcgaccagaacttgtcccgttgcttcaaattccatgagaaatgtcagaagtgccaagcccacctgtcagaggactgtcccgacgtacctgccctgcacacagagctagatgaggccattcggctggtaaatgtcagcaatcagcaatatggccagatcctgcagatgacccgcaagcatctggaggacacggcgtatctggtggagaaaatgagaggccaattcggctgggtttccgaactagctaaccaggccccagaaactgaaatcatcttcaactctattcaggttgtacccaggattcacgagggtaacatttccaagcaggatgagaccatgatgaccgatctgagcatcctgccctccagcaactttacgcttaaaatcccactggaggaaagtgccgaatccagtaacttcatcggctacgtggtggcgaaagcattacagcatttcaaggaacattttaagacatggtag

SEQ ID NO: 11109 - DNA, 207 bp, synthetic construct
  misc_feature 1..207: note = source = /note="Description of Artificial Sequence: Synthetic coding sequence"
  source 1..207: mol_type = other DNA
atgaagctgtgtgttactgtgctctccttgttggtcctggtcgccgctttttgtagtctggccctctcagcgccaacgaaatccagcgaatggaaactacagggggtttgtttccagtgttgtagcggcaaagacccaatccatcagtcttgccctacctggaccatggtccggcagaggaaaatgccaaccacaggcaaaggctag

SEQ ID NO: 11110 - DNA, 420 bp, synthetic construct
  misc_feature 1..420: note = source = /note="Description of Artificial Sequence: Synthetic coding sequence"
  source 1..420: mol_type = other DNA
atgtacaaacttgcttcttgctgtcttctctttataggtttcctgaaccctctgctgagcctccccctgcttgactcaagagaaatcagttttcaattgtccgccccacacgaggacgcgaggcttactccagaggagctggaacgagcatctttactccaaattctgccagaaatgctcggagctgagcgtggagacattctccgtaaggctgacagttccaccaatatcttcaaccctagaggcaatttgcgaaaatttcaagacttctcaggacaagaccctaacatcctcttgtcacacctgctagcaagaatctggaagccttataagaagcagagaagaaagttgcgacaggatcttaggctgtggaagaaagaacctggtctacgaattttcaagaattatgtttatatttag

SEQ ID NO: 11111 - DNA, 1974 bp, synthetic construct
  misc_feature 1..1974: note = source = /note="Description of Artificial Sequence: Synthetic coding sequence"
  source 1..1974: mol_type = other DNA
atgagaacagtggtgttgacaatgaaagccagcgttatagagatgttcttggtgctactggtaactggcgtgcactccaacaaagaaacggctaaaaaaatcaagaggcctaaattcaccgtcccccaaataaactgtgatgtcaaggccggtaagataattgacccagaatttatcgtgaagtgccctgccggttgccaagacccaaagtaccatgtttatggtactgacgtttatgcaagctacagcagcgtgtgcggggcagccgtccattcaggcgttctggataatagcgggggtaaaattttggtacggaaagtggcaggccagtcaggctataagggttcttatagtaatggggtacaaagcctgagcctgccgagatggcgcgaatccttcattgtcctggagtccaaacccaagaagggggtcacgtatcccagcgcacttacctacagcagcagcaaatccccagccgctcaggctggagagaccacaaaagcctaccagagaccacccatccctgggactacagcccagcccgtgacgctgatgcagctgcttgctgtgactgttgctgtggccactcccacaactctacctcgtccctccccttcagccgctagcacgacctctatccccaggcctcagtctgtgggacatagaagtcaggagatggacctgtggagcaccgccacctatacctcatctcagaatcgacccagggctgaccccggaatccagaggcaggacccaagtggggctgcttttcagaagccagtgggcgctgatgtatctttggactgcaagatagaccttagtttcctcattgacggaagtacgtccataggcaaaaggcgatttcgcatccagaagcagctcctggctgatgttgcacaggccctggacattggaccagctggtcccctcatgggcgtggttcaatacggtgataacccagccacacactttaatcttaagactcataccaactctcgcgatctgaaaacagccattgaaaagataacccaaagaggaggactcagcaacgtcggccgtgctataagttttgttaccaagaattttttctctaaggcaaatggaaatcgctctggcgctccaaacgtggtggtggtgatggtagatggctggccaaccgacaaggtggaggaggccagcaggttggcacgggaatcaggaataaatatattctttataacaatagagggagccgctgagaatgaaaagcagtatgtggtggagccgaatttcgctaacaaagcagtatgccgaacaaatggcttttactccctacacgttcagtcgtggtttggccttcacaagacattgcagcccctggttaagagggtgtgtgataccgatcggcttgcctgctccaaaacgtgtctgaacagcgccgatattggatttgtgatcgatgggtcttcttccgtaggcaccgggaatttccgtaccgtcttacagtttgtcacgaacctgacaaaggagtttgagatatcagacactgatactaggatcggcgcagtgcagtatacttatgaacagcggttagagttcggtttcgacaagtatagtagcaagcctgatattctaaatgcaataaaaagggtgggatactggtccggcggaacatccaccggagccgcaatcaactttgcactcgagcagctattcaagaagtctaagccaaataaacgtaaactgatgatcctgatcactgatggaagatcttacgatgacgtccgcattcccgctatggctgcccacctgaaaggcgtgatcacttatgccattggagtggcctgggccgctcaagaggaacttgaagtcatcgccactcacccagccagggaccacagctttttcgtggacgagtttgacaacctacatcagtacgtcccacgtataatccagaacatatgtactgagtttaacagtcagccaaggaactag

SEQ ID NO: 11112 - DNA, 3975 bp, synthetic construct
  misc_feature 1..3975: note = source = /note="Description of Artificial Sequence: Synthetic coding sequence"
  source 1..3975: mol_type = other DNA
atgcgtcatggtgtcgcctgggctctgcttgtggcagccgctctcggccttggagccaggggagtccggggtgcagtagcactcgctgacttctaccccttcggcgcagaaagaggggacgcagttactcctaaacaggacgatggcggatctgggctgcgccctctgtctgtacccttcccctttttcggagccgagcatagtggtttatatgtcaacaataatgggataatcagctttctcaaagaggtgtctcaattcactcctgtcgctttcccaatagcgaaagatcgttgcgtggtggctgccttctgggcagacgtggataaccggcgtgcgggtgatgtgtattacagagaagccacggatccggcaatgctccgcagggcgacagaggacgtcaggcattattttccagaactcctggacttcaacgcgacatgggtgttcgtggctacttggtacagagtgacgtttttcggtggctcatcctcatctcctgtgaataccttccagactgttctcatcactgacggcaagctaagcttcactatctttaactacgagtctatcgtttggacaacaggaacacatgctagctccggtggcaacgccaccggcctgggagggattgccgcacaggctggctttaatgccggagatggtcagcgctatttttccatacctggctcgcgaactgcagatatggctgaagttgaaactacgactaacgtgggagtgccgggtcggtgggcctttcgcatagatgatgcccaggtccgcgtgggcggatgcggccacactacatcagtttgcctagccctcagaccatgtcttaacggcggaaaatgcatcgacgattgcgtgaccgggaatccaagctacacttgctcttgcttatccgggtttacaggcagacgctgtcatctggatgttaacgagtgcgcctcccagccatgccagaacgggggaacctgtacacatggtatcaacagctttaggtgccaatgccctgcgggttttgggggaccgacatgtgaaactgctcaatcgccgtgcgatactaaagaatgtcaacacggcggacagtgtcaggtggaaaacggaagcgcagtctgtgtgtgccaggccggatatactggcgctgcatgcgagatggacgtcgacgactgtagccccgatccatgtctgaatggcggttcatgtgtagacctcgtaggcaattacacatgcctttgcgccgagccatttaagggtctgcgttgtgaaaccggggatcacccagtgccagatgcctgtctgagcgctccatgccacaacggcggaacatgcgtggatgccgatcagggttacgtctgtgagtgccctgaaggattcatgggactggattgtagggaacgtgttcccgacgattgtgaatgtaggaacgggggaaggtgtctgggcgctaataccaccctgtgtcagtgccctctcggcttctttggtctcctgtgcgagtttgagatcaccgccatgccatgcaacatgaatacccagtgtcctgacggagggtattgtatggagcacgggggaagctacctttgtgtgtgccacactgaccataacgctagccactcgctgccgtcaccctgtgattccgatccatgcttcaatggcggatcatgcgatgcccacgatgatagctacacttgcgagtgtcctcggggtttccacggtaaacattgcgaaaaggcccgaccccatttgtgctcttccggcccttgccgaaatgggggtacatgtaaggaagcaggcggtgagtaccactgttcgtgtccatacagatttaccggaaggcattgcgaaataggcaaaccggattcttgtgcctctggtccctgtcacaacgggggaacatgcttccactacattgggaaatataaatgcgactgccctcctgggttctcaggtagacactgtgaaatcgcgccttctccttgctttagatcaccgtgcgtgaacgggggtacatgcgaagaccgcgatactgacttcttctgtcactgtcaggcagggtatatggggaggcgttgtcaggccgaggtggactgcggaccacccgaggaggtgaagcacgccaccctgcgattcaatggaactagacttggagcagtagctttgtacgcctgcgataggggctattcgctcagtgccccatctagaattagagtgtgtcagcctcacggagtctggtctgaaccgccacagtgcttggagatcgatgaatgtcggtcccagccctgtctacatggcggatcatgccaggacagagtagcaggatatctgtgcttgtgcagtaccgggtatgaaggcgcacactgtgaacttgaacgagacgaatgccgggctcatccctgccggaacggcggatcctgtcggaacctgcccggtgcctatgtttgtagatgtcctgcaggatttgtgggtgtgcattgcgagacggaggtagatgcctgtgactctagtccttgccagcacggcggaaggtgcgaatctgggggtggcgcatatctttgtgtctgtcccgagtctttttttgggtatcactgtgaaactgtcagcgacccatgtttcagctctccatgtggcggacggggttactgcttagcaagcaatggtagccatagctgcacctgcaaggtgggttatacaggcgaggactgcgcgaaggagctcttcccccctaccgcactcaagatggagcgggtggaggagtccggcgtgtccatcagttggaaccccccaaatgggcctgcagctaggcagatgctggatggctacgccgttacgtatgttagctctgacgggtcctaccgtagaaccgactttgtcgacagaactagatccagtcatcagctgcaggccctcgcagctggacgcgcttataatatctccgttttcagcgtcaagcggaattctaacaacaaaaatgatatctcaagacccgctgttttgttagcccgaacaagacccagaccagtcgaaggatttgaggtcaccaatgtgacggcgtcaactattagtgttcagtgggcattgcatagaatacggcacgctaccgtgtctggcgtccgcgtgagtatccgccaccccgaggctctccgcgaccaagccacagacgtagatagaagtgtggaccgcttcacattccgtgccttactgccagggaagaggtacacaatccagctgacgaccctgtcaggattacgtggagaagagcacccgacagaaagcctggctacggcgccaacacacgtctggacgagaccactccccccagcgaatctgaccgcagccagggtgaccgctacttccgcacatgtcgtgtgggacgcacctactcctgggagcctgctggaggcttacgtgatcaacgtgacaacatcacagagtactaagtctagatatgtacctaatgggaagctcgccagttacacagtgcgagacttgcttccgggtcgcagataccagctaagcgttatagctgtgcaatctactgagctggggcctcagcactcagaacccgctcacctgtacatcattaccagccccagggacggggctgatcggcgatggcatcagggaggacaccatccaagggtgctgaagaacaggccaccccctgcgcgattgcccgaactgaggctgctgaatgaccacagcgcgcctgagacccctactcagccgcctcggttctccgagctagtagacgggagaggtagggtaagtgccaggtttggcggttctccatctaaggctgccaccgtacgttctcaacccacagcctccgcccagcttgaaaacatggaggaggcccctaagagggtgtcgttagccctccagcttcctgaacatgggtctaaggacattggctctgagtcagctgcactggtcggaacactcggcctcactgattgtagtcagggcccttag

SEQ ID NO: 11113 - DNA, 732 bp, synthetic construct
  misc_feature 1..732: note = source = /note="Description of Artificial Sequence: Synthetic coding sequence"
  source 1..732: mol_type = other DNA
atgggcatatttttggtttatgttggttttgtgtttttttcagttctgtatgtgcaacaggggctgtcctcgcaagccaaatttaccgagttccccaggaacgtcacagcaacagagggacagaatgtagagatgagctgcgcctttcagtccgggtcggcatcggtgtatctggagatacagtggtggttcctccgcggtcccgaagacttagacccaggtgcagagggcgctggcgctcaagtggagcttttacccgatcgcgatcctgactccgacgggacgaaaatctcaaccgtaaaggtgcaaggcaatgacatatcccataaactgcagatatctaaagtgaggaagaaggacgaggggctttacgaatgtcgcgtcactgacgctaattacggcgagctgcaagaacataaggcccaagcctacttaaaggtgaacgctaattcccacgcccgacggatgcaggcctttgaagccagtccaatgtggctccaagatatgaagccgcgtaaaaatgtgagcgcagccattccgtcctccatccacggttcggccaaccagcgaacacatagcaccagttcccctcaggtggtggccaagatccctaaacagtcaccacagtcaggcatggagactcacttcgagccctttattctccccctgaccaacgcaccacagaaaggacagagctatcgcgtcgacagatttatgaacggcgacttctag

SEQ ID NO: 11114 - DNA, 1218 bp, synthetic construct
  misc_feature 1..1218: note = source = /note="Description of Artificial Sequence: Synthetic coding sequence"
  source 1..1218: mol_type = other DNA
atgtggtatgtatcgaccaggggcgttgccccacgagtgaatttcgaaggggctcttttcagcggctacgcgcctgacggtggtctttttatgccagaagagctcccgcaattggatagggggacactctgccaatggtctaccttgagctatcctggcttggtcaaggagctgtgtgccctgttcatcggttctgaattgctccctaaggacgaactgaacgatctgattgacagagcattctcccggttccgacatcgcgaagtggttcatctgtccagactaagaaatgggctgaatgttttggaactgtggcacggggtaacatatgccttcaaagacttatccctttcatgtacaacacaattcctccagtattttttagagaagcgggaaaagcatgtcactgtggtggtcggaacttcaggtgatacgggttcagcggcaatagaatctgtgcaaggagcaaaaaacatggatattatagtgctgctcccaaaaggccattgtaccaaaatccaggagttgcaaatgacaaccgtgctgaaacagaatgtccatgtgtttggcgtggaaggcaactctgatgagctggatgaacctatcaaaaccgtgtttgcagatgtggctttcgtgaaaaagcataacctcatgtcccttaattccatcaattggagtcgggtcctggtccagatggcccatcacttttttgcctacttccaatgtactcctagtctggacactcaccccctgcccctcgtcgaggtagtggtgccgactggagccgcagggaacctggccgctggctatatagcacagaagatcgggctgccaatccgtcttgtggtcgcagttaatcggaacgacatcatccatcggactgtccagcagggtgacttttctctgtccgaggcggttaagtccaccctggcatctgctatggatatccaggtgccatataacatggaacgggtgttctggcttctaagtggctctgatagccaggtgacccgggctctcatggagcagtttgaacgcacccagtcagtgaaccttccgaaggaattacattcgaaatgggaacgccaggattatgaaaaaatggctgttatggaatgcgatggctgttgcgtggaactgtgccttggaaactgtggcccacgcagggggagcgtcaccgatatccccggaaccgccatggtgagaggcggtggatag

SEQ ID NO: 11115 - DNA, 573 bp, synthetic construct
  misc_feature 1..573: note = source = /note="Description of Artificial Sequence: Synthetic coding sequence"
  source 1..573: mol_type = other DNA
atgagaactgtggtgctgactatgaaggctagtgtcattgaaatgttcttggtccttcttgtaactggcgtgcactctaacaaagagaccgcaaagaaaattaaaagaccaaagtttacagtgccccagattaactgtgacgttaaggcaggcaaaatcatcgatcctgagtttatcgttaagtgtcccgctggttgtcaggaccctaagtaccacgtatatggtaccgacgtgtacgcctcttatagctctgtgtgtggggctgctgttcacagcggtgtattggacaattccggtggcaaaatcctggtgaggaaggttgccggacagtcaggatataagggttcctacagcaatggtgtgcaaagtctgtccttaccaagatggcgggagtcttttattgtactcgaatccaagcccaaaaaaggggtcacctatcctagcgcactgacatactctagctcaaaatccccagccgctcaagcagacctgtggagtactgctacctacacaagcagccagaatagaccgagagcagaccccgtgcagagacagccgtgctactctttgtag

SEQ ID NO: 11116 - DNA, 399 bp, synthetic construct
  misc_feature 1..399: note = source = /note="Description of Artificial Sequence: Synthetic coding sequence"
  source 1..399: mol_type = other DNA
atggccccaagtcctcgcacaggcagtagacaggatgcaaccgctctcccgtctatgtctagcacgttctgggcatttatgatcctcgcttccttgctgattgcgtattgtagtcagctggctgctggcacgtgtgagatcgtgactctggaccgagatagctcccaaccacggcgaacaatcgccagacaaactgccagatgtgcgtgccgcaaaggacagatagctggcacaacaagggccaggccggcatgcgtggatgcgagaataattaagaccaagcagtggtgcgacatgcttccatgcctggaaggtgaaggctgcgatttactgatcaacaggtctggctggacatgcacccagcctgggggacgcattaagactaccaccgtcagctag

SEQ ID NO: 11117 - DNA, 957 bp, synthetic construct
  misc_feature 1..957: note = source = /note="Description of Artificial Sequence: Synthetic coding sequence"
  source 1..957: mol_type = other DNA
atgctcccactcacgatgaccgtattgattctgttgctgctacctacagggcaagctgctcccaaggatggcgtgaccagaccagacagtgaggtccagcaccaactgctgcccaacccatttcaacccggacaggagcagctgggccttttacagtcctaccttaagggactgggcagaacggaggtgcaattggagcacctatcaagagagcaggttttattatatctattcgctctgcatgattatgatcagtctggccaattggacgggcttgagctgttgtcaatgctgactgccgcactggcgcctggcgctgctaattctccgaccaccaaccccgtcatactgatcgtggataaagtgctggagactcaggacctgaatggtgacggcttgatgacaccggctgagcttattaactttccgggtgtggctctacgtcacgtagaaccaggcgagccactggcgccttcgccacaggagcctcaagcagtcgggagacagagccttctggcaaagtcgcctctgagacaagaaactcaggaggcccctgggccaagagaggaagcaaagggacaagtggaagcacgcagagagagcctcgatcccgttcaagaacctggcggtcaggcagaagcggacggtgacgtacccggacccagaggcgaagcagaggggcaggctgaggccaaaggagacgcgccaggaccacggggtgaggccggagggcaggccgaggctgaaggcgatgccccaggacctaggggagaagctggtgggcaggctgaggctgagggcgacgctcctggaccaaggggagaggcagggggacaggctgaggcccgagagaacggagaagaagccaaagagttaccaggggagaccttggagtcaaagaacacccagaatgatttcgaagtgcacattgtccaggtggaaaatgatgaaatttag

SEQ ID NO: 11118 - DNA, 399 bp, synthetic construct
  misc_feature 1..399: note = source = /note="Description of Artificial Sequence: Synthetic coding sequence"
  source 1..399: mol_type = other DNA
atgttgcctttaacgatgacggtgctgattctactcttattgccgaccggccaggcagcacccaaggacggcgtgacccgtcccgattcagaagtacagcaccagctgctgcccaacccatttcagccagggcaggaacagctaggattactgcagtcttacctgaagggcttaggcaggactgaagttcagctggaacacttatctcgtgagcaggttctcctctacttattcgcactgcacgattatgatcagtccggccagctagatggactggagcttctgtcgatgctgacagcagcactcgcacctggcgctgctaattccccgactacaaatccgggaaacctggacgcacggctggacggaggtgaaaaggcaatgcagccacagtggtag

SEQ ID NO: 11119 - DNA, 732 bp, synthetic construct
  misc_feature 1..732: note = source = /note="Description of Artificial Sequence: Synthetic coding sequence"
  source 1..732: mol_type = other DNA
atgctcctctcattattgggtgcctgcgccgtggtcggaccattccacggcccagagtgggagcctgtgcaggggctgctgtcacagaatcatagctgtcgggacccacagtgctgcggaaacctgctagttctgtgtctgttcctggtgtggcaggtgcgccactgttggcaccaggtgacaaggacccggtttagtacgcggaatgtcataaaggtgccgctgcagaagcgcgctgtcccatcaatgaggtgcgagaccgtcttcaaactgacacccgagttcttttccccaggaaagtccagagggctggactcccaacagtgcgcgcaacgtcaaagatgggggtacaggcgctcattgcaggagtcttgggcccaaaacctgctgtctccccagcacccgtgccccggaccaccttccggcgtgcacactcacagtgaaccgattttctgcactaccagcatctcaaacacatgtctattaccccagaacagtagctggaaagcttggcaggtcccctggtgtctgcatgatgggcagaccaggcccgctctcgatatgtgccaagagatggagcagcttctacttcattcccaggagcgcctcgtgagcttggagcccgtgatttccgtgcgctctcgaccaacaagcatgaccctcacgacgagtctccccaatctccttagcgccgaaaggctacagttttgcccacagcgcgcaccggcttag

SEQ ID NO: 11120 - DNA, 2505 bp, synthetic construct
  misc_feature 1..2505: note = source = /note="Description of Artificial Sequence: Synthetic coding sequence"
  source 1..2505: mol_type = other DNA
atgaaacacaccctggcactgctggcaccactacttggactgggattgggcttggccctgtcccagttggctgctggtgcgacagactgtaaattccttggccctgccgagcatttaactttcacacccgctgccagggccagatggctggcccctcgcgtgcgggcaccaggactcctggactccctatatggtacagtacgacgatttctttctgttgtccagttaaacccgttcccctcggaattagtcaaggcccttctgaacgagctcgcgtcagtcaaagttaacgaagtagttaggtacgaagcagggtacgtggtgtgcgcagtgatcgcaggcctgtaccttctgttagtaccaaccgccggactgtgtttttgctgctgccggtgccataggcggtgcggcggacgtgttaaaaccgagcataaggcgctggcatgcgaacgcgctgccctcatggtcttcctcctattgaccacattgctgttactcattggtgtcgtttgtgcttttgtcacaaatcaacggacccacgaacagatgggtccgtccattgaggcaatgcctgagactctgctgtccctgtggggcctcgtgtctgacgtcccccaggagctgcaggccgtggcacaacagttcagtctgcctcaggagcaggtgtctgaggagctcgacggggtcggagtctccattggatcagctatacacacacagttgcgatcttccgtctacccgcttctggctgcagtggggtcccttggccaggttcttcaggtctctgtgcatcatctgcagactcttaatgctacggttgtggaattacaagctgggcagcaggatttggagcccgctataagagagcacagagacaggctcctagaactactgcaggaggcgaggtgtcagggggactgcgccggagcgctgagttgggcgcgtaccctcgaactgggggcagacttctctcaggttccctcagttgaccacgtactgcaccagctcaagggagttcccgaggccaatttctctagtatggttcaggaggagaactcgactttcaatgctttacctgcactcgccgcaatgcaaactagctccgtggttcaagaactcaaaaaggcagtggctcagcagcccgaaggtgtgcggacactagccgaagggtttccaggcttggaagccgcttctcggtgggcccaggccctccaggaggtcgaggagagttcacgcccttacctgcaggaggtgcagcgctatgaaacttatagatggattgtcggatgtgtcctgtgttctgtggtgctgttcgtggtgttgtgtaacctgctggggctgaatttgggcatatgggggttatctgcccgtgacgatccctcccaccccgaagccaagggcgaggcgggagcacggtttctaatggcaggcgttgggctgagcttcctgtttgccgcacctctgattctgctggtgtttgctacatttctggttggtggtaatgtccagaccctggtctgccagtcctgggaaaacggcgagctgtttgagttcgcagacactccgggtaatctgcctcctagcatgaacctgtcccagcttctgggattaagaaaaaatatctcaattcaccaggcctatcaacaatgtaaggagggggctgctctgtggactgtgctgcagctcaacgatagctacgatctggaagaacacttggatataaaccagtatactaacaaattgagacaggaactgcagtccctgaaagttgacacacaatccctggacctgctgtctagcgccgctcgacgcgacttagaggccctacagtcttcgggattgcagcgcatccattatcccgatttcctggtgcagatccagcggccagtggttaagactagcatggaacagctcgcgcaggagctccagggactggcacaggcgcaggacaattcagttctgggacagaggcttcaagaagaggcacaggggctccggaacctgcatcaagagaaggtggtgccacagcagtctttggtcgcaaaactgaatctgtccgttagagcgctggagagctctgcacctaacctgcagcttgagactagtgacgttttggcaaatgtaacatacctgaaaggggagctgcctgcttgggcagccaggattctgcgtaatgtttccgaatgttttctggccagggaaatgggatacttttcccagtatgtggcttgggtcagggaggaggtgacacagagaattgccacttgccaacccctctccggcgctctcgataattcccgtgtgattctgtgtgatatgatggctgatccctggaacgctttctggttctgcttggcatggtgtactttttttcttataccttcaatcatttttgccgtgaagacttccaagtattttcgcccaatccggaaacgtctctcgtcgacatcatccgaagagacccagctgtttcatatccctcgagttacctctttgaagctctag

SEQ ID NO: 11121 - DNA, 1185 bp, synthetic construct
  misc_feature 1..1185: note = source = /note="Description of Artificial Sequence: Synthetic coding sequence"
  source 1..1185: mol_type = other DNA
atgtggcgctgcccactcggtcttctgctgctcctgccccttgcaggtcatttggcactgggcgctcagcaggggagaggcagaagggaactggcacccggactccacctgcgcggaatcagagacgcgggtgggagatattgccaagaacaggatctttgctgtcgcggaagggccgatgattgtgcactaccttatctaggggcaatatgctactgtgaccttttttgtaaccgtactgtgagcgactgctgccccttcccccctatccaaggctgcatgcacggtggcaggatttatcccgtcctggggacgtattgggataattgtaaccggtgtacatgtcaggagaaccggcaatggcagtgtgaccaggaaccctgtctcgtggatccagacatgatcaaggccatcaaccagggcaactacgggtggcaggcgggaaatcattccgccttttggggcatgacgctggatgaaggcatccggtatcggcttgggactatccgaccctcctcaagcgttatgaacatgcatgagatttacacggtcctcaatcctggcgaggtcctacccaccgccttcgaagccagtgagaagtggccaaatttaatccatgaaccactggaccagggcaactgcgcgggatcctgggccttttcaaccgctgctgttgcgagcgaccgggtttctatccacagtttgggccatatgactcccgtattgtctccgcagaacctcctgtcctgcgacacacaccagcagcaagggtgtcgtgggggacgccttgacggcgcatggtggttcttaagacggagaggagtggtgtcagaccattgctaccctttctcagggcgtgaacgtgacgaagccggaccagccccaccctgcatgatgcacagtagggccatgggccgaggcaagcgacaggcaaccgcccattgtccaaactcatatgtaaataacaatgatatctaccaagtgacaccggtctaccgcctcggtagcaatgataaggagataatgaaggaactgatggagaatggacccgtccaggctcttatggaggtccatgaggatttcttcctctacaagggcggtatctatagccatacaccggtgtctcttggtcgcccagaaagatacagaaggcacggtacccacagcgtcaaaatcaccggatag

SEQ ID NO: 11122 - DNA, 303 bp, synthetic construct
  misc_feature 1..303: note = source = /note="Description of Artificial Sequence: Synthetic coding sequence"
  source 1..303: mol_type = other DNA
atggcagcagccctggcccttgttgccggtgtcctgagtggcgcagttttaccactttggtccgcccttccccagtacaaaaagaagatcaccgaccggtgttttcatcactccgagtgttactcaggctgctgtctgatggacttagatagcggcggagcgttctgtgccccacgcgctcgaattaccatgatctgtttgccacaaaccaagggagcgacaaatatcatctgcccttgtcggatggggctgacttgtatttcaaaggatcttatgtgtagtcgacgatgccatatgatctag

SEQ ID NO: 11123 - DNA, 978 bp, synthetic construct
  misc_feature 1..978: note = source = /note="Description of Artificial Sequence: Synthetic coding sequence"
  source 1..978: mol_type = other DNA
atgcgcctgccaaggcgtgccgctttgggattgttgcccctgcttttgctgctgccacccgctcccgaggccgctaagaaacccacaccttgtcacaggtgtaggggattagtcgacaaattcaaccaaggcatggttgacacagccaagaaaaatttcggcggaggcaatacagcctgggaagaaaagactttgagcaagtacgaaagctcagagatccgactgctagaaatattagaggggttgtgtgaatccagcgactttgaatgtaatcagatgctggaagctcaggaggagcacctcgaggcctggtggcttcagctcaagagtgaataccctgatctattcgagtggttttgtgttaaaaccctgaaggtgtgttgcagccccggaacatatgggccagattgcctggcctgtcaggggggttcccagcgcccttgcagcggcaacgggcactgctctggtgacggctcacgccagggcgatgggagctgtcgttgccacatgggctatcaggggccactgtgtacagattgcatggacgggtatttctcaagtttgcggaatgagactcattcaatctgcaccgcatgtgatgaaagctgcaagacttgtagcgggctgaccaaccgggattgtggggagtgcgaggttggatgggtcctggatgagggggcttgcgtagagtgtgattcctcctgcgtgggctgtaccggagaagggcctgggaactgcaaggagtgtatttctggctacgcgagagagcatggccagtgcgcagatgtggacgaatgcagtttggctgagaagacttgtgtccgtaagaatgaaaattgctataacacacctggttcctatgtgtgtgtatgccctgatggcttcgaagaaaccgaagacgcctgcgtgccgccagcagaagccgaggcgacagagggcgagtcgcctactcagctgccaagccgggaagacttgtag

SEQ ID NO: 11124 - DNA, 459 bp, synthetic construct
  misc_feature 1..459: note = source = /note="Description of Artificial Sequence: Synthetic coding sequence"
  source 1..459: mol_type = other DNA
atgcgcggtcccggacatcctctgttgctgggcttactgctggtgctgggcgctgccggacggggtagaggcggagctgagccgagagaacctgcagacggccaggcgttattgcgcttggtggtggaactggtccaggagttgagaaaacatcactctgcggagcataaaggcttgcaactacttggcagggattgcgcactcgggcgagccgaggcagcaggactgggcccatctcccgagcaaagagtagaaatcgttcctcgagatctgcgcatgaaggataagtttcttaaacacttaacaggacctctttacttctcccctaagtgtagtaaacactttcaccgcctgtaccacaatacccgggactgcaccatcccggcttattataagagatgcgcgagactgctgacaagacttgcggtgtcgcctgtgtgtatggaggacaaacagtag

SEQ ID NO: 11125 - DNA, 411 bp, synthetic construct
  misc_feature 1..411: note = source = /note="Description of Artificial Sequence: Synthetic coding sequence"
  source 1..411: mol_type = other DNA
atggcaagaacaaagcagactgccagaaagagcacaggtggtaaggcgcctcggaagcagctggctaccaaagcggctaggaagtcggctccggcaaccggaggagtgaaaaagcctcatcggtaccgccctgggactgtagctctgcgcgagattcgaagatatcagaagtcaaccgagctgctgattagaaagctgcctttccaaaggctcgtacgggagatcgcgcaagatttcaagaccgacctaagatttcagtcaagcgcagtcatggctctgcaggaagcaagcgaggcatacctggtgggacttttcgaggacaccaacctgtgtgcaatacatgccaaaagagtgaccatcatgcccaaagatatacagctggcccgaaggattcgaggcgagagggcctag

SEQ ID NO: 11126 - DNA, 1209 bp, synthetic construct
  misc_feature 1..1209: note = source = /note="Description of Artificial Sequence: Synthetic coding sequence"
  source 1..1209: mol_type = other DNA
atgagactccctagaagagccgcactggggttgctgcccttgctgctcctactccccccagctcccgaggctgccaaaaaacctactccctgtcacagatgtcgcggtcttgtagacaagtttaaccagggtatggtcgacacagccaagaaaaacttcggcggtggaaatactgcgtgggaggagaagactctgtcaaagtacgagagctcagagatccgtctgttagaaatcctcgagggcctctgtgaaagttccgattttgagtgtaaccagatgttagaggctcaggaggagcacctggaagcatggtggctgcaactcaaatccgaataccccgacctttttgaatggttttgcgttaaaactcttaaggtatgctgcagccccggaacctacgggccagattgtttagcctgtcagggcggatcccaacgaccatgcagcggaaatgggcactgcagcggggatggttccagacagggggacgggagttgcaggtgccacatgggctaccaggggcctctgtgcaccgactgcatggacggttactttagctctttgcggaatgagacacattccatctgtactgtcaggaccggactttcggattcttatcccccatgctgcctgtcactcggatgctggcggggtgtggggcacgcctggattcgcggaagaaacactcacacacagccagggtattctagccgggtgtggatcgctgctttcagccccgcatgtgacgagagttgcaaaacttgtagcggccttacaaaccgagattgtggcgagtgcgaggtcggctgggtgctggacgaaggagcctgcgtggacgtggacgaatgcgctgccgagcctccaccttgttctgcggctcaattttgtaaaaatgccaacggaagttatacttgcgaagagtgtgatagcagctgcgtggggtgtactggggagggtcccggaaattgcaaggagtgtatcagcggatacgcaagagagcacggccaatgtgccgacgtagatgaatgtagcttggccgagaaaacttgcgttaggaagaatgagaactgttacaacacccctggttcatatgtctgcgtgtgtcccgatgggttcgaagaaaccgaggatgcgtgtgtgcccccagccgaagcggaggccaccgaaggagagtctccgacccagctccctagtcgggaagacctctag

SEQ ID NO: 11127 - DNA, 633 bp, synthetic construct
  misc_feature 1..633: note = source = /note="Description of Artificial Sequence: Synthetic coding sequence"
  source 1..633: mol_type = other DNA
atgtctgcagggaagatgatgcgcactctcatcaccactcacccgctcccactgttactgctaccccaacaactgttacagctggtccaattccaggaggtagacaccgattttgattttcctgaggaagacaaaaaggaggagttcgaggagtgcctggagaaattctttagcaccggaccagcacggcctccaaccaaggagaaggtgaaaagaagggtgctcatcgaacccggaatgccgctgaatcacatcgaatattgcaatcatgaaatcatggggaagaacgtgtactacaaacatcggtgggtggccgaacactactttctgctcatgcagtacgacgagttgcaaaagatctgctacaacagatttgtgccttgcaagaacggcatccggaagtgcaacagaagtaaagggctggttgagggcgtctactgcaacctcacagaggccttcgagattccagcatgtaagtacgaatccctttaccgcaaaggctacgtgctcataacctgctcatggcaaaacgagatgcaaaagaggatcccacatacgataaatgatctggtggaaccgcctgaacaccggagttttctatcagaggacggcgtcttcgttatttccccatag

SEQ ID NO: 11128 - DNA, 585 bp, synthetic construct
  misc_feature 1..585: note = source = /note="Description of Artificial Sequence: Synthetic coding sequence"
  source 1..585: mol_type = other DNA
atgactatgaggcacaactggactcccgatctctcccctctctgggtgttgttgttgtgcgcgcacgtcgtcacattgctcgtgcgcgctacccccgtgtcccagacaacaaccgccgcaacagcctcagtccggagcacaaaggacccttgcccttcacagcccccagtattcccggcagctaaacagtgcccagctctggaagtgacttggcccgaagtagaggtgcctctgaacggcaccttatctttatcctgtgtcgcctgcagccggtttcctaacttctccatactgtactggctcggtaacggctcatttatagaacatctgcccggtcgactgtgggagggcagcacatctcgtgaaaggggaagtacgggcacccagctttgtaaggcactcgtgttggagcagttgactccagccctgcatagcactaacttctcctgcgttctcgtggatccagagcaggtggtgcaacgccatgtagtgctagcccaactctgggccggtctaagagcgacactccccccaacacaggaagcgctgccctcatcgcacagctcaccacagcaacaggggtag

SEQ ID NO: 11129 - DNA, 4059 bp, synthetic construct
  misc_feature 1..4059: note = source = /note="Description of Artificial Sequence: Synthetic coding sequence"
  source 1..4059: mol_type = other DNA
atgcgccatggagtcgcctgggcccttcttgtcgccgcagccctgggactgggagcacggggagtacgcggagccgtggccctggccgatttctatccctttggggcagaacggggagatgcagttacaccaaaacaggatgacggtggaagcggccttcggccactgagcgtcccctttcctttttttggagcggaacattccggactttatgtaaacaataacggcatcatttcctttcttaaagaggtttctcagttcacacccgtggccttccctattgccaaagatagatgcgtggtggccgctttctgggcagatgtggacaatcgtagggcaggcgacgtatattatcgcgaggcaactgatccggctatgctccgcagagctacagaggatgttagacactactttcctgagctgctggactttaacgctacctgggtgttcgtggctacatggtacagggttacattctttggtggaagcagcagtagcccagtgaatacttttcagacagtgttgattacagatggcaagctgagttttaccattttcaactacgagtccatcgtgtggactactggaacccatgcgagctcagggggtaatgccaccggtctcgggggaattgcagcccaggcaggattcaatgcaggggatggacagcgctacttctcaatcccagggtccagaaccgccgacatggccgaagtcgaaactaccacaaacgtaggtgtcccaggaagatgggcattccggatcgatgatgctcaggtgagggtgggaggatgcggccatacaacttctgtttgcctagctcttcgcccatgtttaaacgggggtaaatgcatcgatgactgtgtaactggaaacccctcctatacttgttcctgtttgagcggttttacgggacgcagatgccatcttgacgtcaacgagtgtgcaagtcagccttgccagaacggtgggacctgcacacatggcataaactcattcagatgtcagtgcccagccggttttgggggacccacatgcgaaactgcgcaatccccatgtgataccaaagaatgccagcacggtgggcagtgtcaggtagaaaacggatcggccgtgtgcgtgtgtcaagcaggctatactggcgcagcttgtgagatggacgttgatgattgtagtccagatccttgcctcaatggcggttcatgcgtggatctcgtgggcaactacacctgcctctgtgctgaacctttcaaaggcctacgctgcgagaccggtgaccacccagtgccagatgcttgtctttctgcgccttgtcacaatgggggaacatgtgtggatgcggatcagggttacgtttgcgagtgtccagaaggcttcatggggctggactgtcgagaacgggtacctgacgactgtgagtgcagaaacggtggtcggtgtttgggagcaaacactacgctctgccaatgccccttaggctttttcgggctcctctgcgaatttgaaattaccgcgatgccgtgcaacatgaatacccagtgccccgacggtgggtattgtatggaacatggcggaagttacttgtgcgtgtgccacacagatcacaacgcaagccatagtctgcccagcccctgcgactctgacccatgcttcaatggagggtcctgtgacgcacatgacgattcctacacatgtgaatgcccgaggggattccacggcaagcactgtgaaaaggctagacctcatctgtgtagttcgggtccctgtcggaacggaggtacctgtaaggaggccggaggggagtatcattgttcttgcccatacagatttaccgggcgtcactgcgaaattggaaagcccgatagttgcgctagcggcccatgccataacgggggaacctgttttcactacatcgggaaatacaaatgcgattgccccccagggttcagcggacgacactgcgagattgcaccctcgccttgcttccgttccccctgtgttaatggcggaacttgtgaagaccgggacactgactttttctgccactgccaggccggttacatgggcaggcggtgccaagccgaagtggattgcgggcctccagaggaggtgaagcacgcaacgttgcgcttcaatggcacacgcctgggagccgtggccttatacgcttgcgacaggggatacagcctgtccgctcccagccggatcagagtttgtcagccacacggggtatggagtgagcccccacagtgccttgagattgatgaatgccggagtcaaccctgtctgcatggagggtcatgccaggacagggtcgcaggatatttgtgtctgtgttccaccggatacgagggtgcccactgcgaactcgaacgcgatgagtgtcgtgcgcacccctgcagaaacggaggtagttgtagaaatcttcctggcgcttacgtctgtagatgcccagcgggatttgtcggcgtgcattgtgagacagaagtggacgcatgtgatagttccccctgtcagcatggcggaaggtgtgagtcaggaggaggagcctacctctgtgtgtgtccagaatcttttttcggctaccactgtgaaaccgtttccgatccgtgtttctccagcccttgtggaggacgtggctattgcttggccagtaacggttcacactcctgcacctgcaaggtcggttacacaggagaggattgtgccaaggagctgttccctcccaccgcattaaagatggagcgcgtggaagagtcgggcgtctctatctcctggaatcccccaaacgggccagcagcgagacaaatgttggatggatacgccgtgacatatgtttcaagcgatggaagctaccgaagaaccgacttcgttgatagaacccggagttctcaccaactgcaggccctggcggcaggcagggcttacaatatctctgtgttttctgtgaaacggaactccaacaataaaaatgatatttcccggccagccgttttgctggccaggactcgcccaagaccagtagaaggatttgaggttaccaacgttacagccagcaccatctcagtacagtgggctctgcatcggattagacatgcaaccgtcagcggtgtcagagtgtcaatacggcaccccgaggcactgcgggatcaggccaccgatgtggatcgcagtgtcgataggttcacctttcgcgctctgttacctggtaagaggtacacaatccagttgaccaccctgagcggcctgcggggtgaagaacatcccaccgagtctctggccaccgcccctacgcatgtgtggacgcgacctctgccacccgcaaatctgactgccgcacgggtcacggctacctccgcccacgtcgtctgggacgcaccaacccccggttccttgctcgaggcctatgtgataaacgtaactacctcacagtcgaccaagagcagatatgtacccaatggaaagctggcctcatacacagtgcgggatctactgccaggccgtaggtatcagctgtctgtcatcgccgttcaatcaactgaactgggcccacaacactctgaaccagctcatctttacattataacctcacccagggacggcgctgaccgcaggtggcaccagggtggacaccatcccagagttctgaagaaccggcctccgcctgccagactacctgaacttcgcctgctgaatgatcactctgctcccgaaaccccgacccagccacccagattttctgagcttgtggacggtaggggcagggtttcagcgaggttcggcggtagtccttccaaagctgcgaccgtacggagccatgtcccaggcaattgctctgaaaacccttgtcagaatgggggtacatgtgtccccggagccgacgctcatagctgtgattgcggacccggttttaaaggccgtaggtgcgagctggcttgcatcaaggtgtccaggccctgtacgcgcctgttttctgaaactaaagctttcccggtgtgggagggaggcgtgtgccaccatgtcaaacagagcaaatcccagacgctggaaaaaagctag

SEQ ID NO: 11130 - DNA, 957 bp, synthetic construct
  misc_feature 1..957: note = source = /note="Description of Artificial Sequence: Synthetic coding sequence"
  source 1..957: mol_type = other DNA
atgttacctctaaccatgacagtgctcatattgctgctgctaccaacaggccaggcagcacctaaagatggggtcactagaccagattcagaagttcaacaccaattgctccctaacccttttcagccaggtcaagaacagctggggctcctacagtcctatttgaaagggctcggccgtaccgaggtgcagttggaacacctaagcagggaacaagttctgctctatctcttcgccctgcatgactacgatcagtccggccaactcgatgggctcgaattgctgtcgatgctcacagccgcactggcgccaggagctgccaatagtcccactacaaatccagtgatactgatcgtggacaaggtgctggaaacccaggatctgaacggcgatggccttatgacaccggcagagctcattaattttcctggagtggctttgagacatgtagaacccggagagccgttagcccctagcccacaggaacctcaggccgttggacggcaaagtctcctggcgaagagccctcttagacaagaaactcaggaggcccctggccctagagaagaggctaaaggccaggtggaggctagacgcgaaagcctggatcccgtacaagaaccgggtggccaggcagaggccgacggggacgtgccagggcctagaggtgaggcagagggtcaggccgaggcaaagggagacgcgcctggtcccaggggggaggccggtggccaggccgaggccgagggggatgcgccaggccctcgcggtgaagcaggcggacaggctgaagccgaaggagacgctccaggacccagaggtgaagctgggggacaggcggaggctcgggagaatggtgaggaggccaaggagctacccggtgaaaccttggagagcaaaaatacccaaaatgacttcgaggtgcacattgtccaggtggagaacgatgaaatatag

SEQ ID NO: 11131 - DNA, 816 bp, synthetic construct
  misc_feature 1..816: note = source = /note="Description of Artificial Sequence: Synthetic coding sequence"
  source 1..816: mol_type = other DNA
atgcaggctgcttgttggtacgtgttgtttttgctccagcctacagtttacctcgtaacctgcgccaatcttacaaatggaggtaagagcgaacttctgaaatccggaagtagcaagtcaacgcttaaacacatctggaccgagtcctccaaggatttgtccatcagcaggttgctgtcccagacgttccgagggaaggaaaatgacaccgatctcgatctgagatacgataccccagaaccctacagcgaacaggatctctgggattggctgcgaaactcaacagatttacaagagcctcggcctagggccaaacgtcgcccaatcgtgaagaccggaaaatttaagaaaatgttcgggtggggtgactttcactcaaacatcaaaactgtgaaactgaatttacttatcacaggcaaaattgttgaccacggaaatggaactttctccgtatacttccgccacaactcaacgggacagggcaatgtttcagtgagcttagtccccccaactaaaattgtggaatttgacctggcccagcagaccgtcattgatgccaaagatagtaaatcttttaactgcaggatcgagtacgagaaggtggacaaggcaactaaaaacacgctgtgtaactacgatccttcaaaaacgtgttaccaagagcagacccagtcacatgtctcttggctttgttctaagccattcaaggtcatttgtatatacatttcattttacagcaccgattacaagctggttcagaaggtatgccctgactataactaccactccgacacaccctatttccctagcggatag

SEQ ID NO: 11132 - DNA, 999 bp, synthetic construct
  misc_feature 1..999: note = source = /note="Description of Artificial Sequence: Synthetic coding sequence"
  source 1..999: mol_type = other DNA
atgctgttgttggccgcagcattcctggtggcattcgtgttactactctacatggtgtcgccgttgatcagccccaagcctctcgcactgcctggagcccacgtggtcgttaccgggggtagctctggaatcggtaagtgcatcgccattgaatgttacaaacagggtgcttttatcacactggtggccaggaacgaggacaaactgctgcaggcgaagaaagaaattgagatgcactccattaacgataagcaggttgtgctatgtatatccgtggatgtaagccaggactacaaccaagtggaaaatgtcattaaacaggcccaggagaagcttggccctgttgacatgctggtcaactgtgccggtatggcggtctctggcaagttcgaagacctggaagtatcgacctttgagagactgatgagcataaactacctaggttctgtttacccgagccgtgcagtaattacgacaatgaaggagcgcagagtggggaggatcgtgtttgtgtctagtcaagccggacagcttggcttgttcgggtttaccgcttactctgcttctaaatttgcaatccgaggtctagccgaagctctccagatggaggtgaagccttataatgtttacatcacggtggcctatcctcctgatactgacacgcccggatttgcagaggagaaccggacaaagccacttgaaacccgcctgatttcggagacaacctctgtatgcaaacccgagcaagtggctaagcaaatcgtgaaggacgcaattcagggaaattttaactcgtccttgggctcagatggctatatgctgagcgctctcacctgtgggatggctccagtcacttccattacggagggcctacagcaggtcgtgacaatggggctcttccggactatagccctgttttaccttgggtcctttgattctattgttcgcagatgcatgatgcagagagaaaaatcagagaatgcggacaagaccgcttag

SEQ ID NO: 11133 - DNA, 1497 bp, synthetic construct
  misc_feature 1..1497: note = source = /note="Description of Artificial Sequence: Synthetic coding sequence"
  source 1..1497: mol_type = other DNA
atgagctttagtgcaaccattctgttctcacctccgtctgggtcggaggccagatgctgctgttgcgcctgcaagtcagagactaatgggggtaataccggttctcaaggcggaaaccctcctccgtccactcccattacagtgacaggacatggactggccgtccagtcctccgaacagctcctgcatgtgatttatcaaagagtggataaggcagtgggtctggccgaggccgcactgggactggccagagccaacaatgaactgctgaaaagactccaggaagaagtgggtgatctcagacaggggaaggtttcaattcctgatgaggacggggaatcaagggcgcattctagtccccctgaggaaccaggccctctgaaggagagccctggtgaggcctttaaagcgcttagcgcggtggaggaggagtgcgactctgtcggtagcggggttcaggtcgtcatcgaggaactgcggcagctgggagcagcttctgtagggcctggccctctcggctttcctgcaacccagcgcgatatgagactgccaggttgtaccctcgccgcttcagaggccgcacctttactgaatccgctggtggacgactatgtcgcaagcgaaggcgctgtacagagagtgttggtgcccgcttacgcaaagcagctgtcacccgctacacagctcgctattcagcgcgcaacccccgagaccggcccagaaaatgggactaaactgccgcctccgcgaccggaagatatgttaaatgctgctgccgctttagatagtgcactcgaggagagtggccctgggagcactggcgaactgaggcattcgctgggtctcaccgtctccccatgtcgcacccgaggctccgggcaaaaaaactctcgtagaaagcgggatttagtcctgtcaaaactagttcataatgtgcacaaccatatcaccaatgacaagagatttaatggcagcgagtcgattaagtcatcctggaacattagtgtcgtgaagtttttgctcgagaaacttaagcaggagctggtaacatccccgcataactacaccgacaaggagctgaaaggggcatgcgtagcttattttctgacaaaaagaagagaatatagaaattccttaaacccatttaagggtttaaaagagaaagaagagaagaaactgaggagccgacggtatcgtctgttcgctaataggtcctccatcatgaggcacttcggccctgaagatcagaggctgtggaatgacgttaccgaagagctcatgtcggatgaggaggattctctgaacgaacccgaccggttaccatcggctgaggcccagctcctgccccctgagttatacaaccccaattttcaagaagaagaggacgaaggcggtgacgaaaacgcgcctgggagcccctcttttgatcagccccataagacatgttgccccgacctgaattcgtttattgagatcaaggttgagaaggacgagtag

SEQ ID NO: 11134 - DNA, 966 bp, synthetic construct
  misc_feature 1..966: note = source = /note="Description of Artificial Sequence: Synthetic coding sequence"
  source 1..966: mol_type = other DNA
atgaggctcccgagacgggctgccctggggctgctgccgctgcttcttctgcttccccctgctccagaagccgcaaagaagcccaccccatgccaccggtgtaggggtttagtggataagtttaatcagggtatggtggatacagctaagaaaaactttggcggaggaaataccgcttgggaggaaaaaactctctcaaagtatgaatcctcagaaatacggttgctagagattctggagggactctgcgaaagcagcgactttgagtgtaatcaaatgctggaagcccaggaggagcacctggaggcatggtggctccagctgaagagcgaataccctgatctgttcgaatggttctgtgtgaaaaccttgaaggtctgctgctcccccggaacctacggacctgactgcctggcctgccagggtggatcccagagaccttgtagcggtaacggtcactgctctggcgacggctctaggcagggcgatggaagctgccggtgtcacatgggataccagggacctctgtgcacggattgtatggatgggtacttttctagcctgagaaatgagacccatagtatctgcacagcctgtgacgaatcctgcaaaacttgttcaggactgactaatagagactgcggcgaatgtgaagtgggttgggtgctggatgaaggagcatgtgtggacgtggacgagtgcgccgctgagccacctccatgttctgcggcacagttttgtaaaaatgccaacggcagttatacgtgtgaggatgtcgacgagtgtagcctggcggaaaagacatgtgtccggaagaacgaaaattgctacaacaccccagggagttatgtgtgcgtctgtcctgatgggttcgaagagaccgaggacgcctgtgtgcccccagcagaggccgaggctactgagggagaatcccctactcaactgccctcccgcgaggacctgtag

SEQ ID NO: 11135 - DNA, 711 bp, synthetic construct
  misc_feature 1..711: note = source = /note="Description of Artificial Sequence: Synthetic coding sequence"
  source 1..711: mol_type = other DNA
atgatgggaatctttctggtctacgtgggcttcgtgttcttctctgtgctctatgtgcagcagggcctttcatcacaagcaaaattcaccgagttccctcgcaacgtgaccgccactgagggccagaatgtggaaatgtcctgcgcctttcagagcggatcagcgtctgtttatctggagatacaatggtggtttctgcgcggtcccgaagatttagatcccggagctgagggggctggagctcaggtggagctcctcccagatcgggaccctgatagtgacggaacaaagattagtacagtgaaagtgcagggcaacgacatttcacataagttacaaatctcaaaagtgcgcaagaaggatgaggggctgtacgagtgtcgggtgaccgacgctaactatggggaacttcaggaacataaggcccaggcctatcttaaggtgaacgccaacagccacgctcgcagaatgcaggcgttcgaggcaagccctatgtggctccaggacatgaagcctcgaaaaaacgtctccgctgctattccgagttcaatccatggtagcgcaaatcagcgcactcatagcactagctccccacaagtagtcgccaaaattcccaagcagtctcctcagtctggtgccaggatagccacctctcatggcctgagcgtactgctattggtgtgcggctttgtcaagggggcactcctgtag

SEQ ID NO: 11136 - DNA, 273 bp, synthetic construct
  misc_feature 1..273: note = source = /note="Description of Artificial Sequence: Synthetic coding sequence"
  source 1..273: mol_type = other DNA
atgaacatgaagcccgcaacagcttccgcacttctgctgctgctgctgggattagcatggacccagggctcacacggctggggagcagacgcttccagcctccaaaagcgcgctggacgggatgaccagaattacaactataatcaacatgcataccccaccgcctatggcggaaaatacagcgtaaagaccccagcgaaagggggagtttctccatcttccagtgcatcacgggtccagcccggattgttgcagtgggtgaagttttggtag

SEQ ID NO: 11137 - DNA, 360 bp, synthetic construct
  misc_feature 1..360: note = source = /note="Description of Artificial Sequence: Synthetic coding sequence"
  source 1..360: mol_type = other DNA
atgccagctgtcttcatgctggcttcaagttcggctttgcagtgcggacgaggggtccctaggttcccacggactgaggtcggtgcagggcattccgttaatgaggagacaaaggctgagaaagtgggaaatcagacatccgtgattccagctacatcccgtcaggccgctcttggcacttcttggacacagagaaggactcaaccgctccaagagaggtcccactggcatcccaggggtaacaacgcatcaggaatgggaggccacaggatgttccctggcccactgcgtggcccagccgctcaggttttggagaatgagtgtggttccctgggtcgagccgctgagggcagatcgtag

SEQ ID NO: 11138 - DNA, 639 bp, synthetic construct
  misc_feature 1..639: note = source = /note="Description of Artificial Sequence: Synthetic coding sequence"
  source 1..639: mol_type = other DNA
atgctttcttctgtggtgttctggggtctgatagcactcatcggtacctcacgcggaagttatcctttttctcactccatgaagccacatcttcatcccaggctgtaccacgggtgctacggtgatatcatgaccatgaagaccagcggtgcgacatgtgatgctaactccgtgatgaattgtggcattcgcggatcagagatgtttgctgagatggatttgcgcgctattaaaccatatcaaaccctaattaaggaggtcgggcaacgacattgcgtggatcctgcagtgatcgcggctattatttcaagagaatcacacggaggtagcgtgctgcaggacggctgggaccaccgtggtctaaaattcggactgatgcagctggataagcagacctatcacccggtcggtgcctgggactcaaaggagcatctgtcccaagccacaggtattttgacagaacgaatcaaggcaattcagaaaaaatttccaacttggtcagtcgcccaacatctcaaaggcggactgtctgctttcaaatctgggattgaagctatagccacccccagtgacattgacaatgactttgtaaatgatatcattgcaagggctaaattttataaaagacagtctttctag

SEQ ID NO: 11139 - DNA, 387 bp, synthetic construct
  misc_feature 1..387: note = source = /note="Description of Artificial Sequence: Synthetic coding sequence"
  source 1..387: mol_type = other DNA
atgcgggtggccaggcgcactagaaacgtctgtaggtgccccagggccgcaggcccaggggtcccggaaccccgtgccgctccccttccattgctggcaatggcaccccctccagcttgtcgatcccccatgtctcctcctcctcctccacttttgctactcctgctatcgctggctttgctcggagctagagcaagggcggagcccgctggatctgccgtgccagcacagtccaggccctgcgttgactgtcacgcattcgaatttatgcagagagccctgcaagatttgaggaagacagcgtgctctcttgatgctagaacagaaactctgctcctccaggccgagcgcagagccctatgcgcatgctggcctgccggacactag

SEQ ID NO: 11140 - DNA, 399 bp, synthetic construct
  misc_feature 1..399: note = source = /note="Description of Artificial Sequence: Synthetic coding sequence"
  source 1..399: mol_type = other DNA
atggggccaagggtcctgcagcctccattactgctccttctgttggccctccttttagctgcactgccctgcggggcagaggaagcgtcaccattgaggcccgctcaggtgactctgagtccacccccagccgttactaacggctctcaaccaggggcaccccacaattcaacacacacccgccctcctggcgcttcaggttccgctctcacgaggtcgttttacgtgatcctgggcttctgtgggcttaccgccctttacttcctgattcgggcttttagactcaagaaaccccaacgtcgccgatacgggctgctggccaatacagaggatccaacagaaatggcaagcctggattcggatgaagagaccgtgtttgaatccagaaatctgcgctag

SEQ ID NO: 11141 - DNA, 585 bp, synthetic construct
  misc_feature 1..585: note = source = /note="Description of Artificial Sequence: Synthetic coding sequence"
  source 1..585: mol_type = other DNA
atgagcgcgctatggctgctccttggtttactggcactcatggacctgagcgagtcctccaattggggatgttatgggaacattcaatccctggacactccaggagcttcttgcgggatcggacggaggcatgggctaaattactgtggcgtgagagctagtgaaagactggctgaaattgacatgccttacctcctcaagtatcagcctatgatgcagactattggacagaagtactgtatggaccctgccgtcatcgccggagttctctcccgtaagagccctggcgataagattctcgtgaacatgggtgatagaaccagtatggtccaggaccccggatctcaggctcctacctcttggatctccgaaagtcaggtgtcccaaacaacagaggtcctcaccacgaggatcaaggagatacaaaggaggttcccaacttggactccagaccagtacctcaggggaggcctatgcgcatacagcggcggagccggttatgtgaggtccagccaggatctgtcgtgtgacttttgtaacgatgtcctggccagggcaaaatacctcaaaaggcacgggttttag

SEQ ID NO: 11142 - DNA, 441 bp, synthetic construct
  misc_feature 1..441: note = source = /note="Description of Artificial Sequence: Synthetic coding sequence"
  source 1..441: mol_type = other DNA
atggtcatcaccatttactatgatgtgaaggtacgctttattgtgagagggtgcggacaatacatttcttaccgttgccaggaaaaacggaacacctactttgcagagtattggtatcaggcgcagtgctgccagtatgactactgcaacagctggtcatccccacagctgcagtcatccctgcctgaacctcatgatcgtcctctggctctgcccctgtccgacagccagatccagtggttctatcaagccctgaatctgtccctccctctacccaactttcatgccggaaccgagccagacggcctggatcctatggtgacgctctctctcaatttgggcctatctttcgccgagcttcggagaatgtatctcttcctgaatagcagtggtctcctagtgctgccacaggctggtctgcttaccccacaccccagctag

SEQ ID NO: 11143 - DNA, 234 bp, synthetic construct
  misc_feature 1..234: note = source = /note="Description of Artificial Sequence: Synthetic coding sequence"
  source 1..234: mol_type = other DNA
atgggtagtagtggccttctctccctccttgttttgtttgttctcctggccaacgtgcaggggccaggtctcacggactggctctttcccaggcggtgtcccaagattcgggaggaatgcgaattccaggaacgggacgtctgtacaaaagatcgacaatgccaagataataaaaaatgttgcgttttctcctgtggaaaaaagtgcctcgacttgaaacaagggaaacaatag

SEQ ID NO: 11144 - DNA, 444 bp, synthetic construct
  misc_feature 1..444: note = source = /note="Description of Artificial Sequence: Synthetic coding sequence"
  source 1..444: mol_type = other DNA
atgggccaagaggtgcatggcagctgctgggctctgggcgctggtggcggacagcgccagtgggtcggccgtagcatgccccctttagcccctcaactgtgtcgcgcagtgtttttagtgcccattctgctcttgctgcaggtgaaacccctgaacgggtcccccggaccaaaggacgggagtcagacggaaaagactcctagtgctgaccagaaccaggaacaatttgaagaacatttcgtggctagctccgtgggcgagatgtggcaagtagtggatatggctcagcaggaagaagaccagtcatctaagacagctgctgtacacaagcatagctttcacctgtccttttgcttctcattagcctctgtaatggtgttttctggaggcccattgagacgcacctttcccaatattcaactatgcttcatgttaacgcattag

SEQ ID NO: 11145 - DNA, 1695 bp, synthetic construct
  misc_feature 1..1695: note = source = /note="Description of Artificial Sequence: Synthetic coding sequence"
  source 1..1695: mol_type = other DNA
atggcaccgaaaaaactctcctgtttacggagtctcttgctccctctttcactgaccctgttactgccccaggcggacacccggagcttcgttgttgatcggggacacgatcggttcctgctcgacggagccccttttcggtatgtgtcaggatccttacactatttccgtgtaccacgcgtgttgtgggccgacaggctgttgaaaatgcgctggagtgggctgaacgccatccagttttatgttccctggaactatcacgaaccacagccgggtgtgtataatttcaatgggtctcgggaccttatcgcctttctcaatgaagcagccctggctaatctgctggttatactccggccaggcccttacatttgtgccgagtgggaaatgggaggactgccctcatggctgcttcgcaaacctgaaatccacctcagaacaagtgatcctgctgataatatgactaagatttttaccttgctccgcaagtacgagccccatggccctctggttaattccgaatattacaccggatggctcgactactgggggcagaatcactccactcggagcgtatctgccgtgactaaaggcctggagaacatgcttaaacttggcgctagtgtgaacatgtacatgttccacggtggcaccaactttggctactggaacggggctgataaaaagggacgatttctgcctataaccacatcgtatgactatgacgctccgatttccgaagccggagatccaactcccaagctgtttgccttgcgagacgtgattagcaagttccaggaagtgccattaggtcccctcccacccccaagtccaaaaatgatgctgggcccagttactctgcacctggtgggccatctcctggccttccttgacctgctctgccctaggggtcccatacacagtatccttccaatgacatttgaggccgtgaaacaggaccacggcttcatgctgtaccgcacttatatgacacacactatcttcgagcctacacctttctgggttcctaacaacggcgtgcatgatagagcctacgtgatggtggatggcgtctttcagggtgtggtcgaacgtaatatgcgcgacaagctcttcctgaccgggaagctcggatccaaactcgacatcttggtggagaacatgggcaggctgagtttcggcagcaattccagcgatttcaaaggactgttgaagccccctatactgggacagactattctgacccagtggatgatgttccccctgaagatagataacttggtaaagtggtggtttcccctccagctgcccaagtggccctatccgcaggctccatcggggccaacattctacagtaaaacttttcccatcctcggatccgttggcgacacctttctatacctgccaggttggactaagggccaggtgtggattaacggattcaatttgggaaggtattggactaaacaggggccacagcagaccttatacgtgcccaggttcctactgtttcccagaggcgcactcaacaagatcacccttctagaactggaagatgtgccactgcagccccaggtccaattcctggacaagccgatactgaacagtaccagtacgttgcaccgtacacacattaatagtttatccgccgataccctgagcgccagtgagcccatggaattgtccggtcattag

SEQ ID NO: 11146 - DNA, 423 bp, synthetic construct
  misc_feature 1..423: note = source = /note="Description of Artificial Sequence: Synthetic coding sequence"
  source 1..423: mol_type = other DNA
atgtttttcacaatctccagaaagaacatgagtcagaaactgagcctgctcctcctggtgtttggtcttatctggggactcatgttattacactatactttccagcagccccgacaccaatcctccgtgaagctgagagaacagattttagacctttccaagaggtatgtgaaagccttggctgaggagaacaaaaacaccgttgatgtggagaatggcgctagcatggctggctatgcagacttgaagcgcacaattgccgttctgctcgatgacatcctacaaaggctagtcaagctggagaataaagtcgattatatcgtggtgaatggctctgccgcaaacaccacaaacggaacatctggcaatctggttccggtaacgaccaataagcgtacgaatgtttctgggagtataagatag

SEQ ID NO: 11147 - DNA, 528 bp, synthetic construct
  misc_feature 1..528: note = source = /note="Description of Artificial Sequence: Synthetic coding sequence"
  source 1..528: mol_type = other DNA
atgctccctcccatggcactcccttcggtgtcctggatgctcctctcatgcctgatgctgctcagccaggtccagggcgaggagccacaacgggagttgcctagtgctaggatcaggtgtcccaaaggctctaaagcctatggtagccactgttatgctctgtttctatcccccaagagctggaccgatgccgatctggcctgtcagaaacggccaagcgggaacctagtgtctgtgctgtcaggcgctgaaggctcctttgtctcctccttggttaaatctatcggcaatagctactcatacgtctggataggtctgcatgaccctacacagggaacagagcctaacggggaggggtgggaatggtcttcgtccgacgtcatgaactattttgcctgggaaaggaacccttcaactatatcgagtcccggacactgcgcatccctgagtcgttctactgcctttctccgctggaaggactacaattgcaacgtcaggctcccatacgtgtgtaagttcaccgattag

SEQ ID NO: 11148 - DNA, 381 bp, synthetic construct
  misc_feature 1..381: note = source = /note="Description of Artificial Sequence: Synthetic coding sequence"
  source 1..381: mol_type = other DNA
atgcatttgtcacagctccttgcttgtgccctgttgctcactctgctgagtttgaggcctagtgaggccaaaccaggtgctccccctaaggttccgcgaactcctcctgctgaagaactggccgagcctcaggcagccggaggtggacagaaaaagggcgacaaagccccagggggagggggagcaaacctgaaaggtgaccggtccaggttgcttcgagatttgcgggttgataccaagtctcgcgctgcctgggccaggcttcttcaggaacaccctaatgctaggaagtacaagggagctaacaagaaaggtctgtcaaaggggtgctttggcctcaagttggaccggatcgggtccatgtcgggcctgggctgttag

SEQ ID NO: 11149 - DNA, 288 bp, synthetic construct
  misc_feature 1..288: note = source = /note="Description of Artificial Sequence: Synthetic coding sequence"
  source 1..288: mol_type = other DNA
atggcccctccccctgcctgcaggagccctatgtcgcctccacccccacctctactcttactactcctaagtctggctctgctcggagcccgagcaagagccgagcctgcaggtagcgcggtgccagctcagtcacgcccatgtgtcgattgtcatgcctttgagttcatgcagagggctcttcaggatttgcggaaaaccgcgtgcagcctcgatgctaggaccgaaacgctgctgctacaagccgagaggcgcgctctttgcgcttgctggcctgcaggccactag

SEQ ID NO: 11150 - DNA, 423 bp, synthetic construct
  misc_feature 1..423: note = source = /note="Description of Artificial Sequence: Synthetic coding sequence"
  source 1..423: mol_type = other DNA
atgttttttacaatcagtcggaagaatatgagtcagaaactgtcactgttgctcctggtgttcgggctgatctggggcctgatgttgctgcattatacctttcaacagccacgtcaccagagctccgtcaaactccgggaacaaatcctcgaccttagtaagagatacgtcaaagcattggccgaagagaacaagaacaccgtggacgtagaaaacggcgcaagtatggcagggtatgcagacctcaaacgaacaatagccgttctcctcgacgacatactgcagagactggttaagctggagaacaaggttgactatatcgtggttaatggctccgctgctaatactaccaatggaacatctgggaacctcgtgccggtcaccactaataagcggactaatgtatcaggatcaattcggtag

SEQ ID NO: 11151 - DNA, 291 bp, synthetic construct
  misc_feature 1..291: note = source = /note="Description of Artificial Sequence: Synthetic coding sequence"
  source 1..291: mol_type = other DNA
atggagcataaggaggtggtcctcctgctactgctgtttctcaaatccggacagggagagcccctggacgattacgttaacacgcagggcccttctctgttttccgtaacaaagaagcagctgggggcagggagtcgcgaggaatgcgcggctaaatgtgaagaggataaagaatttacctgcagggcttttcagtatcactccaaggagcagcagtgtgtgatcatggctgaaaatcggaagtcttcaatcatcatccggatgagagacgccgttttgttcgagaaatag

SEQ ID NO: 11152 - DNA, 678 bp, synthetic construct
  misc_feature 1..678: note = source = /note="Description of Artificial Sequence: Synthetic coding sequence"
  source 1..678: mol_type = other DNA
taagctgatctgccatcctgttggggcgctggtccatgttacaccgggcacaaagtcggcgctcttagacgcgacacagtcatttgctgttgtaggcacggtgattattctacaccctgcctcttcacaccaggcaagccatccaggaatcccagtccctggaagaggactttgtggactctgtcagcgccatgggctggacctgcgggatggaccggagaggaacagaatgctactaaaactgggctcatcacaaggcgcccacggccattgcgacgtaggccccatcctgctcccgcaagcccgcttcctgaaataatcagaggcaacattcccaggatgttaggtaaattcgtgcccgtaaattgggagccgcctcaaccgctgccctttcccaagtacctgcggtgttatcggtgcctgctggaaaccaaagagctgggttgcctgctgggttcagatatttgtctaacacctgccggtagctcatgcataaccctccataagaaaaacagcagcggcagcgatgtgatggtcagtgactgtagaagtaaggaacagatgtccgactgctcaaatacgaggacatcacctgttagcgggttttggatcttcagtcagtattgctttttagatttctgcaacgatccacagaatcgaggattatacacaccctag

SEQ ID NO: 11153 - DNA, 684 bp, synthetic construct
  misc_feature 1..684: note = source = /note="Description of Artificial Sequence: Synthetic coding sequence"
  source 1..684: mol_type = other DNA
atgggtgctgtgatgggcacttttagctccctgcagaccaaacagagacggcctagcaaggatattgcttggtggtactaccaatatcagcgggataagattgaagacgagctagaaatgacaatggtgtgtcaccgccctgaggggttggagcagctggaagcacagacaaacttcacaaagagggagctacaagtactttatagaggtttcaagaatgaatgccccagcggcgtggtcaacgaagatacatttaaacaaatttatgcacagttctttccccacggagatgcatctacctatgcccactatctctttaacgcctttgacaccactcagactggatctgttaaatttgaggacttcgtaactgccttgtctatcctgctgcggggaacagtacacgagaagctacgctggacgttcaacctgtacgatatcaacaaagatggttatataaacaaggaggaaatgatggatattgttaaagccatttacgatatgatgggtaaatacacatatcccgtcctcaaagaggacacaccccgacagcacgtggacgtattcttccagaaaatggacaaaaacaaagacggtatcgtgacattggatgaattcctggagtcctgccaggaagacgataatataatgcggagcctgcagttattccagaacgtgatgtag

SEQ ID NO: 11154 - DNA, 546 bp, synthetic construct
  misc_feature 1..546: note = source = /note="Description of Artificial Sequence: Synthetic coding sequence"
  source 1..546: mol_type = other DNA
atgcaagtgaacttcgttagctacgtgcagctaacgtctagagcgctcccaagcctcaccgatagtaagggatccctggtggtggtaagctccctcctgggtagagtgcccacttccttcagcacgccttatagcgcggcaaaatttgcactggatgggttttttgggtccctgcggagagaattggacgtccaggatgtgaatgtggcgataacaatgtgcgtgcttggtctgcgggaccgggcaagtgcggcagaggcggttcggtcttcgacttcccgcccacgacaaccagaacacagaggcgtgccccttcagtctcagacagcgatgtttctccccccaacagtgcccggagccaggacacttactgagacacccctccgcggatggccccagccaaaaatgaaatccagccgacagaagagtaagacagagaagaatgatgggcatttagagcccgtgactgcctgggaagttcaggtcccaagggtcaggcgtctctgcagaggcctggcccgtcctcatctgtttggccacgattag

SEQ ID NO: 11155 - DNA, 423 bp, synthetic construct
  misc_feature 1..423: note = source = /note="Description of Artificial Sequence: Synthetic coding sequence"
  source 1..423: mol_type = other DNA
atgtcagacttgctccttctgggactgatcggcggactcactcttctgctgctcctgacattactggcattcgctggatactcgggcctccttgcaggcgtggaagtcagcgccggatcacctcccattcgcaatgtcactgtggcttataagtttcacatgggcctgtacggtgaaactgggcgtttattcacagagtcatgcagtattagtccaaaactgcggtcaatcgccgtgtactacgacaacccgcacatggttccacctgacaaatgtcgctgcgccgtaggctcaatcctcagtgaaggggaggaaagcccatccccagagcttatcgatctgtaccaaaagtttgggttcaaagtcttcagctttcccgcaccaagccacgtggtcaccgcaacttttccatatactacatag

SEQ ID NO: 11156 - DNA, 177 bp, synthetic construct
  misc_feature 1..177: note = source = /note="Description of Artificial Sequence: Synthetic coding sequence"
  source 1..177: mol_type = other DNA
atgggccctgaggccctctcatcgcttttgctactgctactcgttgcaagtggcgacgccgacatgaagggtcattttgaccccgcaaaatgtaggtacgcgctgggcatgcaggacaggaccatccccgattccgacatctccgcctcctcatcctggagtgactcaaccgcgtag

SEQ ID NO: 11157 - DNA, 2742 bp, synthetic construct
  misc_feature 1..2742: note = source = /note="Description of Artificial Sequence: Synthetic coding sequence"
  source 1..2742: mol_type = other DNA
atgggacctgaagccctcagcagtctgttactcttgctgctggtggcctctggcgacgcggacatgaaggggcacttcgatcccgcaaagtgtagatatgccctgggtatgcaggatcggaccatccccgatagcgacatctccgcttcgtcaagctggagtgacagtacagctgccaggcacagccggctagagtctagcgatggcgacggcgcttggtgccccgctggctccgtgtttcctaaagaggaggaatatcttcaggtcgacctacagaggttgcacctggtcgctctggtgggcacccagggcaggcatgctgggggattagggaaagaatttagccggagctacaggctgcgttatagcagagacggacgcaggtggatgggatggaaggaccggtggggccaggaagtcataagcggtaacgaggatcccgagggggtggttctgaaagatctcggacccccaatggtagcgcgactcgttcggttctaccccagggccgaccgcgttatgtcagtttgtcttagggtcgagttatatgggtgtttgtggcgcgacgggctgctgagctacacagcacccgtgggccagactatgtacctgtctgaagctgtctatcttaacgactccacctatgacgggcataccgtaggcggacttcagtacggaggcctaggccagcttgctgatggcgtcgtgggcctggatgattttcgcaaatcacaagaactgcgcgtgtggccgggatacgactacgtcggctggagcaatcacagcttctcatctgggtacgtcgagatggagttcgagttcgatcgactgcgtgctttccaagcaatgcaggttcattgcaataatatgcacactctgggcgcacgacttccaggtggggtggaatgcagattccgtaggggcccagctatggcttgggaaggggaacccatgcgccacaatctgggaggcaatttgggcgatcctcgggctagagctgtttctgttcccctgggtggtagagttgcaaggtttcttcaatgccgtttcctgttcgcgggtccctggctcttattctccgagataagctttattagtgacgtggtcaataacagcagcccagccctgggtgggacttttcccccagccccttggtggcctcccggtccccctcctaccaattttagttctctggagctcgagcccagggggcagcagcccgtggccaaggcagaaggcagcccaacagcaattctaattggttgcctggttgccatcattctgctcctgctactaatcatagctttaatgctgtggcgcttacattggcggcgactcctgtcaaaagccgaacgcagagtgcttgaggaggaactgactgtacacctgtctgtccctggagacaccattctcatcaataacagacctggcccacgagagccccctccctaccaagaaccacggccaaggggcaatcctccccatagcgcaccatgtgtacccaatggttccgctttgctgttatcaaatcctgcctaccgcctgctcctggccacctacgcacgaccccctcgcggtcccggtcccccaacacccgcatgggccaaacctaccaatactcaggcttactctggcgactatatggagccagaaaaacctggagccccacttctgccgcctccaccgcagaatagcgtgccccactacgccgaagccgacatcgtgaccctccagggcgtgactggcggaaatacgtacgcggtgcctgctttaccaccgggagcggtgggggacgggcctcccagggtggattttccccgttcgaggttaagattcaaagagaaactgggcgaggggcagttcggcgaggtgcatctttgcgaggtggactctccacaagatctggtctctctcgactttcccctgaacgtccgcaagggccaccccctgctggtggcagtgaagatacttcggcctgacgctactaaaaacgctcgtaatgattttcttaaagaggtgaagattatgtcacggctgaaggacccaaatataatccgccttctcggagtgtgcgttcaggatgaccctctttgcatgatcaccgactatatggagaacggcgatctcaaccagtttttgagcgcgcaccagctcgaagacaaagctgccgaaggagcgccaggcgacggacaggcagctcaaggcccaacgattagttacccgatgctgcttcacgttgccgcacagattgccagcgggatgcgctatttagccactttgaattttgtccatagggacctggcaactcggaactgccttgtaggcgaaaattttacgatcaagatagctgactttggcatgagccggaatctgtacgctggtgattactatcgtgtgcagggcagagccgtcctgcctattcgctggatggcatgggagtgtattcttatgggtaaatttaccacggcttccgacgtgtgggctttcggcgtgactctgtgggaggtgctcatgttgtgccgggctcagccttttgggcagctgactgacgagcaagtaatcgaaaacgctggtgaattcttccgtgaccagggtcggcaggtatacctatcgaggccgcctgcatgtccccaggggctctatgagctgatgctccgctgctggagccgggagtcagagcagcgccctccattttcacagcttcacaggtttctcgccgaggacgccctgaatacggtctag

SEQ ID NO: 11158 - DNA, 1146 bp, synthetic construct
  misc_feature 1..1146: note = source = /note="Description of Artificial Sequence: Synthetic coding sequence"
  source 1..1146: mol_type = other DNA
atgcgactgttggcgtggctgatttttttagccaattggggcggagccagggctgagcctgggaaattttggcatattgctgacctgcatctggatcccgactataaagtatccaaagatccttttcaggtctgcccaagcgcaggtagtcagccagtccccgacgcgggaccttggggtgactatctgtgcgatagcccctgggcacttataaactcatcaatctacgccatgaaggaaatcgagcctgaacccgattttatattgtggaccggcgacgatacaccacacgtcccagatgaaaagcttggcgaggctgccgtgctggagatagtcgagcgtcttaccaaactgatacgtgaggtgttccccggagctttttactgtgagaaactgcccggtccaagtggcgctggcagaatagtggtactcaataccaacctttactatacatccaatgccctcacagctgatatggcggatcccggtcagcaatttcagtggcttgaagacgtgctaacagacgcctctaaagcaggggatatggtatatattgtgggacacgtgccaccaggtttctttgaaaagacccagaacaaagcctggttccgtgaaggttttaatgagaaatacctcaaagtggtgagaaagcatcaccgggtgatcgcaggccagttcttcgggcatcatcacactgattccttcagaatgttgtatgatgacgcaggcgttcccataagtgccatgtttatcacacccggtgtcaccccatggaagacaacattaccaggggtcgtcaacggagccaataacccagccattcgagtcttcgaatacgacagggccacattatcattgaaggacatggtaacctatttcatgaacttgtcccaggctaacgcccagggaactcctaggtgggagctggagtaccagagcacactgcaaagatattatgtttataactccgtttcctacagcgccggtgtttgtgatgaagcttgtagcatgcagcatgtttgtgcaatgcgccaagtggacattgatgcttatactacatgtctgtacgcaagcgggaccacaccagtgccccagttgcctctgttgcttatggccttactgggtctgtgcactcttgtactctag

SEQ ID NO: 11159 - DNA, 456 bp, synthetic construct
  misc_feature 1..456: note = source = /note="Description of Artificial Sequence: Synthetic coding sequence"
  source 1..456: mol_type = other DNA
atgagggtggcaggagctgccaagctcgtggttgcagtcgcagtgttcctgctaacattctacgtcatcagccaggtttttgagatcaaaatggatgcctccctcggaaatctttttgccaggtctgctttggatacggcagccagatccaccaagcccccacggtacaagtgcggcatcagcaaagcatgccctgaaaagcatttcgcttttaaaatggcgagcggcgctgcaaacgttgtcgggccaaaaatttgcttggaagataatgtactgatgtccggggtcaaaaacaatgtggggaggggcatcaacgttgcactcgcgaacggaaagaccggagaggtgctcgacaccaagtactttgacatgtggggaggggacgttgccccatttatagagttcctcaaagctattcaggacggcactatcgtcctcatgggtacctacgattag

SEQ ID NO: 11160 - DNA, 936 bp, synthetic construct
  misc_feature 1..936: note = source = /note="Description of Artificial Sequence: Synthetic coding sequence"
  source 1..936: mol_type = other DNA
taggcaccgtctccctgtagccattttaactgcggatctcaggtgacagacggcggtactataaaacagaagatattcacctttgacgccatgttctctaccaattatagccacatggaaaactatagaaagagagaagatttggtctaccagtcaaccgtgcggctgcctgaagttcggatcagtgacaatggcccttacgaatgccacgttggtatttacgaccgtgctacacgagagaaggtggtgcttgctagcgggaatattttcctgaatgtgatggctcccccaacttctatcgaggtagtggccgcagacaccccagcgcctttttcacgataccaggcacagaacttcacccttgtctgtattgtgagcggtggaaagccagcacctatggtgtactttaaacgggacggagagcctatcgacgccgttcctctgtcagaaccccctgccgcatcctctggaccactgcaggactcccgcccttttcgttctctgctgcatcgcgacctcgacgatacgaagatgcagaagtccctgtccctgctcgacgcagagaataggggcggtcgcccatataccgagcggccaagtagggggctcacaccagaccccaacatactgctgcagcctactactgagaacatacccgagactgtagtctcccgcgaattcccccgatgggtgcactcagccgaaccaacatatttcctgcgtcattctcgtacgcctagcagtgacggcacagttgaagtgcgcgcactgctcacctggacgttgaatccacaaatcgacaacgaggcattattcagctgtgaggttaaacacccggctttgtccatgcctatgcaagccgaggtgacactggtggcccctaaaggtccgaaaattgtgatgacgcccagcagagccagggttggggatacatag

SEQ ID NO: 11161 - DNA, 978 bp, synthetic construct
  misc_feature 1..978: note = source = /note="Description of Artificial Sequence: Synthetic coding sequence"
  source 1..978: mol_type = other DNA
atgcaggggcgtgtcgccggtagctgcgccccactggggttgttgcttgtctgcctgcaccttcccggactgtttgcccgatccatcggcgtggtggaggaaaaagttagccagaatctcgggaccaatctgccgcagctgggccagccaagcagcaccggccctagcaatagcgaacacccacagccggcactggacccaagaagcaacgatctggctcgcgtgcccttgaagctgtctgttcccgcttccgatggattcccccctgccggagggagtgccgtgcagcggtggcccccttcctgggggctccctgcgatggattcttggccgcctgaggatccctggcagatgatggccgctgctgccgaagatagactcggcgaggccctgcctgaggaacttagttatttgtcttcagccgcagcattggcacctggctccggccctcttccgggagaaagctctcccgacgcaaccggtctcagcccgaaagccagcttgctccaccaggactctgagagcagacggctgcctcggtcaaactccctaggcgcaggtggtaagatcctgtcccagaggcccccttggtcacttattcacagagtgctgccggatcacccctggggaacccttaacccatccgtttcttgggggggaggcggtccaggaacgggatgggggacccggcctatgccccaccccgaaggaatctgggggattaataaccagccccctggcaccagctggggaaacattaaccgatatccaggcggatcgtggggcaacataaatcgatacccaggtggatcttggggcaatattaatcgctacccaggtggcagctggggaaatatccacttgtatcccggaatcaacaatccttttccgccaggggtgctccggcctccagggagctcctggaacataccagccggattcccaaacccccctagtcccaggctgcagtgggggtag

SEQ ID NO: 11162 - DNA, 957 bp, synthetic construct
  misc_feature 1..957: note = source = /note="Description of Artificial Sequence: Synthetic coding sequence"
  source 1..957: mol_type = other DNA
atggggctgcacctccggccttacagagtcgggctgctacccgacgggttgttgtttttgttgctgctcctcatgctcctcgccgatcctgcccttcccgcaggtagacacccaccagtcgtccttggctggttcacgacaaagcaccctggcccaccctcctttctgatggtctggatgtacgtgagtcttgctcttggacgccctagccactggtcaagttggactcccgcaaaagccgcatgggtgccgattagcaccccctggtggcgagcactgtgggctggtgctactcacggcgtcagaatgagcgaggggctgcccatgaccggagcagagccccagagacagccacaggcctggaaggataagtacatcagagcctttgtcagcctgggtgctccatggggcggtgtggctaagaccctacgcgttctggcgtcaggcgacaacaatagaattcccgtcatcgggcctctgaaaatcagagagcaacagcgatcggctgtttcaactagctggcttttaccatacaattacacatggtcaccggagaaggtgttcgtgcagactccgacaataaactatacactgagagactatcgtaaatttttccaggatataggatttgaggatggctggctcatgagacaggatacggaaggcttggtagaggcaaccatgccccctggtgtgcagctgcactgcctgtatggaaccggcgtcccgacccctgatagcttttattacgagtcatttccagaccgtgacccaaagatttgtttcggggacggggacggaacagtcaatcttaagtcggcactccaatgtcaagcctggcagagccgacaggaacaccaggtgctgcttcaagagctgccgggaagcgaacatattgagatgctggctaatgccactaccctggcctatctgaaacgtgtgctgctcggaccttag

SEQ ID NO: 11163 - DNA, 1575 bp, synthetic construct
  misc_feature 1..1575: note = source = /note="Description of Artificial Sequence: Synthetic coding sequence"
  source 1..1575: mol_type = other DNA
tacgccctgcgcgaccgccaggggaatgcaattggggtgaccgcttgtgacatcgatggagacgggagggaggagatctactttctgaacaccaacaacgccttttcaggagttgcaacttacaccgataagttgtttaaattcaggaacaaccgctgggaggacattctctcggatgaggtgaacgtggcaagaggcgtggcgtccctgtttgcgggacgcagtgtcgcttgtgttgatagaaagggcagcgggaggtattccatttacattgctaattacgcttatgggaacgtgggcccagacgctctgatcgagatggaccccgaagctagcgacctgagcaggggaatcctcgcattgcgggacgttgctgccgaggctggcgtgtcgaaatatacgggcggaagaggagtgtctgtgggccctatcctgagctcctcagcgtccgacatattctgcgataacgagaacgggcctaattttctatttcacaacagaggtgatggaacctttgtcgacgcggctgctagcgctggtgtcgacgatccccatcagcacgggagaggggtcgccttggctgacttcaatcgggacggcaaggtggatatcgtgtacgggaactggaatggcccacatcgactttatttacaaatgtccacacacggcaaggtccgattcagagatatagcgagtccgaaatttagcatgccttcccctgtgagaaccgtcatcacagcagacttcgataacgatcaggaactggaaatcttcttcaataacatcgcctatagatccagcagtgccaatagacttttcagggtgatccgtagggaacacggagaccctctgatagaggaactaaacccaggggatgcgctcgagcctgaaggcaggggcaccggcggagttgtgactgactttgacggggacggaatgttggatctgatcttgtcacacggggaatctatggctcaacccctatcagtgtttcggggaaatcaagggtttaacaataattggctgagagttgtgcccaggacaaggtttggagcattcgccaggggtgccaaagtcgtactgtacactaagaagtccggcgcacatcttagaataattgacggcggatcaggctatctctgtgagatggaaccggttgcacatttcggattaggtaaagatgaagcctcaagcgttgaggtgacctggcccgacggaaagatggtatctcgcaatgtggcaagcggagagatgaactcggtactcgagatcctttatcccagggacgaagatacacttcaggacccagcacccctggaaactcctatgaatgcctcttccagtcattcctgtgcactggagacgtctccctacgtgtccaccccgatggaagcgacaggagcagggcctacacgatccgccgtgggagctacctctccaacccgtatggcgcagcccgcatggggacttagtgccagccacagggcccctgcacctccccctcctccattactgcttcccctcccactgctgctgccactccttgaactgccgctgctgcacaggtcatcttag

SEQ ID NO: 11164 - DNA, 636 bp, synthetic construct
  misc_feature 1..636: note = source = /note="Description of Artificial Sequence: Synthetic coding sequence"
  source 1..636: mol_type = other DNA
atggtgagcaggatggtgtccactatgttatcaggcttactcttttggctggcatccgggtggacccccgcttttgcatatagccctcggacccctgatcgggtaagcgaggccgatatccagaggctgctgcacggcgttatggagcagcttggtattgcacggccacgagttgagtaccccgctcaccaggccatgaatctggttggccctcaatctattgagggcggagctcacgaggggctccagcacctcgggccatttggaaacattccaaatattgtggcagaactgactggggataacattcccaaagactttagtgaggaccaaggctatcctgacccacccaacccttgtcccgttgggaaaaccgatgatggctgcctggaaaatactcctgacactgctgagtttagtagggaattccagttgcaccagcacctctttgacccagagcacgactaccccggactgggcaaatggaataagaagttgctgtacgagaagatgaagggcggagaaagacgcaagaggaggtccgtaaacccgtacttgcagggtcagcgccttgacaacgtggtggctaagaagtcagttccccacttttcagatgaagataaagatcctgagtag

SEQ ID NO: 11165 - DNA, 465 bp, synthetic construct
  misc_feature 1..465: note = source = /note="Description of Artificial Sequence: Synthetic coding sequence"
  source 1..465: mol_type = other DNA
atggctttaggtgtgcccatctctgtatacctcctttttaacgccatgactgcattaacagaagaggcagctgtcacggtcacgccaccgatcactgcccaacaggggaattggacagtcaacaaaacagaggccgacaacatcgagggtccaattgccctgaagttctcccatctatgcctggaagatcataatagctactgcatcaatggcgcttgcgccttccaccacgaattggaaaaggccatttgtagatgttttacagggtacaccggcgagcgttgtgaacacttgaccttaaccagctacgccgtggactcctacgaaaaatacattgccattggtattggcgtgggccttttacttagcggcttcctggtgatattttactgttatatacgtaagaggtgtttaaagctgaaatccccttataatgtgtgctctggcgaaagacgccctctctag

SEQ ID NO: 11166 - DNA, 1446 bp, synthetic construct
  misc_feature 1..1446: note = source = /note="Description of Artificial Sequence: Synthetic coding sequence"
  source 1..1446: mol_type = other DNA
atgggcaaactgcgccctggacgtgtcgagtggctggcctctggacacaccgagcgcccacacctgttccagaacctgctcctgtttctgtgggcccttctgaactgtggccttggagtgagcgcgcaggggcctggcgagtggaccccgtgggtgtcgtggaccagatgcagtagcagttgtggccgtggcgtgagtgttagaagcaggagatgcctccggctaccaggcgaggagccctgctggggcgactcacacgagtatcgactttgtcaactgccagactgccctcctggagctgtcccattccgggatctgcagtgcgccctgtataatggtaggccagtgttagggacacagaagacctaccagtgggttcccttccatggcgcaccaaatcagtgtgacctgaattgtctcgctgagggccacgcattctatcacagttttggcagagtcctggacggcaccgcatgcagccctggcgcacagggcgtatgcgtggccggaagatgcttgagtgccggttgtgacggcctgctcggatccggcgcactggaagataggtgtgggcgttgcggaggggctaacgactcttgcctgttcgtccaaagggtattccgagatgccggtgcattcgccggatactggaacgtgacgcttattcctgaaggagctcggcatataagggtcgaacatcgctctcggaatcaccttgcccttatgggcggagacggacggtacgtgctgaatgggcattgggtcgtttctccccctggtacctacgaggctgcaggtacccacgtggtgtatacccgcgatacgggaccgcaggagacattacaggctgctgggccaacctcccatgacctcctactacaggtacttctgcaggagccaaacccgggaattgagttcgagttctggctcccccgtgagcggtactcaccttttcaggcccgagtgcaagctctgggctggcctctaagacaacctcaaccgcgaggggttgaaccacaaccccctgccgcaccagcggtcaccccagcacagaccccgaccttggctccagatccctgccccccatgccctgacacccgcggacgggctcaccggttgctccactactgtggcagcgacttcgttttccaagctagggtcctcggccaccatcaccaggcacaagagaccaggtatgaagttcgcattcagcttgtttataaaaaccgttccccccttagggcccgagaatatgtttgggcacctgggcactgtccctgtcctatgcttgcccctcaccgcgattacctcatggcagtgcaacgcctggtgagccctgacggtacccaagaccaacttttgttgccccacgcaggatacgccagaccctggtccccagctgaagactcaaggatcagattaacagctcggcgttgccccggatag

SEQ ID NO: 11167 - DNA, 627 bp, synthetic construct
  misc_feature 1..627: note = source = /note="Description of Artificial Sequence: Synthetic coding sequence"
  source 1..627: mol_type = other DNA
atggccgatatgcagaatcttgtggaacgtttggagcgagctgttggacgtctcgaagccgtgagtcacacatctgatatgcataggggctatgctgacagcccttctaaggctggagccgctccatacgtgcaggcattcgattctctactggctggaccagtggctgagtatctcaaaatctccaaagagatcggtggcgacgtgcagaagcacgcggaaatggtccacacaggcctgaagttagagcgggctctcctggtgaccgcctcacagtgccagcagcccgcagaaaacaaactgtcagatctgctggcacccatttccgagcaaatcaaagaagtgatcactttcagggagaagaacaggggttcaaagctgttcaaccatttgagcgccgtttccgaaagcatccaggccctgggatgggtagcaatggcccctaaaccaggcccatatgtgaaggagatgaacgatgccgctatgttctatacaaatagggtcctgaaagagtacaaggatgttgataaaaaacacgtggactgggtcaaggcttacctttcgatctggaccgagctgcaggcttacatcaaggaattccacacaactggccttgcctggtcctag

SEQ ID NO: 11168 - DNA, 1482 bp, synthetic construct
  misc_feature 1..1482: note = source = /note="Description of Artificial Sequence: Synthetic coding sequence"
  source 1..1482: mol_type = other DNA
tctgaggccgtctacttaaatgactctacttatgatggccacacagtgggagggttgcagtatgggggtctgggtcaactcgccgatggggttgtgggactggacgactttcgcaagagccaggagttgagagtctggcctggttatgattacgtcgggtggtccaatcactcattctcctccggctacgtggagatggagtttgagttcgataggcttcgagctttccaggcaatgcaagttcattgtaacaacatgcacactttaggcgctcggttacctggcggagtcgaatgcaggttccgacgcggtccagccatggcatgggaaggtgagcccatgagacacaatcttggtggtaatctgggcgatccgagggcgagagctgtgtctgtcccactgggcggtagggttgcccgttttctacagtgtcgttttctatttgcgggaccctggctcctgttcagcgaaatctcttttattagcgacgtggtcaataacagctccccggcacttggaggtacttttcccccagcaccgtggtggccaccagggccacctccgaccaactttagttccctagaattggaacctcgaggacaacagcctgtcgctaaggccgaggggtcaccgactgccatcctgatagggtgtctggtggcaatcatcctcttgctactcttgattattgccttgatgttgtggcggctgcactggaggcggctgctgtccaaggtgttggaatcccaccctagaaccaggtcacccggattggttggcattaggcccactcctctgcctgtgtctcctatggccttacgctgctgctctccaatacagccaactgcttcgttttggccactaacacccgtaccactggaggcccgagctccacctcatcctcctggtcctaaccctcctaccccacgtggagtgaccggcggtaacacttatgctgtccctgccctgccccctggagccgtgggggacggcccacctagggtggattttccgcgttcaaggttgcgcttcaaggaaaaattaggtgagggccagtttggcgaagtccatctgtgtgaggtggactcacctcaggatctggtaagtctggattttccccttaacgttcggaaaggccaccctctgcttgtagccgtgaagatactcagacctgacgccactaagaacgctaggaacgactttctgaaggaagtgaagatcatgagccggctgaaagaccctaatatcatcagactgcttggggtctgcgtacaagatgacccattatgtatgatcacggactacatggagaacggcgacctgaatcagttcctaagcgctcatcagctcgaggataaagccgcagagggggcacccggagatggacaagccgcacaaggtcccaccatctcttatccaatgttgctgcatgtggctgcacaaattgcctctggaatgcgttatctggctacacttaactag

SEQ ID NO: 11169 - DNA, 2319 bp, synthetic construct
  misc_feature 1..2319: note = source = /note="Description of Artificial Sequence: Synthetic coding sequence"
  source 1..2319: mol_type = other DNA
atgcaatttcaactcacactcttccttcacttgggctggcttagctattcaaaggcccaagacgactgcaatagaggagcctgccatccaactacaggagatctgctggtagggcgtaatacacagttgatggcatcttccacctgtggcctgtcaagagcccagaaatactgcattctgtcatatctcgagggtgaacagaaatgcttcatttgtgatagtcgctttccatacgacccgtatgatcagcctaacagtcatacaatagaaaatgtgattgtgagcttcgagccagatagagagaagaagtggtggcaaagcgagaacggcctggatcacgtgagcatcagattggatcttgaggctctcttccggttcagccatctgatcctgaccttcaagacctttaggccagcagccatgctcgtggaacggagtacagattacgggcataattggaaagtgttcaagtactttgctaaggattgtgcgacatcttttcctaatattacaagcggtcaggcccagggcgtgggcgacattgtttgcgatagcaagtatagtgatatcgaacctagcactggcggtgaggtggttctgaaagtcttagacccttcctttgagatcgagaatccctactcaccttacattcaggacttggtgaccttaactaatctcagaatcaatttcaccaaattgcatacccttggtgatgccttattaggtagaagacagaatgactctctggataaatactattatgctctctatgagatgattgtcagaggaagctgtttctgtaacgggcatgcttctgaatgtcgacctatgcagaagatgagaggcgatgtttttagtccgcctggcatggtgcatggacagtgcgtctgccagcacaacaccgacgggcctaactgcgaaagatgcaaggattttttccaagacgctccatggaggccagctgcagacctccaggacaacgcttgccggtcttgtagctgtaactctcatagctcccgttgccacttcgatatgaccacctacttggcctccgggggacttagcggaggcgtctgtgaggattgtcaacataacactgaaggccagcattgcgacagatgcaggccactcttttaccgcgacccactcaagactatttctgacccgtacgcttgcattccctgcgaatgcgacccagatggcacgatctcagggggaatctgtgtatctcacagtgaccctgcactggggtcggtcgccggacagtgtctgtgtaaagaaaacgtagagggcgctaagtgtgatcaatgtaagcctaaccattacgggctctccgccacagatcctctgggctgccagccatgtgattgcaacccgctgggatccctgccgttcctgacatgcgacgtcgacacagggcagtgcctgtgtctgtcttatgtcacaggcgctcactgcgaagagtgcaccgtcggctattggggtttggggaaccacctgcatggctgtagtccgtgtgattgtgatatcggcggagcctactccaatgtgtgcagtccaaaaaatgggcagtgcgaatgtcgcccacacgtcaccggcaggtcctgtagcgaacctgccccaggttactttttcgcccctcttaatttctacttatatgaagccgaggaagccaccaccctccaaggattggcccctctgggaagcgaaacgttcggccagtctccagcggtacacgtagttctcggcgaaccggtacctggcaatccagttacatggactggtcctggattcgccagggttctgcctggcgcagggctgcggttcgctgttaataacatcccgttcccagtcgacttcactatagcgattcactacgagacccagagcgcagcagactggaccgtccaaatcgtcgtcaatccacccggtgggtccgaacactgcatccctaaaaccctgcaatcgaaaccacagtcatttgccctgccggctgcaacgcgtatcatgctcttgccaacgcctatctgcttggaacccgacgtgcagtatagtattgacgtctacttcagtcagcccctgcagggggagtcacatgctcacagccacgtcctcgtagacagtgccgcagtgcagtggcataatttaggcagccttcagcccccacctcccgaatgcaaacagttctcctgtttctcattccccagctcctgggactatcgccacccaccccctcaccttgctaacttttgtatctttagtcgcgacggggtgtcgccacattggcctggctggtcccaaactcccgatctccggtag

SEQ ID NO: 11170 - DNA, 1371 bp, synthetic construct
  misc_feature 1..1371: note = source = /note="Description of Artificial Sequence: Synthetic coding sequence"
  source 1..1371: mol_type = other DNA
atgggacgcgcaggagcggcagcggtcatcccgggactggcgctcctatgggccgtggggttggggagcgcagcacccagcccgcacctgcggctttcatttcaggagttgcaggcctggcatggcttgcaaactttttccctggagcgtacttgttgctatcaagcactgctcgtagacgaagaacgaggaagactgttcgtgggtgctgagaatcatgttgccagcctcaacctcgataacatttcgaaaagggccaaaaagttggcgtggcctgctccggtggagtggcgggaggaatgcaactgggcgggtaaagatatcggcactgaatgtatgaattttgttaagcttttgcatgcttataacagaacacacctcctggcctgtgggacaggcgcattccaccctacatgtgccttcgtggaggttggtcaccgggcagaggaacctgtgcttcgtctggacccaggtcgcatagaggacggtaaggggaaatctccatacgatccacgccaccgggctgcctccgtactggtcggggaagagctgtattctggagtggccgcagacttgatgggtcgcgattttacgatttttcgatccctgggtcagcgaccctcactacgtacagagccccatgatagtcggtggctcaacgaacctaaattcgtgaaagtcttttggataccagaatctgaaaatcccgacgacgataagatctatttcttctttagagagactgcggtggaggctgctccagctctcgggagactgtctgtgagcagagtgggacagatctgtcgcaacgacgtgggagggcagagatcattggttaacaagtggaccacatttctgaaagcccgactagtgtgttccgtccccggtgtcgaaggcgatacccactttgatcagctccaggatgtgttcttactgagttcccgagatcatcgaacgcccctgctctacgctgtctttagcactagcagctcgatatttcaggggagcgccgtttgcgtctactctatgaacgacgtgaggagagccttcctcggaccatttgcccataaagaggggccaatgcatcagtgggtttcgtaccaaggtcgggtgccttacccgagacaagcctgcgcacccgctcgcccactggcaccgtctgtgccacctaggaccagccagacaatgtcctcatcgctgcggggaacaacacctagctgtactaccctgtcatgtcccctgggtggggctctcttctcttacaagctcgagcctatcacccccagcctgaaacttcctcggacgggcttgcagcctctgacagatacgatgacaagcagcagcctcgcgcagactctagcgagatgttag

SEQ ID NO: 11171 - DNA, 333 bp, synthetic construct
  misc_feature 1..333: note = source = /note="Description of Artificial Sequence: Synthetic coding sequence"
  source 1..333: mol_type = other DNA
ctcttcatgctccataagatcgtgcaggtgtacaactccgacgtgatcgataagcaatccgcatccatgacctcagataatgccgacgataaagcagtgattatacttgttcccgtgcgcctcggaggagagaggactaatacagactatcttgagttcgtgaagggtatccttagtctcgagtactgcgtgggaatcataggaggaaaaccaaagcaatcttactactttgctggattccaggacgactctttaatctatatggaccctcattactgccagagctttgtcgacgtgagtattaaggacttccctctagaagtcatactgtag

SEQ ID NO: 11172 - DNA, 420 bp, synthetic construct
  misc_feature 1..420: note = source = /note="Description of Artificial Sequence: Synthetic coding sequence"
  source 1..420: mol_type = other DNA
atgggacccgaggccctgagctccctcttactgctgctgcttgtagcgagcggggacgccgacatgaagggacattttgacccggctaagtgtaggtacgctctggggatgcaggacagaacaatccccgattccgacattagcgcctcaagctcgtggagtgattcgacggccgcacgacatagccgtctggagtcgagcgatggagatggtgcctggtgccccgcagggtctgtgttcccgaaggaggaggaatatttgcaagttgatctacagcgcctacacttagtggccctcgtgggtacccagggtcggcatgcgggaggtcttgggaaggaattttcaagaagctaccgcctcagatactctcgggacgggaggagatggatggggtggaaggaccgctggggacaggaatag

SEQ ID NO: 11173 - DNA, 570 bp, synthetic construct
  misc_feature 1..570: note = source = /note="Description of Artificial Sequence: Synthetic coding sequence"
  source 1..570: mol_type = other DNA
atgctgggaatcacctcgtgcagtgatcagcaggccaaggaaggggaggggctggagggcagctcaaccggctccagctccggcaatcacggcggttccgggggtggcaacggtcacaagccaggatgtgagaagcccggaaacgaggcacgcggaagcggagagtcaggaattcagaatagtgaaaccagcccaggcatgtttaacttcgacactttttggaagaacttcaaaagcaagcttggtttcatcaattgggacgcaataaacaagaaccaggtgcccccaccatccaccagggctctcttgtactttagccgcctctgggaggacttcaagcagaatacccccttccttaactggaaggctattatcgaaggagcagacgcaagctcattacagaagagagcgggacgggatgatcagaactataactataatcagcacgcctatcccaccgcctatgggggaaagtatagcgtgaaaacccctgccaaagggggagtttctccctccagctccgcaagccgggtgcagccagggctcttgcagtgggtgaagttctggtag

SEQ ID NO: 11174 - DNA, 438 bp, synthetic construct
  misc_feature 1..438: note = source = /note="Description of Artificial Sequence: Synthetic coding sequence"
  source 1..438: mol_type = other DNA
atggccgatatgcagaatctagtcgagcgcttggaacgggctgtcgggcgtctggaggccgtctcacacactagtgatatgcaccgcggttacgctgattctccatccaaagctggcgcagccccttacgtgcaagcctatataaaggaattccataccaccggactagcctggagcaaaacaggacctgtcgccaaggaactctctggtcttccttcaggcccttcagctggatcttgtccccctccaccacccccttgccccccacccccacccgtatctaccattagttgctcttacgagtcagcgtctagatcttcgctgtttgcacagatcaatcagggcgaatctatcacccacgctttaaagcatgtcagtgatgatatgaaaacccacaaaaatccggcattgaaggcccagagcgggcctgttcggtag

SEQ ID NO: 11175 - DNA, 264 bp, synthetic construct
  misc_feature 1..264: note = source = /note="Description of Artificial Sequence: Synthetic coding sequence"
  source 1..264: mol_type = other DNA
tgtaagcgaaagccgtacctgctgccaagtattagagagggcgctcgtttgggcatacaggagtgtgggagtcagtttcggcatgagcggtggaactgtatgataactgctgctgcaacaacagcccctatgggggcaagccctttgttcggatacgagttgtcctcaggctgccgccaggtggacgtgtctcggttgccgctaccgagatcgtttcgccttctgtgctgcgagaacatgcttgagaatcatgtgtttttttag

SEQ ID NO: 11176 - DNA, 2535 bp, synthetic construct
  misc_feature 1..2535: note = source = /note="Description of Artificial Sequence: Synthetic coding sequence"
  source 1..2535: mol_type = other DNA
atggggcctggggcacctttcgccagagttgggtggccattaccgctcttggtcgtgatggccgcaggcgtggctcctgtatgggccagccatagtccgcatcttcctaggcctcatagccgggttccgcctcacccttcctccgagcgccgagccgtgtatattggagccctcttccccatgtccggcggatggccgggaggacaagcgtgtcagcccgcagtggaaatggccctggaagatgtcaattctcgaagagacattctgcccgactatgagcttaaactgatccaccacgactcaaaatgtgatcccggacaggcaacaaagtatttgtacgaactcctgtataatgatcccattaagattattctgatgccgggttgcagcagtgtctccacacttgtggccgaggccgctaggatgtggaaccttatcgtcttatcctacggatccagcagtccggcactgagcaacaggcagcgcttcccaaccttcttcagaacccacccatctgcaactttacacaacccgacaagagttaaactgttcgaaaaatggggctggaagaagattgcaacgatccagcagactactgaagtcttcacaagtacactcgacgacttagaagaacgcgtgaaagaagctgggatagagattacctttagacagtccttcttctctgaccctgctgtgcctgtgaagaacctaaaaagacaagacgcaaggatcattgtcggcttgttttatgaaactgaggcccgaaaggtgttttgcgaggtatataaggaacggctgtttggaaaaaagtatgtgtggtttctgattgggtggtatgcggataattggtttaaaatatatgacccttccatcaactgcacggtggacgagatgacggaagccgtcgagggccacatcactaccgaaattgtcatgctcaatccagcgaatactcgctcgattagcaacatgacgagtcaggagttcgtggagaaacttactaagaggcttaagcgacaccctgaagaaaccgggggttttcaggaggctccgctcgcatacgatgccatctgggcactggcccttgcactgaataagacctcagggggaggcggacggagcggcgtgcggctcgaagacttcaactacaataaccagacgatcactgaccagatctaccgtgccatgaacagcagctcctttgagggagtctccggacacgtggtgttcgacgccagtggaagtcgcatggcgtggactctcattgagcagctccagggaggatcatacaagaagatcgggtactatgatagcacaaaggatgacttatcctggtccaagaccgataagtggatcgggggttcgccccctgccgaccagaccctggtgatcaaaacgttccgcttcctctctcagaagctctttatatccgtgagcgtgctgtcatcactggggatagtgctggccgtggtctgtcttagttttaacatctataacagtcatgtgcggtacatccagaacagccagccaaacttaaataatctgaccgccgtgggatgctcattggccttggccgctgtattccctttggggctggacggataccatattgggagaaaccagtttccttttgtttgccaggccagactgtggcttctgggcctcggcttctcactggggtacggctctatgttcaccaagatttggtgggtgcataccgtgtttaccaaaaaggaggagaagaaggagtggcgcaaaactttagaaccctggaagctgtatgccacggtagggttgctagtaggaatggatgtacttactctggccatttggcagattgttgatcccctccacagaactattgagaccttcgcaaaggaagaacccaaggaagacattgacgtgtccatcctgccccagctggaacattgttcctcacggaaaatgaatacctggctcgggatcttctatggctacaaaggactcctgttactcctcgggattttccttgcttatgagaccaaaagcgtcagcactgaaaaaattaacgatcacagggccgttggcatggctatctataatgtggccgtgttatgcctcatcacagcacctgtgaccatgatactgtcatcccagcaagacgctgctttcgcgttcgctagtctcgcaatcgtgttctcaagctatataaccctggtggtgctgttcgttccaaaaatgcggcgactgatcactagaggcgagtggcaatccgaagcccaggacacaatgaaaaccggctcctctacaaataacaacgaagaggagaagtcaagacttctcgaaaaggagaatagagaacttgagaaaattatcgccgagaaggaagaaagagttagcgagctccggcaccagttgcagagccgtcagcaactgcgcagccggaggcatccaccaacccccccagagcctagcgggggactgcccagaggtccccctgagccaccagacagactctcatgcgatggctctcgcgttcacctgctctacaaatag

SEQ ID NO: 11177 - DNA, 2631 bp, synthetic construct
  misc_feature 1..2631: note = source = /note="Description of Artificial Sequence: Synthetic coding sequence"
  source 1..2631: mol_type = other DNA
atgggaccagaggcactttcgagcctgctgctcctgctgcttgtggcttcaggcgatgctgatatgaaaggtcactttgaccctgcaaaatgccggtacgctctcggaatgcaggacaggaccataccggactctgacatttctgccagctcgtcctggtctgactcaaccgcggctaggcactcccggctggaaagctccgacggtgatggtgcctggtgccccgcaggtagcgtctttcctaaggaggaagaatacctacaagtcgaccttcaaaggctgcacctcgtggcacttgtagggacacaaggaaggcatgctggaggtctcggtaaggagttttccagatcttatcgactgaggtatagtagagacggaagacgttggatggggtggaaggaccgctggggccaggaagtgatctcagggaatgaggatcccgagggcgtcgtactgaaggacctgggtccacctatggtcgcccgtctggtcagattttacccaagggctgacagggtcatgagtgtgtgtctgcgcgtagaactgtacgggtgtctgtggcgcgacggcctgttatcttacactgcacctgttgggcagactatgtatctatctgaagctgtgtacctgaatgattccacatacgacggtcacaccgtcggtggactgcaatacgggggtttgggccagctggcagacggtgtggtcgggctcgatgactttaggaagagtcaagagctcagggtttggccaggctatgattacgtgggttggtctaaccattcttttagcagtggttatgttgaaatggagtttgaatttgaccgactgagagcctttcaggctatgcaggtacactgtaacaatatgcataccctgggtgcaagactaccaggaggcgttgaatgtagattcagaaggggtcccgctatggcctgggaaggggaacccatgcgacataatctaggcggaaacctcggcgacccaagagctagagccgtatccgtaccattgggtggaagggtggccagatttctgcagtgccgattcttgtttgccggtccatggctgctgttcagtgagatttcatttatttcggacgtcgtgaacaattcaagtcctgctttgggaggtacattcccccctgcaccgtggtggccgcctggacctcccccaacgaacttcagctcgctcgagctggagcctcgtggacaacagcctgttgccaaggcagaggggtcaccaacggccatccttatcggttgtctggtcgctataattcttctgctcctgctgattattgcactcatgctgtggaggctccactggcggcgtctgctttccaaagcggaacgccgtgttttggaggaggagctgactgtccacctgagtgtcccgggagacactatcttaattaataataggcccggacccagagaaccccctccataccaagagccgcgaccaagaggaaaccctccacactcagccccatgcgtgcccaatgggtccgcctattcaggagattacatggaacccgagaagccgggagcccctctgttgcctcctccgccacagaactcagtgcctcactatgccgaggctgacatcgtcaccctacagggcgtgactgggggtaacacgtatgcagttcctgcgctgccgcctggcgcagtgggtgatgggcctccgagggttgattttcctcggtcccgtctgaggtttaaagaaaaactgggagaggggcagttcggcgaggttcacctgtgcgaggtcgattctcctcaggatttggtcagcctcgatttccctctgaatgtgcgaaaaggtcaccccctgctagttgccgtcaaaatcctgaggccagacgctaccaaaaacgccagaaacgacttcttgaaggaggtgaaaatcatgtcccggctcaaagatcctaacataatccggctccttggtgtgtgcgtgcaggatgatcctctgtgtatgatcacagactatatggaaaacggcgatttaaaccagtttctgtccgctcaccagctggaggataaggccgcagagggtgcacctggtgacggacaggcagcacaaggacctaccatcagttacccaatgctgctgcacgtggccgcacagattgccagtgggatgaggtacctggccactctcaattttgtacacagggacctggcaaccaggaattgcctggtgggagaaaatttcactattaaaattgccgacttcggaatgagtcgaaacttgtacgctggtgattactatcgggtccagggcagagctgtattacccatcaggtggatggcctgggaatgcatcctcatggggaaattcacaactgcatcagacgtgtgggcatttggtgtcacactgtgggaagttcttatgctctgtagggcacagccattcggacagttgaccgacgaacaggtgatcgagaacgctggcgaattcttccgggaccagggaaggcaggtatatctgagtcggcctcccgcatgtcctcagggcctatacgagttaatgctgaggtgctggtctcgggaatcggagcagcgacctccatttagccaattgcaccggtttctggccgaggacgcattgaacacggtttag

SEQ ID NO: 11178 - DNA, 942 bp, synthetic construct
  misc_feature 1..942: note = source = /note="Description of Artificial Sequence: Synthetic coding sequence"
  source 1..942: mol_type = other DNA
atgtccgatctgctccttttgggtcttatcggtggcctaactctgttgttgcttctgactctgctcgccttcgctggatacagcggtttactggccggagtggaggtgagcgccggtagccctcccatccggaatgtcacagtggcttataagtttcatatgggtttgtacggagagactggtcgattgtttaccgaaagctgttcaatcagcccaaagctgcggtctatcgcagtgtactatgacaatccgcacatggtgccaccagacaagtgtaggtgcgccgtgggatctatcttgagcgaaggggaggagagtccctcacccgagctgatcgacctttatcagaagttcggttttaaggtgttctcattcccagcaccctcgcatgtcgttactgccacttttccttacacgactattctgtcgatctggctggcaacccggagagtacaccccgctctggatacatacatcaaagagcgaaaactgtgtgcttacccacgcttagagatttaccaagaggaccaaatccatttcatgtgtccattggctcgtcagggtgatttctacgtgccagagatgaaggaaaccgaatggaaatggcgcggtcttgtggaggctatcgatacacaggtagacggcaccggagcagacacaatgtctgatacctcatcagtgtctctagaagtcagtcccggttctcgagaaaccagcgccgctacactctcccccggtgctagctctcgcggttgggatgacggggatacccgcagcgagcactcttactccgagagcggagcgagcgggtcctccttcgaagagttggatctcgagggcgagggtcctctgggggagagccggttagatcctggcactgagccacttgggaccaccaaatggctgtgggaacctaccgcccctgaaaagggaaaggagtag

SEQ ID NO: 11179 - DNA, 843 bp, synthetic construct
  misc_feature 1..843: note = source = /note="Description of Artificial Sequence: Synthetic coding sequence"
  source 1..843: mol_type = other DNA
atgaagacctttacgtggacgcttggggtgcttttttttctacttgttgatacaggccattgccgcggtgggcaatttaaaattaagaagatcaatcaaagaagatacccgagaacgatcaaggacatgatcactcggatggacctggagaatctgaaggacgttctgagcagacagaaacgagagatcgatgtcctgcaactggtcgttgatgtggacggcaatatcgtgaatgaggtgaaactgctgcggaaggaaagtcgcaatatgaattcaagggtaacacagctgtacatgcagttattgcatgagatcattcgcaagcgcgataattccttagagctgtcacagttggaaaataaaattttgaatgtcactaccgagatgctgaagatggccacccgctaccgcgaactggaggtgaagtacgctagtctcacagacctagtgaataatcagtccgttatgattacactcctggaggagcagtgccttcgcattttctctcggcaggacactcacgtcagccccccactggtgcaggtggtcccccaacatataccgaactcgcagcagtataccccaggcctgctcgggggaaatgagatccaaagggatcccggatatccaagggacttgatgccaccccctgatctggctaccagccccaccaagtctccttttaaaatcccacctgtgacctttattaacgaaggacctttcaaggattgtcagcaggcgaaagaggccggtcactccgtgaacgggattttctgggcagaatatagggggggatcctattcgctgcgagctgtacagatgatgatcaagcctattgattag

SEQ ID NO: 11180 - DNA, 522 bp, synthetic construct
  misc_feature 1..522: note = source = /note="Description of Artificial Sequence: Synthetic coding sequence"
  source 1..522: mol_type = other DNA
atgcactggaagatgcttctgctgctgttgctgtattacaatgcagaggccagcatgtgtcataggtggagcagggctgtgctctttcccgctgcacacagacccaaaaggagtagttctcttcccctcaatccagtgctgcagaccagcctggaagaagtggagctcctctacgagttcctgctggcagagctggagatctcccctgatctgcagatatctatcaaggacgaggagttagctagcttacggaaagcgagcgactttaggaccgtttgcaataatgtaattccaaaaagcattccggacattcgcaggctgtctgcttcactttccagtcacccgggaatactcaagaaggaggacttcgagagaacagtcctgaccctggcttacactgcttaccgcactgccctgtcccatggccatcagaaggacatttgggcccaaagcctggttagcctgtttcaagcactcaggcacgatctgatgcgctcctcccagccaggggtacccccttag

SEQ ID NO: 11181 - DNA, 309 bp, synthetic construct
  misc_feature 1..309: note = source = /note="Description of Artificial Sequence: Synthetic coding sequence"
  source 1..309: mol_type = other DNA
atggagcggggagccggagcaaaattgcttcctttgctgctgcttttacgcgctaccggctttacatgtgctcagacagacggtcgcaacggttatacagccgtcattgaagtaacttcgggcggtccctggggggactgggcgtggcctgagatgtgtcccgacggtttcttcgcttccgggttttctctgaaagtcgaaccaccacagggtatccccggtgacgataccgcactgaacggtattaggctgcactgcgcaagaggtaatgtgcttggaaacacacatgtgctcggtagaatggagtag

SEQ ID NO: 11182 - DNA, 351 bp, synthetic construct
  misc_feature 1..351: note = source = /note="Description of Artificial Sequence: Synthetic coding sequence"
  source 1..351: mol_type = other DNA
atggccgctggtagcgctccgatgcagttgcacctccgcgcaacaatccgtatgaaagacgggttatgtgtgccccgaaagtggatctaccatctcacggaaggaagtacagacttacggaccgaaggtaggcccgatatgaagactgagctgtttagcagctcctgccccggtgggattatgctcaacgagacaggacagggttatcaacgtttcttgctctacaacaggtcaccccacccacccgaaaagtgcgtggaggagtttaaatcgctaacatcgtgcctagattccaaagcctttctgctaacacctagaaatcaggaagcctgcgagctgtcaaacaactag

SEQ ID NO: 11183 - DNA, 1137 bp, synthetic construct
  misc_feature 1..1137: note = source = /note="Description of Artificial Sequence: Synthetic coding sequence"
  source 1..1137: mol_type = other DNA
tgatactctggcgactatatggaacctgagaagccaggggcacccctgctgcccccaccgccacagaattcagttccacactatgccgaggccgatatcgtgacactgcaaggagttaccggcggtaacacttatgcggttcccgctttaccccctggagctgttggcgacgggccaccacgagtggacttcccccgaagcaggttgcgtttcaaggaaaaactgggcgagggacaatttggggaggtgcacctgtgtgaggtagatagccctcaggatctcgtgtctctggacttccccctcaacgtccgcaagggacacccattgcttgtagctgtcaagatcctgcgaccagatgcaaccaaaaatgcaagtttttccctcttctcccggaatgattttctgaaagaggtaaaaatcatgagccgcttgaaagatcccaatattattagactgttgggggtgtgcgtgcaggatgaccccctatgcatgatcacagactacatggagaacggagatttgaaccaattcctgagtgcacatcagctcgaggacaaggccgctgagggcgcacctggtgacggccaagccgctcagggaccaacaatttcctacccaatgctacttcacgtggcggcacaaatcgcctctggtatgaggtacctggccacgctgaacttcgtgcacagggatttggccactagaaattgtcttgtgggagaaaacttcactattaaaatagcagatttcggaatgtcccgtaatctatacgccggtgattactacagggtgcaagggagagctgtgttgcctatcagatggatggcatgggagtgcattttgatgggcaagtttactacagcatcagacgtgtgggccttcggcgtcacattgtgggaagtgctcatgctgtgcagggcccagccatttggccagctgaccgacgagcaagtgatcgaaaatgcaggcgagttctttagggaccaaggaaggcaagtttacctcagtagaccccctgcatgcccccaggggttgtatgaactgatgctgcgatgttggagccgggagagtgagcagcggcctcccttcagtcagctccatcgcttcctggccgaggatgccctgaacacagtatag

SEQ ID NO: 11184 - DNA, 942 bp, synthetic construct
  misc_feature 1..942: note = source = /note="Description of Artificial Sequence: Synthetic coding sequence"
  source 1..942: mol_type = other DNA
atgagtgacctgctgcttctggggctgatcggcggtcttaccttgctgctcctactcacattgctcgccttcgccggatattctggattacttgccggtgtggaggtgtcagccggatctcctcctattcggaacgtgacggtggcatataaatttcatatggggctttatggtgagacgggcagactcttcacagaatcttgcagtatctctccaaaactgagatctattgccgtgtactatgataatccacatatggttcccccagataagtgtcgctgcgccgtgggctctatcctgtccgagggcgaagaatcccccagccccgaactcattgatttatatcagaaattcggcttcaaggtcttctcctttcctgctccgagccacgtggtgactgctacgtttccatacactactattctgagtatttggctggctactagaagggtacatcccgctctcgatacgtacatcaaagagaggaaattatgtgcctatcctaggctggagatctaccaggaggatcaaattcattttatgtgccccctggcacgtcaaggcgacttttacgttcctgaaatgaaggagactgagtggaagtggcggggacttgtagaagctatcgacacccaggtggacggaacgggggcagacactatgtctgatacctcctctgtgagtctagaggtgtctccagggtcacgcgaaacgagtgccgcaactctgagccccggagctagctcaaggggctgggatgacggcgatacccggagcgagcattcctacagcgaatctggggcaagtgggagcagtttcgaagagttggatctggaaggggaggggccactgggggaatcccgcttggatccgggtactgagcccctgggtaccaccaagtggctttgggagcccaccgcccctgagaagggcaaggaatag

SEQ ID NO: 11185 - DNA, 420 bp, synthetic construct
  misc_feature 1..420: note = source = /note="Description of Artificial Sequence: Synthetic coding sequence"
  source 1..420: mol_type = other DNA
atgggtccggaggccctgagtagcctgctgttactgctgcttgtggcctccggggacgcggatatgaagggccattttgatccagctaagtgccgttatgcactgggtatgcaggacaggactattcctgattctgacatctctgccagctctagctggtctgatagcactgctgccaggcatagtagacttgaatctagcgatggcgacggtgcatggtgtccggcaggcagtgtgttccccaaagaagaggagtatctgcaggtggatctccagagactgcacttagtcgctctcgtcgggacgcaaggacggcatgccggagggctggggaaagaatttagtcggtcctatcgcctccggtatagccgagatgggaggaggtggatgggatggaaggatcgatggggccaggagtag

SEQ ID NO: 11186 - DNA, 342 bp, synthetic construct
  misc_feature 1..342: note = source = /note="Description of Artificial Sequence: Synthetic coding sequence"
  source 1..342: mol_type = other DNA
atggacaacgtacagccaaaaataaagcaccgaccattctgcttttccgtaaagggacacgtcaaaatgttgagattggctctgaccgtgacaagcatgactttttttatcatagcccaggcccctgagccttacattgtcattactggatttgaggtcactgtgatcctattctttattctgctctatgtgctgcggttggacaggctgatgaagtggctgttctggcccctcttagatatcatcaactcactggtgacaaccgtcttcatgctgatagtatccgtactggcccttataccagagactacaactctcacggttggaggtgggctattctag

SEQ ID NO: 11187 - DNA, 465 bp, synthetic construct
  misc_feature 1..465: note = source = /note="Description of Artificial Sequence: Synthetic coding sequence"
  source 1..465: mol_type = other DNA
atgttcggttggggggactttcatagcaacatcaagaccgtcaaacttaatctactgatcaccggcaagatcgtagaccacggcaacggcacattctccgtctattttcggcacaatagcaccggtcagggcaacgtttccgtatccctcgtgcctccaaccaaaatcgtggagttcgatctagcacagcagaccgtgatcgatgctaaggattctaagtcctttaattgcaggatcgagtacgagaaagtggacaaggccaccaaaaacacactctgcaactacgatccgtccaagacatgttaccaggaacagacacagagtcatgtatcctggctctgtagcaagccattcaaagtcatctgtatttacatcagtttctacagcacagactacaaactcgtgcaaaaggtatgcccagattacaattaccatagcgatactccatatttcccatccggctag

SEQ ID NO: 11188 - DNA, 531 bp, synthetic construct
  misc_feature 1..531: note = source = /note="Description of Artificial Sequence: Synthetic coding sequence"
  source 1..531: mol_type = other DNA
atggccgacatgcagaatctggtggaaaggctggagcgggctgtgggtcgccttgaggctgtgtcccacacctcagatatgcatcgaggatacgctgattcgccctcaaaagctggtgcagcaccctacgttcaggcatttgatagtctgctggccggtccagtggccgaataccttaaaatctctaaggagattggcggagacgtccagaagcacgccgagatggttcatacaggcctgaaactggaacgcgcattgcttgtgactgcgagccagtgtcagcaacccgctgagaacaagctttctgacctgctggcaccaatctctgaacaaataaaggaggttatcacttttagagaaaaaaataggggatctaagctctttaatcacctctctgctgtgagcgaatccatccaagccctggggtgggtcgccatggcacccaaacccggtccgtacgtcaaggagatgaatgacgccgcaatgttttacaccaatcgagtgctaaaagagtacaaggatgtcgattag

SEQ ID NO: 11189 - DNA, 2535 bp, synthetic construct
  misc_feature 1..2535: note = source = /note="Description of Artificial Sequence: Synthetic coding sequence"
  source 1..2535: mol_type = other DNA
atgggcccaggagccccatttgcccgtgtcggctggcccctgcccctgctggtggtgatggcagccggagtggctcccgtgtgggccagtcatagtccacacctacccaggccccactctcgagtcccgcctcatccatcgagtgaaaggagggcagtctatatcggtgctctctttcctatgtccggcggttggcctgggggtcaggcatgccaaccagcagtcgaaatggctttagaggacgttaacagcaggcgggatattctgcccgattacgaactcaaactgatccatcacgacagcaaatgcgatccgggtcaagcaacgaaatacctgtatgagcttctatacaatgaccccatcaagatcattctgatgcccggatgcagcagcgtatccacgctagttgcagaagctgcgagaatgtggaacctgatcgttctcagctatggatcatcttccccagcactgtctaaccgccagagattccctacgttttttcgcactcacccctcggccactctgcacaacccaacccgagtcaaactgttcgaaaagtggggttggaagaaaatcgccaccatccagcagaccacagaagtgttcacaagtactcttgacgatttggaggaaagggtcaaagaggccggaatcgagattacattcagacagagtttcttctctgatcctgcagtgccggtgaagaacttaaagcggcaggatgcacggatcattgtgggactcttctatgagaccgaagcacgcaaagttttctgtgaggtctacaaggaacgcctcttcggtaaaaaatatgtgtggtttctgattggctggtatgcggataattggttcaaaatttatgatccttccatcaactgtactgtcgacgagatgaccgaggccgtggagggtcacattactacggagatagtgatgctgaatcctgcgaatacccgctcaatcagcaatatgacctcacaagaatttgtggaaaaattgacaaaacggctgaagcgtcatcccgaagagacaggtggctttcaagaggcgcctctcgcctatgatgccatctgggctctggccttggccctgaataagacatccgggggaggaggcagaagtggcgtccggcttgaggattttaattataacaaccagaccatcacagatcagatctatagggccatgaactcctcctcctttgagggggtctctggtcatgtcgtcttcgatgcttctggatctcggatggcctggactctgatcgagcaactccaggggggatcctacaagaaaattggttactatgattccacgaaggatgatttgagttggagcaaaactgataagtggattggcggttcacctcccgctgaccagacgttagtcattaagacgttcagattcctgtcgcagaagttattcatttccgttagcgttttgagttccctaggaatcgtgctcgcagtggtgtgcttatcattcaacatttacaacagccatgttagatacatacaaaacagccagcccaatctaaacaacctcacagcagtgggttgtagcctggccctggctgctgtctttcctctcggcttagatgggtatcacatagggagaaatcagttcccattcgtctgtcaggccagattgtggcttctgggtttagggttctctctcggctatgggtccatgttcacgaagatctggtgggtgcataccgttttcactaaaaaagaggagaaaaaggaatggaggaaaacactggagccatggaagctctacgccacagtggggctgctggtcggcatggatgtcctcacacttgccatttggcagattgtggaccctctccatcggaccattgaaacttttgcgaaggaggagccaaaggaggacattgacgtgtctattctgccccagctcgagcattgctcttccaggaagatgaacacctggctcggcatattctacggctataaggggcttctgcttttattgggaatattcctcgcctatgaaactaaatccgtatctacagagaagatcaatgaccaccgcgctgttggcatggccatctacaacgtcgctgttctgtgtctgattacagctccagtgactatgatcttgagcagccagcaggacgctgccttcgcgttcgcctcattggccattgtcttctcgtcttatattacattggttgttctatttgtccctaagatgcgacgtctgatcactcggggagagtggcagtccgaagcccaggatacaatgaaaacagggagcagcaccaataacaacgaagaggagaagagccgtctgttggagaaggagaatagagaactcgagaagatcatcgccgaaaaagaagagcgcgtgtccgagttgaggcatcagttacagagccggcagcagctcaggtcgaggcggcacccaccgaccccacccgaaccgtctgggggacttccaagagggccaccagagccacccgatcggcttagttgtgatggcagcagggtgcacctgctctacaaatag

SEQ ID NO: 11190 - DNA, 2055 bp, synthetic construct
  misc_feature 1..2055: note = source = /note="Description of Artificial Sequence: Synthetic coding sequence"
  source 1..2055: mol_type = other DNA
tgacctcgcagcagcacacacgtcccactggtgttacctctgctagtgttgctgctgctggctcctgcacggcaggctgccgcacaacggtgcccgcaggcctgtatttgtgataactctcggcgtcatgtcgcttgccgttaccagaacttaaccgaagtgcctgatgctatccctgagctgactcaaagactcgaccttcagggaaatctgctgaaggtgatcccagccgctgcttttcagggagttccgcatcttactcacctcgatcttcggcattgcgaggtcgaattagtggctgaaggagcattccgcggtttggggcgtctcttgttgttaaacctcgcctcgaatcacctgcgcgagctgcctcaagaagctctggatggattgggttccctgaggaggctagagctcgagggtaacgccttggaggagttgcgccctgggactttcggggctctgggcgctcttgccacacttaatctagcacacaatgctttagtctaccttcctgctatggcttttcagggcctgctgagagtgagatggctcaggctctcgcataacgcccttagtgtcttagcacctgaggccctggctgggctgcccgcattacgccgactgtcgctacaccataacgagctgcaggccctgccaggccctgttctttcccaggcacgcggtcttgcacgcctagagctcggtcacaatccactcacctacgcgggtgaagaagacggtctggccctcccaggcctgagggaactccttctggacgggggagccctgcaagccctgggcccaagggcctttgcccattgtccacgcctgcatacactggacttacgtggaaatcagctcgatacattgcctcctctgcagggccctggccagctccggaggctgaggctccagggcaacccattgtggtgtggttgccaggctaggccattgctcgaatggctggcgagggctcgggtgagatccgacggagcctgccaggggcctcggcgattgaggggagaggccctggatgctctacggccttgggatctaagatgtcctggagacgcggctcaggaagaggaagagctggaggagcgggcagtcgccggaccaagagctccgcctcggggaccccctcggggaccaggcgaagaacgtgcagttgcgccatgcccaagggcctgcgtctgtgtacctgaatctcgacattcctcttgcgaaggttgcgggctccaggctgtccccagggggttcccttccgacacccagctgctagaccttcggagaaaccactttcccagcgtgcctcgagctgcttttcctgggttgggtcacctggtaagtttgcacttgcagcactgcgggatcgccgagctggaagccggagctctggccggactggggagactgatctatctgtacctatctgacaaccagttggccggtctgagcgccgctgctcttgagggcgcaccacgactggggtacctttacctcgaacgcaatcggtttcttcaggtacctggcgcagcactgcgcgctctccccagtctgttctcattacacttgcaggacaatgctgtcgatcgactggcacccggagacctcggccgtactagggcccttcgctgggtgtacttaagtggaaataggattactgaagttagtctgggcgctctcggcccagccagagaacttgaaaaactgcatctggatcgtaatcagttacgagaggtcccaactggagccttggaggggttgcccgcactgctggaacttcaactctccggcaacccgttgagggccctgagagatggagccttccaaccagtgggtaggtcattacagcacctgtttctaaatagctcgggtctggagcagatttgcccaggcgcattttcaggtctgggacctggtttgcagagcctgcatctgcaaaagaaccagctcagggccctgcccgctctaccaagtgccaggaggacccccatcaaaggccgacagtgcggggcagacaaagtggggaaagagaagggcagattatag

SEQ ID NO: 11191 - DNA, 2259 bp, synthetic construct
  misc_feature 1..2259: note = source = /note="Description of Artificial Sequence: Synthetic coding sequence"
  source 1..2259: mol_type = other DNA
atggcgagacacctactcttgcctctggtcatgctcgtgattagtcccatcccaggagccttccaggattctgctctgtctcctacacaggaggagccggaggacctggactgcggacgtcccgaacccagcgctagaatagtgggaggttcaaatgcacagccgggaacatggccatggcaagtctcactgcaccatggtggaggacatatctgcggaggcagtcttatagccccaagttgggttctgtcggcagcacactgtttcatgactaatgggacccttgaaccagccgctgagtggagtgtgcttttgggggttcacagccaagacggccctctcgacggcgctcacactagagcagtcgccgcaatagtagtgcctgccaactattcccaggtggagttgggcgcagacttagctttgctgaggttggcttcaccagcgtccctgggcccagccgtgtggcccgtgtgtctgcccagagcatcgcacagatttgtccacgggactgcttgctgggccacagggtggggagatgtccaggaagctgatccactgcctctgccctgggtgctccaggaagtggagctgcggttgttgggggaagccacatgccaatgcctctactcgcagcctggccctttcaacctgaccctgcagattttgccaggcatgttgtgtgctggctaccccgaaggaagacgcgacacatgccagggcgactccggcggtcctctggtgtgcgaggaaggaggacggtggtttcaggcgggtattacctcgttcgggttcgggtgcggacgaaggaatcgacccggagtcttcactgcggtagcgacttacgaggcatggattagggagcaggtgatgggcagcgaaccaggtccagcgtttcctacacagccccaaaagacccagtccgatccccaggagcctcgggaggagaattgtacgatcgccctgccagagtgtggaaaggctccaagaccaggtgcctggccttgggaagcacaggtaatggtgcccggatccaggccatgtcatggagccctggtaagcgagtcctgggttctcgcaccagcctcctgcttccttgaccctaatagttcagattcccctccgagggatctagacgcttggagagtgctcttgccctcgcgccctagggcggagcgtgtagccagactagtgcagcacgagaacgcgtcttgggacaacgccagcgacctggcactgctccaattgagaacgccagtaaacctctccgccgctagccggccagtctgccttccacaccctgaacactactttctccctggcagccggtgtaggttggcgcgatggggcaggggcgagccagcgctagggccaggtgccttactcgaagccgagcttctgggcggttggtggtgccactgtttgtacggcaggcaaggagccgctgtgcctctgcccggtgatccgccacacgccttgtgcccagcttaccaagagaaggaagaagtgggaagttgctggaacgatagccggtggtcactgttgtgccaagaagagggtacgtggtttctggcaggtatcagggatttcccgtcaggctgtctgagacccagggctttcttcccactgcaaactcacggaccttggatttcacatgttacgagaggagcctacctcgaggaccaattggcatgggattggggcccagatggcgaagagaccgaaacccagacttgccctcctcacactgagcatggtgcttgtggtctaaggctcgaagcagcccctgttggcgtgttgtggccctggcttgctgaggtacatgtcgcgggagacagagtatgtacaggaattctgctggcccctgggtgggttctcgctgcaactcactgcgtgctgaggcctggaagcaccacagtaccgtacatcgaggtctacctaggtagagcaggtgcatcatccctcccacagggccatcagatgacatccgcacctccccttctatgccaaatgaccgagggctcgtggatcctcgtgggaatggccgtgcagggatcacgagaattgtttgccgcaattgggcctgaggaagcctggatcagccagaccgttggcgaagccaactttctcccccctagcggttcaccacactggcccactggcggatccaatctttgcccccctgagctggctaaagccagcggctcgccccatgctgtttactttctgcttctcctgacgttgctgatacagagctag

SEQ ID NO: 11192 - DNA, 453 bp, synthetic construct
  misc_feature 1..453: note = source = /note="Description of Artificial Sequence: Synthetic coding sequence"
  source 1..453: mol_type = other DNA
atgcgctttatggcgggtccagcgggaagccagtcactggggccactctgttttcactcttcaccacaggccctctacaccgtattgctgattgtactggttatgatgtcactagtgtttggcaaatttgttcctgtgaactgggagcctccccagccattgccatttcccaagtatctgagatgttacaggtgtctgctggaaactaaggaattgggctgccttctcggctccgatatttgtttaacccctgccggttcgtcttgtattactctgcacaaaaagaactcctcgggtagcgacgtgatggtgagtgactgtaggtccaaggagcaaatgtctgactgctcaaataccagaacctcaccagtatccggcttctggattttcagtcagtattgttttttggatttttgcaacgacccccaaaaccgcggtctatacacaccctag

SEQ ID NO: 11193 - DNA, 1161 bp, synthetic construct
  misc_feature 1..1161: note = source = /note="Description of Artificial Sequence: Synthetic coding sequence"
  source 1..1161: mol_type = other DNA
atgaagttccaggggcctcttgcctgcctgctgctcgccctttgtctgggctcaggcgaggccggacccttacaaagcggggaagagtccacaggcaccaacatcggagaagcgctgggacatggcctgggcgacgcactgagtgagggagttggaaaagctatcgggaaggaggcgggaggagctgccggtagtaaggtgagtgaggccctcggccagggaacccgcgaagcggtcgggactggtgtgcgacaggttccaggcttcggcgtggccgacgccctggggaatcgagttggcgaggcagcccatgccctgggaaacactggccacgaaattgggcgacaggccgaggacgtcatccggcatggcgcagacgccgttcgcggatcttggcagggagtccccggacataacggcgcatgggaaacatctggcggtcacgggatcttcggttctcagggtgggttgggaggacagggccaggggaatcccggaggactggggacaccttgggtgcacggttatccagggaactctgccggatcatttgggatgaatccccagggggctccgtgggggcaggggggtaacgggggtcctcccaattttggcaccaacacacagggcgctgtcgcgcagcccggatacggaagtgttagagcctctaatcagaatgagggctgtaccaatcctcccccatctggttctgggggtggaagtagcaacagcggcggaggatccggtagccagtcaggctcatcagggagtgggtcaaatggggacaacaataacggctctagctcgggaggcagttcaagcggctcatcctccgggggaagctccggtgggtcaagtggcggatcatctggtaactctggtggctctcggggagactcaggtagtgagagctcttggggctccagtacgggctctagtagtgggaaccatgggggaagtggcggaggcaatggacataagccagggtgcgagaagccaggaaatgaagccagggggtctggagagtcagggatccagaatagcgagacatccccgggtatgtttaatttcgatacgttctggaagaattttaagtccaaactcggatttattaactgggatgccatcaacaaagaccagcggagtagtagaataccttag

SEQ ID NO: 11194 - DNA, 1995 bp, synthetic construct
  misc_feature 1..1995: note = source = /note="Description of Artificial Sequence: Synthetic coding sequence"
  source 1..1995: mol_type = other DNA
atgaaaaccggactgttctttttgtgtttactgggtaccgcagccgctatacccaccaacgcacgtttgctgagtgatcattccaagccaactgctgagaccgtggccccagataacacagcaatcccttccctgagagctgaagctgaggaaaatgaaaaggaaacggctgtttcaaccgaggacgattcacaccataaggcggagaagagctctgttctaaagtccaaagaagagtcccacgaacagtcagctgagcagggtaagtcctcctcccaagagctcggcctgaaggatcaggaggactctgatggccatctctcagtgaatcttgaatatgctccaaccgaaggcaccctggatatcaaggaggacatgtctgagccccaggagaagaaactgtccgagaacacagacttcctggcgccaggggtgtctagctttaccgatagcaaccagcaggagagcatcactaaacgggaggagaaccaggagcaacctcgcaattactctcatcaccagctgaatcgctcctccaagcatagccaaggactgagagaccagggcaaccaggaacaagacccaaacatctctaacggtgaggaagaagaggaaaaagagcccggtgaggtgggcacccacaacgacaatcaggaacggaaaaccgagttaccgcgtgaacacgccaattcaaagcaagaggaggataacacacagagcgacgatatcctggaagaatctgatcaacccactcaagtctcaaagatgcaggaggacgagtttgaccaggggaaccaggaacaggaggacaacagtaatgcagaaatggaagaagaaaacgcgtctaacgtgaacaagcacatccaggagaccgagtggcagagccaggaaggcaaaacaggtttggaggccattagcaaccacaaggaaacggaggagaagacagtctccgaagccttgctcatggaaccgacagatgacggtaacacaacgcccagaaatcacggcgtggatgacgatggtgatgatgatggcgacgatggcggaacagacggccctcgtcactctgcctctgacgactatttcattccttctcaggccttcttggaggctgagcgggcacaatccatagcatatcaccttaaaatagaggagcaacgcgagaaggtgcatgagaatgagaacatcggcactaccgaacctggggaacatcaggaagccaaaaaagcggagaattctagcaatgaggaggaaacttcaagcgagggcaacatgcgagtccacgcagttgatagctgcatgagttttcagtgtaaaaggggccacatctgcaaggccgatcagcaaggaaaacctcactgcgtgtgtcaggaccctgtgacctgtccaccaaccaaaccgcttgaccaagtatgcggcaccgacaatcagacatacgccagtagctgtcatctcttcgcaaccaaatgtcggctggagggaactaaaaaggggcatcagttacagctggattacttcggtgcgtgtaaaagcatccccacatgtaccgatttcgaagtgatacaatttcctctccgcatgcgagattggttgaaaaatattttaatgcagctgtacgaagccaactccgagcatgccggatacctaaacgagaagcagcgaaataaggtcaagaagatttatctggatgagaagcgattactcgccggagaccatcctattgatctcctgctacgtgattttaagaagaactatcacatgtatgtttaccctgtgcattggcagttctctgagcttgatcagcatcctatggaccgcgtactgacccacagcgaactggctccgttgcgtgcgagtctggtccccatggagcactgcatcactagattctttgaagagtgcgatccgaataaggacaagcatataacgctgaaggagtggggccattgctttgggatcaaggaggaggacattgacgaaaatctcctgttctag

SEQ ID NO: 11195 - DNA, 420 bp, synthetic construct
  misc_feature 1..420: note = source = /note="Description of Artificial Sequence: Synthetic coding sequence"
  source 1..420: mol_type = other DNA
atggggcctgaggctctcagttccctgcttctcttactgttagtggcttccggcgacgcagacatgaaaggacacttcgatcccgcaaaatgccgctacgcccttggcatgcaggacaggaccatcccggactctgacataagtgcctcatcttcttggagcgacagtacagctgcacgccactcccggttagagagctcggatggcgacggcgcttggtgccctgctggctcagtgtttcctaaggaagaagaatatttacaggtagatcttcaacgcctgcaccttgtggcccttgtgggtacccagggcaggcacgcgggtggactcggcaaggaattctctcgatcatatcggctgcggtatagtcgggacggtcggagatggatgggctggaaggaccgctggggccaggaatag

SEQ ID NO: 11196 - DNA, 285 bp, synthetic construct
  misc_feature 1..285: note = source = /note="Description of Artificial Sequence: Synthetic coding sequence"
  source 1..285: mol_type = other DNA
atgcaacactctttggttttcttctttgcggtgattctgcacctgtcacatttactgcaccttgacgcatctatccacccattccggctgccatttagcagtaagcctttcctcctgatccctatgagcaacactacgctgcctcatactgcctggcccttgtcatttctgcatcagacagtgtcaacactgaaagcagtggctgtgacccattctctctggcacctgcaaatcccggtggactgccaagcctgcaatcgtaagagtaagaaaatttattgttag

SEQ ID NO: 11197 - DNA, 699 bp, synthetic construct
  misc_feature 1..699: note = source = /note="Description of Artificial Sequence: Synthetic coding sequence"
  source 1..699: mol_type = other DNA
atgctgccaaagtctaggagagcgctgactattcaggagatagctgccttagccagatcatccctccacggcatttctcaggtcgtgaaagatcatgttacaaagcccaccgcaatggcacagggcagggtcgcacacctgatcgagtggaaggggtggtcaaaaccatctgattcaccagctgcactagaaagcgcgtttagctcttacagcgatctgtctgagggggaacaggaagctagatttgccgctggagtggcagagcagttcgcaatcgcagaggcaaaattacgcgcttggtccagcgtggatggcgaggatagcacggatgactcatatgacgaggactttgcgggagggatggatacggacatggctgggcagttgccactgggccctcacctgcaggacctgtttacagggcacaggttttccagacctgtgcggcagggatcggtggagcctgagtccgactgtagccagaccgtatcaccagatacgttgtgttcctcgctctgcagtttagaagacggcctgctcggcagcccagcacggctggcatcccagctacttggggatgaactgctgttggccaagttgcccccaagccgcgaaagcgcttttcgctcgctggggcctctcgaagcccaggattccctttataatagtccgctgaccgaaagctgtctgagtccatag

SEQ ID NO: 11198 - DNA, 2631 bp, synthetic construct
  misc_feature 1..2631: note = source = /note="Description of Artificial Sequence: Synthetic coding sequence"
  source 1..2631: mol_type = other DNA
atgggccctgaagctctgtcgagtctcctactgctgctgctcgtcgcttcaggggacgccgatatgaaaggacactttgatcctgctaagtgccgctacgccctggggatgcaagacagaaccatacccgacagcgatatttccgcatcttcttcttggtccgacagtaccgcagctcgacactcaaggctcgaatctagtgacggtgatggcgcatggtgtcccgcaggttctgtattccctaaggaagaggaatatctgcaagtagatctacagaggttacatcttgtagcacttgttggaactcagggacgccacgctgggggattaggcaaagagttcagcagaagctacagactacgctacagccgcgatgggcgtcggtggatgggctggaaggatcggtggggacaagaggtgatttctgggaatgaagaccccgaaggagtggtactaaaggacctgggacccccaatggttgctcggttggttagattctaccctcgagctgatagggtgatgtctgtgtgtctgagggtcgagctgtatggctgtttgtggagagacgggcttctgtcctatactgcgccagttggccagactatgtacctgtccgaagccgtttatctcaacgactccacgtatgacggtcataccgtcgggggtctccagtacgggggactgggacagttagccgacggcgttgtaggtctcgacgatttcagaaagagtcaggagttgagagtgtggccagggtacgactatgtcggctggtctaaccactccttctcctccggttacgtcgagatggaatttgaattcgaccgattgcgggcatttcaggcaatgcaggtacactgtaacaatatgcacaccctgggcgcaagactccccggaggggtggaatgccgttttagaagaggcccagctatggcgtgggagggcgagccgatgcggcacaatcttggcggtaaccttggagacccacgtgccagggcagttagcgtgccactggggggtcgcgtggctcgcttcctacagtgcaggttcctattcgcaggtccatggctgcttttttcagaaataagtttcatttcagacgtcgtaaacaatagttccccagctctgggcggaacgtttccgccagccccttggtggccgcctggacctcccccaacaaactttagctcgctagagttggaaccccgaggtcagcagccggttgctaaagctgaaggctctccgacagccattctcattggttgtctggtagccatcatcctgctcctcttgctgattatcgcactcatgctttggcgcctgcactggcgcaggctgctcagtaaagcagagcgcagagtacttgaggaagaattgaccgtacatctgtccgtgccgggagacaccatcctgattaacaatcgcccaggcccacgggagcctcccccataccaggagcccagaccgcgtgggaatccccctcattccgcaccatgtgttcccaatggttctgcatacagcggtgactatatggagccagagaagccaggcgctcctttacttccgcctccccctcagaactctgtcccacactacgccgaagccgacatcgttacactgcaaggcgttaccggcggaaatacctacgccgtcccagctctccctcctggagctgtcggagacggccctcccagagtggactttcctcggtcgcggctgcggttcaaagaaaagctgggcgaagggcaattcggtgaggtgcatttgtgtgaggtggatagccctcaagacctggtatccctcgactttccgcttaacgtgaggaaaggccatccattactcgtggccgtcaaaatcctgaggcccgacgctactaaaaacgctcgcaacgacttcctgaaagaagttaagattatgagccgattgaaggatcccaatattataagattgctgggagtatgcgtgcaagatgacccactgtgcatgatcaccgactacatggagaatggcgacctgaatcaatttctgagtgctcatcagctggaggataaggcagctgagggggctcccggagatggacaagcggctcagggccctacaattagctatcccatgctgctacatgttgccgctcaaatcgcttcgggcatgagatacctagcaactcttaactttgtgcaccgggacctggcgactcgcaactgcctagtaggtgagaacttcaccatcaagatcgccgacttcggaatgagcagaaatctctatgccggtgattactaccgagtgcaggggagggccgtcctccctatcagatggatggcttgggaatgtatcctgatgggtaagtttacgaccgcttcggacgtgtgggcctttggcgtcaccctgtgggaggttctcatgctctgtagggcacagccgtttgggcaattaaccgatgagcaggtcatcgaaaatgcaggcgagttcttccgcgatcagggtcgccaggtctacttgtcaagacccccagcctgcccccagggtctatacgagctcatgcttaggtgctggtcccgggagagcgaacagcgccctcccttttcccagctacatagatttttggccgaggatgccctgaacaccgtgtag

SEQ ID NO: 11199 - DNA, 165 bp, synthetic construct
  misc_feature 1..165: note = source = /note="Description of Artificial Sequence: Synthetic coding sequence"
  source 1..165: mol_type = other DNA
atgtgtagagagacagcaggatatggctggttgctggcgagcacagagttactctccttgctagaacccctgagcccccagctgctcaaagaacacatctcctgtacgtcacaagtcgccgcaggggcaaaagtgacaccggattccgccgtttgggcgccttag

SEQ ID NO: 11200 - DNA, 2256 bp, synthetic construct
  misc_feature 1..2256: note = source = /note="Description of Artificial Sequence: Synthetic coding sequence"
  source 1..2256: mol_type = other DNA
atggcgtttcgcacaatctgcgtcctggtgggggtgttcatttgctctatttgtgtgaaagggtccagtcaaccacaagccagggtttaccttactttcgacgaactccgggaaacaaagacttcagagtacttttctctgtcacaccatccactggactatcggatcctcctcatggatgaggaccaggatcggatttacgtaggaagtaaggatcatattttgtccctaaacattaacaatattagccaagaggccctctcagtcttttggccagcttccaccatcaaagtggaggagtgtaagatggccggtaaagatcccactcacgggtgtgggaattttgtgcgtgtgattcagacatttaatcggacacatctttacgtgtgcgggtccggcgctttcagccccgtatgcacctatctgaatcgagggaggcggagcgaggaccaggtgtttatgatcgatagcaagtgcgaatctgggaagggtcgttgctcattcaatcccaatgtcaatacagtctccgtcatgatcaatgaggagctttttagtggcatgtatattgatttcatgggtactgacgcagccatcttccgatccctcactaaacgcaacgccgtcaggactgaccagcacaactctaagtggctgtcggagccgatgttcgtagatgcacacgtcatcccagatggcaccgaccccaatgacgccaaggtctacttctttttcaaggagaaacttaccgacaataacagatcaaccaagcagattcactccatgattgctcggatttgtccaaacgatacagggggtctgaggtccctggtcaacaaatggaccaccttcttgaaagctaggctcgtatgtagcgtcactgacgaggatggcccagagacacatttcgacgagctcgaggatgtttttctcttggagaccgacaacccacgcaccacattggtctacggaatctttacaaccagctcatccgtcttcaagggaagtgctgtgtgtgtctaccatctgagtgacatccaaaccgtgtttaatggcccattcgcccacaaggagggccctaaccatcaattaattagctaccagggcagaattccatatccaaggcctgggacctgtccaggtggtgctttcactccgaacatgcgaaccactaaagagttccccgacgatgtggtcacattcatccgcaaccaccccttgatgtataattcaatctaccctatccataaacggcctctcattgtcaggatagggactgactataagtatacaaaaatagctgtcgatcgggtgaacgccgcagatggtagataccacgtgttgttcctgggaacagaccgaggaacagtccaaaaagtggtcgttctgcctaccaataattccgtcagcggggagcttatcctggaggagctggaggtatttaaaaatcatgcacccattaccaccatgaagattagcagcaaaaaacagcagctgtacgtgtcctccaacgagggggtttctcaagtgagtctccacagatgtcatatttatggtactgcctgtgctgactgctgcttggccagagatccttattgcgcgtgggatggccatagctgttccagattctaccccactggtaagagaagatctcgcaggcaggacgttcgacacgggaatccattgactcagtgtagggggtttaacctgaaggcctacaggaacgctgcagaaattgtccagtacggagttaagaataacaccactttcctggaatgcgcgccaaaaagccctcaagctagcatcaagtggcttttgcagaaggataaagatcggaggaaggaagtcaagttaaacgagcgcatcatagcgacttcccagggtctgctcatccggtctgtccagggttctgatcagggactgtaccactgtatcgcaaccgagaacagctttaaacagacaattgcaaaaattaacttcaaagtactggacagtgagatggtggcggttgttactgacaaatggtcaccttggacttgggcctcctccgttcgagccctgccattccacccgaaggatatcatgggtgccttctctcattctgagatgcaaatgatcaaccagtattgtaaagataccaggcagcagcaccaacagggagatgaaagccagaagatgcggggagattatggaaaactcaaagccctcatcaatagccgcaagtcccgtaacagacgtaaccagctgccagagtcgtag

SEQ ID NO: 11201 - DNA, 630 bp, synthetic construct
  misc_feature 1..630: note = source = /note="Description of Artificial Sequence: Synthetic coding sequence"
  source 1..630: mol_type = other DNA
atggggcctgaggcactgtcttccctcctgctgctgctactggtggcttcgggcgacgccgatatgaaaggacacttcgacccagcaaaatgccggtatgccttaggtatgcaagatcgaaccatccctgatagcgacatctcagcgtcttctagctggtccgactccaccgccgcaagacacagtaggttggaatcttctgacggggacggggcatggtgtccagccggtagtgtattccccaaggaagaagagtatcttcaagtcgacctgcagaggttacatctcgtcgcccttgtggggacgcagggacgccacgcaggcggtttggggaaagagttctcccggtcatacaggctcaggtacagtagggacggcaggcgatggatggggtggaaagatcgatggggccaggaggtgatcagcggaaatgaagaccccgagggggtcgtgctgaaagacctggggcctcccatggtggctaggctggtcagattttaccctagggctgacagggttatgtcagtatgtcttcgtgtggagctgtatgggtgtctgtggagagacggcctgctttcctatacggctcccgtgggacaaacgatgtatctgtccgaggcagtgtattag

SEQ ID NO: 11202 - DNA, 315 bp, synthetic construct
  misc_feature 1..315: note = source = /note="Description of Artificial Sequence: Synthetic coding sequence"
  source 1..315: mol_type = other DNA
atgtccgacctgcttttgctaggactcattggcggactcactcttctcttgcttcttacactgttggcgttcgccggatattccgggcttctggctggtgtagaagtatctgctggttcaccacctatcagaaatgtgaccgtcgcttacaaattccatatgggactgtacggagagacgggacggctgttcaccgagtcatgttctatctctccgaaactacggtccatcgcggtgtactacgacaatccccacatggtgccccctgacaagtgccgatgcgccgtgggatccatcctgtctgaaggtgagtag

SEQ ID NO: 11203 - DNA, 2631 bp, synthetic construct
  misc_feature 1..2631: note = source = /note="Description of Artificial Sequence: Synthetic coding sequence"
  source 1..2631: mol_type = other DNA
atggggccagaggcgctctcgtctctgttattgctgctgctggtcgcttcaggggatgctgacatgaaggggcactttgacccagccaagtgcaggtatgccctgggtatgcaggacagaactattcctgattcagatatctctgcctcttcgtcctggtcagatagtacagctgccaggcacagccgattagaatcttctgatggagacggggcttggtgccctgccggttcagtgtttccgaaggaggaagagtatctgcaggtggatctgcagcggctgcacctggtggcccttgtcggcacacaaggcagacatgccggagggctgggcaaagaattttcgcgatcgtaccggctgcgatatagtcgggatggacgtagatggatgggctggaaagacaggtggggacaggaggtgattagcggcaacgaggatcctgagggggtggtgctcaaagacctcggcccaccgatggtggccagactcgtacgcttttaccccagagccgatcgcgtgatgagtgtgtgcttaagagtcgagctctacggatgtctgtggcgggacggcctgttatcctacaccgctccggtagggcagactatgtacctgtccgaggcagtatacctgaatgattcaacttacgatggacataccgtagggggactacaatacggaggcttggggcagcttgccgatggcgtggtaggactggacgatttccggaaaagccaggaactgcgcgtctggccaggctatgattatgtcggctggtcaaatcactcctttagtagcgggtacgtagaaatggagtttgagttcgacagactgagagctttccaggcaatgcaggtgcactgtaacaacatgcacacccttggcgctcggctgccgggtggcgttgaatgccgatttagacgtgggcctgccatggcttgggaaggggagcccatgcgccacaacctggggggtaacctgggagacccacgtgctcgtgccgtttctgtcccgctggggggtagggtcgcccgattcctgcaatgccgatttttattcgctggtccgtggttactattcagtgaaatctcctttattagcgacgtggttaataactctagtcctgccctcggcggtaccttccctcccgcaccgtggtggccacccggaccgcctcccacaaatttctcatccctggaactagaacccagggggcagcaacccgtggccaaagcagaggggtcccccacagctattctgataggctgtctcgttgctatcatactgctactattgctcatcatcgccctgatgttatggcgcttgcactggagaagactcctgtcaaaagctgaacgcagggtgctggaggaggagctgactgtccaccttagcgttccgggagacactatactgatcaataacagacctggacccagggagcctcccccatatcaggagcccagaccaagaggcaacccccctcatagcgctccttgcgtcccaaacggttctgcctactcaggggactacatggaaccagagaaacctggcgctccactactaccccctcccccacagaactccgtgccacattacgccgaggcagacatcgttacactgcagggcgtcacaggtggaaacacatacgccgtccccgcattgccacccggtgcggtgggggatggtccgcctcgtgtagatttcccacgctctagattaagatttaaggagaaactcggtgaaggtcagtttggggaggtgcacctgtgtgaggtggactctccccaggatcttgtaagcttggacttccctttgaatgttcgcaaggggcatcccctgctcgtggccgtcaagatacttcgccctgatgctacaaaaaacgcaagaaacgacttcctcaaggaggtgaaaattatgagtcggctgaaagacccaaatatcattaggctcttaggagtgtgtgttcaggacgaccctctgtgtatgattactgattatatggaaaatggcgacctgaatcaattcctcagcgcgcaccagttggaagacaaggccgctgaaggggctcccggtgatggacaagcggctcagggcccaactatcagttaccctatgctactgcacgtagctgctcagatagcctccggcatgcgctatctagctacactgaatttcgtgcatagggatctggctaccaggaattgtctcgttggcgaaaactttacaataaagatcgccgacttcggaatgtcgcgcaatctgtacgccggagactactatcgagtccaaggtcgggctgttctgcctattagatggatggcatgggagtgtatcctgatggggaagtttaccactgcctctgatgtctgggcgtttggcgtgacattatgggaggtcctgatgttatgccgggctcagccctttggccagctgactgacgaacaggtgattgagaatgccggagaatttttccgcgaccagggcaggcaggtctatttatcccgtcctccagcctgtccccagggactgtatgagcttatgctgcgctgctggagtagggaatcagagcagagacctcctttttcgcaactccacagattcttggcggaggacgcactgaacacggtgtag

SEQ ID NO: 11204 - DNA, 1053 bp, synthetic construct
  misc_feature 1..1053: note = source = /note="Description of Artificial Sequence: Synthetic coding sequence"
  source 1..1053: mol_type = other DNA
atggaagccttcgcactcggaccggctagacgaggcagaagacggacccgcgcagcagggagcctgctgtctcgcgcagcgattcttctgtttatttctgcgttcctcgtcagggtgcccagttccgtgggtcatctggtgcgcctcccacgcgcattcaggctcactaaagacagcgttaagatcgtgggatccacatccttcccggtgaaggcctacgttatgttacaccagaagtcgccccacgtattgtgcgtgacacagcaactccggaacgctgagctaatcgacccatcgttccaatggtacggccctaaggggaaagtggtgtcagagaacagaaccgcacagattacctccacgggaagtctcgtctttcagaattttgaagaatctatgagtggcatctacacctgctttctcgagtataaaccgaccgtggaggaaatagtgaagagactccagctcaagtacgcgatatatgcctatcgggagcctcattactactatcagttcactgccagataccatgctgcaccctgcaatagcatatataatatttcttttgagaaaaagttattacaaattctatccaagctgttgctggatctcagctgcgagatctcattacttaaatcagaatgtcaccgtgtcaagatgcaaagagccggactgcaaaacgagttgtttttcgccttttccgtcagctcacttgataccgagaagggcccaaagaggtgtaccgaccacaattgcgaaccatacaagcggttattcaaagctaagaatctgattgagcggttcttcaaccagcaggtggagatcctgggacgcagagccgagcagctcccgcaaatctattacattgaggggacactgcagatggtgtggataaatcggtgcttcccagggtacggtatgaacgtacagcagcaccccaaatgtcccgaatgctgcgtgatttgttctcctgggagttataatcctagagatggaatacattgtctgcagtgcaattcttcgctggtgtacggtgcaaaaacatgcctgtag

SEQ ID NO: 11205 - DNA, 1392 bp, synthetic construct
  misc_feature 1..1392: note = source = /note="Description of Artificial Sequence: Synthetic coding sequence"
  source 1..1392: mol_type = other DNA
taactagccctggtgctctgtacggtggattcacggccaccagctcagcttgctctgtcccatgccggaagactgttagcatcatctacggccgcttcagtcccaaatacactgagactggagctgcgcggtccacagcccagggatgagggtttttatagctgtagtgctagaagtcctttgggccaggccaacaccagtctggaactgcggctagaaggggtgagagtgatcctcgcaccagaagctgccgtgccagaaggcgcacctataacagtgacctgcgccgaccccgctgcacatgctccgactttgtacacttggtatcacaacggaaggtggcttcaggagggaccagccgcttccctgtcattcttggtggcgaccagagcgcacgcgggtgcatacagctgtcaggcacaggacgctcaaggcactagatcctccaggcccgcagcgctgcaagtattgtatgccccacaggacgctgtgctgagttcctttcgcgattcgcgcgctcgcagcatggccgtgattcagtgcacagtggatagcgagccgccagccgagttggctctgtcgcacgatggaaaggtgttagcgacctcctccggagtacactccctggcctcgggaactggccacgtacaagtggcacggaacgccctgcgcctgcaggtccaggacgtgccagccggagatgacacttatgtttgcacagcccagaacctgcttggcagtataagcaccatcggcagactacaggtcgagggggcaagggtggtggcagaacctggcctggatgtgcccgagggggcagctcttaacctgtcgtgtcgattacttggagggccaggccctgtgggcaacagtacattcgcttggttctggaatgatcggcgactgcatgccgagcctgtgcctactttggcttttacacatgtagcacgcgctcaagcaggcatgtatcattgtctcgctgagttgccgacaggcgcagcagccagcgcccctgtgatgctacgggtgctctatcctcccaaaacaccaaccatgatggtttttgtggaaccagaaggcggtctccggggtatactggattgccgagtcgactctgagcccctagcgtctctgacacttcacttggggagtcgcctggttgctagtagccagccccaaggggcacccgcagaaccccacatccatgttctggctagccccaacgccttgagagtcgatatcgaggccctccggccaagtgaccaaggagagtatatttgctctgccagtaacgtgctggggtctgcgagtacatctacttatttcggtgtgagaggagaaggaagaggtttgcatctgccgggacacagcgcacagaaaccctccagttag

SEQ ID NO: 11206 - DNA, 1398 bp, synthetic construct
  misc_feature 1..1398: note = source = /note="Description of Artificial Sequence: Synthetic coding sequence"
  source 1..1398: mol_type = other DNA
atgaagtttcaggggcctctggcctgcctactcctggccctctgcctgggcagcggggaagctgggcctctgcaatcaggtgaagagtcaactgggactaacatcggcgaagctctcggacacggcctgggtgacgccctgagcgagggggttggcaaggccatcggcaaagaagcgggaggcgcagctggctccaaggtaagcgaagcactggggcaggggacaagggaggccgtagggacaggagtccgacaagtgccagggttcggcgtggccgacgctttgggaaatcgggtgggtgaggccgctcacgccctaggcaacactgggcacgagataggcaggcaagccgaggatgttattcggcatggcgctgacgccgtgagaggctcctggcagggcgtgccaggccacaatggagcctgggaaaccagcgggggacacgggatttttggaagtcaggggggattgggcggacagggccaggggaacccaggcggtttgggtactccgtgggttcacggatatcccggaaattcggctggcagctttggcatgaatcctcaaggagccccttggggacaggggggaaatggcggtcctccaaattttgggaccaacacacagggcgctgtggcccagccgggatacgggagtgtacgtgcaagcaaccaaaacgaaggctgtactaaccccccaccttccggaagcgggggaggttcttcaaactccggcggatcgtcaactgggtccagttccggcaaccacggaggttccgggggagggaacgggcacaaacctgggtgtgagaaaccaggcaacgaggcacgtggaagcggggagtccggtatccaggggttcaggggacagggggtgagttcaaatatgagagaaatatcgaaagagggtaaccggctgctaggcggatctggcgataactaccgcggacaaggcagctcatggggttctggcggaggcgacgccgtgggaggcgtcaacacagtaaacagcgaaacctccccagggatgttcaactttgacaccttttggaagaactttaagtccaaactaggctttattaactgggatgccatcaacaaaaatcaagtccctccaccctcaactcgagcactgctctacttctcacgcctgtgggaagatttcaagcagaacaccccctttttaaattggaaagcaatcatagaaggggctgatgcgtcttcactgcaaaagcgggcaggacgggacgatcaaaactacaattacaaccagcacgcctaccctacagcatatggaggcaaatactctgtgaaaactcctgccaagggaggggtatcaccttctagttccgcttcccgcgtgcaaccgggactacttcagtgggtcaagttttggtag

SEQ ID NO: 11207 - DNA, 2700 bp, synthetic construct
  misc_feature 1..2700: note = source = /note="Description of Artificial Sequence: Synthetic coding sequence"
  source 1..2700: mol_type = other DNA
atgctgttgctgcttctcctcgctcccctgttccttagaccaccaggggctggtggggctcagacacctaatgccacctctgaaggctgccaaattatccatccaccctgggagggtggcatccggtaccggggactcacacgggatcaggtgaaagccatcaactttctgccagtagactacgagattgagtatgtgtgcagaggagaaagagaagtggtgggccctaaagtccgaaagtgccttgcaaatggctcctggacagatatggataccccctcccgctgcgtgaataggacccctcatagcgaacgcagagctgtctatatcggggctctctttcctatgagcggtggctggcccggaggacaggcgtgccagcctgcagtagaaatggccctagaggacgtcaattcacgcagagacattctgcccgattacgagctgaagctcatccaccacgactctaaatgtgacccagggcaggcaacgaagtatttatacgagctgctctataatgaccccattaagattattcttatgcccggatgctcctcggtatctacactggtcgccgaggccgctagaatgtggaacctgattgtgctttcttacgggagctcctctccggcactctctaatcggcagcgttttccaactttctttaggacgcaccccagcgccaccctccataatccaacacgcgtcaagctctttgagaaatgggggtggaagaagatagctacaattcagcaaaccacagaggtgttcacaagcactctggatgacctggaggaacgcgtgaaggaggcaggcattgagatcacctttagacagagttttttttctgacccagcagtgccggtgaagaacctcaagcgccaggatgcacggatcatcgtgggactcttctacgaaactgaggcacgcaaagtattctgcgaagtttacaaagagcggctgttcggcaaaaaatacgtttggtttctgatcggctggtatgctgacaattggtttaaaatctacgatccgtccatcaactgtacagtggatgaaatgaccgaagccgtggaagggcacattacgaccgagatagtgatgctgaacccagcaaacaccagatctatctcaaacatgaccagccaagagttcgtggaaaaactgaccaagcggctgaagaggcatcccgaggaaaccggtgggttccaggaggcacctctggcttacgacgccatctgggcactggcactggctttgaacaagaccagcggtggcggtggaaggagcggtgtcaggcttgaagactttaattataataaccagactattaccgatcagatttatcgcgcaatgaactccagctcttttgaaggcgtcagcggccatgtggtatttgatgcttccggatcgcgcatggcatggactctaattgagcagcttcaggggggaagctataaaaagattggatactacgactccaccaaagacgacctgagttggagcaagacggataagtggatcgggggaagtccccctgcggatcaaacattagtgataaagacgtttagattcctgtcgcaaaagctgtttattagcgtatcagtcctgtcctcattgggaatcgttctggcggtagtctgcctatcctttaatatctacaacagccacgtccggtacattcagaacagccagcccaatctgaataaccttacggccgtgggatgtagtctagcactagcggcagtctttcccctcggcttggatggataccacattggtagaaaccaatttccttttgtgtgccaggcccgtctttggctcttgggattagggttttccctcgggtatggcagtatgtttaccaaaatttggtgggtccatactgtgtttactaagaaggaagaaaagaaagagtggcggaagaccttagagccctggaagctctacgccacggtcggtctgctagtgggtatggatgtgctaactctggccatatggcagatcgtggatcctcttcataggacaatcgaaacattcgctaaggaagagcctaaggaagatattgacgtttctattcttcctcagcttgagcattgctccagtaggaaaatgaacacgtggcttggcatcttctatggctacaagggcctgctcctcctcttggggatcttccttgcatacgagacgaaatccgtatccaccgagaagattaatgaccatcgggctgtgggtatggctatctataacgtggccgtcttatgtctgataacagcacctgtgacaatgatcctcagctcacagcaggacgcagcttttgccttcgcaagccttgctatcgtgtttagtagttacattaccctcgtggtcctgtttgtgccaaagatgcggcgactgatcacacggggagagtggcagtcagaggcccaggacacaatgaagacaggaagttccacgaacaacaacgaggaagaaaaatcacgattattggagaaggaaaatcgcgaactcgagaagattatagctgaaaaggaggagcgtgtgtccgaactacgtcaccagctccagtcgcgtcaacagctgcggtctcgcagacatcccccaaccccgcctgagcctagtggcggactgccccgagggcctccggagccaccggaccgccttagttgcgatgggtctcgcgtgcatctgctgtacaagtag

SEQ ID NO: 11208 - DNA, 381 bp, synthetic construct
  misc_feature 1..381: note = source = /note="Description of Artificial Sequence: Synthetic coding sequence"
  source 1..381: mol_type = other DNA
atgtggtacgtgagcaccaggggcgtagcaccccgagtgaatttcgagggggcactcttttcggggtacgccccagacgggggactcttcatgccagaggaattgccccagttagacagagggaccctgtgtcagtggtcaacgctttcatatccaggcctggttaaggaactgtgtgcgctattcattggctctgagctattgcctaaggatgaactgaatgacctgattgatcgtgctttcagtcgatttagacaccgggaggtggtacacctgtcaagactcagaaacggcctgaacgtgctggaactttggcacggggtcacctatgccttcaaggacctgtctctgtcctgtaccactcagttccttcagtattag

SEQ ID NO: 11209 - DNA, 147 bp, synthetic construct
  misc_feature 1..147: note = source = /note="Description of Artificial Sequence: Synthetic coding sequence"
  source 1..147: mol_type = other DNA
atgccacctttcttaatcacactgtttttatttcatagctgttgcctgcgggcaaacggtcacctcagggagggcatgaccctgctcaaaactgagtttgcgttgcacctttatcagagcgtggccgcttgtagaaatgaaacctag

SEQ ID NO: 11210 - DNA, 390 bp, synthetic construct
  misc_feature 1..390: note = source = /note="Description of Artificial Sequence: Synthetic coding sequence"
  source 1..390: mol_type = other DNA
atggctgctggctctgctcccatgcagttgcacctgagagcgactattaggatgaaggatggcctctgcgttccccgtaagtggatctatcacctgacagaaggatcaacagatctgaggacggagggccgtcctgacatgaagaccgagctgttttcttcctcatgtcccggaggaatcatgcttaacgagaccgggcagggatatcaacgcttcctgctctataatagatctccacaccctcctgagaagtgtgtggaagaattcaagtccctgacaagttgcctggatagtaaggcctttctgttaactcctcgtaaccagggcaaaggacttaagagtcacaagacagggctgggtttaactaagtcttcgggcgtgaccgggtag

SEQ ID NO: 11211 - DNA, 462 bp, synthetic construct
  misc_feature 1..462: note = source = /note="Description of Artificial Sequence: Synthetic coding sequence"
  source 1..462: mol_type = other DNA
atgactatccacatacttatccttctcttgttgctcgctttcagcgcacagggggatctggacaccgctgcacggaggggccagcaccaggttcctcagcatcggggacacgtgtgctatctgggcgtatgcaggactcataggctggccgaaattatttattggatccgttgcttgcaccagggcgctctcggcgaggggcagccgcgagcccctggtcccctgcagctgtgggcaccccctgtggccagaggtggcagtccggctagatttcccggtttccgccctgcagctagaggccttgctcagtgtcccgctcggtgggtcacctctggaaccgcacgccctctactcggattttcactgcccatctgcatgctggagctactgctgcacatcagcagccctttgacccccgcacctgagaccgtgttcccgtcaccttctccaggctgtgattag

SEQ ID NO: 11212 - DNA, 450 bp, synthetic construct
  misc_feature 1..450: note = source = /note="Description of Artificial Sequence: Synthetic coding sequence"
  source 1..450: mol_type = other DNA
atgggatggctaacacgtatagtctgtctattttggggagtcctgctgactgccagggctaactaccagaacggcaagaataatgtacctcgactcaagctcagttacaaggaaatgctggagtccaacaacgttatcacctttaatggactcgccaatagttcttcataccacacattcctgctggatgaagagaggtccagattgtacgtcggtgccaaggaccatatcttctccttcgatttggttaatattaaggattttcagaagatcgtgtggccggtatcatatactcgacgagacgaatgtaaatgggcaggaaaggacatccttaaagagtgtgcaaatttcataaaagtgcttaaggcgtataaccaaactcatctctacgcatgtggcacgggcgctttccaccctatctgcacctacattgaaattgggcaccactag

SEQ ID NO: 11213 - DNA, 543 bp, synthetic construct
  misc_feature 1..543: note = source = /note="Description of Artificial Sequence: Synthetic coding sequence"
  source 1..543: mol_type = other DNA
atggccgacatgcagaaccttgtggagagacttgagcgggctgttggcagattggaggccgtctcgcatacatcagacatgcacagagggtatgccgattctccgagtaaagcaggagcggctccttacgtgcaggcctttgacagcttgctcgccggaccagtcgcggagtacctgaagatcagcaaagaaattggaggtgacgtgcagaagcacgccgagatggtccacacaggcctgaagctggaacgagcgttgctcgttacagcttctcagtgccaacagccagcagagaacaaactcagcgatctgcttgccccaatcagcgaacaaataaaagaagtgatcacattccgtgagaaaaaccgtgggagcaaactgtttaaccatctgtcagccgtctcagagtctatacaggcactcgggtgggtggctatggcccctaaacctggaccgtatgtgaaggaaatgaatgacgctgccatgttttataccaacagggtgctgaaggaatacaaggatgtagacaagaaacacgtctag

SEQ ID NO: 11214 - DNA, 630 bp, synthetic construct
  misc_feature 1..630: note = source = /note="Description of Artificial Sequence: Synthetic coding sequence"
  source 1..630: mol_type = other DNA
atgggccctgaagccctaagctcccttctgctactcctgctggtggcctccggtgatgctgacatgaaagggcacttcgacccagcaaaatgcagatatgcacttggcatgcaggatcgcaccattcctgactctgatatctcagctagttcgtcctggtctgatagtacggctgccagacacagtcgcctcgaatcgtccgacggggatggggcatggtgtcctgctggttctgtctttccaaaagaagaggaatatctccaggtggatctacagcggctacacctagttgctctcgttggaacacaaggcaggcacgcgggtggactagggaaagagttttcccgaagctaccgactgcgctacagtagagacggacgcagatggatggggtggaaagataggtggggacaggaagtgatatccgggaatgaggatccagaaggagtggtgcttaaagacctgggcccacctatggttgcgcgattggtacggttttatccccgtgctgatagagttatgtctgtttgcctccgcgtggagctttacgggtgcctctggcgggacggtctgctgtcatataccgccccagtggggcaaactatgtacctgtccgaagcagtgtactag

SEQ ID NO: 11215 - DNA, 630 bp, synthetic construct
  misc_feature 1..630: note = source = /note="Description of Artificial Sequence: Synthetic coding sequence"
  source 1..630: mol_type = other DNA
atgggtcccgaagcattaagctcccttctactgttgctgctcgtggcttccggggacgcagacatgaaggggcacttcgacccggcaaagtgccggtacgccttggggatgcaggaccgaacaatcccggattctgatatctcagcctcatcttcttggagtgactcaactgcagccagacactccagactggaaagctctgacggcgatggcgcatggtgtccagcaggcagtgtcttccccaaagaggaagagtacctccaggtggacctgcagcggctccaccttgtcgcgttagtgggaacccagggcagacatgcaggtggactgggcaaagagttttcaaggagttataggctcaggtacagtcgtgatggcaggcgctggatgggatggaaggatagatggggacaagaagtcataagtggcaatgaggatccagagggtgtggtcctgaaggacttaggcccacctatggtagcacgattggtcagattctaccccagggcggatcgggttatgagcgtctgcctccgagtggaactatacggctgtttatggcgggacggtctccttagttacaccgctccagttggacagaccatgtatctgtctgaggcggtttactag

SEQ ID NO: 11216 - DNA, 2631 bp, synthetic construct
  misc_feature 1..2631: note = source = /note="Description of Artificial Sequence: Synthetic coding sequence"
  source 1..2631: mol_type = other DNA
atgggaccagaagctctgagcagtctcctgctgctgctattggtggccagtggagatgcggacatgaaaggccacttcgacccggctaaatgtagatatgccttgggcatgcaggatcggacgatccctgattcggacatttcagccagcagctcttggtcggacagcacagctgccaggcatagccgactggaatcaagtgatggagacggagcctggtgtccagctgggagcgtgtttcccaaagaggaggaataccttcaggttgacctgcagcgtctgcatcttgtggcactggtgggaacccagggacggcacgctggcggtcttggcaaagagttttctcgatcttaccgccttaggtacagcagggacgggaggcgctggatggggtggaaggacagatggggccaggaggttatcagtggtaatgaagatccagagggcgtggtgttgaaggacttgggtcccccaatggtggcaagactggtcagattttaccccagagccgaccgggtgatgagcgtgtgcctccgagtggagctgtatgggtgcctgtggcgtgatgggttattgagctacactgccccagtggggcagaccatgtacctgtcagaggccgtgtatctgaatgatagtacttacgacgggcatactgtcggaggactgcagtacggagggctgggccagctggctgatggcgttgttggtttggatgattttcggaaaagccaagagctaagagtgtggcccggatatgactatgtgggctggagtaatcatagcttctccagcgggtacgttgaaatggagttcgaattcgatcgtttgagagcctttcaggccatgcaggtacactgtaataacatgcatacgctgggcgcacgtctccctggtggggtcgaatgtcgctttaggcgcggacctgcgatggcttgggaaggcgagccgatgaggcacaacctgggagggaacctgggcgatccgcgtgccagggccgtctctgtgcctctgggtggtagggtggccagattccttcagtgcagattcctcttcgcaggaccctggttactcttttctgagatatcatttatcagcgatgtggtgaataacagttctccagcccttggaggaacctttcctcccgctccttggtggccaccagggccaccacctacgaacttctctagcctcgaattagagccacggggtcagcagccggtcgccaaggccgagggctcaccaactgccatacttatagggtgtctggtcgcaattatactcttactgctgttgatcatcgccctgatgctgtggagactgcactggcgcagacttttgagcaaagctgagcggagagtgttggaagaagagctgacggtccacctttccgttccgggagacacaattctgattaataaccgccctggtcccagagaacctcccccttaccaggaacccagaccaagggggaacccacctcactcagcaccttgcgttccaaacggctctgcatactcgggagattacatggaacccgagaaacccggagccccactgctgccacccccacctcagaatagcgtgcctcattacgctgaggccgatattgtgacccttcagggggttacaggcggtaatacttacgccgtgcctgccctacccccaggagccgtgggggatggaccccctcgtgtggactttccaaggagccgtcttaggtttaaggagaagttgggcgagggccaatttggagaagtgcatctgtgcgaggtcgattcacctcaagatctggtatcactcgacttccctttaaacgtccgcaagggccacccactgctggtggcggtgaagattctgcgtcccgatgcaaccaagaacgctagaaacgacttcctgaaggaggttaagattatgtcccggctgaaagatccaaatataatccgcctgcttggagtttgcgtgcaagacgatcccctgtgcatgataaccgactatatggaaaatggtgacctgaatcagttcctgtctgcccatcaactcgaggataaagctgctgagggcgctccaggagatggacaggctgcgcaggggccaacaatatcttaccctatgttgcttcatgttgccgcacagattgcctcagggatgagatacttagccactctgaacttcgtgcatagagacttggccacccgcaattgcttggttggagaaaattttaccattaaaatcgccgactttggcatgtccagaaacctttacgctggagattactatcgcgtgcaaggcagggccgtcttacctatccggtggatggcttgggagtgtatcctgatgggaaaatttacaactgccagcgatgtgtgggccttcggggtcacactgtgggaggtgctgatgctgtgccgcgcacagccatttgggcaactgactgacgaacaggtgatcgagaacgcaggggagttcttccgggatcagggccgacaggtgtacctgtctaggccccctgcctgcccccaagggctgtacgagctgatgctcaggtgctggtctcgggagtccgaacagagaccacccttcagtcaattgcatcggtttctggcggaggacgcattgaacactgtgtag

SEQ ID NO: 11217 - DNA, 2103 bp, synthetic construct
  misc_feature 1..2103: note = source = /note="Description of Artificial Sequence: Synthetic coding sequence"
  source 1..2103: mol_type = other DNA
atgttggcacccttcttattgctactgactcactcacgatccccactctcctttcgcccttgcagccacgtacccggtgccctcatagcccagaagcctatgggatcttcgagacttgcagcccttcttctgccccttctgttaatcgtgattgatctgagtgactccgccggtatcggctttcgtcacctgccacactggaacactcgatgcccactggcttctcatacagacgatagctttacgggcagctcggcatacattccttgtcggacttggtgggcactgtttagtacaaagccctggtgcgtgcgagtgtggcactgttcgagatgtctctgccaacatttattgagcggtggctctggtctacagagggggctctttcatctgctggtgcagaagtccaaaaagtcctctacttttaagttttaccgccgtcataagatgccagcccctgctcagagaaagttgttgccacgtcgacacctgtcagagaaatctcatcatatcagcatcccatcacctgacattagccataaaggactgagatcaaagcggacacaacctagcgaccccgagacatgggaaagtctgccgagactggactcacaacggcatgggggacccgagtttagcttcgatctcctgcctgaggcacgcgctatccgggtgaccatttccagtggacctgaagtgtcggtgagactctgccatcagtgggctctagagtgtgaggagctgagcagcccttacgatgttcaaaagattgtatccggcggacatacagtcgagttgccctatgagttcctgctaccttgcttgtgcattgaagcatcatatctccaggaggacacagtgcgacgaaagaaatgtccttttcagtcttggcccgaagcatacggtagcgatttctggaagagcgtacacttcacagattactcccagcacacacagatggtgatggctctcaccctgcgatgtcctcttaagttagaggccgctctctgccaaagacacgattggcacaccctgtgtaaagacctccctaatgcgactgccagggagagcgatggttggtacgtcttggaaaaggtagacctgcatccccaactgtgttttaagttcagctttggaaattcttcacacgtggaatgcccacaccagaccggctctcttacatcctggaatgtgtcaatggacacccaggctcagcagctcatactgcatttctcaagccgcatgcacgctacctttagcgcggcatggtctctgcctggtctgggccaagatacccttgtgccaccggtctataccgtctctcaagcaaggggtagctctcctgtgtcccttgacttgattatccccttccttagaccagggtgttgtgtgttggtgtggaggagtgatgtgcagtttgcatggaagcatctgctatgccccgacgtgtcgtaccgtcacctgggcctactgatcctagccctgttggccctgctcacactcttgggagtagtgctggctctgacttgcaggcgcccacagtcagggccaggacccgcacggccagtgctgcttcttcacgcagctgacagtgaagcacaacggaggctcgtgggcgctctggctgaactcctgcgggcagcgctcgggggtgggagagatgttattgtggatctttgggagggcagacacgtcgctcgtgtcggccctctgccctggctatgggctgccagaaccagggtggctcgagagcaggggaccgtgcttttactatggtcaggtgccgatctgagaccagtctcagggccagatccccgagccgctccactgctcgcattgctgcacgctgccccacgaccattgctgctactagcctatttcagtcgtttatgtgccaagggcgacattcccccacctttgcgggctctgccacgatatcgccttttacgggatcttcccaggctgttacgagctctggacgcacgcccatttgccgaggccacatcttggggtcggctcggagctcgtcaaaggcgtcagtcacgtctggaattgtgtagtcgattagagagagaggctgctcgactagcagatctgggatag

SEQ ID NO: 11218 - DNA, 1194 bp, synthetic construct
  misc_feature 1..1194: note = source = /note="Description of Artificial Sequence: Synthetic coding sequence"
  source 1..1194: mol_type = other DNA
atgcgcagtcttctgttgctctccgccttttgtctccttgaagcggcacttgccgcagaagtgaaaaagcctgctgcagctgccgctcccggaacagcagagaagctctccccaaaggcagccacactagcagagcgatctgcagggctcgctttcagtctgtaccaggctatggcaaaggaccaggcagtagaaaatatcctggtctctccggttgtagtggcctcatccctgggtcttgtgagcctggggggtaaagcgacaacggccagccaggctaaggccgtgctgagcgctgaacagctccggaatgtgacctggaagttaggtagccgactttatggaccctcatcggtgtccttcgccgacgatttcgtacgctctagtaagcaacactacaattgcgaacatagtaaaataaattttagagataagagatctgccctgcaatctatcaacgaatgggcggctcagacgaccgatggaaagctgccagaagtgaccaaggatgtggaacgtactgatggtgctttgcttgtgaacgctatgttctttaagccccattgggatgagaagtttcaccataaaatggtggataaccgaggtttcatggtgacacggtcctatactgttggcgttatgatgatgcataggactggcttgtataattattacgacgatgaaaaagaaaaacttcagatcgtcgagatgcccctcgcccacaaactttcaagcttgattattttaatgccccaccacgtcgagcctctggagcgtctggaaaagttgcttactaaagagcaattaaagatctggatggggaaaatgcagaagaaagcagtggcaattagtctgcccaagggagtagtggaagtcactcacgatctgcaaaagcatttggcgggacttggactcaccgaggccattgacaaaaataaggctgacttgagccggatgagtggcaaaaaggatctctatctggcctccgttttccatgcgaccgcattcgaactggatacagacgggaatccctttgaccaggatatttatgggcgtgaggaattacgctccccaaaactattttacgctgaccacccctttatctttttggtaagagacacccaatcagggtccctactgttcattggccgtctcgtccgtcccaaaggtgataaaatgagggatgaattgtag

SEQ ID NO: 11219 - DNA, 612 bp, synthetic construct
  misc_feature 1..612: note = source = /note="Description of Artificial Sequence: Synthetic coding sequence"
  source 1..612: mol_type = other DNA
atggccgacatgcaaaacctcgtggagcggctggagcgtgccgtggggagacttgaagccgtatcccacacctcagatatgcaccggggttacgccgattcaccaagcaaggcaggggctgccccttatgtgcaggcatttgactccctgctcgcaggcccagtggccgaataccttaaaatttcgaaggagataggcggtgatgtgcaaaaacacgctgaaatggtgcataccggcctgaagctcgagagagctctactggtcaccgccagccagtgccagcagccagctgagaataaactgtctgacctcctggccccaatctcggagcagatcaaggaggttattacatttcgcgagaaaaatcggggatctaagctattcaatcatctctcggccgtatccgagtcaatccaagccctgggctgggttgctatggcgcctaaacctgggccatacgtgaaggaaatgaacgacgcagctatgttctacacgaacagggtgctgaaggagtataaggacgttgacaagaagcacgtagattgggttaaagcatatctcagcatctggacagagttacaggcctacatcaaggagttccacactacttag

SEQ ID NO: 11220 - DNA, 1293 bp, synthetic construct
  misc_feature 1..1293: note = source = /note="Description of Artificial Sequence: Synthetic coding sequence"
  source 1..1293: mol_type = other DNA
atgagaaaactaatgaaacaggttcaagaacagtgtcctaatatcacaaggatttattctatcggtaagtcataccagggactcaaattgtacgtgatggaaatgtccgataaaccgggagagcatgagctaggtgagccggaggtcagatatgtggccggaatgcacggtaatgaggcgttgggacgagagctgctcctcctgctgatgcagtttttgtgccacgaatttttacggggtaatccacgcgttactcggcttttgagtgaaatgcggattcatctcctgcccagcatgaatccagacggctacgaaattgcataccaccggggtagtgagctggtgggctgggccgagggcagatggaataaccagagtatcgatctcaatcacaattttgccgacctgaacactcctctgtgggaagcccaagatgatgggaaggtgccccacatcgtacctaatcatcacttgcctctccccacctattacaccttgccaaatgctaccgttgctcccgaaacccgtgcagttatcaaatggatgaaaaggatcccttttgtactaagcgcaaacctgcacggtggagagctagtggtctcctacccatttgatatgacgagaacaccctgggcagctcgggaactcacacccacgccagacgatgcagtgttcagatggctgtcaactgtctacgccggatccaatttagccatgcaggacacctctcgtcgtccctgccacagccaggacttctccgttcacgggaatattattaacggcgctgattggcacactgtaccaggctccatgaacgacttcagctaccttcataccaattgttttgaagtcacggtggagttgagctgtgataaattcccacacgagaatgagctcccacaagaatgggagaataataaagacgcgctcctgacctatctcgaacaggtcagaatgggtatcgctggagtcgtgcgcgacaaagataccgagctcgggatcgcggatgcagtgatcgcagtcgacggtattaaccacgacgtgactacagcctgggggggagactactggaggctgttaactcccggtgactacatggtcaccgcaagcgcggaagggtaccacagcgttacacgcaactgtagggttacttttgaggaggggcctttcccctgcaacttcgtcttgaccaaaacaccaaaacagagattgcgggaattgctcgcagccggagctaaggtgccacctgacctaaggcggcgactggaacggttacgcggacagaaagattag

SEQ ID NO: 11221 - DNA, 1680 bp, synthetic construct
  misc_feature 1..1680: note = source = /note="Description of Artificial Sequence: Synthetic coding sequence"
  source 1..1680: mol_type = other DNA
atgtggacaaacttcttcaagttgcgcctgttctgctgtttactcgctgtgttgatggttgttgtgctcgtcataaacgtgacccaagttgaatacctcgaccacgagaccgtgtcggccacatttatcgatagctccggccaattcgtgtcaagtcaggtgactggtatttctcggaacccctactgcgggtacgaccaacagactttatcctcccaagaacggatggaggaagactcactgctggccgctcttcacaggcaggtgcctgacgtcgggccagtaccctttgtaaagagcacggatccttcctccagttatttcgtcattctgaatagcgcagccttttttaaagtaggctctcagctggaagtgctagtgcacgtgcaggattttcagcgcaaaccaaagaagtacgggggagactacctgcaggcaagaattcattcgctgaagttgcaggccggagccgtggggagagtcgtcgattaccagaacggattttataaggtcttctttactctcctgtggcctggcaaagtgaaggtgtccgtgtccctggtgcatcccagtgaaggtattcgtgtgcttcagcgactgcaggaggataagcctgaccgggtctatttcaaatctctcttcagatcagggcgtatttccgaaaccacggaatgcaacgtctgtttgcccggaaaccttcctctgtgtaacttcacagatttgtacactggagagccgtggttttgcttcaaaccgaaaaagctaccttgcagttctcggattacccatttcaagggcggatatctcaaggggctcctgacggccgcagaaagcgcctttttccagtccggagtaaacataaaaatgccagtgaacagctccggcccagactgggtgacagtcattccaaggcgcattaaagagaccaatagtctcgagctctcgcagggatccggaacctttcctagtgggtactactacaaggatcaatggcggcctcggaagtttaagatgcggcaattcaacgacccagataatattaccgagtgtctgcagaggaaggtggtacatctcttcggagattccactatcaggcaatggttcgagtacttgactacattcgtgccagaccttgtggaattcaaccttggatcacctaaaaacgtgggacccttcttggcagtggatcagaaacataacatactgctgaaatacaggtgtcacggccctccaattagatttaccacagtgttctcgaacgagctccactatgtagcaaatgaactgaatggcatcgtggggggtaagaatactgtagtggcaattgccgtgtggtcacacttctctaccttccctctggaggtttatattagacgactgcggaatatcagacgagctgtagtgagattgctggatcggtcgcccaagaccgtggttgtgattcgcaccgcgaacgctcaggaactcggacccgaggtgtcgctctttaatagcgactggtacaatttccagctggacactatactacggagaatgttttcaggcgttggtgtatatctcgtggacgcttgggagatgaccctggctcattaccttcctcacaagctgcacccagacgaggtgatagtgaagaaccagttagatatgtttctgagctttgtctgtcccctcgaaacttag

SEQ ID NO: 11222 - DNA, 8199 bp, synthetic construct
  misc_feature 1..8199: note = source = /note="Description of Artificial Sequence: Synthetic coding sequence"
  source 1..8199: mol_type = other DNA
atggaacagacggattgcaaaccttaccagcctctgcccaaggtgaagcacgagatggacttggcatacacctcctcatccgatgagtcagaggacggcaggaagcccagacagtcttacaactcgcgcgagaccctgcacgaatacaaccaggagttacggatgaactacaattctcagtcacgcaagcgcaaggaggtggagaaaagcacacaagagatggaattctgcgaaacgagccatactctatgttcaggataccagaccgacatgcatagcgtgtcaagacacgggtatcagctggaaatgggatccgatgtggatactgagacagaaggtgctgcaagccctgaccatgccttaaggatgtggattagggggatgaaaagcgagcatagctcctgtttaagtagtcgtgcaaactccgcactgtcactgaccgataccgaccatgagcgcaagtcagacggggagaacggatttaaattcagccctgtgtgctgtgatatggaggcgcaggctggctccacacaagatgtgcagtcgagtccacataaccaattcacctttaggccccttccccctccccctccgccacctcacgcctgtacctgtgccaggaaaccgcctccagcggcagactctctgcaacggaggtctatgaccactagatctcaaccctcccccgctgccccagctcctccgacttcaacccaagatagcgtccacttgcacaactcatgggtcctgaattcaaacatccccttagagacaagacattttctctttaagcacggatccggcagttctgccatttttagcgccgcttctcagaactaccccctcacttcaaacacagtgtacagcccacctccccgtcctctaccaagaagcactttctctaggccggcattcacctttaacaagccttacagatgttgtaactggaagtgcactgccctatctgcgacagcaattacagtgacgctagccttgctgcttgcgtacgtaatcgctgtacacctgtttggactgacgtggcagcttcaaccagtcgagggcgagctgtatgccaacggggtgtcaaaaggcaacagagggacagaaagcatggataccacgtacagtcctatcgggggaaaggtttcagacaaaagtgaaaaaaaggtgttccagaaggggagagcaatcgacacaggggaggtggacatcggtgcacaggtaatgcagaccatccctcctggtctcttttggcgattccagattaccatccaccacccaatttacctcaagttcaacataagtctcgctaaggactccctgctgggcatctacggaaggcgcaatattccaccgactcacacgcagttcgattttgtaaagctgatggatgggaagcaacttgtaaagcaagacagcaaggggtctgatgatacacagcatagcccgaggaacctgatactcacgagcttacaggagacagggttcatcgagtatatggatcagggcccttggtaccttgctttctacaatgatggtaagaaaatggagcaggttttcgtcctcactaccgcaattgaaattatggacgattgttcgacgaattgtaacgggaacggcgagtgcatcagtggtcattgtcattgcttccccggttttctcggcccagattgtgctcgtgactcctgccctgtgctgtgcggaggtaatggggaatacgagaagggccattgcgtctgccgtcatggctggaaaggtcctgagtgcgatgtgccagaagaacagtgcatcgatccgacctgcttcggccatggcacatgtattatgggtgtctgcatctgcgtgccgggatataaaggagagatatgtgaagaagaggattgtcttgatccaatgtgctctaaccacggcatctgcgtcaagggagagtgccactgctcaactggttgggggggtgtaaattgtgagacgcccctgcccgtatgtcaagagcagtgtagcggtcacgggaccttcctgctggacgccggtgtgtgtagctgcgacccaaagtggacgggtagtgactgcagtaccgaattgtgtactatggaatgtggatcccacggggtctgtagccgtggaatctgtcagtgtgaggagggatgggttgggcctacgtgcgaggagcgctcttgtcacagtcactgtaccgagcacggccaatgtaaggacggaaaatgtgaatgtagtcccggttgggagggagaccactgcaccattgcccattacctcgatgcggttcgcgacggctgcccaggactgtgttttggcaacggacgctgtaccctcgatcagaacggttggcactgcgtgtgccaggtgggctggtccggtactggatgcaatgttgtcatggagatgctgtgcggcgacaacctcgacaacgacggcgacgggctgactgactgcgtggatccagactgttgccagcagtctaattgttatattagtcccttatgtcagggctctcccgacccactggatttaattcaacaatcccaaactctgttcagccagcacacctctaggctgttctacgataggattaagtttctgataggtaaagattccacacatgtaattcctcccgaggtcagtttcgactctcggagagcttgtgttattagaggccaggtcgtagcaattgacggaactcccctggtcggagtcaacgtgagtttcctgcaccattcagactacggatttacaatctctcgccaggatgggagctttgacctggtggcaattggcggtatttccgtgattttgatcttcgaccgcagccctttcctcccggagaagcggactctgtggctaccctggaaccaattcatcgttgtcgaaaaagttacgatgcaacgggtggtctctgatccgccttcttgcgacattagtaattttataagcccaaaccccatcgtactgcctagccctctcacgtccttcggcggttcgtgtccagaaagaggcacaattgttcccgagttgcaggtggtccaggaggagataccaattccatctagtttcgtgaggttgagttacctgagttctaggacgccaggatacaagaccctcttgcggatcttgttgacacattctactatccccgtcggcatgattaaagttcaccttaccgtcgctgtagagggcagattgactcagaaatggtttcctgctgccatcaacctggtgtatacattcgcatggaacaagaccgatatttatggacagaaggtgtggggcttagctgaggcgctggtaagcgtcgggtatgagtacgagacctgtccagactttatactctgggaacaacgcacggtcgtgttacaaggatttgagatggacgcaagcaaccttggagggtggagtctaaataagcatcatatactgaatccacagtcgggcatcattcacaagggcaacggcgagaacatgttcatctctcaacagccccctgtcattagcacgattatggggaatggccaccagagatcagttgcttgtactaactgcaatggcccagcccataacaataaactctttgcaccagtggcgcttgcaagtggcccagatgggtctgtgtacgttggggactttaactttgtccggaggatattcccatctgggaatagcgtatccattctggagctgagaaatcgtgacacaagacattccaccagtccagcacataagtactatctagctatggatcctgtgtctgagagtttgtacctttccgacactaacaccaggaaagtctataaattgaagagtttggttgagaccaaggacctgtcaaagaacttcgaagtggtagccggtaccggggaccagtgcttgccgttcgaccagagtcattgtggtgacggcggtagagcttctgaagcttctctgaattcaccaagaggcattactgtcgacaggcatggttttatatactttgtggatggcaccatgattcgcaaaatagatgaaaacgctgtgataactactgtcattggatcaaatggccttacgagcactcaacctctgtcttgcgactcggggatggacataactcaagtcaggctggagtggccaactgatttagccgtaaatcctatggacaacagcttgtatgtcctggataataacatagtattgcaaatctcagagaaccggagagtgcgcatcatcgccggacgccctatccactgccaggtcccagggatcgatcactttcttgtttccaaagtcgcaatccatagcacactggagtcggcccgagcaatctcggtaagccactctggccttttattcatcgccgagaccgacgagcggaaagttaatcgcattcagcaggtgaccactaatggtgagatttatatcattgccggagcccctaccgactgtgactgtaaaatcgaccccaactgtgactgcttttcaggggacggtggctatgccaaggatgccaagatgaaggccccaagctcccttgctgtgtcccctgatggcaccctctatgtcgccgacctggggaatgtccggatccggactatctctcggaaccaggcacacctaaacgacatgaatatctacgagattgcttcaccagcagatcaggagttataccagttcactgtgaacggcactcacctccacacgttgaacctgataacaagagattacgtttataattttacttataatagcgagggggatcttggggctatcacctcttcaaacgggaacagtgtgcatattagacgagacgctggcggaatgcctctgtggctcgtggtgccaggagggcaggtctattggctcactatctcctccaacggggtcctaaagcgtgttagcgcccagggatataacctagctctcatgacgtatccaggaaatactggcctgttggccacgaaatccaatgagaatggttggacgactgtctatgagtatgatccagaaggacacttaacgaatgcaacattcccgacaggagaggtgtcgagttttcactctgacctggagaaacttactaaggttgaactcgatacaagtaatcgtgagaacgtcctaatgtccaccaaccttactgctacttcaactatctacatcctcaaacaggagaatacccagtctacgtacagagtgaatcccgacgggtccctcagagtaacgtttgcctccggcatggaaatcgggctgagctcagagccgcacattttggccggtgcagttaaccctacactggggaaatgcaacatcagcctgccaggagaacacaatgctaatctgatcgaatggagacagcgcaaggagcagaacaaaggaaacgtgagtgcgtttgagcgaagactccgcgcacacaatagaaatctgctgagtatcgacttcgaccacatcacccggacaggtaaaatttatgacgaccaccggaagttcaccttgcggattctctacgaccagactggaagaccaatactgtggtcacccgtttctcggtacaacgaggtgaatatcacctactcaccaagcggcctcgttacctttatccaaagaggtacttggaatgagaagatggagtatgatcagtccggaaagatcatatctcgaacttgggcggatggaaagatttggagctacacatacttggagaaaagcgttatgctgttgctgcattctcagaggaggtacatctttgagtatgatcagccagactgccttctgtcggttactatgccgtctatggtgcggcatagtcttcagaccatgctgtccgtgggctactatcgcaacatttataccccacccgactccagtactagttttattcaggattatagtcgggatgggaggctactgcagacactgcatctcgggacgggaagacgtgtattgtataagtatacaaaacaggcaaggttatccgaggtcctctatgacaccacccaggtaactttgacttatgaggaatctagcggagttataaaaacaatccacctcatgcacgacggcttcatatgcaccattagatatcgccaaactggcccacttatcggtcgccagattttccgcttttctgaagagggtctagttaatgcccgattcgactattcctataataatttcagggtgacctctatgcaggccgtgatcaatgagacacctctacctattgacctctataggtacgtggacgtatccggacgcacagaacaatttgggaaattctctgtgattaattacgacctcaaccaggtgatcaccacaaccgtcatgaagcacactaaaattttcagtgccaatggccaagtgatcgaggtccagtatgagatccttaaagcaattgcctattggatgacaatccagtacgacaacgtgggcagaatggtgatttgcgacatccgagttggggtggatgcaaacataaccaggtacttctacgaatatgatgctgatggccaactgcagacggtatccgtcaatgataagacacagtggcgctacagttacgatctgaacggaaacattaaccttttatcacacggcaagtccgccaggctgacacccctccggtacgatttgcgtgacagaatcacgcgtctgggagagattcagtacaaaatggacgaagatggattcctgcggcagaggggcaatgatattttcgaatataattccaatggcctactgcagaaagcctacaataaggcatctgggtggacagtacaatactactatgacggactgggtcgccgagtcgcgtcaaaatcaagcttggggcagcatctacagttcttctatgctgacctgactaatccaatccgggtgacacatctctacaatcacacttctagcgagattacttcgctgtactacgatttgcaaggccacctgatagctatggaactgagttcgggggaagaatactacgtggcgtgtgataatacaggcacccccctggccgtcttcagcagcagggggcaggttattaaagaaatcctttacacgccatatggggacatctatcacgatacctaccctgatttccaggtgattatcggcttccatggcggtctatatgactttctgacaaagctggtgcacctggggcagcgcgactatgacgtggtggctggtcggtggactactcccaaccatcacatctggaaacagcttaatctgctgcccaaaccctttaatctgtactcctttgagaataactaccctgtgggtaaaatccaagacgttgcaaagtacactactgatatcagaagttggttggagttgttcgggttccagttgcacaatgttcttccgggatttccaaagccagagctggagaatctggagctgacctatgaactgctcagactccaaacaaagacccaggaatgggaccccggaaagacgattctgggaattcagtgcgaacttcagaagcagctgcggaatttcataagcctggaccagttgcctatgactccaaggtacaacgacggcaggtgcctggaagggggaaaacagcctcgctttgctgctgtccctagcgtgttcggtaagggcattaaatttgctattaaggacgggatagtgactgccgatatcatcggtgtcgccaacgaggactcccggaggctggccgcaatcctgaataatgcccattacctagagaatctccacttcactatcgaaggaagagacacccactacttcatcaaactgggatctctcgaggaggacctggtgctgatagggaatactggagggagacgtatcctcgaaaatggcgtgaacgtgacggtgtctcaaatgacttcagtacttaatgggaggacacgcaggttcgcggacattcagctgcagcatggggcactgtgcttcaatatcaggtacggcacgactgtagaggaggaaaaaaaccacgtactcgagattgcacgccagcgagcagtagcccaggcatggaccaaagaacagaggcgcctgcaggaaggcgaggaaggcatccgcgcatggacagagggagaaaagcaacagctgctgtccactggcagggtccaggggtatgacggctattttgtgttgagcgtagagcaatacctggagttaagcgacagcgctaacaacatccactttatgcgacagagcgaaatcggcagaagatag

SEQ ID NO: 11223 - DNA, 264 bp, synthetic construct
  misc_feature 1..264: note = source = /note="Description of Artificial Sequence: Synthetic coding sequence"
  source 1..264: mol_type = other DNA
atgaaagtgctgctgctgaccggcctgggcgcactgtttttcgcttattattgggatgacaattttgaccctgcctctctacagggggcacgggtgctgctcactggcgctaatgccggagtaggggaagaacttgcttaccactatgcgcgactcggcagccatctggtactcacagctcatactgaggccctgctccaaaaagcacgctggctgaccctcgtcgtttctacacttggcggaaggggaaagtggatcacatag

SEQ ID NO: 11224 - DNA, 1233 bp, synthetic construct
  misc_feature 1..1233: note = source = /note="Description of Artificial Sequence: Synthetic coding sequence"
  source 1..1233: mol_type = other DNA
atgcgcgcttgtatttcgctcgtgctagctgtattgtgtggcttagcctgggctggtaaaatcgagagctgcgccagcaggtgtaacgaaaagtttaatagggacgctgcatgtcagtgcgatcggcgttgtttgtggcatgggaattgctgtgaggattatgagcacttgtgtacagaggaccataaagagagcgagcccttgcctcagctggaggaagaaacagaagaggcgctggctagcaacctgtatagtgcccctacaagctgtcaaggtagatgctatgaagcttttgacaaacaccatcagtgtcattgcaatgccagatgccaggagtttggtaactgctgtaaggattttgagtccctctgtagcgaccatgaagtatcacatagctctgatgccattaccaaagaagagatccagagcatttcagagaaaatctacagagccgatacaaataaagcccaaaaggaagatattgtgttgaacagtcaaaactgcatctccccatccgagactcggaaccaagtggataggtgccctaaacccctattcacttacgtcaatgaaaagcttttctccaaaccaacatacgctgcatttatcaatctgttgaacaattaccagcgtgcaacggggcatggggaacatttctccgcccaggagctggccgaacaggacgcttttctgagagagattatgaagaccgccgtgatgaaggaactctatagctttttacatcatcagaatcgttacgggtcggagcaagagttcgtggacgatctcaaaaatatgtggtttgggttgtacagccgtggcaatgaagagggggatagcagcggcttcgagcatgtgttcagtggtgaggtgaagaagggaaaggtgactgggtttcacaattggatcaggttctatcttgaggagaaggagggtctagtggactactactcccacatctacgatggaccttgggatagttatcctgatgtcctggccatgcagtttaactgggatggctattacaaggaggtaggatctgctttcatagggagttcacccgagttcgagtttgccttgtacagcctctgtttcatcgccagaccaggcaaagtgtgtcaattatccctggggggttatccactcgcggttcgtacatatacctgggacaaaagtacctatggcaatggaaagaagtacatcgcaaccgcgtacatcgttagtagcacctag

SEQ ID NO: 11225 - DNA, 351 bp, synthetic construct
  misc_feature 1..351: note = source = /note="Description of Artificial Sequence: Synthetic coding sequence"
  source 1..351: mol_type = other DNA
atggccgcaggatccgccccaatgcaattgcatctccgcgcaaccatccgaatgaaggatggtctgtgtgtgccaagaaagtggatctatcacttgactgagggatcgaccgacctacgcacagagggacggcctgacatgaaaactgaactgttttcaagcagttgccccggtggcatcatgctgaatgagaccggtcaaggctaccagagatttctcctatacaaccgttcgcctcatcctcccgaaaagtgcgtggaggagtttaagtcattaacgagctgcttggactctaaggcgttcctcctgacgccaaggaatcaagaagcatgcgaactgagcaacaactag

SEQ ID NO: 11226 - DNA, 1200 bp, synthetic construct
  misc_feature 1..1200: note = source = /note="Description of Artificial Sequence: Synthetic coding sequence"
  source 1..1200: mol_type = other DNA
atgtccgcccgaggcaggtgggaagggggaggacgacgcgcttgtaggggctcactcggactggccagagcacagggggctgagcgagtaaccagctctgaacaacggcctgctatggccagcttaggcctgctgttactgctccttttaaccgctttgccacccttatggtcctcatccctcccaggactggatacagcggagtccaaggcaactatcgcggatctgattctctccgctctcgaacgggctacagtattcctggagcagagactccccgaaattaacctggatgggatggtgggtgtgcgcgtccttgaggagcagttaaagtccgttcgtgaaaaatgggcccaggaacccttgcttcagccactctctctccgggttggtatgctcggcgaaaaattggaagctgcgatccagcgatctctccactacctgaaactttcagatcccaagtacctccgggagtttcagttgacactgcagcctgggttttggaaactcccacacgcctggattcacaccgatgcttctctggtatacccaacgttcgggcctcaggacagctttagcgaagagcgctctgacgtttgtctggttcagttgttgggtacagggaccgattcgagtgaaccatgtggtctatctgatctttgccgctctctgatgacaaaaccagggtgttccggctactgcttatcccatcagcttctgtttttcctgtgggccagaatgagggggtgcactcagggccctctgcagcagtcacaggattatattaaccttttttgcgccaacatgatggacctgaaccgcagggctgaagccatagggtatgcatacccaactagagacatctttatggagaacattatgttttgcggaatgggaggtttcagcgacttttataaactgaggtggctggaagccatcctctcctggcagaaacagcaggaggggtgttttggcgagccagatgctgaggacgaggaactgtctaaagctattcagtaccagcagcacttcagcagaagggtgaagagacgagaaaagcagtttccggacggctgtagctcacacaacactgctacagccgttgccgctctgggtggatttttatacatcctggctgagtaccctccagccaatagggagccgcatccaagcacacccccaccaccaagctccaggtag

SEQ ID NO: 11227 - DNA, 510 bp, synthetic construct
  misc_feature 1..510: note = source = /note="Description of Artificial Sequence: Synthetic coding sequence"
  source 1..510: mol_type = other DNA
atgctgagttcggtggtgttctggggcttgatagctctcattgggacttcccgtgggtcttacccgttttcccactctatgaaacctcatttgcaccctcgcctgtaccacgggtgttacggcgacataatgacaatgaagacgagtggggctacttgcgacgccaattcagttatgaattgcggcatcagaggctcggagatgttcgctgaaatggacttgcgcgctatcaaaccctaccaaactctgatcaaagaggtgggacaacgccactgtgtggatccagctgtgattgccgcaataatcagcagagaatcccatggagggagcgtactgcaagatggctgggatcatcggggtcttaaatttggcttaatgcaactggataagcagacgtaccatcctgtgggggcatgggacagcaaggagcacctgtcccaagccaccgggatcctgactgaaaggatcaaagcaatccagaagaagttccctacttggagcgtggcttag

SEQ ID NO: 11228 - DNA, 300 bp, synthetic construct
  misc_feature 1..300: note = source = /note="Description of Artificial Sequence: Synthetic coding sequence"
  source 1..300: mol_type = other DNA
atggaacgtattagcgcttttttcagtagcatatgggacaccatcctgaccaaacaccaggaagggatttacaataccatttgccttggagtcttgttaggtttgcctttgctggtgattatcaccctgctcttcatttgctgccactgttgctggagccccccaggcaaaagaggacagcaacccgaaaagaacaagaagaagaagaaaaaaaagaaaaaaaaagatgaagaggatctgtggatttcagcccagccaaaattgttgcagatggagaagcgtccctcactcccagtttag

SEQ ID NO: 11229 - DNA, 468 bp, synthetic construct
  misc_feature 1..468: note = source = /note="Description of Artificial Sequence: Synthetic coding sequence"
  source 1..468: mol_type = other DNA
atgactagtctcaagtgcggagaaaatttgtacatgtcatcagcctcctctagctggtctcaggccatccagtcctggttcgatgagtacaatgactttgactttggagtggggcctaagaccccaaacgccgtcgttggacactacacgcaagtggtgtggtacagcagctaccttgtggggtgtggcaatgcctattgcccaaatcagaaggtgttgaagtactactatgtgtgccagtattgtcctgctggcaattgggccaacagactgtatgtgccttacgaacagggcgctccctgtgccagctgccccgataattgcgatgatgggctgtgcacaaacgggtgtaagtatgaagatctgtactctaattgcaaatcgctcaagttgactcttacctgtaagcaccagcttgtacgggactcatgcaaggccagctgcaactgttctaacagcatatactag

SEQ ID NO: 11230 - DNA, 2886 bp, synthetic construct
  misc_feature 1..2886: note = source = /note="Description of Artificial Sequence: Synthetic coding sequence"
  source 1..2886: mol_type = other DNA
atgttgttgctgctactgctcgctcccctctttctccggcctcctggcgctgggggagcccaaactccgaatgccacatcggaggggtgtcagatcatccatcctccatgggaagggggtatcaggtataggggactaacccgtgaccaggttaaagccatcaattttctaccggtcgattacgaaatcgagtacgtgtgtcgaggggaaagggaggtagtgggccctaaggtaagaaagtgcctcgccaacgggagctggaccgatatggacacaccatctagatgtgtgagaatctgcagtaagagctatctgaccctcgagaacgggaaggtgttcctgaccggcggagacctgccagctttggatggagcaagggtggattttagatgcgatcctgatttccatctcgtggggtcctctaggtctatctgtagccagggccagtggagtacaccgaagccccattgccaggtgaaccgaacaccccacagcgaacgccgtgccgtctacatcggggctctgttccccatgtcgggcggttggccagggggtcaggcctgtcaacctgccgtggaaatggcattagaggacgtaaactccaggagagatatactccccgattacgagctaaaactaatacaccacgactccaaatgcgaccccggacaggccactaagtatttgtatgagctcttatataacgatcctatcaaaatcatcctcatgcctggatgttcaagcgtatctaccctcgtcgccgaggccgctaggatgtggaacctcattgtacttagctatggcagctcatcccccgcattgtcaaatcggcagaggtttcctacctttttccgcacgcatccttccgcgacactgcacaaccctacccgtgtgaagctctttgagaaatgggggtggaagaagatcgcaacaattcagcagacaaccgaggtgttcacctctacgttggacgatcttgaagaacgcgtcaaggaggcaggcatagagatcactttcagacagagctttttctctgatcccgcagtacctgtgaagaacctcaagcgccaggacgccaggattatcgtaggcttgttctacgagacagaagcacggaaagtcttctgtgaagtctataaagaacgcctcttcggcaaaaagtatgtatggtttttaatcgggtggtacgcggataattggtttaagatctatgatccatcgataaattgtactgtggatgaaatgactgaggctgtggagggacacatcacaaccgaaattgtcatgctgaaccccgctaatacccgatctatatctaacatgacaagtcaggaatttgtagagaagctaacgaagcggctcaagcggcatccagaagagactggtgggtttcaggaagcccctctcgcttacgatgcaatttgggccctggcactcgcgctaaataaaacttcaggcggtggaggacgtagcggtgttagactggaagacttcaactacaacaaccagactattactgatcagatttaccgggctatgaattcatcctcattcgagggggtgtcaggccacgttgtctttgacgcaagcggttcgcgcatggcctggacactgatagagcagctgcagggtgggagctacaaaaaaatcggttactacgacagcaccaaagacgacctgtcctggtccaagacagataaatggattgggggaagcccaccggcagatcagaccctcgtgatcaaaacctttaggttcttgagccagaagctcttcatttctgtttctgtgctgtcaagcctgggcatcgtgctcgccgtggtctgtctctcctttaacatctacaatagtcacgtcagatacatccagaatagtcaacccaatctgaacaatctgacagctgtaggttgttcccttgctctggccgcagtgtttcctctagggctagatggataccacatcgggcgtaaccagttcccctttgtctgtcaggctagactgtggctgctgggactgggattctctctggggtacggctcgatgttcactaagatctggtgggtccatacagtcttcacaaaaaaagaagagaagaaagaatggagaaaaactttagagccatggaaactgtacgcaacagtcggcctacttgtcggtatggatgttctgacactcgccatttggcagattgtggatccactgcacagaactatcgaaacatttgcaaaagaggagcctaaggaagacattgatgtcagcatacttccccagctcgagcactgtagcagtcggaagatgaatacttggctgggtatcttctacggatataaagggctcctgttgctactaggcatcttcctcgcttatgaaacaaaaagcgtcagtacggaaaagattaacgatcatagagccgtggggatggccatatataatgtcgccgtcttgtgcctgataacagccccagtgaccatgatcttgtcctcgcagcaggacgctgcttttgcattcgcctccctcgccattgtttttagttcctatatcaccctcgttgtgttgttcgtgcccaaaatgcgacggcttatcaccagaggcgaatggcaatcagaagctcaggacaccatgaagactggatcttcaaccaataataacgaagaggagaagtcacggctgctggagaaggaaaaccgagagctggaaaagattatcgccgaaaaggaagaaagggtgagcgaacttcgacatcaattgcagtcaagacagcagcttcgctcacggcgacatccaccgaccccgcctgagccgagtggtgggctccctcggggtccacctgaaccccctgaccggctatcttgcgatggatcacgggtccatctgctctacaaatag

SEQ ID NO: 11231 - DNA, 444 bp, synthetic construct
  misc_feature 1..444: note = source = /note="Description of Artificial Sequence: Synthetic coding sequence"
  source 1..444: mol_type = other DNA
atggccggaccctggacatttactctcctttgcgggttgctggccgcaaccctcatccaagccactctgtctccaactgccgtgcttatccttggaccgaaagttatcaaggaaaagctgactcaggaactgaaagaccataatgccacgtccatcctacagcagctgcccctgctttccgcaatgagagagaagcccgctggaggaatccccgtcctcgggtccctggtgaatactgtgcttaagcacataatttggcttaaagtgatcacagccaatatactgcagcttcaggttaaaccctcagctaacgatcaggagcttctggtgaagattcctttagacatggtcgccggatttaacacccctctcgtaaaaacgattgtggagtttcatatgactactgaagcccaggctactattagaatggataccagcgcctag

SEQ ID NO: 11232 - DNA, 948 bp, synthetic construct
  misc_feature 1..948: note = source = /note="Description of Artificial Sequence: Synthetic coding sequence"
  source 1..948: mol_type = other DNA
atgaaggtgctcctgttgacaggactgggcgctttgttcttcgcctattactgggatgacaactttgacccagcctctttgcagggtgctcgggtattgttaacgggagctaatgctggcgtaggagaggaactggcctaccactacgccaggctgggtagccacctggtcctgactgcacacacggaagccctgctgcagaaagtcgtgggcaactgcagaaagctgggggctccaaaggtgttttacatcgcggctgacatggcatcacccgaagctccagagtctgtagtacagttcgctctggataaactgggtggtttagattatctggtgcttaaccacatcggaggagccccagccggtaccagagccagaagccctcaggcaacacggtggctgatgcaggtgaattttgtgtcttatgtacagttgacttccagggcactcccctctttgactgactccaaaggttcgctggtcgtggtctccagcttgctggggcgagtgccgacttccttcagcaccccatattccgccgctaagtttgcattggacggcttcttcggaagtttgagaagagaattggatgtgcaggatgtgaacgtggctattaccatgtgcgtcctcggtctcagggacagagcctcagccgcagaagctgttcggagcagcacttcccgacctaggcagcccgagcacagaggagttcctctgcagtctcagactgctatgttccttccaccgactgtacccggagctaggaccttgacggagacacccctccgcggatggccccagcccaagatgaaatcatcacggcagaagagcaaaaccgagaagaacgacggccatctggagccggtcacggcctgggaggtgcaggtgcctagagttcgccgactgtgccggggactggctcgtcctcatctgttcggccatgactag

SEQ ID NO: 11233 - DNA, 285 bp, synthetic construct
  misc_feature 1..285: note = source = /note="Description of Artificial Sequence: Synthetic coding sequence"
  source 1..285: mol_type = other DNA
atgcagcacagtctggtcttcttcttcgccgtgatccttcatctgtcacacctcctccaccttgatgcttctattcatcccttccggttgcccttttctagcaagcctttcctactgattcccatgtctaacacaaccctaccccacacagcttggcctctgagttttctacaccagaccgtgagcaccttgaaagctgtggccgttacccacagcctgtggcacctccaaattccagtcgactgtcaggcctgtaatagaaagtcgaaaaagatctactgttag

SEQ ID NO: 11234 - DNA, 783 bp, synthetic construct
  misc_feature 1..783: note = source = /note="Description of Artificial Sequence: Synthetic coding sequence"
  source 1..783: mol_type = other DNA
atggaaaaatttaacaccatcagcgtgtccaagtgcaataaggagaccgttgccatgaaggagaagtgtaagttcggaatgacatccacaatccctagtggacatgtgtggcggaacacatggaaccctgttagttgcagcctcgctaccgtcaagatgaaggaatgtctgagaggaaaattaatctatctgatgggcgatagcactatcaggcagtggatggaatatttcaaagctagcattaacactctgaaatccgttgatcttcatgagagcgggaaactccagcatcagttggccgtggacctggaccgaaacattaatatccaatggcagaagtattgttatccattgatcggcagcatgacctactcagtcaaggagatggagtatttgacaagagcaatagatagaaccggaggcgaaaaaaataccgtgatagtcatttctctcggacaacactttcgaccattccccatcgatgtatttatccgaagggcgctgaacgttcacaaggccatccagcacctgctgctgcgaagccccgacaccatggtcatcatcaaaacagaaaacatccgtgagatgtataatgacgcggagaggttcagcgacttccacggttatatccagtatttaatcataaaagatatctttcaggaccttagtgtttcaatcatcgacgcttgggacattaccattgcatacggaacaaacaacgttcatcctccgcaacatgtcgtaggtaatcagatcaatatccttttgaattatatctgttag

SEQ ID NO: 11235 - DNA, 1644 bp, synthetic construct
  misc_feature 1..1644: note = source = /note="Description of Artificial Sequence: Synthetic coding sequence"
  source 1..1644: mol_type = other DNA
atgtcctccaacacgatgcttcagaagacattgctgatccttattagcttctccgttgtcacttggatgatctttataatcagccagaacttcaccaagctgtggtccgccctcaacctgagtatcagcgtgcactactggaacaattcggcaaaatccctcttccctaagacctcccttattcccctcaaaccactgactgaaactgagctgcgtattaaggaaataatcgaaaagcttgatcagcagataccccctcgcccttttacccatgttaacacaaccactagtgccacacactctaccgcgactattctgaatcctcgggacacctactgtcgcggagaccagttagatattctattggaggttcgggaccaccttggccagagaaaacaatatggaggcgacttcctacgagccagaatgtcatctcctgcgctgaccgcaggtgcgagcggcaaagtgatggacttcaacaatgggacctaccttgtctcctttacactgttctgggaaggacaggtgtcactaagtctgctgctgatccacccttccgagggcgcttccgccctttggagagcaaggaaccagggctacgataagataatattcaagggaaaatttgtgaacggtactagtcacgtttttacagagtgcggcctgactttaaacagcaatgcagaactgtgcgagtacttggacgatcgcgatcaggaggcgttctattgcatgaaacctcagcatatgccctgcgaggctctcacctacatgaccacccgcaaccgagaagtgtcctacctgactgataaggagaatagtctattccaccgcagtaaggttggtgtcgaaatgatgaaagataggaagcacattgacgtgaccaactgtaacaagagggagaagattgaggagacttgtcaggtcgggatgaagccacctgtgcctgggggatacactctgcagggtaaatggataaccacattctgtaaccaagtgcagctggacactatcaaaatcaatgggtgtctgaagggcaagctcatctacttattgggcgactctaccctgcgccaatggatttactacttccccaaagtggtaaagactttgaagtttttcgatctgcatgagaccgggattttcaaaaagcatctgttgctggacgccgagcggcatactcagattcagtggaaaaaacattcctatccctttgttacttttcaactctacagtttgattgaccacgattacataccacgcgaaattgacaggctgtctggtgacaagaacaccgccatcgtgattacattcggacagcattttagaccctttccgatagatatttttatcaggcgtgccatcggagtgcaaaaagccatcgagaggttgttccttaggtcccccgctactaaagtgattatcaagactgagaatatacgggagatgcacattgaaactgagaggtttggcgactttcacggctacattcactacttgattatgaaagatatctttaaggatctgaacgtgggaatcattgacgcttgggatatgactatcgcatacgggactgataccattcaccctcctgaccacgtcatcggaaaccagatcaacatgttcttaaattatatttgctag

SEQ ID NO: 11236 - DNA, 399 bp, synthetic construct
  misc_feature 1..399: note = source = /note="Description of Artificial Sequence: Synthetic coding sequence"
  source 1..399: mol_type = other DNA
atgctaatgttattcgtgtttggtgtcctcttgcatgaggtgtccttaagtgggcagaacgaagccccaccaaacacacattctatccctggtgagccgctctacaattatgcttcaatccgtttgccggaggaacacattcctttttttttgcacaacaatcggcacattgccaccgtctgccggaaggacagtctgtgtccctacaagaaacatctggaaaaactgaagtattgctggggctacgagaaatcctgtaagcctgaattccgcttcgggtacccggtctgcagctacgtggacatgggctggaccgacaccctcgagtcagcggaggacatattctggaagcaagccgattttgggtatgcaagggaaaggctcgaggagatgcattag

SEQ ID NO: 11237 - DNA, 861 bp, synthetic construct
  misc_feature 1..861: note = source = /note="Description of Artificial Sequence: Synthetic coding sequence"
  source 1..861: mol_type = other DNA
atgggctccgccctatttgttaaaaaagagctgcagctacaggcaaattttctggggaacgtgaaaagactatatgaagccgaagtgttcagtaccgacttttctaaccccagcattgctcaagcccgtataaactcgcatgtcaagaagaagactcaggggaaggtggttgacataatccagggcctagatctccttactgcaatggtgttggtaaaccatatcttttttaaggcgaagtgggagaagcctttccatcctgagtacacgcgcaagaattttccatttcttgtcggcgaacaggtgacagtgcatgttccaatgatgcatcagaaggagcaatttgcattcggggtcgacactgaactgaattgttttgttctgcagatggactataaaggagatgcggttgccttcttcgtactgccttctaaaggcaagatgcggcagttggagcaagcactgagcgctaggactctgcgcaagtggtcacactctctacagaaacgctggattgaggttttcatcccccgtttttcaattagcgccagctataacctggaaaccatcctccccaagatgggaattcagaacgtgtttgacaagaatgccgatttttcaggcatcgccaagcgagactctctccaggtttccaaggctacacataaggccgtcttggacgtttcggaggagggaactgaagccacagccgcaacaaccacaaaattcatcgtgcggagtaaggacggaccaagctatttcactgtctccttcaaccggacctttctgatgatgattaccaacaaggccaccgacggaatactgttcttgggaaaggtagagaaccctaccaaaagctag

SEQ ID NO: 11238 - DNA, 60 bp, synthetic construct
  misc_feature 1..60: note = source = /note="Description of Artificial Sequence: Synthetic coding sequence"
  source 1..60: mol_type = other DNA
atggggtggctgacgcgcattgtgtgcctgttctggggtgttctgctgactgcccgatag

SEQ ID NO: 11239 - DNA, 1197 bp, synthetic construct
  misc_feature 1..1197: note = source = /note="Description of Artificial Sequence: Synthetic coding sequence"
  source 1..1197: mol_type = other DNA
atgaagtttcaaggccctctagcatgcctgcttctggcactttgcctgggatctggagaagctgggccacttcagtccggcgaagagagcacagggacaaatatcggggaagccctggggcacggactcggcgacgcactctctgaaggggttggcaaagctataggaaaagaagctggaggcgctgctggaagtaaagtatccgaggccctggggcaggggactcgagaagcggtagggacgggtgtgagacaggtgccaggcttcggcgtcgccgatgctttgggcaatagggtgggggaggcagcacacgcactgggcaacaccggccatgagatcggtcgtcaggccgaagacgtgatccgacatggcgcagatgcggttcgcggttcctggcagggggtcccgggtcacaacggcgcttgggaaacttccggcggacacgggattttcggatcccaaggaggccttggtggacagggacaaggtaacccagggggactggggaccccttgggttcatggctatcccggtaatagcgccggatcctttggtatgaacccacagggagccccttggggccaaggaggtaatggcggaccacccaactttggaacgaatacacagggagctgttgctcagcctggctatgggagtgtgcgggctagtaatcagaacgaaggttgcaccaacccgcctccaagcggatctggaggcggttcctcaaacagcggcggagggagtggctcccagagtggatcttctgggagcggaagcaatggtgacaataacaacggcagcagctcagggggatcttcttctgggtcctcatcagggggatcctccggcggtagctctggcggatcctccggaaatagcggtggtagtagaggtgattccgggtccgagagcagttggggcagctcaacaggatcttcttcaggtaaccacggcggaagcggaggaggtaacggccataaaccaggatgtgaaaaacctggcaatgaggctaggggatctggcgaaagtgggatacagggctttagaggtcagggtgtgagctcaaacatgagaaattcagagacgtctcctggcatgtttaatttcgacacattctggaaaaactttaaatccaagctgggcttcattaactgggacgctattaataaagaccaaaggtccagccgaatcccttag

SEQ ID NO: 11240 - DNA, 81 bp, synthetic construct
  misc_feature 1..81: note = source = /note="Description of Artificial Sequence: Synthetic coding sequence"
  source 1..81: mol_type = other DNA
atggctccaaaaaagttgagttgcctcaggtcgcttctcctgcccctgtccctgacattgctgctcccacaggccgattag

SEQ ID NO: 11241 - DNA, 696 bp, synthetic construct
  misc_feature 1..696: note = source = /note="Description of Artificial Sequence: Synthetic coding sequence"
  source 1..696: mol_type = other DNA
atggctcagctgtttctcccccttcttgctgccctggtcctggctcaggctccagccgcactggctgatgtgctcgaaggcgattcaagtggaatctacagatgtgaagtgcagcacggtatagacgattccagcgatgcagtggaggtgaaagtgaagggcgtggtattcctgtatagagaaggtagtgccagatacgccttcagcttctctggtgcacaggaggcttgtgcaagaatcggggctcatatcgccactcctgagcagctctacgccgcttacttgggaggttatgaacagtgcgatgccggatggcttagcgatcagaccgttagatatcccattcagacacctagggaggcctgttatggcgacatggacggcttcccgggtgtgcgcaactacggtgtagtggaccccgacgacctgtatgacgtttactgttacgctgaggacctcaatggagagttgtttctgggagaccctcctgagaagttaaccctcgaagaagcccgagcttattgccaagagagaggggctgaaatagcgactaccggccaactttacgcagcctgggatggtggtctggatcactgctccccaggttggcttgcggatggttctgtgcgttatcctatcgttaccccgtcacaacggtgcggtggcggtctccctggtgtgaaaacattattctag

SEQ ID NO: 11242 - DNA, 600 bp, synthetic construct
  misc_feature 1..600: note = source = /note="Description of Artificial Sequence: Synthetic coding sequence"
  source 1..600: mol_type = other DNA
atggacgagctgctgcctctgatccccgttctagaacaatacaagacagacgctaagctgattacacagttcaaagaggagatcaggaacctatctgctgtgcttaccgggatacaagaagaaatcggcgcatatgactacgaggaactgcatcagcgggtgctgtctctcgagacgaggctcagagactgtatgaaaaaactgacctgcggcaagctgatgaaaattactgggcctgtcaccgttaaaacttctggaaccaggtttggggcatggatgactgacccgcttgcatccgagaaaaacaatcgcgtgtggtatatggactcttacaccaataataagattgtcagagaatacaaatccattgctgattttgttagcggcgcagaatctaggacctataacctcccctttaagtgggctggtacaaatcatgtggtctacaacggctcactgtattttaataagtatcagtctaacatcataattaaatactcattcgacatgggtcgcgttctggcccagagaagtctggagtacgctgggttccataacgtgacccccacgcacggagtggactcactaacttctacctag

SEQ ID NO: 11243 - DNA, 609 bp, synthetic construct
  misc_feature 1..609: note = source = /note="Description of Artificial Sequence: Synthetic coding sequence"
  source 1..609: mol_type = other DNA
atggccgatatgcagaacctagttgagaggctggagcgggctgtgggcaggttggaggcagtatcccacacaagcgacatgcacagggggtacgcagatagtcccagtaaggctggggctgctccctacgtgcaggcgttcgatagcctgctggcagggcctgtcgccgaatacttaaaaatatctaaggaaattgggggagatgtccagaaacacgccgagatggtccacacaggtctgaagctggaacgcgctctcctcgtgacagctagtcagtgtcagcagcccgcagaaaataaactgtccgacctcctggcgcctatttccgagcagataaaagaggtaatcacattccgggagaaaaacaggggcagtaaactttttaatcacctgagcgctgtgagcgaatctatccaggcactaggctgggtcgcgatggcccctaaacccggtccttatgttaaagaaatgaatgatgccgcaatgttttatacaaacagagtgttgaaggagtacaaagacgtcgataagaagcacgtcgattgggtgaaagcttacttgagcatctggactgagctgcaggcttacatcaaagaattccatacctag

SEQ ID NO: 11244 - DNA, 2886 bp, synthetic construct
  misc_feature 1..2886: note = source = /note="Description of Artificial Sequence: Synthetic coding sequence"
  source 1..2886: mol_type = other DNA
atgctcttactattgctgctggcaccgctttttctgagacccccaggagctggcggagcgcagactcccaatgctacctcagagggatgtcagattattcacccaccctgggaaggcggaatcagatacaggggccttactagagaccaagtaaaggccatcaatttcctgcctgtagactatgagatcgagtatgtgtgcaggggggagagggaggtggtgggcccaaaagtgcggaagtgtctagccaacggatcatggaccgatatggacactccgtctcgctgcgtgaggatctgcagcaagagctatctgactcttgaaaacggtaaggtgttcctcaccggcggagatttgcctgctttggacggagccagagtggacttccgatgcgatcctgactttcatcttgtaggatcctcgcggtccatctgcagtcaagggcagtggagcacacccaagccccactgccaggtgaacaggactccacatagcgaacggagagcggtctatatcggggcactgtttcctatgtccgggggatggcctggtggacaagcctgtcagcccgcagtcgagatggcgctggaggatgtaaacagcaggcgcgacatcctccccgattacgagttgaagctgatccatcacgacagtaaatgcgatcctggacaggcgacgaaatatctttatgaactgctatacaacgacccgataaagattatcctgatgcccggatgttcatcagtgtccactttggtcgcagaggcagcacgcatgtggaacctcattgtcttgagctacggctcctcctccccggctctgtctaatcgacaaaggttccctactttttttcgcacacacccatctgcaacccttcacaaccctacaagagtcaaactctttgagaagtggggttggaaaaagatcgctaccatccagcagaccaccgaggtgtttacctctacgctcgatgacttagaggaacgcgttaaggaggccggaatcgagatcacatttcggcagagtttcttcagcgaccctgctgttcctgttaaaaacttaaaacgccaggacgcaaggataatagtgggactgttttacgagactgaagcacgaaaagtgttttgtgaagtatataaagaacggctgttcggcaaaaagtatgtgtggttcctcatcgggtggtacgccgataattggtttaagatctatgacccatccatcaattgtaccgtggatgagatgactgaggccgttgagggccacataaccacggagattgttatgttaaaccccgcaaatactagatccatcagcaacatgacaagtcaggagttcgtggagaaattgaccaagcgattaaaacgccaccccgaagagactggaggtttccaagaggccccactggcgtatgacgctatatgggcattagcactcgccttgaacaaaacctccggcggtgggggtcgaagcggcgtcaggctcgaggattttaattataacaatcaaaccatcactgatcagatctatagggctatgaactcttccagctttgaaggtgtgtcaggtcacgtggtgttcgatgcgtccgggtcccggatggcatggactctaattgagcaactacagggagggtcctataaaaagatagggtattatgattccacaaaggatgacctgtcctggagtaagacagataaatggatcggagggagtcctcccgcagatcagacactcgtgatcaagactttccgctttctgagtcaaaagctttttataagtgtctctgttttatcatcactgggcatagtcctcgcggtggtgtgtctgtcgttcaacatttataattcacacgtgagatatattcagaattcccaacctaatcttaacaacctgactgcagtcggatgtagcctagcattggccgctgtctttccactgggcttagatggctaccacatcggtagaaaccaattccctttcgtttgtcaggctcgactgtggctgctgggcctgggattttctctgggctatggatctatgtttaccaaaatttggtgggtacacacagtatttactaagaaggaggagaaaaaggagtggcgtaaaaccctagagccctggaagctctacgccaccgtgggcctgttggttggaatggacgtgctgaccctggcaatatggcaaattgtggacccactgcataggaccatagagacttttgccaaagaggagcctaaggaagatattgacgtctcaatcctgcctcagctggagcattgttctagcagaaagatgaacacctggctaggcatcttctacggttacaagggactgttgctgctgctcggcatattcctggcatatgaaactaagtctgttagtacagagaagatcaatgaccacagggcagtggggatggcgatttataacgttgccgttctgtgcctgatcaccgcccctgttaccatgatcctaagcagccagcaggacgccgctttcgcttttgcctcccttgccattgttttctctagttacataacgctggtggtcctcttcgtcccaaagatgagaagactaattacacgcggtgagtggcagagtgaagctcaggatacaatgaaaaccggctccagcaccaacaacaacgaggaggagaaaagcagactgctcgaaaaggaaaaccgagaactcgaaaagataatagcggaaaaagaagagagggttagcgaactcaggcaccaactgcagagtaggcaacagctgaggtccagacgtcacccccctaccccccctgagccctccggcggtctccccagaggtccaccggaacctccggacagattatcatgcgacggctcgcgggtgcatcttctgtacaaatag

SEQ ID NO: 11245 - DNA, 351 bp, synthetic construct
  misc_feature 1..351: note = source = /note="Description of Artificial Sequence: Synthetic coding sequence"
  source 1..351: mol_type = other DNA
atggccgctggctcggccccaatgcagctgcatctccgggctaccatccgcatgaaggacggactctgtgtgccccgaaagtggatatatcatttaacagaaggcagcaccgacctcaggaccgagggcagacccgatatgaagaccgagttgttttcttcttcctgtcctggcggtataatgctcaacgaaactggccaggggtaccaacgtttcctcttgtacaatcggtccccacaccccccagagaagtgcgtggaagagttcaagagcctaacctcctgtcttgactctaaagccttcctgttaaccccacgcaatcaggaagcatgcgagctgtccaacaattag

SEQ ID NO: 11246 - DNA, 2334 bp, synthetic construct
  misc_feature 1..2334: note = source = /note="Description of Artificial Sequence: Synthetic coding sequence"
  source 1..2334: mol_type = other DNA
atggctgcagcgggactggtcgctgttgccgctgctgctgaatactcagggacagttgcttctggtggtaatctgccaggcgtgcattgcggccctagcagtggcgcaggtcctggctttggaccagggagttggagtcggtccttagatcgggctcttgaagaagctgcagtcaccggcgtcctgtccctgtctggtcggaaactccgggagttcccgagaggagccgcaaaccacgatctgaccgatacaactcgcgctgatttatcccgaaatagactgagcgagatacctattgaagcttgtcattttgtttctttggagaacttgaatctgtatcagaattgtatacgatatatcccagaggcaatacttaatctgcaggccctcacatttcttaacatcagcagaaatcagctcagcactctgccggtccatctttgcaatcttcccctcaaggttttgatcgcctcaaacaataaattagtgagtctacccgaagagatcgggcacttaaggcatttgatggaattggacgtgtcatgcaacgagattcagacaatcccaagtcagattggaaacctggaggctttgcgggacttgaatgtgcggaggaatcacctcgtccatttgccagaagagctggctgagttgccactgatcaggctagatttcagctgcaacaaaataacgactatcccagtttgctatagaaacctcagacacctccaaaccatcaccctggataacaaccccctgcagtccccgcctgctcagatttgtattaagggcaaagtgcacatctttaaatacctaaatatacaagcctgtaaaatagctccagatctgccggattatgacagaagacctttaggattcggaagctgccacgaggaactgtattcaagtagaccgtatggggcacttgattctggctttaactcagtggactccggagataagcgctggtcaggaaatgaaccaacagacgagttttctgatctgccactccgggtcgcagagatcaccaaggagcagcgcctgcgccgtgagagccagtaccaagaaaatcgcggttccttggtagtgacgaatgggggagtagagcacgacttggatcagatcgattatatagacagctgcacagctgaggaggaggaagcagaggtgaggcaacccaaagggccagatccagatagcctttctagccagtttatggcttacattgagcagcggagaatttcgcatgaagggtcacccgtcaagcccgtggcaattagggagtttcagaagacagaggatatgcggagatatctgcaccagaatagggtgcctgctgaaccctcgagcctcttaagcctctctgcctcccacaaccagcttagtcacacagacctggagctgcaccaacgtcgagagcagctcgtggaacgcacacgcagggaggcacagctggccgctctacagtatgaggaggaaaaaattcggacaaagcagatccagcgggacgcggtgctcgattttgtcaagcagaaggcatctcagagcccccagaaacagcatcctctgctggatggcgtggacggggaatgcccatttccgagtcgtaggtcacaacacaccgatgactctgcgctgtgcatgagtttaagcggcctgaaccaggtgggatgcgccgctacccttccacacagcagtgcatttacccctcttaaaagcgacgaccgtcccaacgccctgctgagctctcccgcaaccgagactgtgcatcacagccccgcatactcattccccgctgccatccaacgtaatcagccccagcgacccgagagtttcttgtttagagctggcgtgcgggcagaaacaaataagggtcacgcttctcccctacctccatctgctgcgcctactaccgatagcaccgactctattacgggacagaactcgcgccaacgggaggaagagttggagctcatcgaccagctgcgcaaacacatcgaatatcgactgaaggtgtccttaccatgcgatctgggcgctgcgctgacagacggagtcgtgctgtgtcacctggcgaaccacgtcagaccgcgatctgtaccatctatccacgtgccatcccctgcggtgccaaaattaaccatggccaagtgcaggcgcaatgtggaaaactttctggaggcatgccgtaagatcggagtgccccaggagcagttgtgcctgccccttcacattctggaagagaagggcctgtcacaggtcgcagtaaccgtacaggctctgctggagctagctcctccaaagcagcaacaacatcagctgagtgccgtctag

SEQ ID NO: 11247 - DNA, 834 bp, synthetic construct
  misc_feature 1..834: note = source = /note="Description of Artificial Sequence: Synthetic coding sequence"
  source 1..834: mol_type = other DNA
atgcttcatcctgaaacgagcccaggacggggacatctgctggcagtgttgcttgccctactgggtaccacctgggccgaggtgtggcccccacagctacaggaacaagccccaatggctggggctttaaatcgcaaggaaagctttcttcttttaagccttcataacagactccgatcctgggtccaaccccctgctgctgatatgaggcgcctgttagtctgggccacttcatctcagctggggtgtgggcgtcatctgtgcagcgccggacagactgccatcgaggctttcgtttgcgcttactccccaggaggtaactgggaagtcaacggcaaaaccatcattccctacaagaagggggcttggtgctccctttgtactgccagtgttagcggctgcttcaaagcctgggaccacgctgggggactgtgcgaggttccccgaaacccttgtcggatgtcttgccagaatcacggccgtctgaatatatccacatgtcattgccactgtcctcctgggtacacaggacgatactgtcagggtcacctgcctaattcaaatatgccgcactcggccatgggaacaaagcccaagaccccaggcgtacccgctataggatcactggtgcgctgcagtctgcagtgtgtgcatggcagatttagagaggaagaatgttcctgtgtttgcgatatcggatacggtggagcacaatgcgcctctgagtcctgcccaagagccccaaaagagcccgcaccccttaagactcccctccagtggggcatatcatcccaggagccagctgtatgcttgtcattccagcttattcagtag

SEQ ID NO: 11248 - DNA, 456 bp, synthetic construct
  misc_feature 1..456: note = source = /note="Description of Artificial Sequence: Synthetic coding sequence"
  source 1..456: mol_type = other DNA
atgtctgacctgttactgctgggtctgataggcggacttacactactgctgctgttgacattgttagcctttgctgggtacagtggactgctcgctggcgttgaagtgtcagccggatcccctcccatccggaatgtcacagtggcatataaattccacatggggctttacggggaaacaggacggctgtttaccgagtcatgttcaattagcccaaagctgcgtagcatcgcagtgtactatgacaatccgcacatggtcccaccagacaagtgtaggtgcgctgtggggagcatactaagcgagggggaagagtcaccttctcccgagctcatagacctatatcaaaaattcgggttcaaagtttttagtttccccgcaccatcccacgtcgtgaccgcgaccttcccttacactacgatcttgtccatctggctggctacacgaagggtatag

SEQ ID NO: 11249 - DNA, 390 bp, synthetic construct
  misc_feature 1..390: note = source = /note="Description of Artificial Sequence: Synthetic coding sequence"
  source 1..390: mol_type = other DNA
atggccgctggaagcgcgccaatgcagctgcacctgagggcaactatccgaatgaaggatgggctgtgtgtcccacggaagtggatttatcacctgacagaaggttcgacagacttacggaccgaaggcaggcccgatatgaagactgaactgttttcatccagttgccctggcggaatcatgctgaacgagacagggcaggggtaccagcgcttcttgctttacaatagatccccccaccccccagaaaaatgtgtggaggaattcaaatcgctgaccagttgcctggattcgaaggcgttcctcctcactccgaggaatcaggggaaaggcctgaagagccataagacagggctcggtctgaccaagtcgtcgggcgtgacaggatag

SEQ ID NO: 11250 - DNA, 390 bp, synthetic construct
  misc_feature 1..390: note = source = /note="Description of Artificial Sequence: Synthetic coding sequence"
  source 1..390: mol_type = other DNA
atggcagcagggagcgcaccaatgcagctgcatctgagagcaaccatcaggatgaaagacggcctgtgtgtcccgcgaaaatggatatatcaccttaccgaaggcagcaccgacctgcggaccgaaggccgacctgatatgaagacagagctcttctcgagctcttgcccaggaggcatcatgttgaacgaaacaggacagggctaccaaagatttctgctctacaatcgctcaccccaccctcccgagaagtgcgtcgaagaattcaagagcctgaccagttgcctcgatagtaaagcttttctactgacccctagaaatcaggggaaaggccttaaaagtcacaaaactggcctcggactgaccaaaagttcgggggtcacaggctag

SEQ ID NO: 11251 - DNA, 891 bp, synthetic construct
  misc_feature 1..891: note = source = /note="Description of Artificial Sequence: Synthetic coding sequence"
  source 1..891: mol_type = other DNA
atggaggctctgctactgggtgccggactgctgcttggggcttatgtccttgtctactataatctggtcaaggcacccccatgtggcggtatgggaaatcttcgcggaaggacagcggtggtgactggaatctcctcttgcggacggacaagggaagcatttaatctgttgctcagagtgaaccacataggcccattcctattaactcacctcctgctgccgtgcctgaaagcttgcgcccctagtcgagttgtagtggtggcctctgccgcacattgtaggggcaggctggacttcaagcggctggatcggcctgtcgttggttggaggcaagaactgcgtgcctatgcggacacaaaactggccaatgtcctgttcgctagagaactggccaatcagctcgaagccactggggttacctgttacgccgcacatcctgggccagtgaattctgagttgttcctgagacacgtcccgggatggctgcgacctctcttgcgaccacttgcctggctggtgctgcgcgctccgcgagggggtgcccagactccactgtactgcgccttgcaagaaggcattgaacctctgtctggtcgctattttgcgaactgtcacgtcgaggaggtcccaccagctgccagagacgacagagctgcccacaggctgtgggaggcctccaagaggctggcagggctgggacctggggaagatgccgaaccggacgaggacccacaatccgaagattcagaagccccaagttcactgtcaactcctcatcctgaagagccaacagtctcacagccttatccttcaccacagtcaagccccgacctgagcaaaatgacacaccgtattcaggcaaaagttgagccagagattcagctgtcctag

SEQ ID NO: 11252 - DNA, 567 bp, synthetic construct
  misc_feature 1..567: note = source = /note="Description of Artificial Sequence: Synthetic coding sequence"
  source 1..567: mol_type = other DNA
atgttccaccaaatctgggcagccctgctgtatttttacggaattatcctgaattcgatttatcagtgccctgagcacagccagctcactacgcttggtgtcgacggaaaggaattcccggaggtccatctaggccagtggtactttatagccggagccgcaccaaccaaggaggagctggccactttcgacccagtcgacaatatcgttttcaacatggcggcagggtccgccccaatgcaactccatctccgagctactatcaggatgaaggacgggctgtgcgtgccgcgtaagtggatctaccatctgactgagggcagtacggatcttcggactgagggccgtccggatatgaaaaccgagttgttcagtagctcttgccccggtggaataatgctgaacgagactggccagggttatcaacgctttctcctgtacaacaggtcaccacatcctccagaaaagtgtgtcgaagaattcaagtctctgacgagctgtcttgacagcaaggccttcctcctgaccccccgaaatcaagaagcctgcgagctgagcaacaactag

SEQ ID NO: 11253 - DNA, 978 bp, synthetic construct
  misc_feature 1..978: note = source = /note="Description of Artificial Sequence: Synthetic coding sequence"
  source 1..978: mol_type = other DNA
atgcagggcagagtggctggatcttgcgctcctctgggtctccttctggtctgtcttcatttgcccggactcttcgcccgaagcataggcgtggtcgaggaaaaagtgagccaaaacttaggcaccaacctcccacagcttggccagccatcaagcaccggtcccagcaactctgaacacccccaacctgcactggatccaaggtccaacgatctggccagagtgccattgaaactgtctgtcccagcctcagatgggttcccccctgccggaggatctgcagtgcagcgctggcccccttcctggggcctgcccgctatggactcctggcctccagaggacccatggcagatgatggcagccgctgcagaggataggctgggtgaggcactccccgaagaactctcttacctgtcatccgctgccgctctggccccagggtccggccctctgcccggtgaatcaagtccagatgcgactgggttgagccccaaagccagcctcctgcatcaggactcagaaagccggaggctgcctcgaagcaattctcttggtgcaggaggaaagatactcagccagaggcctccgtggtcactgatccaccgggtgctgcccgatcacccctgggggaccctgaaccctagcgtgagctggggtggcggaggacctggtaccggctggggcactaggccaatgccccaccctgaaggtatttggggtattaataaccagccacctgggacgagctggggaaatatcaaccgttaccccggaggcagctggggaaatatcaacagataccctggtgggtcttggggaaatattaacagataccccggaggctcttggggcaacatacacttgtaccccggtattaacaatccatttccgccaggggtactgaggccacctggatccagctggaatatccctgcaggcttcccaaacccgccatctcccagacttcagtggggatag

SEQ ID NO: 11254 - DNA, 2631 bp, synthetic construct
  misc_feature 1..2631: note = source = /note="Description of Artificial Sequence: Synthetic coding sequence"
  source 1..2631: mol_type = other DNA
atggggccagaggccctgagttctctcctgctgctgttgctcgtggcctctggcgatgcagatatgaaagggcatttcgacccggctaagtgcagatacgcactgggcatgcaggatcgaactataccggactccgatataagtgcctcctcttcctggtccgactcaaccgccgcacggcattcgcggctggagtcttctgatggtgacggcgcttggtgccctgcaggatcggtatttccaaaggaggaggagtacctccaagttgatctgcaacggttacacttggttgctttggtaggtacccaggggaggcacgccggaggtcttgggaaagaattctccagatcgtatcgcttgcgatactccagagatggtcgtaggtggatgggatggaaggatagatggggtcaggaagtcatttctgggaatgaagacccagaaggagtggtgctgaaggaccttggtccaccgatggttgctagactggtgcggttctacccccgtgctgatcgggtcatgtccgtgtgtctaagggtggaattatacggctgcctatggcgcgatggtctcttgagctacaccgctccagtggggcaaacaatgtatctctcagaggctgtctatttaaacgacagcacatatgatggtcacaccgttgggggactgcagtacgggggactggggcagttggcagatggcgtcgttggcctggacgactttcggaaatctcaagaactgagggtgtggcctggctacgattatgttggctggagtaaccattctttctcgtctggatacgtagaaatggaattcgagttcgatcggttgcgggcattccaggctatgcaggtccattgcaataacatgcatacactgggtgccagactgcctggaggcgttgaatgtcggtttcgacgcggtccagccatggcgtgggagggagagcccatgagacacaatctgggtggtaatttgggcgatcccagagctagggccgtgtccgtacccttgggcggacgggtggctcggtttttgcaatgccgcttcctcttcgccggtccctggcttcttttcagcgaaattagcttcatttccgatgtggtcaataattcttcacctgctctcggcggtactttcccgcctgccccatggtggccccctgggcctccccctactaatttttcgtccctggagctcgaacccaggggccagcagcccgtggctaaagccgaggggtcacctacggctatactcatcggatgtctggttgccatcattttgttactgctgttaattatcgcattgatgctctggcgcttacattggaggagactgctcagcaaggcggagaggcgcgttctggaagaggaactgaccgttcacctttccgtacctggggacacaatcctgatcaacaacagacctggtcctagggagcctcccccataccaggaacctcgaccacgtggcaatcccccacactcggccccatgcgtcccaaatggttctgcctactccggcgattatatggagcccgaaaagccgggtgcacccctcctaccacccccaccccagaacagcgtacctcactatgccgaggccgatattgtcacactacaaggtgtcaccggagggaacacttacgccgtcccagctctgcctcctggtgccgtgggcgacggaccgccacgcgtcgattttcctagaagtaggttgagatttaaggaaaagctgggcgaaggacaatttggcgaagttcatttgtgcgaggtggactcccctcaggatctggtgagtctagatttccctttgaatgtgaggaaaggacatccactgctggtcgctgtgaagatcttaagacctgatgccaccaaaaatgcacgcaatgactttctgaaggaggtcaaaatcatgagcagactgaaagaccccaatatcattcggctgctgggggtgtgcgtgcaggacgatcccctgtgcatgatcactgactacatggagaacggcgacctgaatcagttcctgagcgcccatcagcttgaggacaaagctgccgagggggcaccaggtgacggacaagccgctcagggcccaacgatatcttaccctatgctcctgcatgtggccgctcagattgcttcaggtatgaggtacctggccacactcaattttgtccacagggacctggccactcgcaattgtctggttggagagaatttcactataaagatcgcagactttggaatgtcccggaatctctatgctggtgactactacagagttcaaggaagggccgtcttgcccataagatggatggcctgggagtgtatcttaatgggcaagttcaccacagccagtgatgtttgggctttcggggtcaccctttgggaggtgcttatgctgtgtagagcccagccattcggccagctgacagatgaacaggtgatcgaaaacgccggtgagttctttcgggaccaggggaggcaggtttaccttagccgaccccctgcctgccctcagggactgtacgagctgatgctccgctgctggagccgggagtccgagcagaggccccctttctcacagctgcataggttcctcgccgaggatgctcttaacactgtttag

SEQ ID NO: 11255 - DNA, 1482 bp, synthetic construct
  misc_feature 1..1482: note = source = /note="Description of Artificial Sequence: Synthetic coding sequence"
  source 1..1482: mol_type = other DNA
atggccctcctagcagggggactgtccagagggctcgggtcccaccctgccgctgccggaagggacgctgtagtttttgtatggttattgctgagcacctggtgcactgcacctgcccgagctattcaagtgaccgtgtcaaacccctatcatgtagtcattctgtttcagccggtgaccttgccctgtacgtaccagatgacatccactcccactcagccaattgtgatatggaagtataagagcttttgccgggatcgcattgctgacgcgttctctcctgcaagtgtggacaatcagctgaacgcgcaattggccgctggtaacccgggttacaacccgtatgtggagtgccaggatagcgttcgtaccgtccgcgtggtggctacaaaacagggtaatgccgtaacactcggcgattactatcaagggagacgtatcactataacaggcatgtatgccgcaggaaaagccgctacatctggagtccctagcatctacgctccctccacttacgcccatctcagtcccgcaaaaactcccccaccacctgccatgatccctatgggacccgcatacaacggataccccggtggctacccaggtgatgtcgaccggtcatcctctgccggtggccagggcagttatgtccctctgctcagagatacggattcctccgtggcttctgaggtacgtagtgggtaccgcattcaggcttcccagcaggatgactctatgcgggtcctctattacatggaaaaggagttagcaaattttgatccatcaaggccagggccaccctctggtagggttgagcgtgccatgtctgaggttacctccttacatgaagacgactggagatcacgaccatcaagggggcctgcccttacacctattagggacgaggagtgggggggtcacagccctcgatcccctcgaggctgggaccaggaacccgctcgcgagcaggccggaggaggatggcgggctaggcgcccaagagcaaggtctgtggacgctttagatgatttgactcccccttccacagcagaatctggcagtcgaagccctaccagcaatggcggaagaagtagagcttatatgccacctcggagccgtagtcgagatgacctctacgatcaggacgatagtcgcgacttcccgaggtctcgagacccacactatgatgactttagaagcagagagagaccgccagcggatcctcggtcacaccatcatcggacaagggaccctagggacaatggaagccgaagcggtgacctgccgtacgatggaagactcctggaggaagccgttcgaaaaaaggggagcgaggaacggcgacgccctcataaagaggaagaggaggaggcttactatccccctgcccctcccccatactccgaaacagactcccaggcctctcgcgaacggaggttgaagaagaatctcgccctttctcgcgaaagtctagttgtctag

SEQ ID NO: 11256 - DNA, 1788 bp, synthetic construct
  misc_feature 1..1788: note = source = /note="Description of Artificial Sequence: Synthetic coding sequence"
  source 1..1788: mol_type = other DNA
atggattttctcttggccctggtcctcgtgtcttccctgtacttacaggcggctgccgagtttgatggtcgttggcctcgccagatagtaagttcaattggactgtgccggtatgggggaaggattgactgttgttgggggtgggctcggcagtcatggggtcaatgccagcctgtctgccaaccccgatgcaagcatggagagtgtattggacccaataaatgcaagtgccatcccggatacgctggcaaaacctgcaatcaggacgaacacatccctgcccctctggatcagggctctgagcaacctttattccagccactggaccatcaggcgacatcgttgccgtctagggaccttaacgaatgcggcttaaaacctcggccatgcaagcacagatgcatgaatacatacgggtcttataagtgctactgtctcaacgggtacatgcttatgcctgacggaagctgctccagcgccctgacttgttctatggctaactgccagtacggctgcgacgtggttaaaggacagatccgctgccaatgtccgtccccaggcctgcagctagcacccgatggtaggacttgtgtggatgtcgacgagtgcgctacaggtagagcgtcatgtccacgttttaggcagtgcgtgaacacgttcggctcatacatctgtaaatgccacaaaggctttgacctcatgtacatcggtggtaagtaccagtgccacgatatagatgagtgttcattggggcaatatcagtgttcatcattcgctcggtgttacaacatccggggtagctacaaatgtaagtgtaaagaaggataccaaggagatggattgacttgcgtgtacatccctaaagtgatgatcgagccctcaggcccaatccacgtccctaaaggaaatggcactattctgaagggcgacactggaaacaacaattggataccagatgtcggcagtacctggtggcctccgaagaccccatacattccccctatcatcaccaacaggcccacctctaagccgactacccgccctacaccgaagccaacacccatcccaacacctccaccccctccccctctcccaaccgaactgcggactcctttgccccctactactcctgaacgccctaccaccggccttaccacaatcgcacctgctgcttccacgccccctggcggaatcactgtcgacaaccgggttcagacagacccgcagaaaccgaggggcgacgtgtttatcccccgtcagccaagtaatgatcttttcgagatctttgagatcgaacgcggagtgagtgctgacgacgaggcaaaagatgaccccggtgtactcgtccattcatgcaatttcgatcacggactgtgcgggtggattagggagaaggataacgatctccattgggagccgatacgcgaccccgctggcggacagtaccttacagtctccgcagccaaggcccctggcggtaaggcagccagacttgtgctgccacttggcagacttatgcacagcggtgacttatgtctatccttccggcacaaggtaaccggcctgcacagtgggaccctgcaggtttttgttcggaagcatggggcacatggagccgcactgtggggccgaaatggtggccatgggtggaggcaaacacagataacgctgagaggcgcagatattaagagcgtggtctttaagggagagaaaaggaggggccatacaggagaaattggtcttgatgacgtttccttgaagaaaggccattgctccgaggaaagatag

SEQ ID NO: 11257 - DNA, 210 bp, synthetic construct
  misc_feature 1..210: note = source = /note="Description of Artificial Sequence: Synthetic coding sequence"
  source 1..210: mol_type = other DNA
atgaaaaatcaggataagaagaatggggcagccaaacaaagtaacccgaagagttcgccgggacagccagaggcgggaagcttcgactctctggatctggagaaagtctccctgggcagagccctggcaggacggagcgaattagggatcagctgcctggaacaaggcacttggcggatgttcctccgcggtatgatgtgctggagctag

SEQ ID NO: 11258 - DNA, 483 bp, synthetic construct
  misc_feature 1..483: note = source = /note="Description of Artificial Sequence: Synthetic coding sequence"
  source 1..483: mol_type = other DNA
atggccagagactacgatcacttattcaaattattgatcatcggggactccggggtaggaaaatcctctctcctgctcaggttcgccgacaacacgttttcaggttcgtatataaccacaattggagtcgacttcaaaatccgcaccgtagaaatcaacggggagaaagtcaagctgcagatctgggacacagccggtcaggaacgcttccggaccatcacatcgacagcagagacagctctgcgaagtctgccccaaccagaagctcatggaggcagtagcggtgattcccttagtttcgtgccccttttcaaggaattttccccatgcttttgtattggcaggtgccatagacactttctccccagaccaccgagggtccctcgacgctgctggacctcacctccattccctaccggagccccttcctcacccgctaaagcgccagggcctggtgaggacgcagctcggcgagctgattag

SEQ ID NO: 11259 - DNA, 360 bp, synthetic construct
  misc_feature 1..360: note = source = /note="Description of Artificial Sequence: Synthetic coding sequence"
  source 1..360: mol_type = other DNA
atgaacaagattcttagttcaacagtttgcttcggactcctcaccctgctctcagtgctgagctttttgcagtcagtacacggacggccttatcttacacagggaaatgaaatctttccagacaaaaaatacaccaatcgcgaagagctcctgctcgcgctgttgaataagaatttcgacttccagcggcctttcaatacagatctcgcactccccaataagctggaggaacttaatcaactggaaaagcttaaggagcagctggtggaagagaaagactctgagacgtcatacgctgtggatggattattttcttctcacccgtctaaacgcgcttgtttctggaaatattgtgtgtag

SEQ ID NO: 11260 - DNA, 2514 bp, synthetic construct
  misc_feature 1..2514: note = source = /note="Description of Artificial Sequence: Synthetic coding sequence"
  source 1..2514: mol_type = other DNA
atgttcaaatgctggtctgtggtcctcgtgctcggattcatttttctggagtccgaggggagaccaacaaaagaggggggttacggattgaagagttaccaacccctgatgaggctccgacacaaggaaaagaaccaggaaagctcccgcgtcaagggattcatgattcaggatggaccttttgggtcgtgtgagaacaaatactgtggccttgggaggcattgtgtcacaagtagggaaactggccaggccgaatgtgcctgcatggacttatgcaagcgccactacaagccagtatgtgggagcgatggagagttttacgagaaccactgcgaagttcacagagcagcctgtctcaaaaaacagaaaatcacgatagtgcataatgaggattgtttcttcaaaggcgataagtgcaagactacagagtactccaagatgaagaacatgctgctggaccttcagaaccagaagtatataatgcaggagaatgagaatcccaacggggacgacatcagtcggaaaaagctccttgttgatcagatgttcaagtattttgacgcagatagcaacggactcgtagacatcaacgagctgactcaagtcatcaagcaggaggagttagggaaagatttgttcgactgcacactttacgtgctattaaaatacgatgactttaacgccgacaaacacctggctctggaggagttctaccgggcttttcaggtgatccagctgtcccttccagaagaccaaaaactgtccatcaccgcagcaaccgtggggcagagtgctgtactgtcttgtgcgatccagggcacacttaggccgcctattatctggaagaggaataacatcatactcaacaatttggacctggaggacattaacgactttggagatgacggaagcctgtatattaccaaggtaactacaacccatgttggtaactatacttgctatgccgacgggtatgagcaggtttatcaaacacatatattccaggtcaatgtgcccccagtgattagggtgtatcccgagtcccaggccagggagccgggagtcaccgcttctttacgctgccacgccgagggaataccaaaaccacaactgggatggctgaaaaacggcatcgacatcaccccaaagcttagcaaacaattaacactccaggcaaatggcagcgaggttcatattagcaacgtgaggtatgaagatacaggcgcatatacatgtattgcgaagaacgaagccggtgtggacgaagacatcagctcactcttcgtggaggacagcgcgcgaaagactcgtctcggaatcgggaatatgttttatgtgttttatgaggacggcataaaggtaatccaaccaatcgagtgcgagttccagagacatattaaaccaagtgaaaagctcctggggtttcaagacgaggtgtgtccgaaagccgaaggcgatgaggttcaaagatgcgtgtgggcatctgccgtcaatgtgaaagataaattcatctatgtcgcccagccaacactggatcgcgtgctaatcgtcgacgtgcaaagccagaaagtggtgcaggctgtcagtacggaccctgttcccgtgaaactccattatgataaatcccatgatcaggtgtgggtcctcagctgggggaccttggagaagaccagcccaaccttgcaggtcatcactttggctagtggtaatgtgcctcaccacacgatccacacccagcccgtaggcaagcagtttgatcgggtggatgacttcttcattccaacaaccacactgatcattactcatatgcgctttgggtttattctgcataaggatgaagccgcattgcagaagatcgatctggagaccatgagttacatcaaaaccattaaccttaaggactacaagtgcgtccctcagagtctggcttacacgcacttggggggttactacttcatcggttgcaagccagactcaactggagcagtatcgccccaggtgatggtggatggagtaaccgactctgtgattgggtttaattccgacgtgactggaacaccctatgtgagtcccgacggtcactatctggtcagtataaatgatgtcaagggcctagtaagagttcaatatattaccataagaggagagatccaagaagctttcgacatttacactaacctccacatctctgacctcgctttccagccaagtttcaccgaagcacatcaatataacatatatggttcgtcaagcacccagacagacgtgctgttcgtagagctgtccagcggaaaggtcaagatgattaagtccctaaaggagccactcaaagctgaagagtggccctggaatcgtaaaaaccggcagattcaggactccggactgttcggccaatatttgatgacaccctctaaggatagcctcttcatactcgacggtaggctcaataagctaaactgtgaaattacagaggtggagaagggcaatactgtgatctgggtaggggacgcctag

SEQ ID NO: 11261 - DNA, 648 bp, synthetic construct
  misc_feature 1..648: note = source = /note="Description of Artificial Sequence: Synthetic coding sequence"
  source 1..648: mol_type = other DNA
atggccgatatgcaaaatctcgtcgaaagattggagagggccgtggggagattagaagctgtttcccacaccagcgatatgcacagaggatacgccgacagtccgtcaaaggcaggtgcggctccctatgttcaagcatttgacagcctgctggccggtccagttgcagaatacttaaaaattagcaaggaaatcgggggtgacgttcagaagcacgccgagatggtacacaccggcctcaaattagagagagcattgctggtcacagcctctcagtgccagcagcctgctgagaacaagctatctgatttactagctccaatttcagagcaaattaaagaagtgattacgttcagagagaagaaccgcggtagtaaactattcaatcatctctctgcagtttctgaaagtatccaggccctaggttgggtggcaatggcccctaaacccggaccctatgtgaaggaaatgaacgacgcggctatgttttatactaatcgggtccttaaagaatacaaagatgtcgacaagaagcacgtggattgggtgaaagcctatttgagtatttggacggagttgcaagcatacatcaaagagtttcacaccaccggcttggcttggagtaaaactggaccagttgccaaatag

SEQ ID NO: 11262 - DNA, 3837 bp, synthetic construct
  misc_feature 1..3837: note = source = /note="Description of Artificial Sequence: Synthetic coding sequence"
  source 1..3837: mol_type = other DNA
atgcgtctcctcctgttggtgccacttttgctggcaccagctccagggtcgagcgcccctaaagttaggagacagagcgatacatggggaccctggtctcagtggagcccgtgttccagaacctgcggaggaggggtcagtttcagagagcgaccatgctacagccagcgaagagacggtggaagcagttgcgtggggccagcacgtagccacagaagctgcaggacagaaagctgccctgacggagccagggattttcgggcagagcagtgtgcagagttcgatggtgctgagtttcagggtcgcaggtaccgttggctgccatattatagtgcgcctaataaatgcgagctcaattgcattcctaaaggcgaaaatttctattataagcacagagaagctgtagtggacggcacgccctgcgaacctgggaaaagagatgtgtgtgtggacgggagttgccgcgtggtggggtgcgaccacgagcttgatagttctaagcaagaagataagtgtcttcgatgtggcggtgacggcaccacgtgttacccagtcgcaggaaccttcgacgccaatgacttgtctcgtggttacaaccaaatcctcatcgtacccatgggcgcaacgagtattcttattgatgaggcagccgcatcccgcaatttccttgcggtgaagaacgtgcgtggagaatactatctgaatggacactggaccatcgaggccgctagagctttgcctgctgcctctaccattttgcattatgagcgaggtgccgagggggacctggccccagagagactgcatgcacgaggtccgaccagcgagcccctggtgatcgaacttatctcccaggagccaaaccccggagtacactacgaatatcacctgcctctgcgtcgccctagccccggattctcctggagccacggtagctggtctgactgctccgcggaatgcggtgggggacaccagtcacggctagtgttctgtacaatcgatcacgaggcctaccccgatcacatgtgtcagagacaaccccgtcctgctgatcgccgtagttgcaacctccacccgtgtcccgagactaaacgatggaaggcgggtccttgggcaccgtgtagcgcatcatgtggagggggttcccagagtcgctcagtgtattgcatctcttcagatggagcagggattcaggaggcagtcgaggaggctgagtgcgccggtctccccggtaagcccccagctatacaggcatgcaacctacaacgctgcgccgcatggtcccctgaaccgtggggcgaatgctctgttagttgcggagtcggcgtgaggaagaggtcggtaacgtgccggggtgagcggggaagcttactgcacacagccgcatgttcactcgaagatagaccaccactcactgagccatgcgtgcacgaggactgcccactgctgagcgatcaggcatggcatgttggcacgtggggcctctgctctaaatcctgcagctccggtacgcggaggcgtcaagttatctgcgcaatcggtccgcctagccactgtggtagcctccaacattccaaaccagtcgatgttgagccctgcaacacccagccatgccatctcccacaggaggttccttcgatgcaggatgtccatacccccgcttccaacccatggatgccactgggtcctcaagagagtcctgcgtcggactccagagggcagtggtgggccgcacaagagcatccgagtgccaggggggatcacagaggcgaaagaggagatccacggggtgatcaaggcacgcatctgagcgccctggggccagccccatctctccaacagcctccttaccagcagccactgcggtctggcagtggtcctcatgattgtaggcattcccctcacggatgttgtcccgacggccatactgcgtcactcggaccgcagtggcaaggatgccccggtgcaccctgccagcagtcccgatacggttgctgccccgatcgtgtgagtgtcgcagagggccctcatcacgccggatgtacaaaatcctacggtggggatagcacagggggaatgccacggtcacgggctgtggcttcaacggtgcacaatactcaccaaccacaagcccagcaaaacgaaccctccgagtgccgaggcagtcagttcggttgttgctacgacaacgtggcaacagccgcagggccactgggagagggttgcgtggggcaaccatcccacgcgtaccctgttagatgcctgctgcctagtgctcacgggtcttgcgctgactgggccgcaaggtggtacttcgttgccagcgtgggccagtgcaacagattttggtacggcggatgccacggtaacgccaataatttcgcatcggagcaggagtgcatgagcagttgccagggaagcctacacggccctcggcgtcctcagcccggtgcgtcaggacgaagcactcacaccgatggtggcggatcctctccggcaggcgagcaggagccgtcacaacaccggacaggagccgctgttcagcggaagccatggccatctggcggactctggcgccaagaccagcagccaggacccggagaagcccctcacactcaagcctttggggaatggccatgggggcaggaactgggtagccgtgctccaggactggggggtgatgctgggtccccagctccaccttttcacagctcctcttacaggatttccctggcgggagtcgagccctctttggtgcaagcggcattagggcaactcgtgaggctgtcatgttcggatgatacagctccagagtcgcaggcagcatggcagaaggacggccaacctatctcatctgataggcatagacttcagttcgacggcagcctgatcattcatcctttgcaggcagaggatgcgggaacctacagctgcgggtcaacccgcccaggtagagacagtcaaaaaatacaactgcggatcatcggcggtgatatggccgtgttatccgaggctgaactcagtcgctttccccagcccagggaccctgcccaagattttggccaagctggagccgctgggcctctaggggcaataccctcaagtcacccgcaaccagccaataggctccgcttggaccagaatcaaccacgggtggtagacgcctcacccggtcagcggattaggatgacttgcagagcggagggttttcccccaccggcaattgagtggcagcgcgatggacagcccgtatcttcacctcgccatcagctccaaccagatggatcactcgtcattagccgtgtggctgtcgaggacggcggtttttatacctgtgtcgcttttaacggacaggaccgcgatcaaaggtgggtgcagttgcgcgtcctcggcgagttaaccatctctggacttcctccaacggtcactgtccccgaaggcgacaccgcgagacttctttgcgtggtggcaggcgaaagtgtcaacattcgatggtcccggaatgggctccctgttcaggcagacggccatagggttcatcagagccccgatggaacactcctgatctacaatctgagggctcgagacgagggatcgtatacttgttccgcttatcaggggagccaggcagtgagtcggtcaaccgaggtaaaagtggtcagtcctgcgccaacagcacagcctcgcgaccccggacgagactgcgtagatcagccagaactcgccaactgcgatctgatcttgcaggcacagctctgcggtaacgagtactactcctcgttttgctgcgcaagctgctctcgctttcagccacacgcccaacccatctggcagtag

SEQ ID NO: 11263 - DNA, 546 bp, synthetic construct
  misc_feature 1..546: note = source = /note="Description of Artificial Sequence: Synthetic coding sequence"
  source 1..546: mol_type = other DNA
tgaaaagggcatgcctccccacttcccccatccgctgctccaacaacagattcaacggactctatcacagggcagaattctcgtcagcgagaggaagaactcgaactgatcgatcaattaaggaagcatatcgagtatcgactgaaagtgtcactaccatgcgacctaggggcagccctgacagatggcgtagtgctctgtcacctcgccaatcacgtcaggcccagaagcgtcccatccatccatgtgccgagcccggctgttcccaagctgaccatggccaagtgcagacgcaacgtggagaactttcttgaggcctgtcggaaaattggtgtgccccaggataacttatgtagcccttcagatatcctccagttgaacctcagtgtcaagagaactgtggaaactctattgtcactcggcgcacatagtgaggaatcttccttcgtctgcctgtcgctgcagctcctcgggttcgtggccttctattgtacagtgatgttaacactttgcgtgttgtattactggctctttcccgctcgttag

SEQ ID NO: 11264 - DNA, 804 bp, synthetic construct
  misc_feature 1..804: note = source = /note="Description of Artificial Sequence: Synthetic coding sequence"
  source 1..804: mol_type = other DNA
atgggacccgaagctcttagctcattactattgcttctgctggtcgccagtggggatgctgatatgaaagggcactttgatccagccaaatgccgctacgcgctggggatgcaagaccgaacgattccggactcagatatctccgccagctcgagctggtccgactccaccgctgcacgacacagcagactggagagctccgacggcgatggggcttggtgtccggcaggaagtgtgtttccaaaggaagaggagtaccttcaagtcgatctgcagagacttcatcttgtagcactagtagggacccagggaaggcatgctggcggactgggcaaggagttttcacgctcgtacagattgcggtactcacgggacggacggaggtggatgggatggaaagaccggtggggacaggaggtgattagtgggaatgaggatcccgagggggtggtccttaaagacctcggaccgcctatggtcgccaggctggtgcggttctaccctagagctgaccgtgtgatgtctgtctgtctccgtgtcgagctctatggctgcctgtggcgggacgggttacttagctacaccgctcccgtggggcaaactatgtacctctccgaagccgtctatttgaatgactccacctacgatgggcataccgttggtggcctgcagtatgggggtcttggccagctggccgatggcgtagtaggacttgatgattttcggaaatcccaggagttgcgcgtgtggcctggatacgactacgtaggctggagtaatcacagcttttctagcggttactag

SEQ ID NO: 11265 - DNA, 345 bp, synthetic construct
  misc_feature 1..345: note = source = /note="Description of Artificial Sequence: Synthetic coding sequence"
  source 1..345: mol_type = other DNA
atggcacctaagaagctgtcctgcctccgatcattgttacttcctcttagtctgacactgctattgccacaagctgatacccgcagttttgtggtggaccggggacacgatcgcttcctgctcgacggcgctccgttccggtacgtctctggttcgctgcattatttcagagtccctagggtgttatgggctgaccggcttctcaagatgagatggtcaggtttgaacgctatccagttctacgttccctggaattaccacgagcctcagcctggagtgtacaattttaacggaagtcgcgacctgatcgcctttctgaacgaggccgctcttgccaacttatag

SEQ ID NO: 11266 - DNA, 507 bp, synthetic construct
  misc_feature 1..507: note = source = /note="Description of Artificial Sequence: Synthetic coding sequence"
  source 1..507: mol_type = other DNA
gccccacggatggagatgtttcagggcctgctccttttgctgctcctgagcatgggcggaacgtgggctagcaaggagcctctgcgcccaaggtgccgccctatcaatgcaactcttgccgtagagaaggaggggtgcccagtctgcataactgtcaatactactatttgtgcaggatactgccccacaatgacccgcgtcctgcagggagtgctgccagctttgccacaggtggtgtgtaattacagggatgttcggtttgaatcgatccgtttacccggttgtccccgaggcgttaatcccgtggtatcttacgctgtcgcactgtcttgtcaatgtgccctctgccggagaagcacaactgactgcggaggtcccaaagaccacccgctcacctgtgatgacccaaggttccaggatagttctagttctaaagccccaccaccatccttgccaagcccctccaggctccccggaccttccgacacccctatacttccccagtag

SEQ ID NO: 11267 - DNA, 1203 bp, synthetic construct
  misc_feature 1..1203: note = source = /note="Description of Artificial Sequence: Synthetic coding sequence"
  source 1..1203: mol_type = other DNA
atggagacacaggagctccgcggagcactggctctcctgttactgtgcttcttcacttctgcatcccaggatttgcaagtaatcgacctcctaacggtcggggaatcccggcagatggtggccgtggctgaaaaaataaggactgcactgctgaccgcgggtgacatttacctcctgtcaacctttcggctgcctccaaagcagggaggcgtgctgtttggtctgtacagccgccaggacaacacaaggtggctcgaagcaagtgtcgtcggcaagattaacaaagttacaaatgcgcttcactcaatcctcggtgaaggcaacgtcccagatcccaagcatcattacggggtcagtggcttccacgaacaacgtagccactgttcccccaacccctgtttcagaggggtggattgcatggaggtatatgaataccccggatacaggtgtggtccatgtccccctggcctccagggcaacgggactcattgtagcgacatcaacgaatgcgcccatgcggacccttgcttcccgggttctagctgcatcaacaccatgcctgggttccattgcgaggcttgcccaagagggtataaaggtacacaggtgtctggcgtgggaatcgactacgctcgcgctagcaaacaggtgtgtaatgatatcgacgagtgtaatgacggcaacaacggaggttgtgatcccaacagtatctgtaccaatacagtgggctctttcaaatgtgggccttgtagactgggtttcctcggcaaccagtcgcagggatgcctgcccgcaaggacgtgtcactcaccagcgcacagtccttgccacatccacgctcactgcctgttcgaaaggaatggcgctgtctcctgccagtgcaacgttggttgggcgggaaacggcaacgtgtgcgggacggacaccgacattgatggttatccagatcaagccctgccatgtatggataacaacaaacactgtaaacaggacaattgtctcttaacacctaacagcggtcaggaagacgccgataatgatggagtgggcgatcaatgcgatgacgacgccgacggcgacggtataaagaacgtggaggcttccccgatggactggacgattgccctcaagtctcccacacactaccggcagactggaatgaggaccggatgggaaatgctggcgacggcagccttgaaatag

SEQ ID NO: 11268 - DNA, 618 bp, synthetic construct
  misc_feature 1..618: note = source = /note="Description of Artificial Sequence: Synthetic coding sequence"
  source 1..618: mol_type = other DNA
atgatgcgcactctgatcacaacccaccccctgcctctcctcctgctcccccagcaactgctgcagctggtgcaattccaggaagtggatacggatttcgactttcctgaagaggacaaaaaagaagaattcgaggaatgtctcgagaaatttttttccacaggcccagcacgtccaccaactaaagaaaaagtaaagcggagggttctgattgaacctggtatgcctttaaatcacatcgagtactgcaaccatgagattatgggaaaaaacgtgtactacaaacatcgctgggtggcagagcattattttctgcttatgcagtatgacgagctacaaaagatctgttataaccggttcgtcccctgtaagaacggaattcgcaagtgcaaccgcagtaagggcctcgtcgagggtgtttattgtaatctgactgaggcattcgagattcccgcatgtaaatacgagtctctctatcgcaaaggctacgtgctcatcacttgctcatggcagaacgagatgcaaaaaaggatcccacatacaattaatgacctggtggagcctccggagcaccggtcctttctctccgaagacggggtatttgtgattagcccatag

SEQ ID NO: 11269 - DNA, 177 bp, synthetic construct
  misc_feature 1..177: note = source = /note="Description of Artificial Sequence: Synthetic coding sequence"
  source 1..177: mol_type = other DNA
atggacctgttgcagtttctggcttttttgttcgtgctgctgttaagtggaatgggtgccaccgggacactccggactagtctggatccaagtttagagatctacaagaaaatgtttgaggtgaagaggcgggaacaactgcttgcgctgaagaacttagctcagttaaacgattag

SEQ ID NO: 11270 - DNA, 450 bp, synthetic construct
  misc_feature 1..450: note = source = /note="Description of Artificial Sequence: Synthetic coding sequence"
  source 1..450: mol_type = other DNA
atgaaggtgattgctattttaactctgcttttattttgcagccctacacacagttccttttggcagttccagcgacgcgtgaagcacatcactgggaggtccgcctttttctcctactatggctatgggtgctactgcgggcttggggacaagggaattcccgtcgatgacaccgaccgccattcacctagttcccccagcccatacgagaagctgaaggagttctcttgtcagcctgttttaaattcttatcagttccatatcgtgaacggagccgttgtatgtggctgtaccctcgggcctggggctagttgtcactgccggctgaaggcttgcgagtgtgacaagcagagcgttcattgtttcaaagaatccctaccaacatatgagaagaacttcaaacagttctcctcacaaccccgttgtgggaggcacaagccgtggtgctag

SEQ ID NO: 11271 - DNA, 237 bp, synthetic construct
  misc_feature 1..237: note = source = /note="Description of Artificial Sequence: Synthetic coding sequence"
  source 1..237: mol_type = other DNA
atggggagcgggctgcccctggtgttactcctgacacttctgggtagctcccacggaacgggcccaggaatgaccctacagctgaagctgaaggagtcatttctgactaacagttcttacgagtcatccttcctggagcttctcgagaaactgtgcctcctgctccatcttccgtctggaaccagtgtcacactgcaccacgccaggagtcagcaccacgtcgtctgtaatacttag

SEQ ID NO: 11272 - DNA, 1461 bp, synthetic construct
  misc_feature 1..1461: note = source = /note="Description of Artificial Sequence: Synthetic coding sequence"
  source 1..1461: mol_type = other DNA
atgattagcccgtctccttctcaggaggaactgcagactacgctggaggagactgatcagagcacccaggagccattcacaaccaaaatacctagaacgacggagctagcaaagacgacacaggccccacaccggttctacacaacagtgcggcctagaactagcgacaaaccccacattcgcccagtgcttaaccgaacaacaactcgtccgaccagacccaagccaagtggcatgccgtcaggaaacggcgtggggacaggcgtcaagcaggcaccccgacctagtggcgcagatagaaatgtgagtgtggattctacccacccgactaagaagcctggaaccagacggcctccactaccccctagacctacgcatcctcgcaggaaaccactgcctcctaacaacgttaccggaaagcctggctctgccggaatcatcagcagcggtccaatcacaacccctcctttaaggtcgacaccccgtcctaccggcacccccctggagagaattgagacagatataaaacaacccacagtcccagcgtccggcgaggaattagagaacatcactgacttctcatcttcaccaacccgggaaacagatccactgggaaagcccagatttaaaggaccacatgtacgctatatacagaaaccagataatagcccgtgtagtatcaccgactccgtgaaacgcttccctaaagaggaggctacagaggggaacgctacttcgccaccccagaatcccccaactaaccttactgttgtcacggtggaggggtgtccttcgttcgtgatcctggattgggaaaagcctctgaacgatactgtgactgaatacgaagtgattagcagagagaacggttcattctccggcaagaacaaaagtatccagatgaccaatcagaccttctccacagtagagaacctcaaacctaataccagttatgaatttcaggtgaaacccaagaatccactgggcgaaggtccggtttctaatacagtcgctttctccactgagtccgccgaccccagggttagcgaaccagtgtctgccggacgtgacgccatctggacagaacgcccttttaacagtgactcttactccgaatgtaagggaaagcagtacgtgaagcgcacatggtataagaagttcgtgggcgtacagctgtgcaactcgctgcgctacaagatctacctgtctgattcattaaccgggaagttctacaatattggcgaccagcgcggacatggagaagatcactgccaatttgtagatagttttttagacggacgcacgggtcagcaactgactagtgatcagctgcctatcaaggagggctattttagagctgtgcggcaggagccagtacagttcggcgaaattggtggccatactcagataaactacgtccagtggtacgagtgcggaactaccattccaggtaagtggtag

SEQ ID NO: 11273 - DNA, 243 bp, synthetic construct
  misc_feature 1..243: note = source = /note="Description of Artificial Sequence: Synthetic coding sequence"
  source 1..243: mol_type = other DNA
tagaatggacccgtcctctggtttaaaggaaccgggccaaatcggaaactgatttacaattttaaacaggagcagaaccctaggccaccaaaaaatcggccagcgggaagagccggatcacgggctcaccatgacgctcacacttgcctgtcagcgctgcctgagaggaattcaacgaactattttgtccagccctgttgctgtctccggcttctcgggctcactgggctgctgagcaagtag

SEQ ID NO: 11274 - DNA, 1341 bp, synthetic construct
  misc_feature 1..1341: note = source = /note="Description of Artificial Sequence: Synthetic coding sequence"
  source 1..1341: mol_type = other DNA
atgctgcaccccgaaaccagtccgggtcgcggacatctgctcgccgtcctgctggctctgcttggtacaacatgggccgaggtttggcctccgcaattgcaggaacaggctcctatggccggtgctctaaaccgtaaagagtcgtttctccttcttagtctgcacaacaggctccggagctgggtgcagccgcctgctgctgatatgaggcgcctggactggagcgacagcctcgcccagctagctcaggcgcgtgctgccttatgcgggattccgactccaagcctggcctccggactgtggcgcaccttacaggtgggctggaatatgcagctgctgccggcaggccttgcttcatttgtggaggttgtgtcactatggttcgcagagggtcagcgatattctcacgccgctggtgagtgtgctcgcaatgctacatgcacacattacacacagctagtctgggccacttcctcacagttaggatgtgggcgtcacctgtgctctgccggacagaccgccatcgaggccttcgtgtgtgcgtatagcccccgaggcaactgggaggtaaacggaaagacaattatcccatataaaaaaggcgcttggtgcagcttgtgtactgctagcgtgtctggctgtttcaaagcttgggaccatgccggaggcctgtgtgaggtgccacggaatccctgccggatgtcatgccagaaccatggccgacttaatataagcacatgtcattgccattgccctccagggtacacagggagatactgccaggtaaggtgttcgctccaatgcgtccacgggagatttcgcgaggaggagtgctcctgcgtatgtgatattggttatggaggtgcccagtgtgccacaaaagtgcactttccttttcacacgtgcgacctgagaatcgatggggattgcttcatggtgagcagcgaggctgacacgtactaccgagcacgaatgaaatgtcagaggaaggggggagtgttggcgcagattaagtctcaaaaagtgcaggatatactcgctttttatctcgggcgattagagacaactaacgaggtcatcgatagcgacttcgagacaagaaatttttggattggactgacttataagaccgccaaggattctttccgatgggctaccggtgagcatcaggcctttacgtctttcgctttcggacagcctgacaatcacggcttcgggaattgcgtggagctgcaggcctctgctgcctttaattggaacgaccagcggtgcaagaccagaaataggtacatatgtcagtttgcccaggagcatatctctaggtggggcccaggttcttag

SEQ ID NO: 11275 - DNA, 432 bp, synthetic construct
  misc_feature 1..432: note = source = /note="Description of Artificial Sequence: Synthetic coding sequence"
  source 1..432: mol_type = other DNA
atgcaggcagcgtgttggtacgtcctctttcttttgcaaccaacggtctacttggtgacgtgcgctaacctgacaaatggtggaaagagtgagctcttgaagagcggaagctctaaatcgactctcaaacacatctggactgaatcgtctaaggatctgtccataagcaggcttctgtctcagaccttcagggggaaggaaaacgatacggatctcgacctgcggtacgacacacccgaaccctactcagaacaggatctttgggactggctgcgaaactctacagatctgcaggagcctaggccccgagcgaaaagaaggcccattgtgaagacagggaagttcaaaaaaatgttcggatggggcgattttcacagcaacatcaagaccgtgaaattgaatctgctcataacgggtaagattgttgattag

SEQ ID NO: 11276 - DNA, 783 bp, synthetic construct
  misc_feature 1..783: note = source = /note="Description of Artificial Sequence: Synthetic coding sequence"
  source 1..783: mol_type = other DNA
atgcaaggagagcccttcgcttgcctgacccatcaggaacctctgcccaagatgtttaagctactctcgagagcgtacgcagacgtccaccctatgatgatggatagatccgaaaatcggtgcggcggtaactttttgaaacgtggctcaattattaatggagctgattggtattcttttactggaggtatgagtgattttaattatctgcacactaattgtttcgaaattacagtcgagctggggtgtgtgaaattcccacctgaagaggctctctatatcctctggcaacataacaaggagtccctacttaactttgtggagacggtacatcgcggtattaaaggtgttgtcaccgataagtttgggaagccggtgaaaaacgctagaatctcagtgaaaggaataagacatgatatcaccactgcgcctgacggcgactactggagactgctgccgcctggcatccacatcgttatagcccaagcacctgggtacgccaaggtgattaagaaagtgataatacccgctcggatgaagcgggctggtagggtagactttattctgcagccactggggatggggcctaaaaattttattcacggtctgcggaggacgggtccacacgatccactaggtggcgctagctcgctcggggaggccactgagcctgatccattgagggcgagacgccagccctcagccgacggtagtaagccatggtggtggtcctatttcacatccctttccacacaccgtccacgatggcttctgaaatattag

SEQ ID NO: 11277 - DNA, 882 bp, synthetic construct
  misc_feature 1..882: note = source = /note="Description of Artificial Sequence: Synthetic coding sequence"
  source 1..882: mol_type = other DNA
atgtctagtgggggtggcagcaggggcctcttagcttggctgttactgcttcagccatggccagggcagaattgggccggaatggctgcccctcgactcccgtctcctctcctttcagaggagggcggtgagaatccagaggcatcacccgctcctggtcctgaagctggaccaccactcaacctctttacctcatttcccggagatagcttattgtgtggcagaactcccttgaggattgtgggcggagtagacgcagaggagggaaggtggccatggcaagtatcagtacggaccaaaggacgtcacatctgtggcggtaccctggtgaccgctacctgggttctgacagccggtcactgtatcagttctagatttcactacagcgtgaaaatgggagaccgttctgtgtacaacgaaaacacaagcgtagtggtttctgtccaacgcgctttcgtacaccctaaattcagtactgttactacaatccgaaacgatctagcgcttcttcagctgcagcatcctgtgaattttactagcaatatacagccaatttgcatcccccaggaaaacttccaggtggaaggcaggactcgctgttgggtgacgggttggggcaagactcccgaaagggagaagctggcatcagagatccttcaggatgtcgaccagtatatcatgtgttacgaggagtgtaacaaaatcattcaaaaggctctgagctcaacaaaggatgtgatcataaagggaatggtgtgcggatataaagaacaaggtaaagatagctgccagggagattctggaggtagactggcatgcgaatacaatgacacatgggttcaagtaggaattgtctcctggggcattggctgtggcagatag

SEQ ID NO: 11278 - DNA, 870 bp, synthetic construct
  misc_feature 1..870: note = source = /note="Description of Artificial Sequence: Synthetic coding sequence"
  source 1..870: mol_type = other DNA
atgtttgtgctgctgtacgtcacaagcttcgccatttgtgccagcgggcagccgcgtgggaaccaattgaagggtgaaaattactcaccacgctacatctgcagtattccgggactgcctggcccacctggtccacccggtgctaacgggtctcccggacctcacggaagaatcggcctcccgggtcgcgatgggcgtgacgggcgtaagggagaaaagggcgaaaaaggcaccgccggtctgaggggtaagacgggccctctgggcctggctggggagaaaggagaccaaggcgaaactggaaagaagggtcccatcggaccggaaggcgagaagggtgaggtgggtccaattggacccccaggtcccaagggtgaccgaggcgaacaaggggatcctgggcttcccggtgtgtgtaggtgcggcagtatcgtactgaagtcagctttcagtgtgggtatcactacaagctaccctgaggagcgactccccatcatcttcaataaggtgctttttaatgaaggagagcattacaatcccgcaacaggaaaattcatttgcgcatttcccggaatctattacttctcgtatgacatcactctggcaaataaacacctagccattggcttggtgcataatgggcagtataggataaagacattcgatgcaaacaccggcaatcatgatgtggcctcgggtagcacggtaatttacctacagcccgaggacgaggtctggttagaaattttttttactgatcaaaacggactgttctctgacccaggttgggccgattcgctcttttccgggttcttgttatatgttgatactgattatctcgactccatctcggaggatgacgagctgtag

SEQ ID NO: 11279 - DNA, 2742 bp, synthetic construct
  misc_feature 1..2742: note = source = /note="Description of Artificial Sequence: Synthetic coding sequence"
  source 1..2742: mol_type = other DNA
atgggccctgaagctctgtctagcctccttttgctcctcctggtcgcaagtggggacgctgatatgaagggtcatttcgaccccgctaagtgcagatatgccctcgggatgcaggaccgcaccatcccagactctgatatatctgctagctcctcctggtctgactctaccgctgcgagacactcgaggcttgaaagctctgatggcgatggcgcttggtgcccggcaggtagtgtctttcccaaggaggaggagtatctgcaggttgacctgcagagactgcatctagttgccctggtggggactcaggggaggcacgcaggcggtctggggaaggaatttagccggtcgtatcgcttgcgctattctagggatggtcgaagatggatggggtggaaggacaggtggggccaagaagtgatcagcgggaatgaggaccctgagggtgtggtacttaaggatctggggcctcctatggtggcaagactggttaggttttaccccagagcagatcgggtgatgtctgtatgtctaagggttgagctgtacggatgtctatggcgggacggtctgttatcctacacagctcctgttggccagacgatgtacctctcggaggctgtttacctaaatgattctacgtacgacggacacactgtgggtggcttgcagtatggtggactgggacagctggctgatggagttgtggggctagatgactttcgcaagagtcaggagctgcgcgtgtggcctgggtatgactacgtgggctggtcgaaccattcctttagctctggatacgttgagatggagttcgaattcgataggttgcgagcatttcaagccatgcaggtacactgcaacaacatgcacaccttaggtgcccgactgcccggaggtgtggagtgcaggtttcggagagggcctgcgatggcgtgggagggcgaacccatgagacacaatctcggtggaaatttgggggatcccagagcaagggctgtctcagtgccactgggaggcagggtcgctaggttcctgcaatgtcggttcctcttcgccggaccctggttgctgttctcggaaattagcttcattagcgacgtggtcaataactcatcacccgctcttggtggaacattcccacccgctccatggtggcctcccggacccccacccacaaacttctcaagcctggaactggagccccgaggtcagcagccagttgctaaagctgaaggttcccccacagcgatattgattggttgtctggttgcaatcattctcctgctcctgctgataattgcgctgatgctgtggcggctacactggcggaggcttctgtcaaaggccgagcggcgtgtcctggaagaagaacttaccgtccacttatctgtccccggagataccatcttgatcaataacaggcccggtccgagagaaccgcctccataccaggagccacggcctcgaggcaaccctcctcattctgctccatgtgttcctaatggtagcgccctgttgctctccaaccccgcttatcgcctgctgctggctacttacgcccgaccccctagaggtcctggtcccccaacgccagcgtgggccaagccgacaaacacccaggcctactccggagactacatggagcctgagaagccaggtgcacccttactgcctcctccccctcagaactcagtgcctcactatgctgaagcagatattgtaacactgcagggggttacaggaggcaatacgtacgctgtgcccgctttaccccctggggctgtgggagacggccctccacgtgtcgatttccccagatctaggctgagattcaaggagaaacttggcgagggccagtttggagaggttcacctgtgtgaggtggatagtccccaggatctggtgagcctggatttcccgcttaacgtgcgcaaaggccaccctctactggtggctgtgaagatcctccggcctgatgcgaccaagaatgcacgcaatgattttctaaaggaagtcaagatcatgagccgcctgaaggaccctaatataatcagactgctgggagtttgtgttcaggacgatccactgtgcatgatcactgattatatggagaatggtgacctgaatcaattccttagtgcccatcagttggaggacaaggccgctgagggggcaccaggagatgggcaggcggcacagggccctaccatttcttatcctatgcttctgcacgtcgctgcacaaatcgcctcgggcatgcggtaccttgctactctgaactttgtccacagggacttagcaacccgcaactgcttagtgggagagaactttactattaagatagcagactttggaatgtcccggaacctgtacgccggagattattacagggtgcaaggaagggccgtgctgcctatccgctggatggcgtgggaatgtattctgatgggaaagtttacaaccgccagtgacgtgtgggctttcggagttaccctctgggaagtcctgatgctgtgccgcgctcagccttttgggcagttgacagatgaacaggtgatcgagaatgcaggcgagttctttagggaccaaggtagacaggtgtacctgtcacgccctccggcatgcccccagggcctgtatgagctcatgcttcgctgttggtctagggaatcggagcagagaccccctttctcccagttgcatcgattcctggctgaggacgcactgaacactgtttag

SEQ ID NO: 11280 - DNA, 1089 bp, synthetic construct
  misc_feature 1..1089: note = source = /note="Description of Artificial Sequence: Synthetic coding sequence"
  source 1..1089: mol_type = other DNA
atgcggaccctgttcaatctcctgtggcttgctcttgcctgctcccctgtgcacactaccctctccaaaagcgacgccaagaaagcagcatctaagacactgttggaaaagagccagttttcagacaaacccgtgcaagataggggtcttgtggtgacagacctaaaagcggagagtgtcgtcctcgaacaccgctcttactgctctgcgaaagcacgggatagacatttcgccggtgacgtcttgggctatgtcacgccttggaattcccacgggtacgatgttacaaaagtctttggctccaagttcactcagatttcacctgtttggcttcagctgaaacgtcgaggccgtgaaatgttcgaggtgactggcctgcacgatgttgatcagggatggatgagagcagtgcgaaagcacgccaagggactgcacatcgtcccacgtctgctttttgaagactggacctacgacgacttccgcaatgtcctggacagcgaagacgaaatcgaagagctcagtaaaacggtcgtgcaggtggccaagaaccagcacttcgacgggttcgtggtggaggtgtggaatcaattactgtctcagaaacgcgtgactgatcagctgggcatgtttacacacaaagagttcgaacagcttgcacctgttttggatggattctcactgatgacatacgactactcaactgcccaccagccagggcctaacgccccactcagctgggtccgtgcatgcgttcaagtcctggacccaaagagcaagtggagatctaaaatactgcttgggctcaacttctacggtatggactacgctactagcaaggacgccagggagccagttgttggcgctagatacattcagaccctgaaagaccatcgccctagaatggtctgggacagccaggcatctgagcacttttttgagtacaaaaaatctcggtccgggcgacatgtggtgttctatccaactctgaagtcgctgcaggttaggctggaactcgcaagagagctcggggttggggtgagtatctgggaactagggcaagggctcgattatttttacgatctgctgtag

SEQ ID NO: 11281 - DNA, 1350 bp, synthetic construct
  misc_feature 1..1350: note = source = /note="Description of Artificial Sequence: Synthetic coding sequence"
  source 1..1350: mol_type = other DNA
atgaagtttcaagggccattggcatgtcttctgctggcactctgtctcggcagcggcgaagccggtccactgcaatccggggaagaaagtacaggaacaaacatcggggaagctctcggccacggtttgggtgacgcactgagcgagggtgtgggcaaagcaataggaaaagaagccggaggtgcggcaggctctaaggttagcgaagccctggggcaagggactcgggaagccgtggggactggggtccggcaggtgccaggcttcggcgtggcagatgcacttggtaaccgggtgggggaagctgcccacgctctgggaaatacaggccatgaaatcggaagacaggctgaagatgtcataagacacggcgctgacgccgtgcgcggaagctggcagggagtacctgggcacaacggcgcttgggagacgtcggggggtcatggcatcttcggttcccaaggcggtctagggggacaaggacaggggaatcctggtggcctgggcaccccctgggtacacgggtatccaggaaacagtgcaggaagtttcggaatgaacccccaaggcgcaccatggggacagggcggtaacgggggaccacccaactttggcacgaatacccagggcgcagtggcccagccagggtatggatccgtcagagcctccaatcagaacgaaggatgcaccaatccaccaccttcagggtcaggaggaggctctagtaattctggcggatcaagcacgggaagctcaagtggcaaccacgggggttcaggtgggggtaacggacacaagcctgggtgtgaaaagcctggcaacgaggcacggggatcaggagaatctggcatccagggccagggcagcagctggggatcaggaggaggagatgcggtgggcggagtgaacacggttaacagtgaaacaagtccaggtatgttcaacttcgataccttttggaagaactttaagagcaaactgggtttcatcaattgggacgcaataaacaagaaccaggtcccccctccctccacgcgtgccctgttatacttcagtcgcctgtgggaagacttcaaacaaaacacccccttcctcaactggaaagctatcatcgagggagccgatgcttctagccttcagaagagagctggtcgcgatgaccagcccggagctggatggcaggaggtcgccgcagtgacatctaaaaattataactataatcagcatgcgtacccaacagcctatggcggaaaatacagtgtgaagactcctgcaaaaggcggtgtatcacctagcagctccgcctcccgcgtgcaacctggtctgttacagtgggtgaagttctggtag

SEQ ID NO: 11282 - DNA, 735 bp, synthetic construct
  misc_feature 1..735: note = source = /note="Description of Artificial Sequence: Synthetic coding sequence"
  source 1..735: mol_type = other DNA
atgtggggggctcccctaccaagacgtcctgtttgggatgtccggtcagcttccgccggaccccagccttgtcttggcggaaaaatgaagctcaatctcgttcagattttcttcatgcttttgatgttactgctgggcctgggcatggggttaggcctggggctgcatatggctaccgccgtgttagaagaaagcgatcaacccctaaatgagttctggtcctcagatagccaggacaaggccgaggccaccgaagagggggatggaacacaaaccaccgaaacattggtactctcgaacaaggaagtcgtccaacctggctggccagaagaccccatcctcggcgaggacgaagtcggcggaaataagatgttgcgggcaagcgccttattccagagtaacaaggactacttgcggctggatcagaccgaccgcgagtgtaatgatatgatggcacacaagatgaaggagcctagccaatcatgtattgctcagtacgcctttatacacgaggatcttaacacagtcaaagctgtatgcaactcccccgttatcgcgtgcgagctgaagggcggtaaatgtcacaagtcatcccggcctttcgacctcacactctgcgaactttcccaaccagaccaggtcacgccaaattgcaactatttaacctcggttataaaaaaacatattattataacatgcaatgatatgaaaagacagttaccaacaggccagtag

SEQ ID NO: 11283 - DNA, 1728 bp, synthetic construct
  misc_feature 1..1728: note = source = /note="Description of Artificial Sequence: Synthetic coding sequence"
  source 1..1728: mol_type = other DNA
atggcatcctggttgagaagaaaattgaggggtaaacgtaggccggtgattgcgttctgtctcctgatgattctatcagctatggctgttacccgctttcccccacagcgtccctccgccggacccgatcctggtccgatggaaccacagggggtgactggtgctccagctacgcatatccgccaagccctgagcagcagccggcgtcagagagcaaggaacatgggcttttggcgtagccgtgcgctgccgagaaactcaatattggtctgcgccgaggaacagggtcatcgcgcaagagtcgatcggagccgggagagtcctgggggagatttaagacatcctggacgcgttcgaagggacatcactctgtccggccaccctaggttatccacccagcacgtggtgctcttgagagaagacgaggtcggcgacccaggaactaaagacctcggccatccccagcacgggtcacctatccaggagactcaatcagaagtggtgactctggtgtccccactccctggctctgatatggctgccctgcctgcttggagagctacctccgggctgacgctgtggccccatacggctgagggacgcgatcttctgggtgcggaaaatagagccctgacaggcggtcagcaggccgaagacccaacactggccagtggcgctcaccagtggcctggatctgtggaaaagctgcagggctctgtgtggtgtgatgccgaaactctgctgtcaagcagcaggactggcggacaggccccaccgtggcttactgatcatgatgttcaaatgctgaggttactggctcagggcgaggtggtcgataaggcaagggtgccagctcacggacaggtcctgcaggttggcttctctacagaagccgcactccaggatctgagcagccccaggctcagtcagttatgtagccaggggttgtgtggccttataaaaagaccgggagacttgccggaagtattgagcttccacgtggatcgggtgcttggacttaggcgcagcttgccggctgttgcaaggcggtttcactcaccgctcctaccatacaggtataccgacgggggagccaggccggtaatttggtgggctccggatgtccagcatctttctgaccccgacgaagatcaaaactccctggctcttggctggctgcagtatcaagccctccttgcacattcctgtaattggcccggacaggctccctgtcctggcattcatcataccgaatgggcaaggctggcactcttcgacttcctgctgcaagtgcatgaccgccttgaccggtactgttgcggattcgagccagagccatctgacccctgtgtcgaggaaaggcttagggaaaagtgccaaaatcctgccgagttgcgccttgtccatatcctggtgcgctctagtgacccgagtcatttggtttacattgacaacgctggcaacctccagcatccggaagataagcttaatttccggctgctggagggcattgacggatttccagaaagtgctgtcaaggtactggcctcaggttgcctacagaacatgctgctgaagtctcttcagatggatccagttttttgggaatcccagggcggtgcacaaggactgaagcaggtgctgcaaacccttgagcagcgcggacaggtgctgctgggccatattcagaagcataatctgaccttatttcgtgatgaagatccctag

SEQ ID NO: 11284 - DNA, 390 bp, synthetic construct
  misc_feature 1..390: note = source = /note="Description of Artificial Sequence: Synthetic coding sequence"
  source 1..390: mol_type = other DNA
atggcggctggatctgcaccaatgcagcttcatctgagggctaccattaggatgaaggacgggctgtgtgtgccaaggaaatggatataccacctgacagagggctctacagacctacgcactgaaggcaggcctgacatgaaaacggagttgttctctagctcttgtccaggtggtatcatgttgaatgaaaccgggcaggggtatcagagatttcttctgtataataggtcccctcacccacctgagaagtgtgtcgaagaatttaagagcctgaccagctgtcttgactccaaggcctttctgctcaccccgaggaatcagggcaaaggtttaaagtctcacaagaccggactgggattaactaaaagctccggcgttacagggtag

SEQ ID NO: 11285 - DNA, 567 bp, synthetic construct
  misc_feature 1..567: note = source = /note="Description of Artificial Sequence: Synthetic coding sequence"
  source 1..567: mol_type = other DNA
atgtttcaccagatttgggccgctctgctctacttctacggtatcatcctgaacagtatctatcagtgtccagagcactcacagctgactactttgggtgttgacggtaaagagtttccagaggtacacttgggacaatggtattttatagctggggcagccccaactaaagaagagctggccacattcgatcccgtcgataacatcgtgttcaacatggcagcaggcagtgctcctatgcagcttcacttgcgggctactattagaatgaaggacggcctgtgtgtacccaggaaatggatctatcaccttactgaaggctctacggacctccgcacggaaggtcgacccgacatgaagaccgagttgttcagctcaagctgccccggtggcataatgctgaacgagacagggcagggctatcagagatttctgttgtacaatcgatccccccatccacctgagaagtgcgtggaggaatttaagtccctgacgtcctgcctggactccaaggcgtttctgctgactcccaggaaccaggaagcttgtgaactcagcaacaattag

SEQ ID NO: 11286 - DNA, 2676 bp, synthetic construct
  misc_feature 1..2676: note = source = /note="Description of Artificial Sequence: Synthetic coding sequence"
  source 1..2676: mol_type = other DNA
atgctgcccacagaggtgccccagtcacacccaggcccatcggctcttcttcttttacaactgctcctgcctcctacaagcgcattcttccctaatatatggagtttgctggccgctccaggctcaattacacaccaggacctcaccgaagaagctgcccttaatgtgaccttacagctgtttctggaacagccgcctccaggcagaccccctctgaggctagaggatttccttggccgaactttgctagccgatgatctgtttgcggcttactttgggcctgggtcttctcgccgatttcgtgccgctcttggtgaggttagtcgagccaatgccgcacaggatttcctccccacctccagaaatgatcctgaccttcatttcgacgccgagagattgggccaagggagggctcgcctggtaggcgcactgagggaaacagtagttgcggcacgggcacttgaccacacccttgctcgacagaggttgggggctgcccttcatgctctgcaagacttttattcacactctaattgggtagagctcggagagcagcagccccacccacacctgctttggccgagacaagagctacagaacctggcccaagtggcagacccaacttgttcggattgtgaggagttgagttgcccacgtaattggttaggcttcacgctgctgaccagtggttatttcggtacacaccctcccaagccgccaggcaaatgctcacatggaggccattttgatagaagctcttcccaacctcccagagggggaattaataaagattcaacatctcccggattcagcccacatcatatgctgcacctgcaagctgcaaaactggccctgctggcgagtatccaagcattcagccttttacgcagccgtctgggagacagggatttctcacgcctgctggacattactccagctagctccttgtccttcgtcttggatacaaccgggtcaatgggggaagagatcaatgctgccaaaatacaggcgaggcatctggtcgagcaaaggcggggatcgccaatggagcccgttcactacgtcttggttccattccacgaccccggttttggccctgtattcaccacgtctgaccctgattctttctggcaacagctgaacgagatccatgcactgggaggaggcgatgaacctgagatgtgtctgtcagcgcttcagctcgccctgctgcatacaccacccctgagcgacattttcgtgtttacagacgcatcccccaaagacgcctttctgacgaaccaagtcgagtcactgacccaggagcgcaggtgtcgagtcacattcctcgttacagaggacacgagccgcgttcaaggccgtgctcggcgtgaaattttgtcccccctgaggtttgagccctacaaagccgtggctcttgcctccggaggtgaggttatcttcacaaaagaccagcacatcagggatgtggctgctatcgtcggagagagcatggcagccctggttactctgcccctcgaccctcccgttgtggtgccaggccagccgctggtgttttccgtggatggtctccttcaaaaaattacagtacgtatccacggagatatcagctcattttggattaagaatcctgctggggtaagtcagggccaggaagagggtggtggccctctcgggcacacccgaagatttggccagttctggatggtgaccatggacgaccccccacaaacgggaacctgggaaatacaagtcaccgcagaggatacacccggtgtacgagtccaagcccagacgtctttggatttcttattccacttcggaattcctatggaggacggcccacaccctggcctgtatcctttaacgcagccggttgccggtctacagactcagctgttggtggaggttacaggccttggaagccgcgctaaccccggtgatccccagccacacttctcccatgtgatcctgcggggagttcctgagggagcggagcttggacaagtgcctttagaacctgttggccctcctgaacgaggcctcctcgcagcctcactctctccaacactgctaagcacacccagacctttcagtctggaactgattggacaggatgctgccggtaggcggcttcatagggccgctcctcagccttcaacagtcgtgccggtgctgctcgagctatccggtccctctggctttctcgctcccggatctaaagtgcccctgagcctccgtatagcatccttctcaggaccccaggatctcgatctccggacgttcgttaaccccagcttctcactgaccagcaatttgtctcgagcccacctggagctgaatgagtcggcctggggtaggctgtggctggaggtgcccgactccgctgctcccgactcagtggtaatggtgactgtgacggcagggggacgggaagctaatccggttcctcctacccatgcattcttgaggctgctagtgagtgccccagcccctcaggaccgccacactacgcctacaggttcctctgatcccattcttacaaccgctactcctgcattcagtcccttcactctggtaactcagggacgcgcaggtgctggtctggcagcaggatccccctggtgggggaccgtcggcggtgtcctgctgctactgggcttagccagctggtag

SEQ ID NO: 11287 - DNA, 2742 bp, synthetic construct
  misc_feature 1..2742: note = source = /note="Description of Artificial Sequence: Synthetic coding sequence"
  source 1..2742: mol_type = other DNA
atgggcccagaagctctgtctagcctgctgcttctgctgctcgtagctagtggagatgcagacatgaagggccacttcgacccggctaagtgtcgctatgccttgggaatgcaggacagaacgattcccgatagcgacataagtgcgagctcctcatggtccgactctaccgccgctaggcatagccgtttggagtcgtccgatggagatggagcctggtgtcctgccggtagcgtgtttcccaaagaggaggagtacttgcaagttgaccttcagcgactccacttagtcgctttagtaggcacgcaaggcaggcatgccggaggacttggcaaggagtttagtagaagctatagattgagatacagcagagatgggaggcgttggatggggtggaaggatagatggggacaggaggtgatctccgggaacgaggacccagagggcgttgtactgaaagatctcggtcccccaatggtggccaggctcgtcagattctaccctcgggctgaccgggtcatgagcgtgtgcctacgagtcgagctatacggctgtctatggagagacggattgctgtcatataccgcccctgtgggacagaccatgtatctaagcgaggccgtgtatctcaacgatagcacctatgatggtcataccgtaggcggattacaatacggagggctgggacagctcgccgacggagtggtgggcctcgacgatttccggaaatcccaggaactaagggtgtggccgggatatgactatgtcggatggtcaaaccactcctttagcagcgggtatgtcgaaatggaattcgagttcgacagactgcgcgcttttcaggcaatgcaggtgcattgcaacaacatgcacactctgggcgctaggttacccggtggtgtggagtgcagattcagaaggggaccagccatggcctgggagggggagcctatgcgtcacaacctcgggggaaacttaggggacccacgtgctagagctgtgtcggttcccttaggaggacgggtcgcaaggttcttgcagtgccggttcctgttcgcaggcccttggctcctgttctccgagattagcttcatcagcgacgtggtgaacaactcatcccccgcactcggtgggacatttccacccgcaccatggtggccacccggtcctccgcctacaaatttcagtagtctggagctggaacctagaggccagcagcctgttgcaaaagctgagggctctcccactgccatcctgatcggctgtcttgtggcaattatcctcctgcttctactaatcatcgccctgatgctgtggcggctccattggaggcgactcttgagcaaggctgagagacgcgtgctggaggaagagttaacagtgcatctgtctgtgcccggagacaccatcttgattaacaataggccagggcctcgggagcctccaccttaccaggaaccacgacctagaggaaatcccccacattcggcaccatgcgtgcccaatggcagcgcgctgctcttaagcaaccccgcatatcggcttctgttagccacttatgcgcgacctcctagagggccaggacctccaaccccggcttgggccaagcctacgaacacacaagcttattctggtgactacatggagcctgagaagccaggcgctcctctcctccccccacctccacagaattctgtcccacactatgccgaagcggacattgtcactctacaaggggttacaggaggtaatacatatgctgtccccgcattaccccctggcgctgtgggcgatggaccacctagagttgatttcccacgatcgcgcctccgattcaaggagaaattgggtgagggccagtttggcgaagtccacctgtgtgaagtggactcacctcaagacctcgtgagcctggactttcccctgaatgtcaggaaaggccatccccttctggtggccgtaaaaattcttcggccagatgccaccaagaacgcccgtaacgatttcctgaaggaggtgaaaatcatgtcccgactcaaagatcccaatatcattcgcctacttggggtgtgtgtccaggatgaccccctgtgtatgattaccgactacatggaaaacggcgatctcaaccaattcctttccgcccatcagctggaggataaggcagctgaaggtgcgcctggggatggccaagcagcgcaagggccaacaatcagctatcccatgttgctccatgttgctgcccagatagccagtggaatgagatacctggcaaccttgaatttcgttcaccgggatttggcgacacgcaattgtctcgtgggtgagaatttcaccatcaaaatcgccgacttcggaatgtctagaaacctgtacgcgggagactattatcgggtgcagggtagagccgtgctcccaatccggtggatggcttgggagtgcattcttatgggtaaatttactactgcaagtgacgtttgggcttttggggtgactctgtgggaagtgctcatgctgtgtcgcgcacagccgttcggccaacttacagatgagcaagtcattgaaaacgcgggtgaatttttcagggaccagggccgacaggtatatctgtcacggcctcccgcatgtccacagggcctttacgagttgatgctcaggtgctggtctcgcgagtctgaacagcgccctccatttagccagctgcacaggtttcttgcggaggacgctctgaataccgtttag

SEQ ID NO: 11288 - DNA, 453 bp, synthetic construct
  misc_feature 1..453: note = source = /note="Description of Artificial Sequence: Synthetic coding sequence"
  source 1..453: mol_type = other DNA
atgcggtttatggccggacccgctgggagccagagtttgggccctctgtgctttcactcaagcccccaggcgctttatactgtactgctcatcgtgctggttatgatgagtttagtgttcggaaagttcgtgcccgtgaactgggagccaccacagcctctaccctttcctaaataccttcgctgttatagatgcctcttggaaacgaaggagctggggtgcttactcggaagcgacatttgcctgacacctgccggttccagttgtattacactgcacaaaaaaaacagcagcggctctgacgttatggtttccgactgccggtcaaaagagcagatgtctgactgctcaaataccaggacgtccccagtgtccggtttttggatattttcacagtactgttttctggacttttgcaacgatcctcagaacaggggactctacacaccttag

SEQ ID NO: 11289 - DNA, 192 bp, synthetic construct
  misc_feature 1..192: note = source = /note="Description of Artificial Sequence: Synthetic coding sequence"
  source 1..192: mol_type = other DNA
atggggcctgaggctctgtccagccttctcttactgttactggtggcatccggggatgcagatatgaagggacacttcgacccagcaaaatgccgctatgccttgggcatgcaggataggactatcccagattccgacatttcagcgtcaagctcctggagtgattccaccgcagccagacactcccgttag

SEQ ID NO: 11290 - DNA, 1212 bp, synthetic construct
  misc_feature 1..1212: note = source = /note="Description of Artificial Sequence: Synthetic coding sequence"
  source 1..1212: mol_type = other DNA
atgcaggggacccccggaggaggaacacgccctgggcctagtcccgtcgaccggagaacattactcgtgttctcctttatcctcgccgcagctctcggtcaaatgaactttactggtgaccaggtgcttcgtgttctcgccaaggacgagaagcagctgagtctgctcggagacttagagggtctcaaacctcagaaagtggatttctggcgaggacccgctaggcccagcctgcctgttgatatgcgcgtcccgttttccgaactgaaggacattaaagcttacctcgagagccacggcctggcatactccataatgatcaaggacattcaagtgctcctggacgaggaacgtcaagccatggcaaagtcccgccgtcttgagaggtcaactaatagctttagttacagcagctatcatacattggaagagatctactcttggatcgataactttgtgatggaacactcagatatcgtgtctaagatccagatcggtaatagcttcgagaatcagtctatattggttctgaagttctcaaccggtggctctagacatccagccatctggatcgacacgggcattcactctagagagtggattacacacgctacaggcatttggaccgctaacaaaatagtcagtgattatggcaaagaccgggtgcttaccgatatattaaatgcaatggacatcttcatcgagctagttaccaaccccgatgggttcgccttcacacactcgatgaatcgtctctggagaaagaataaatctattaggcccggtatcttctgcatcggagtggatttaaatcggaattggaagtcaggcttcggaggaaacggttcaaactcgaacccctgttccgaaacgtatcacggcccatcaccacaaagcgagccagaggtagcagctattgttaacttcatcactgctcatggtaattttaaagccctgatctctattcattcgtacagccagatgcttatgtatccctacggtaggctcttggagcctgtcagcaaccagagagagctgatgtggcctgtgggctcaccttccaccggccctatgacagtggctagcagcaccccttctgccttaagtagcgggaccttgggatctatggcctcatgctgccgtccccatcgttcgtcgcccaggccgagaagacgaggctggagattcgggccttcctggtcaaccccgtag

SEQ ID NO: 11291 - DNA, 1542 bp, synthetic construct
  misc_feature 1..1542: note = source = /note="Description of Artificial Sequence: Synthetic coding sequence"
  source 1..1542: mol_type = other DNA
atggcacccgcacgcacaatggcccgagcacggctggccccagccggtattccagccgtggcgctgtggcttctgtgcaccctcggtctccaggggacccaagctggtccacccccagcccctccaggactgccggctggagccgactgcctcaactcatttacagccggtgtccctgggttcgtgttagacaccaatgctagcgtgtctaacggtgcaaccttcctggagtcgcccacggtaaggcgcggatgggattgcgtcagagcatgttgtacgacgcagaattgcaatcttgcgctggtggaattgcagcctgaccgcggagaagatgcgatagctgcatgcttcctgatcaattgtttgtatgagcagaactttgtatgcaaatttgcacctagagaagggttcattaattatctgactcgcgaagtgtataggtcatatcggcagctgcgtactcaggggttcgggggtagtggaatacctaaggcttgggcgggaatagacctgaaagtgcagccgcaagagccgctggtgttgaaggacgttgaaaatacagattggcgactgctccgtggagacactgacgtcagagtggaacggaaggatccaaaccaggttgagctgtggggtcttaaagaaggcacttatttgttccagctcactgtgacatcttccgaccatccagaggacactgccaatgtcaccgttacagtgctgtcaaccaaacaaactgaggactattgcttggcttcgaataaggtcggcaggtgccggggttcgtttccacggtggtactacgaccccactgaacagatctgtaagagcttcgtctacgggggatgtctcgggaataagaataattacctgcgcgaagaagagtgtatactcgcctgccggggagtgcaggggccttctatggagagacgacaccctgtttgttccggaacatgtcagcccacacagttccggtgttctaacggatgctgtatcgactctttcttagagtgcgacgacaccccaaattgccccgacgctagtgacgaggccgcatgtgaaaagtatacatctggctttgacgagctacagaggatacacttccctagtgacaaggggcattgcgtcgacttgcccgacaccggcctctgcaaggaaagcatccccaggtggtattacaacccgttctccgaacattgtgcacgttttacttatggagggtgctacggaaacaagaataatttcgaggaggagcaacagtgccttgaaagttgcagaggcataagtaagaaggacgtgttcgggctacgacgggagattcctattccttccacggggagtgtggaaatggcggtggctgtcttcctagtgatttgtatagtggtcgttgtagccatcctgggctactgtttcttcaagaaccagcgtaaggactttcacggccatcaccatcacccgcctccgactcctgcctcctccaccgttagcactacagaggatacggagcatttggtctacaatcacactaccaggcccctgtag

SEQ ID NO: 11292 - DNA, 798 bp, synthetic construct
  misc_feature 1..798: note = source = /note="Description of Artificial Sequence: Synthetic coding sequence"
  source 1..798: mol_type = other DNA
atggcaccttggtcacatcccagtgcacagttgcagcctgtgggaggggatgccgtctctcccgcactgatggtgttgctgtgtctcggcttgtccctgggccctcgcacacacgtgcaagcgggaaatctgagcaaagcaacattatgggctgaacccggatctgtgatcagtagggggaactctgtgaccatcagatgccagggtactcttgaggcacaagaataccggctcgttaaagaaggaagccccgaaccttgggacacccagaatccactcgaaccaaagaataaggccagattctcgattccttcgatgaccgaacatcatgccggtcgctatagatgctattactactcccccgcaggctggtctgaaccttccgatcctttagagttagttgtgaccgggttctacaataaaccaaccctgtcagcacttccaagtccagtagtgacctcaggagaaaatgtgaccctgcagtgtggatcacgccttaggtttgatcggtttattcttacagaagagggggatcacaagctatcttggactctcgattcgcaactgactccctccgggcagttccaagccctgtttccggttggtccggtcacgccaagtcatcggtggatgctcagatgttatggatctagaaggcatatcctgcaggtctggtctgagccttctgacttgctggagatcccagtgtctggcgaggaggccacagtcttcagttctaccatccaaggaagtcagaccgggtgcggcgagttgtacagacaagggagtccgtgctag

SEQ ID NO: 11293 - DNA, 795 bp, synthetic construct
  misc_feature 1..795: note = source = /note="Description of Artificial Sequence: Synthetic coding sequence"
  source 1..795: mol_type = other DNA
atggaaaagcccattctgaaaaacctcaatgaaatgctgtgtcctatcatcgccagcgaggtgaaggccctgaacgcaaatctcagcaccttggaagttcttacaaagatcgacaattacactctattagattattcactcatctcttctcccgagatcactgagaactatcttgacctgaatcttaagggggttttttaccccttggaaaacctgacagaccctcctttctcaccagtaccttttgtactgcctgagaggagtaacagtatgctgtatatcggcatcgctgaatatttcttcaagagtgccagctttgctcatttcacagccggagtgttcaacgtgaccctctccacagaagagatcagcaatcacttcgtccaaaactcccagggtcttggcaacgtgctgtcccgcgtcgctagtacctcagtggggctggtaattctcggccagcgcctagtgtgctcgctgtctctcaaccgctttaggttagccctgcctgagagtaatagatcgaacattgaagtgctacgtttcgagaatattctgtcatccatcttgcatttcggcgtgctccctctggcaaacgccaaactccagcagggcttcccgctgagtaacccacacaaattcctcttcgtaaattctgatattgaagttctggagggtttcctattgatctctacggatcttaagtacgagaccagctcaaaacagcaaccctcctttcatgtgtgggaggggctgaacctaataagtcgacaatggagaggcaaatctgcaccctag

SEQ ID NO: 11294 - DNA, 117 bp, synthetic construct
  misc_feature 1..117: note = source = /note="Description of Artificial Sequence: Synthetic coding sequence"
  source 1..117: mol_type = other DNA
atgaacaagatattgtcatccactgtctgtttcggtctcctgactctgctatcggttctgtcttttcttcagagcgtacacggaaggccttacctgacccagggtaatgagatatag

SEQ ID NO: 11295 - DNA, 567 bp, synthetic construct
  misc_feature 1..567: note = source = /note="Description of Artificial Sequence: Synthetic coding sequence"
  source 1..567: mol_type = other DNA
atgtttcatcaaatctgggctgccctgctgtacttttacggcattattctaaactcgatctatcagtgccccgagcatagccagttgacgaccttgggcgtagacggcaaggaatttccagaagttcacctgggacagtggtacttcatcgccggagctgcgcctactaaggaagagctcgcaacattcgatcctgtcgacaatatagtgtttaacatggctgccggatccgcaccaatgcagcttcatcttagagccaccattaggatgaaagatggtctgtgtgttcctcgaaaatggatttatcatctcacggagggcagtactgatttgcgtacagaaggtcgtccagatatgaagactgaactgttttctagttcttgccctggaggcattatgcttaatgagacgggacagggatatcaacgatttcttctttataatcgctcaccccaccctccagaaaaatgcgtggaggaattcaagagcctcacaagttgtctggatagcaaggcgttcttgctgacacctcgcaatcaggaggcttgcgagttaagtaataattag

SEQ ID NO: 11296 - DNA, 600 bp, synthetic construct
  misc_feature 1..600: note = source = /note="Description of Artificial Sequence: Synthetic coding sequence"
  source 1..600: mol_type = other DNA
atggaaaccttccctctgctccttctgagcttggggttggtgcttgccgaagctagcgagagtacgatgaaaattatcaaggaggaattcacagacgaagagatgcagtacgatatggcgaagagcggacaggagaaacagacaatagagatactgatgaaccccatccttctcgtgaagaatacaagcctgtccatgtccaaagatgacatgtcatctactcttctgacgtttcgctcactgcattacaacgaccctaaggggaactcttcaggcaacgataaggaatgttgcaacgatatgacagtatggaggaaggtgagtgaggctaacggatcgtgtaagtggtcgaataattttatccgatcgtcaaccgaggtcatgcggagggtgcaccgcgcaccctcctgcaagtttgtgcaaaatccaggaatatcatgttgtgagtccctggagctggagaatactgtttgccagtttaccaccggaaagcaattccctcggtgccagtatcactctgtcacatcactggaaaaaatattgactgtccttactgggcacagcctgatgagctggctcgtctgcggttccaagttgtag

SEQ ID NO: 11297 - DNA, 30 bp, synthetic construct
  misc_feature 1..30: note = source = /note="Description of Artificial Sequence: Synthetic coding sequence"
  source 1..30: mol_type = other DNA
atggcaccgaagaaactgtcctgcctttag

SEQ ID NO: 11298 - DNA, 831 bp, synthetic construct
  misc_feature 1..831: note = source = /note="Description of Artificial Sequence: Synthetic coding sequence"
  source 1..831: mol_type = other DNA
atggcgcctagtccattacaaaggctgcattgcggcccatctcccagcccacgtcctactgaagtccctcgcggtaccgtgtccgtgtcttgtcgatacctgaagaactccctgcacgtcttcgtttccggcggtgccataggaacctcctctccagcgctgctcgagtgtcaggaaggtgttggcccagcgcgaccgagtctgctggttccacctccccctcggccaaggcgactggacctcgctaggacactgcccgctgaacggactgactcccagtcgttgtatatcgtctatattgcactccccggaaggaccccccgtccagctcttgctttcgctttcctgatgcctgcttgttgtaatcgtccatcccctcgaccttcacctgcccatctgactgcctccagcgtgcttcgaagacagagacacgtactggccgcaagcgctgcgagtccttgccaatggtctggactgcgggtcgcccatagcctgcgacaggtggtgtccctgtgtcccaggtgcacaggctcctgccccttttctggcgcatgtgctagttcattgccatctcccctcagttgccctcattcacacagcgggtcttgggggacatggagccaaggacgaccctgctcaagtaccgaggtggccggtcttgcattgtggccaacagatttcctcagctgccttttggacgcctcagaattacagacacaaggtagccacggcttttcttttaccccgaccgggttcagcagcaataggaaggtgggtgtcggttcttgtcgggatggcgcagggaggggggcaatgggcggtctcttctag

SEQ ID NO: 11299 - DNA, 678 bp, synthetic construct
  misc_feature 1..678: note = source = /note="Description of Artificial Sequence: Synthetic coding sequence"
  source 1..678: mol_type = other DNA
tgagcagaccttccaagttgctggggcgctggcccatgttacaccggccataaagtgggagcattaagaagggacacagtaatttgttgctgcagacatggcgactacagcacaccttgtctgtttactccgggaaagccctctcgaaacccgtcaccctggaaacgtaccctgtggaccctgagcgccccatgggctggtccggctggatggaccggcgaagagcaaaatgctactaagaccggtcttatcacccgcagaccacgacccctacgccgtcgcccacaccccgcacccgcaagtcccctgccagaaattattagaggcaacatccctcgtatgctcggtaagttcgtgcccgtgaattgggagcctcctcagcccctgcctttcccaaagtacctcagatgttatagatgcttacttgaaactaaggagctgggatgcttgttgggcagcgatatttgcctgacaccggctggctccagctgcatcactctacacaagaagaattcctcgggtagtgacgtcatggttagtgattgcaggtccaaggagcagatgtccgattgtagcaatactagaacttcacctgtcagcgggttctggattttttctcagtattgtttcctggacttctgcaatgatccacagaacagagggctctataccccgtag

SEQ ID NO: 11300 - DNA, 534 bp, synthetic construct
  misc_feature 1..534: note = source = /note="Description of Artificial Sequence: Synthetic coding sequence"
  source 1..534: mol_type = other DNA
atggttcctgctgcaggggctctcctgtgggtgctgcttcttaacctggggcctcgcgctgctggagcccaaggattaacacaaacccctacagaaatgcaaagagttagtcttcggttcggcggaccaatgacgaggagctaccggtctaccgcacggacaggcttacccagaaaaacccggatcatactcgaggatgaaaatgacgctatggcggacgccgatcgcctggccggtcccgctgcggcagaactgctggccgctaccgtgagcaccggcttctcgaggtcctccgcaattaacgaggaagacggtagttctgaagaaggtgtagtcattaacgcgggtaaagacagtacctcaagagagctgcctagcgccacacctaacactgcaggaagcagcagtactcgttttatcgcgaactctcaagaaccggaaataaggctcacttcttccttgcctcgcagtcctggtaggtctactgaggatctacctccctgccatttactccgcatatgtgggtggtgttag

SEQ ID NO: 11301 - DNA, 912 bp, synthetic construct
  misc_feature 1..912: note = source = /note="Description of Artificial Sequence: Synthetic coding sequence"
  source 1..912: mol_type = other DNA
atgctccatcccgaaacaagtcccggaaggggacacctccttgcagtgctgttggccctgctaggtaccgcgtgggccgaagtctggccccctcagcttcaggaacaggctccgatggctggggctctcaatcgcaaggagtcttttctgctcctgtcccttcacaacagactgcgatcatgggtgcaaccaccagccgctgatatgcgcaggttggactggtcggactctttagctcagctggcccaggctcgagccgctctatgtggcattccaacaccttcgctcgcatccggcctatggcgcacccttcaggtggggtggaacatgcagctgctgccagccggactggcctcatttgtggaggtggtgtctctttggtttgcagagggccagaggtactctcacgcggctggcgagtgtgcacgcaacgcaacctgcacccactacacgcagctcgtgtgggcaacgtcctcacagctgggatgcggccgtcacctttgttctgctggtcaggctgcaatcgaggcattcgtatgtgcctacagtcccagaggaaattgggaagtgaacgggaaaaccattgtgccatataagaagggtgcctggtgctctctgtgtacggcatccgtaagtgggtgcttcaaggcttgggaccacgccggtggcctgtgcgaagtgccacgcaatccatgtcgaatgtcttgccaaaatcacggcaggctcaacatctccacttgccattgtcattgcccaccagggtacacgggcaggtattgtcaggttaggtgttcgttgcagtgtgtgcacggacggttccgtgaagaggaatgttcctgtgtttgtgacatcggatatggggagcctagtgtgccccctaggtgcatatttcctagcacaccagttacttag

SEQ ID NO: 11302 - DNA, 1482 bp, synthetic construct
  misc_feature 1..1482: note = source = /note="Description of Artificial Sequence: Synthetic coding sequence"
  source 1..1482: mol_type = other DNA
agcgaggcagtgtacctgaatgacagtacatatgatggccatacagtgggtggtttacagtatggcggtctgggacagctggccgacggcgttgtgggcctcgacgactttcgtaagagtcaggaacttcgcgtgtggccgggatatgactatgtagggtggtcaaatcattctttctcttcaggctatgtcgagatggagtttgaatttgacagattgcgcgcttttcaggctatgcaggtgcattgcaacaatatgcataccctgggtgcccgtttgcccggaggcgttgagtgtcgctttcggagaggaccggcaatggcctgggaaggtgagcccatgaggcacaatttaggcggaaatttgggcgatcccagggcgcgtgctgtcagtgtgccgttaggaggccgagtggcccgatttctccaatgtaggttccttttcgccggtccgtggctcctgttctctgagatctctttcataagtgatgtggtcaacaattcgtcgcccgctctcggaggtactttcccccctgcaccgtggtggcctccagggcctcctcccaccaatttcagctctctggaattagaaccccgaggacagcagcctgtggccaaagccgagggatcccccacagcaatcttgattggatgcctggtggctatcatcttattgctcctgctcataatcgccctgatgctgtggcggctgcattggcgacggctcctgtctaaggtgctggaatcacaccccagaacgagaagtccagggctggtgggcattcggcctacccccctcccagtttcccctatggctctacggtgctgtagccccattcaacctacagccagcttctggccgctgaccccagtgcccctggaagcaagagcacctcctcacccacctggacctaacccccctacgcctcgcggtgtgactgggggtaatacgtacgctgtgcccgctcttccacccggtgcggtgggggacggacctccgcgagtggacttcccacgatcccggctcaggttcaaggagaagctaggggagggccaatttggagaagtgcacctgtgtgaggttgactctccgcaagacctggtatcactggactttcccttaaatgtgaggaagggacacccactgctcgtggccgtgaagattttgcggcctgatgcaactaagaacgccaggaacgacttcttaaaggaggtaaaaattatgagccggctgaaagacccaaacattatcagactgttaggcgtatgcgtccaggacgatccactctgcatgattaccgactatatggagaacggtgacctgaaccaatttctctctgctcatcagctcgaggacaaagccgcagagggggcaccaggagatggacaggccgctcaaggccctacgatctcataccctatgctcctgcacgtggccgctcagatcgcgtcaggaatgcggtacttagctactctgaactag

SEQ ID NO: 11303 - DNA, 807 bp, synthetic construct
  misc_feature 1..807: note = source = /note="Description of Artificial Sequence: Synthetic coding sequence"
  source 1..807: mol_type = other DNA
atgaagcagatcctgcatccagcactcgagacgacagacccgtgctccaccggatttgtgttccccgctatgacgttatttccagtactgttgtttttggttgcgggactgctgccctccttccccgcaaatgaggataaagatccggctttcactgccctgttgacaacccagacgcaggtgcaaagggaaatcgtgaacaaacacaacgagctgagacgggctgtctcccccccagccagaaacatgttgaaaatggaatggaataaggaagctgccgctaatgcgcagaaatgggccaaccagtgtaattatcgccattcgaacccaaaagaccgcatgaccagtctgaaatgtggtgaaaacctctacatgtcctctgcctcctcaagctggtctcaggctatccagtcctggttcgacgaatataacgatttcgactttggagtgggcccaaaaacccccaacgcggtagttggacactacacacaagtagtctggtacagctcttatctggtgggctgcggcaacgcttattgccccaaccaaaaagtgctgaaatactattatgtttgtcagtactgtcccgcagggaactgggccaaccggctgtacgtgccctatgagcagggtgctccatgcgcgagctgccccgataattgcgacgatggactgtgcactaatggatgcaaatatgaggatctctactcgaactgtaagtctttgaagctgacgctcacttgcaagcaccagctcgtgagagatagttgcaaggcgagttgcaactgtagtaatagtatttattag

SEQ ID NO: 11304 - DNA, 372 bp, synthetic construct
  misc_feature 1..372: note = source = /note="Description of Artificial Sequence: Synthetic coding sequence"
  source 1..372: mol_type = other DNA
atgctccctaagagccgcagggctctcaccattcaggaaatagctgccctggcccgatcttctttgcacggtataagccaggtagtgaaagatcacgttacaaagcctactgcgatggcgcagggtagagtggcccatctgatagagtggaagggctggtccaaaccatcagacagcccagccgcactggaatccgccttcagttcatattcagatctaagtgaaggcgagcaggaggcccgattcgcagctggagtggcggaacaatttgccattgcagaggccaagctgagggcttggagctcagtggatggcgaagattccacagatgattcgtacgacgaggacttcgcagggggtatggacacgtag

SEQ ID NO: 11305 - DNA, 726 bp, synthetic construct
  misc_feature 1..726: note = source = /note="Description of Artificial Sequence: Synthetic coding sequence"
  source 1..726: mol_type = other DNA
atgggtgccgtcatgggcacattctcaagcctgcaaacaaagcagcggagacctagcaaggataaaatcgaagacgaactcgagatgaccatggtttgtcacaggccagaaggactcgaacagctggaggcacagaccaacttcaccaagagggagcttcaggtcctttaccggggattcaaaaatgaatgcccatccggcgtggtcaacgaggatacttttaagcagatctatgcacaattctttccacatggggctctgccttgccttgagggctccccttgtgtagagttcctacctccatcccctgctctgctgttctgcctggttgatgcttccacttatgcccattatctatttaacgcttttgacacgacacagactggaagcgtgaagtttgaggacttcgtgaccgctctgtccattctgctgcgaggcactgtccacgagaagctcagatggacatttaacctgtacgacattaacaaggacggctacattaacaaagaagaaatgatggacatcgtgaaggctatttacgacatgatgggtaaatacacttatcctgttctcaaagaggacactccacggcagcacgtggacgttttttttcagaaaatggacaagaacaaggatggcatcgtcactctggatgaatttctggaatcatgtcaggaagacgacaatatcatgaggagcctgcaattgttccaaaacgtcatgtag

SEQ ID NO: 11306 - DNA, 630 bp, synthetic construct
  misc_feature 1..630: note = source = /note="Description of Artificial Sequence: Synthetic coding sequence"
  source 1..630: mol_type = other DNA
atgggccctgaggcgctttcctcgttattgctcctcctgctggtcgctagtggggacgcggacatgaaaggtcattttgaccccgcaaagtgcaggtacgcactgggaatgcaagatcgcactatccccgactctgatatcagcgcatcgagcagctggagtgatagcacggcagctcgccatagccgattggaatcttccgacggtgatggcgcatggtgtccagcagggagcgtcttccctaaggaagaagaatacctccaggtcgacttacaacgtctgcatcttgtggctttggtggggactcagggccgtcatgcaggcggattaggtaaagagtttagtcgaagttacaggttgcgctactcccgagacgggaggaggtggatggggtggaaagacagatgggggcaggaagtaatttctggcaatgaagacccagaaggggtggtgctgaaggatctgggaccaccgatggtggctcgacttgtgcgcttttaccctagagcggatagggtgatgtcagtctgtctgagagtggagctctatggatgtctctggcgggatggcttgctgagttacacagcccctgtcgggcagaccatgtatctctccgaggcagtgtattag

SEQ ID NO: 11307 - DNA, 312 bp, synthetic construct
  misc_feature 1..312: note = source = /note="Description of Artificial Sequence: Synthetic coding sequence"
  source 1..312: mol_type = other DNA
atgaggcagcgtctcttgcctagcgtgacgtcacttcttttggtagcccttctcttccctggcagttcacaggcacgccatgtcaatcatagtgcaactgaggccctgggcgagctgagggagagagcgcctggccaaggcaccaacggatttcagctgttgcgccatgcggtgaagagagatctccttcccccaagaacccccccataccaggtgcatatcagccatcaggaggcacgcggacccagcttcaagatctgcgtcggattccttgggccacgctgggccaggggatgctcgaccggcaactag

SEQ ID NO: 11308 - DNA, 426 bp, synthetic construct
  misc_feature 1..426: note = source = /note="Description of Artificial Sequence: Synthetic coding sequence"
  source 1..426: mol_type = other DNA
atgaaaacagggctcttttttttgtgcttactcggaacagctgctgccattcctactaacgccaggcttttgtccgaccacagcaagccaaccgcagagactgtggcccctgacaacaccgcgataccaagcctgcgagcggaagctgaggaaaacgagaaagaaacagctgtgagcacagaggatgattcgcaccacaaggccgagaagtcatcagtgttgaaatcaaaggaggagtcccacgagcagtctgccgaacaaggtaagagttcctctcaagagctcgggttaaaggatcaggaagatagcgacggtcatttgtccgttaacctggagtatgctccaaccgagggaactcttgatataaaggaagatatgtcagagcctcaagagaaaaagctgagcgagaataccgacttcttatag

SEQ ID NO: 11309 - DNA, 642 bp, synthetic construct
  misc_feature 1..642: note = source = /note="Description of Artificial Sequence: Synthetic coding sequence"
  source 1..642: mol_type = other DNA
atgcgtctcgcaggacccctaagaatcgttgtgctggtcgtgtccgtgggagtgacctggatagtagtttctatcctcctcgggggacccggaagtggcttccccagaattcagcagctgttcacaagcccagagtcgtccgttaccgccgcacccagggcaaggaagtataaatgcggcctgccacaaccttgccccgaagagcacttagcctttagggtcgtgagtggggcagctaatgtgatagggccaaagatctgcttggaagataagatgctgatgtcctctgttaaggacaatgtaggacgtggtctcaatatcgcactggtaaatgacgtgaatgatctgcttaaatttatccgacccctgcacgagggaacactggtcttcgttgctagttacgatgaccctgctaccaagatgaatgaagaaacgagaaaactcttcagcgagctgggctcccgcaatgccaaggaactggctttcagggactcatgggtgtttgtgggggctaagggggtgcagaataagagtccttttgaacaacacgtgaagaacagtaaacatagtaacaaatacgaaggatggccagaggctctggagatggaggggtgcattccgaggagatccacggcatcttag

SEQ ID NO: 11310 - DNA, 2700 bp, synthetic construct
  misc_feature 1..2700: note = source = /note="Description of Artificial Sequence: Synthetic coding sequence"
  source 1..2700: mol_type = other DNA
atgcttttgcttttactgcttgcccctctatttttaaggcctcccggagcagggggtgcacagacgcctaacgccacttcggagggttgtcaaatcattcaccccccatgggagggcggaattcgctacaggggacttacaagagatcaggtcaaagccattaacttcctgccagtggactatgaaattgagtacgtgtgtaggggtgagagagaagttgtgggacctaaagtacgcaaatgtctcgccaacggatcctggaccgacatggacaccccatctagatgcgtgaacaggacccctcactccgagcgcagggctgtgtacatcggagccctattcccgatgtctggcggttggcctggaggccaagcttgtcagccggctgtcgaaatggccctggaagatgtgaacagcaggcgcgatatcctcccagattacgagctgaaactgattcaccatgattcaaaatgtgatccaggtcaggctacaaaatatctgtatgagctgctctacaatgaccccatcaagatcattttaatgcctggctgttcttccgtctctaccttggtggcagaagccgctagaatgtggaatctgatcgtactgtcatacggctcatcatctcccgctctgtctaaccgccaaaggttccctactttttttcgcacacacccgtctgccaccctgcataatcccacacgagttaaactgttcgagaaatggggctggaagaagattgccacaatccagcagactaccgaagtctttactagcacactggatgacttagaagagagagtgaaggaggcaggaatcgaaatcaccttccgtcagagctttttttccgaccctgccgtacctgtaaaaaatctgaaacggcaagacgcccgaattattgttggattattctacgaaacagaagcacggaaagtcttctgcgaggtctataaggaacgcctattcggcaagaagtacgtgtggttcctgattggttggtacgctgataattggttcaaaatttatgacccttcgatcaactgcacagtcgatgagatgaccgaagccgtcgagggtcatatcactacagaaatagtaatgctgaaccccgcaaatactcggtcgatctcgaacatgaccagccaggagtttgtggagaagctgactaagcggctgaaacggcaccctgaggaaaccggaggattccaggaggctcctctcgcctacgacgctatttgggcactcgcgctcgcgctgaataaaacttctggagggggtggtcggtcaggcgtccggctagaagactttaattataacaaccaaacgattactgaccagatatacagggctatgaactcaagtagcttcgagggggtcagcggacatgtcgtgtttgacgccagtgggtcccgaatggcctggacactgatagagcagctgcagggtgggagctacaaaaaaataggatattacgatagcaccaaagatgacctctcctggagtaagaccgacaagtggatcgggggttctcctcccgcagaccaaacactggtcatcaaaaccttcaggttcctttcacagaagttatttataagcgtgtctgtgctttcctccctcggaattgtactcgccgtcgtatgtctttctttcaacatatataacagtcacgtgcgatatattcaaaactcccaacccaatctgaataacctgacagccgtgggatgtagtttggccctcgcagccgtgtttccgttgggactggatgggtatcacatcggtcgcaatcaatttccattcgtctgccaggccaggctctggctccttgggcttggcttttcacttggatatggcagcatgtttaccaaaatttggtgggtacacactgtgtttaccaagaaggaagaaaaaaaggaatggcgaaagacgctggaaccttggaaactctacgctacagtaggcttgctggtcggtatggatgtgttgactctggcgatttggcaaatcgtggacccactgcaccgcactattgagacatttgccaaagaggagcctaaagaggatatcgacgtttccattctacctcagctcgaacactgctcttctagaaaaatgaatacttggctggggatcttttatgggtataaaggcctgttgctgctcctggggattttcctggcttacgagacgaagtctgtaagcacagaaaagattaatgaccatcgggctgttgggatggccatttataacgtggccgtgctctgtctgatcaccgctccagttaccatgatcttatccagtcaacaggacgcggctttcgcctttgcctcacttgccatcgtcttctcatcatacataacactggtggtgttatttgtgcctaagatgaggaggctaatcacacgcggtgaatggcaaagcgaggctcaggacaccatgaaaacaggatcaagcactaacaataacgaggaggaaaaaagcaggctgcttgagaaggagaacagggagttagagaagatcattgcggagaaagaggagagagtcagcgaacttcgacatcaactgcagtctcgacagcagctgaggagccgacggcatccccctaccccacccgaaccgtcagggggattaccaaggggtccccctgaaccccctgaccggctttcttgtgatggctcacgtgtgcacttgctgtacaagtag

SEQ ID NO: 11311 - DNA, 192 bp, synthetic construct
  misc_feature 1..192: note = source = /note="Description of Artificial Sequence: Synthetic coding sequence"
  source 1..192: mol_type = other DNA
atggggccagaggccttatcttctttgctgctgctgcttttagtggcctctggggacgccgacatgaagggccattttgacccagctaaatgccgatacgcccttgggatgcaggataggacgatacccgattccgatatttctgcctccagctcctggagtgactctaccgcagcccgacattcaagatag

SEQ ID NO: 11312 - DNA, 489 bp, synthetic construct
  misc_feature 1..489: note = source = /note="Description of Artificial Sequence: Synthetic coding sequence"
  source 1..489: mol_type = other DNA
gacgaggacagatacactacatgctggccaaagacatggttggcgaaggactgcccggcattaagaatcattagcgtggaatatgacactagcttaagcgactggcgggcacggtgccctatggagcgcaagtcaatagctttccgctccaacgaattgcttcgtaaattgcgtgccgctggggttggggacagacccgtggtgtggatctcccatagcatggggggtttactggttaaaaaaatgctactggaggcttccaccaagcccgagatgtcaacagtgatcaacaatactcgaggtattattttctatagtgtcccgcaccatggttcccgactggccgagtatagcgtcaacattcggtacctgttgtttcccagtctcgaggtcaaggagctgtccaagggtaacacattctgccataaaggaaactgggggtatattaacatctcctacactgaaaagaaaaagaagtttcttccttag

SEQ ID NO: 11313 - DNA, 1083 bp, synthetic construct
  misc_feature 1..1083: note = source = /note="Description of Artificial Sequence: Synthetic coding sequence"
  source 1..1083: mol_type = other DNA
atgcccgaattggttgtgacagccctccttgccccatctcgattatctctcaagctcctgagagccttcatgtggagcttggtattcagcgtggcgttggtggccgctgcagtgtatggctgcatagccttgacccatgttctgtgtagacccaggcggggatgttgcggccgtcgcagatctgcatccccagcctgtctctccgatcccagcctcggtgagcatggcttcctcaatctgaagtcgagcgggttacgcctgcattacgttagcgcgggtcggggtaatggcccattaatgctctttctccatggattcccagagaattggttttcatggcgttatcagctgcgcgagttccagtcccgctttcacgtggtggcggtggatctccgcggttatggcccttccgacgctccccgtgacgtcgactgctatactatcgacctactccttgtcgacattaaagatgtgatattgggcttaggctattcgaagtgtatcttagttgcccacgattggggggcattgcttgcatggcatttttcaatctattaccctagcctggttgagaggatggtagtggtctctggagctccaatgagtgtttatcaggattacagcctccatcatatcagccagttctttaggagtcattacatgtttcttttccaattgccctggctccccgaaaagttactgtctatgagcgattttcagattctgaaaaccaccctcacgcacagaaagacagggataccctgccttactccaagcgaattggaggcttttttatataacttttctcaacccggaggcctgaccggcccactgaactattatcgcaatttattccgcaactttccgttggagccacaggagctgactacacctactctgctcctgtggggcgagaaagacacttaccttgagctgggactcgtggaagccattggatctaggttcgtgcccggaagacttgaggcacatatcctccctgggatcggccattggatcccccaaagcaacccacaggaaatgcatcagtatatgtgggccttcctccaagacctgctggactag

SEQ ID NO: 11314 - DNA, 678 bp, synthetic construct
  misc_feature 1..678: note = source = /note="Description of Artificial Sequence: Synthetic coding sequence"
  source 1..678: mol_type = other DNA
taggccgacttgcctagctgctggggtgcaggcccatgctataccggccacaaggtgggagccttacggagagacaccgttatatgttgttgcagacacggggactacagcaccccctgtctgttcacaccagggaagccttctcgcaacccatcgccctggaagaggacactttggactttgtcggccccttgggcaggacccgcagggtggacaggggaagaacagaacgctactaagacagggctgatcacccggcgtcctagaccactccgccgacgaccccaccctgctccggcttcaccactgcccgaaatcatccgcggtaatataccacggatgcttgggaagtttgtacccgttaactgggagccccctcagccacttccattccccaagtacctgaggtgctacaggtgtctgttagaaacaaaggagttggggtgtctgctggggtccgatatctgcctcacacccgctgggtcaagttgtataactctacataagaagaattcttcaggctctgatgtgatggtctcagactgtaggagcaaggaacagatgagcgactgttcaaacacccggacaagtccagttagcggattctggatcttttctcaatattgttttctggatttctgcaatgatccccagaatcgcggtctatacaccccctag

SEQ ID NO: 11315 - DNA, 192 bp, synthetic construct
  misc_feature 1..192: note = source = /note="Description of Artificial Sequence: Synthetic coding sequence"
  source 1..192: mol_type = other DNA
atgaagcacgtcctcaacctatacctgttgggcgtggtgcttactctcctcagtatatttgtccgggttatggagagtttggaggggctgttagaatcgccttccccagggacgagctggactacaaggagccaactggctaatactgaacccacaaaaggactgcccgatcatccgtccaggtcaatgtag

SEQ ID NO: 11316 - DNA, 5235 bp, synthetic construct
  misc_feature 1..5235: note = source = /note="Description of Artificial Sequence: Synthetic coding sequence"
  source 1..5235: mol_type = other DNA
atgcgcctgctctggggccttatctgggccagttctttttttacgctcagtttacagaagccacgtctgctgttattttccccctcagtcgttcatctcggtgtgccattgtctgtcggtgtgcagctgcaggacgtaccccgaggccaggttgtcaaaggcagtgtgttcttgaggaatcccagccggaacaacgttccgtgcagccctaaggtcgacttcacattaagctcagaacgcgacttcgccctgctgtcacttcaggtccctctcaaggatgctaagagttgcggactgcatcagttgctccggggacctgaggtacaactggtagcccacagtccttggctgaaagactcattaagtcggactactaacatccagggtatcaatctgctctttagctcaaggagagggcatctgttccttcagactgaccaacccatctataatcctggccaaagggtacgataccgagtttttgccctcgaccagaagatgcggccatcaacggacactatcacggtaatggttgagaattcccatgggctgagggttagaaaaaaggaagtttacatgcctagttccatcttccaggatgatttcgtgattcctgacatctccgagcccggtacctggaagatcagcgccaggttttcggacggccttgaatctaactcatctacccagttcgaagtgaaaaaatatgtcttaccaaacttcgaggtcaagatcacgcccggaaaaccttacattctaacagtcccaggacacctcgacgagatgcagctagacatacaagcacggtacatttacggtaaacctgtccagggcgtcgcctatgtcaggttcggtttgctagatgaagatggcaagaaaaccttctttcggggattggagtcacagaccaaacttgtcaatggccagtcacacatttccttgagcaaggccgagtttcaggatgcattggagaaactcaatatgggtatcaccgacctacaagggctcaggctttacgtcgcagcagccattattgagtacccaggtggagagatggaagaggccgaactcacctcctggtattttgtgtcttcaccatttagtctggaccttagtaagactaagagacatttagtgcccggtgccccattcttactacaagcactcgtgcgtgagatgtctggcagtcccgcatctgggattccggtgaaggtaagcgctactgtgtcctctcccggaagcgtgcctgaggtccaggacatacagcagaataccgatggcagcggacaggtttcgattccgatcattataccgcagactatatccgagttgcagctctccgtttctgctggctcaccccacccagcaatcgccagactaacggtggctgccccacccagcgggggtcctgggttcctgagtattgagaggccagattcccgacctcccagggttggggataccctcaaccttaacctgcgagcggttggttctggcgcaacgtttagccactattactatatgatcctttcaaggggtcagattgtattcatgaatcgagagcccaaacgcactttaacctctgtgtccgtcttcgtggaccatcatcttgctcctagcttctacttcgttgctttttactaccacggcgatcaccctgtggccaacagcctgagggtggacgtgcaggcaggggcatgcgaagggaagctggaacttagcgtggacggagccaagcagtatagaaatggcgagagtgtgaagctgcatttagagacggactccctagctctggttgcgctgggcgctctcgacaccgctctctacgcagccggatccaaatcccacaaacctttgaatatgggcaaggtcttcgaggccatgaatagttatgacctcggttgcggccctggtggcggagactctgcgttgcaggtttttcaggccgcagggttggcttttagcgacggtgatcaatggacgttgtctaggaaacggctgagttgcccaaaagagaagaccacgcgaaaaaagaggaacgttaactttcagaaggccataaatgagaaactgggacagtatgcttctccgactgccaagaggtgttgtcaggacggggtgacacggttaccaatgatgaggtcatgtgaacagagggccgctcgtgttcaacagccagactgccgcgagccatttctttcgtgctgccagttcgctgaaagcctgcgcaaaaagtcgcgggataaggggcaagcgggactccagcgcgcactggagattctgcaggaagaagatttgattgatgaggacgatatcccagtcaggagtttcttcccggaaaattggctgtggcgcgtggaaacggtggaccgatttcaaatcctgactttgtggctgccggattcactaacaacctgggagattcacgggctcagtctgtctaaaacgaaaggattatgtgtggccacacctgtgcagctgagggtgttcagagagtttcacctgcatctgagactgcctatgagtgtccgtaggttcgagcagttagagctgcgccctgtcctctacaactatctcgacaaaaacctgaccgtgtccgttcatgtaagccccgtggaaggactatgcctggccggaggtgggggactggctcagcaggtgctggttcccgcagggagcgcaaggcccgtggccttctcggttgtaccgacagccgctgctgcggtgtcccttaaggtggtggcacgcggatccttcgaattcccagttggggacgcagtgagtaaggtgctccaaatcgagaaagagggcgctatccaccgagaggaactggtctatgaacttaaccccctggatcataggggtcgaactcttgagataccaggaaatagtgacccaaacatgatccccgacggggattttaactcttatgtccgcgtcacagccagtgatccattagacacattaggctctgaaggagccctcagcccgggaggcgttgcatccctgttgcgactccccaggggatgcggagagcagacaatgatctatctagcaccaacacttgcggcaagcagatatttggacaagacagagcaatggagcaccctcccaccggaaactaaggatcacgcagtggatctgattcaaaaaggttacatgcggattcagcaattccggaaggccgatggctcatacgccgcttggttatcccggggaagctccacttggcttaccgcttttgttttgaaggtactctccctggcccaggaacaagtcggcggatctcctgaaaagcttcaggaaacatctaattggttactttctcaacagcaggccgacggtagcttccaagatctgtcgccagttattcaccgcagcatgcaggggggactggtcggcaacgatgagaccgtggccctgaccgcgttcgtgactatcgccctgcaccacggcctggcggtattccaggacgagggggcagagcctctgaaacagagagtggaagccagcatctcaaaggcttcaagcttccttggcgaaaaagctagtgccggtctactgggcgctcatgctgccgctatcacagcctacgcactgactctgacaaaagctcctgcagacctccgaggggtggcacataataatcttatggccatggcccaggagactggggataacctgtattggggcagtgttacaggctctcagtcaaatgccgtaagcccgactcccgctcccagaaatccatccgacccaatgccacaggcaccagccctgtggatagagaccacagcctacgccctgctgcatctcctactgcacgagggcaaggcagaaatggctgatcaggcagcagcttggttgactaggcaggggagcttccaagggggtttcaggtcaacccaggacacagtaatagctttggatgccctgtcggcctattggatagcctcccacacaacggaggagcggggactgaacgtcactctaagcagtacaggtagaaacgggttcaaatctcacgcgcttcagctgaataaccgccagatcaggggactggaggaagagctgcagttcagcctgggatctaaaataaatgtgaaagtcgggggaaattctaaagggacacttaaggtcttaagaacttacaacgtcctcgacatgaaaaacacaacctgtcaggatctgcagattgaagtgaccgtcaagggacacgtggagtacacaatggaggccaacgaggactacgaagattatgagtacgacgagctaccagccaaggacgaccccgacgctccactgcagccagtcacgcccctacagctgtttgagggcagacggaacaggagacgtcgcgaggcacctaaggtggtggaggaacaggagagccgcgtccattatactgtctgcatttggcggaacggaaaggttgggttaagcggcatggccatcgcagatgttacattactcagcggcttccacgccctgcgggctgacttagagaaactgactagtttatcagatagatacgtctctcattttgaaaccgaggggcctcatgtgctgctctactttgatagcgttccaaccagcagagagtgcgtggggtttgaggcagtgcaagaagttccagtgggtctggtacaaccagcatcagctaccctctacgactattataacccagaacgcaggtgtagcgtattctacggcgctccatctaagagtcgcttgctggctaccctgtgttcggccgaggtgtgccagtgcgctgaaggtaagtgtcctagacagcggagagctctcgaaaggggcctccaggacgaagatggctacagaatgaaattcgcctgctattatccgagagtggagtatgggttccaagttaaagtgctgagggaggatagtagagccgctttcagactgttcgaaacaaagatcacccaggttctgcactttaccaaggacgttaaggctgccgctaatcagatgcgaaattttttggtacgcgcatcatgtcgcttaagactggagcccggaaaggaatatctgatcatgggactggatggagcaacatatgaccttgaggggcacccacagtacctgctcgactccaattcgtggatagaagagatgccatcagaaagattatgtagatctactcgccagcgagcggcttgtgcacagctcaacgattttcttcaagagtacggcacccagggatgccaggtctat

SEQ ID NO: 11317 - DNA, 792 bp, synthetic construct
  misc_feature 1..792: note = source = /note="Description of Artificial Sequence: Synthetic coding sequence"
  source 1..792: mol_type = other DNA
atggcggacatgcagaacctggttgaacgtctcgagagggctgttggcagactggaggccgttagccatacatccgatatgcacagagggtatgccgactctcctagcaaaggtgctgctccttacgttcaggcatttgatagtttgctagcagggccagtggcagagtatctcaaaatttcgaaggaaataggtggagatgtgcagaagcacgctgagatggtacatactggcttaaaactcgaacgagccctgttagtgacagctagccagtgtcaacagcctgcagaaaataagctgtcagatctgctcgctcccatctcagagcaaatcaaggaagtgataacgtttcgtgagaagaatcgcggatctaagctgttcaatcacctctcagcagtctctgaaagtatacaggccctgggctgggttgcgatggcacccaaacctggcccttacgtgaaggaaatgaacgacgcagccatgttttacaccaatagagtgctgaaagaatacaaggacgtggacaagaagcatgtggactgggtgaaagcgtatctgagcatttggacggagttgcaggcctatattaaggaatttcatacaacagggctcgcgtggagcaagaccgggccagtggctaaggagctgtcagggttaccttctggtcctagcgccggaagctgccccccacctccaccaccttgccccccaccgcctcccgtaagcacaataagttgctcctatgagtctgcctcaaggtcctctctgttcgcgcagataaatcaggggtag

SEQ ID NO: 11318 - DNA, 501 bp, synthetic construct
  misc_feature 1..501: note = source = /note="Description of Artificial Sequence: Synthetic coding sequence"
  source 1..501: mol_type = other DNA
atgggcccagaggccctgtcgtcgctgcttctccttctgctggttgcgagcggcgacgctgacatgaagggccattttgatccggcaaagtgtcgctacgctctcggtatgcaggacagaacaattcctgacagcgacatatccgcatcttcttcttggagcgactccacagcagcaagacatagccggcttgaatccagtgacggggatggtgcttggtgccccgctggcagcgtttttcccaaagaggaagaatatctccaggtggatttacagagactgcacttagttgccctggtgggcacgcaggggagacatgcgggaggcttgggcaaagagttttctaggagttacagactgcggtattcgcgagatggccgtcggtggatggggtggaaggaccgatggggtcaagaagtcatctccggaaatgaggaccccgaaggggtggttctgaaggacctgggaccgcctatggtggccagactggtcagattttag

SEQ ID NO: 11319 - DNA, 2349 bp, synthetic construct
  misc_feature 1..2349: note = source = /note="Description of Artificial Sequence: Synthetic coding sequence"
  source 1..2349: mol_type = other DNA
tctatcctgagggttgaagccgttgatgccgattgcagccctcagttctctcagatatgtagttatgaaatcataacgccggacgttcctttcaccgtggacaaagatgggtatatcaaaaacactgaaaaattaaactatgggaaagaacaccagtacaaactgactgtcacagcatatgactgcgggaagaagcgggcaacggaagatgtcttagtgaaaatctccatcaagccaacctgcacaccaggctggcaggggtggaataacaggattgaatacgagcctggaaccggggctttggctgtgttccctaatattcatctagaaacctgtgatgagccagtggcctctgtgcaagcaacagtcgagcttgaaactagccacattgggaagggctgtgacagggacacctattccgagaagtctcttcaccggctgtgcggggctgctgcaggcacggcagaacttcttccctcccccagcgggagcctgaactggacaatgggcctccccactgacaatgggcacgattctgatcaagtgtttgaatttaatgggactcaggccgtgcggattcccgatggcgtcgtgtccgtgagccctaaggagcctttcaccatcagcgtgtggatgcggcatgggccatttggaaggaaaaaagagacaatactgtgcagctctgacaagactgacatgaatcgtcaccactatagcttgtatgttcatggatgccgtttgatcttcctgttccgccaggaccccagtgaggagaagaagtacaggcctgctgagtttcattggaagctgaaccaagtctgcgacgaggagtggcaccactacgttttgaacgtcgaattccctagtgtcactttatatgtcgacggaacctctcatgaaccattcagcgtgacagaggactatccgctgcatccctctaagattgaaacacagttagtcgttggggcttgttggcagggcggagatcttcatatgacacagttcttcagagggaatctggccggattaaccctgcgttctggaaaactagctgacaagaaagttatcgactgcctttatacctgcaaggaaggcttggatctgcaggttttggaggattccggcagaggggtacagatccaagctcatccatctcagttggtgcttacattggaaggtgaagatctgggggagttagacaaggctatgcagcacatttcctacctcaatagccgccaattccctaccccaggcatcagacgtctcaagattacatccaccatcaaatgctttaacgaagcaacctgtatttctgttcctcccgtcgatggttacgttatggtcctccaacccgaagagcctaagattagtcttagcggcgtgcatcactttgctcgagccgctagcgagtttgagtcaagcgaaggagttttcctattccctgagcttagaatcatctctactattaccagagaagtcgaacccgagggtgacggcgcagaggatccgaccgtacaggagagcctcgtgagcgaggaaattgttcacgacctggatacctgcgaggtgactgtggagggcgaagagctcaatcacgaacaagagtctttagaggtggacatggcacggctgcagcagaaaggtatcgaagttagcagctcagagctgggcatgacattcaccggagtggacacgatggcctcctacgaggaggtactgcatttactgaggtaccgcaattggcacgcgaggtcgctactggaccgcaagtttaagctgatctgttccgagctcaacgggcgatacattagtaacgagttcaaagttgaagtcaatgtgattcatactgcgaaccctatggagcacgccaatcatatggccgcacagccgcagtttgtccatcccgagcatcgctcttttgtagacttgagcgggcataacttagccaacccccacccatttgccgtggtgcccagtacggccacggtggttattgtcgtttgtgtctccttcctagtgtttatgatcatcctgggcgtcttcagaattagggctgctcatcggcgtaccatgcgggaccaggacaccggcaaggagaatgaaatggattgggacgattctgccctaactatcaccgtcaaccctatggagacctatgaggatcagcattcctcagaggaagaagaagaagaagaggaagaagaggaatctgaagacggagaggaagaggacgacattacgagcgcagagtctgagtctagcgaagaggaggagggcgagcagggggacccccagaacgcgaccaggcagcagcaactcgagtgggatgacagtaccttaagctactag

SEQ ID NO: 11320 - DNA, 531 bp, synthetic construct
  misc_feature 1..531: note = source = /note="Description of Artificial Sequence: Synthetic coding sequence"
  source 1..531: mol_type = other DNA
atggctaggcgacattgcttttcctactggttgctggtgtgttggttagtagtgactgtggctgaggccttatctaccttttacttgcaacaacacatcaatctgcatatggataaaaagcgctatctgcgccttttggagattcacaaaatcatgcggacactcccaactgctcgatcgctgcattctcccttacatctacccaggggcgttcgtagccaaggcccatcgccaagtcagcgacatccgggagtccctagcattttctttcacgagggacctgaaagtatactggggtttcagactgacctaagctctctgcagggagtgactacggtgttccatagttcccattttattggccataccgtgacattgttgattggaatatcccctgaggaagattctagagaggaggcacatctacggaaagcggaacgcgaagagaagccaaagcacacagaggccaagaagtctctgagcttccgaaagaaacagcaaaaggacttctgctttatcttcaggaattag

SEQ ID NO: 11321 - DNA, 1182 bp, synthetic construct
  misc_feature 1..1182: note = source = /note="Description of Artificial Sequence: Synthetic coding sequence"
  source 1..1182: mol_type = other DNA
atgcgcaccttgtttaatctgttgtggcttgcgttggcctgcagtccggtccacaccactctctcaaagtcagacgccaaaaaggcagcgtcgaagacattgctggagaaatcccaattctctgacaaacctgttcaagaccgcggacttgtcgttacggacctaaaggctgagagcgttgtcttagagcataggagctactgcagtgcaaaagcccgagacaggcacttcgctggtgacgtgctgggctacgtaaccccctggaacagtcacggatatgacgtaactaaggtctttggaagtaaattcacgcagatctcacccgtctggcttcagctgaagaggcggggacgggagatgttcgaagttactggcctgcacgacgtggatcaaggatggatgcgcgctgttcgcaagcacgctaagggactgcacatcgtcccacggttgctgtttgaggactggacctacgatgatttcagaaacgtcctcgactcagaagatgagatcgaggagctaagcaagactgtcgtgcaagtggccaaaaaccagcattttgatggattcgtcgttgaggtttggaatcaactgctgtcccagaagagggttggtttaatccacatgctgactcatcttgccgaagccctgcatcaggcaagattactcgcactccttgtgatcccacctgccattacaccaggcactgatcagctgggcatgttcacgcacaaggagttcgagcaactagcaccagtgctcgatggcttcagcctcatgacgtatgactactctactgctcaccaacccggtcccaacgccccactcagctgggtgcgagcatgtgtgcaggtgttggatcccaaaagcaaatggcgttcaaaaattttgttagggctcaacttctatggtatggactacgccacgagcaaggacgctcgggagcctgtcgtgggagctcggtacattcagacactgaaagatcaccgcccacgcatggtgtgggattcccaggcttcagagcacttctttgaatacaagaaatccaggtccggacgacacgtcgtgttctatccgacactcaagtctctgcaggtgcgactggaactcgcacgagaactcggagtaggcgtgagcatttgggagctgggacaaggtctggattatttctacgacctgctttag

SEQ ID NO: 11322 - DNA, 324 bp, synthetic construct
  misc_feature 1..324: note = source = /note="Description of Artificial Sequence: Synthetic coding sequence"
  source 1..324: mol_type = other DNA
atgctgccgtgtctcgcccttctgctactgatggagctgagtgtctgcactgtggccggagatggaggcgaggagcagaccctgagcacggaggcggagacttgggagggagctggtccatctatccagttgcagctgcaggaggtgaagacaggtaaggcgtcccaattcttcgggcttatgggtaagcgagtcggtggaaggcctttgattcagccacgcagaaagaaagcttatcaattggagcacaccttccagggcctcctcggcaagagatcactgtttaccgagggcagggaggatgaggcccaggggtctgaatag

SEQ ID NO: 11323 - DNA, 1086 bp, synthetic construct
  misc_feature 1..1086: note = source = /note="Description of Artificial Sequence: Synthetic coding sequence"
  source 1..1086: mol_type = other DNA
atgggaattatccagtccatcttggcgacatctagagactgttatagcttcaagaagaagcccattcccaaaaaacctactatgttggccctggcgaagatcctgcttataagtaccctattttactctctcctctctggtagccatggcaaagagaaccaagacattaatactacccagaatatcgctgaggtgtttaagaccatggagaacaagcccataagtctggaaagcgaagcaaatctgaattccgataaagagaacatcaccacatcaaatctgaaggccagtcatagtccaccactcaacctgccaaataattctcacggcatcacagacttcagcagcaactcttcggcagaacattccctgggcagtctgaaacccacttctaccatatcaacctcaccccctctgattcacagcttcgtgtctaaggtgccctggaatgcaccaatagccgatgaggatctactgcccatatctgcccaccccaatgccacccccgctctgtcatccgaaaacttcacatggtcactggtgaatgacacagtgaaaaccccagataattcttcaatcaccgtcagcattttaagctccgaacctacatcccccagcgtgacccccctgatcgtggagccaagtggttggctaacgaccaactccgactctttcactgggtttaccccttaccaggagaagaccaccctccagcctactctgaaattcactaacaactctaaattgtttccaaatacctccgatccgcagaaagagaatcgcaataccgggatcgtgttcggggcaatcctgggcgcaatcctaggggtgtccctgctcacactcgtcggctacctcctgtgtggcaaacgcaaaacagattctttttcacatagacggctgtacgatgatcgcaatgagccagttcttagactcgataacgccccagagccatacgatgtctcatttggaaactccagctattacaaccccactctgaacgatagtgccatgcctgaatccgaagaaaatgctcgagacggaatccctatggatgacatccctcctctgcggacatctgtttag

SEQ ID NO: 11324 - DNA, 279 bp, synthetic construct
  misc_feature 1..279: note = source = /note="Description of Artificial Sequence: Synthetic coding sequence"
  source 1..279: mol_type = other DNA
atgcgaggtcctggtcatcccctcctccttgggttgctcctcgtgttggggccatctccagagcagcgagtggagatcgtgccaagggatctgcggatgaaggataagtttctgaagcacctgacaggtccgttgtatttttcgcctaagtgtagtaagcacttccatcggttataccacaatactcgggattgcaccatccctgcatactataaacgctgcgcacgactgctgaccagacttgctgtaagcccggtttgcatggaggataagcaatag

SEQ ID NO: 11325 - DNA, 1125 bp, synthetic construct
  misc_feature 1..1125: note = source = /note="Description of Artificial Sequence: Synthetic coding sequence"
  source 1..1125: mol_type = other DNA
tgacgcgtgcgcagagggccattacccgctgatagacctcgcgctctggggcctgccagaaggtgctcacgtcatcctcacccggctccctttcgagtttgctccgaaggggctgcacatcgattgcggaggccggagcgcttgcccctaccctcccgtgcacttcgcccacggcctgcccatactccaattctgggacccgctcctcgtgcctgccctggcgctccccgagcctctgacagccctacctgcgctgctgctgctgcaactgcctggccaaggacccgggcagtggaacgcaagggatgtcaggttgctgccgcagccggagtgcgcggtactggctgcccatcccgcgctgaccttgagaaagacagctggaacgacaccaaagaggacgtgttcgtccatcagactgccattaagaagaacaatcctaggaaatacttgcgaagtgttggggacggcgagactgtagagttcgacgtagtggaaggtgagaagggagccgaggccgctaatgtgacaggcccagggggtgttcctgtgcaaggctctaaatatgcagcagaccgaaatcattataggaggtatcctcggaggagagggccacctaggaactaccagcagaattaccagaacagtgaaagcggggagaagaatgagggatccgagagcgcaccagaaggccaagcccagcagcggcgtccgtatcgacgtcggagattcccgccatactacatgagacgcccttatgggcgacgccctcagtattcaaacccgccagtccagggagaggtaatggagggcgcagacaaccagggagccggtgaacagggacgacccgtgagacagaacatgtaccgaggctatagacctcgatttcgcagggggccacctagacaacgacagcctagagaggacggaaacgaggaggacaaggagaatcaaggtgacgagactcagggtcagcagccacctcaaagaaggtatcggcgaaatttcaactacagacggagaaggcccgaaaaccctaaaccacaggacggtaaggaaactaaggccgcagaccctccggcagaaaattcaagcgcccctgaggctgagcaggggggtgccgagtag

SEQ ID NO: 11326 - DNA, 420 bp, synthetic construct
  misc_feature 1..420: note = source = /note="Description of Artificial Sequence: Synthetic coding sequence"
  source 1..420: mol_type = other DNA
atggccttgcgcatgctttgggccggacaggccaaggggattctggggggttggggcatcatttgtcttgtcatgagcttactgctgcagcatcccggagtctacagcaaatgttactttcaagcccaggcaccttgtcactatgaaggcaagtatttcactctaggcgaatcctggctgagaaaggattgcttccattgcacctgcctccacccagtgggtgtgggatgttgcgacaccagccagcacccgatcgacttcccagcaggctgtgaagtaaggcaagaggccggaacctgccaattttccttagtccagaagtccgatcctcggctcccatgtaagggcggaggaccagacccggagtgggggagcgcaaacactcctgttcctggagcccctgctccacactcatcatag

SEQ ID NO: 11327 - DNA, 462 bp, synthetic construct
  misc_feature 1..462: note = source = /note="Description of Artificial Sequence: Synthetic coding sequence"
  source 1..462: mol_type = other DNA
cattactgcaaggagggttattatcgggacatgggcaaacccattacccataggaaagcgtgtaaggcatgtgactgtcaccctgtgggagctgctggtaaaacatgcaatcagacaaccgggcagtgtccatgtaaggacggggtcacaggcataacatgtaatagatgtgccaaaggttaccagcaaagtagaagtcctattgcgccttgtatcaaaattccagtggctccacctaccaccgcagcctcctctgttgaggagcccgaggccgctcgacagcctaacacctttcaggctgaaggtctgtctttgttacccggtgctgctgaaaaggaaggagccaggtgttgggggtacagaagacgactgggacaccgggtcgcccaggccgaatgccgtggtcccaggtcctgggcatggggacggatcacaagcagcttttcttttgccagtaactag

SEQ ID NO: 11328 - DNA, 213 bp, synthetic construct
  misc_feature 1..213: note = source = /note="Description of Artificial Sequence: Synthetic coding sequence"
  source 1..213: mol_type = other DNA
atgctggtgctgttcttacttggcacagtttttcttctctgtccctactggggagagcttcatgatccaataaagggacagtccatgtatcactattcaaagctgtcatgcatgacctcctgcgaggatataaacttcttaggctttacaaagcgcgtggagctgatttgttgtgatcactctaattattgcaacttgcccgagggcgtgtag

SEQ ID NO: 11329 - DNA, 567 bp, synthetic construct
  misc_feature 1..567: note = source = /note="Description of Artificial Sequence: Synthetic coding sequence"
  source 1..567: mol_type = other DNA
atgttccatcagatttgggccgctctgttgtatttctacggtattatcttaaactccatctaccagtgtcctgagcactcccagctgaccacattgggtgtcgatggcaaggaattccccgaagtgcacctcgggcagtggtattttatcgccggtgctgccccaaccaaggaagagctggctacctttgaccccgtggacaatatcgtcttcaatatggctgctggctctgcccctatgcagctacacttgagagctacgattcgtatgaaggacggactgtgtgtcccccgaaagtggatctaccacctgaccgagggttcaaccgacctgaggactgaaggtcgcccagacatgaagacagagctgttctcgtcaagttgccccggtggcatcatgctcaatgaaaccggtcagggataccaacgcttcttgctctacaacaggtcgcctcacccgccagagaagtgcgttgaagagtttaagagcctgacctcatgccttgacagtaaggccttcctgctgacccccagaaatcaagaagcttgtgagctgtctaataattag

SEQ ID NO: 11330 - DNA, 2316 bp, synthetic construct
  misc_feature 1..2316: note = source = /note="Description of Artificial Sequence: Synthetic coding sequence"
  source 1..2316: mol_type = other DNA
atgggatggttaaccaggattgtgtgcttattttggggtgtcctcctgacagccagggcaaactaccagaatggcaaaaataatgtccctcggctgaaattaagctacaaggagatgctcgagtcgaataatgtgattaccttcaatggactggccaacagttcatcataccacacctttctactggacgaggagagatctcgcctgtatgttggggctaaagaccatatttttagttttgacctggtgaacataaaagactttcagaagatcgtatggccggtatcgtacactaggcgtgacgaatgcaagtgggccggaaaggacatcctgaaagagtgcgccaactttattaaagttctgaaggcatataaccagacacatctttacgcatgcggaacaggcgcattccaccctatctgtacctatatcgagatcggtcaccatccagaggacaacattttcaagcttgagaacagtcacttcgagaatggccgaggcaaaagtccctatgatccaaagcttctgaccgcgtcgctgctaatcgatggagaattgtactcagggaccgccgctgatttcatgggcagagattttgccatcttcaggactttgggccaccaccaccctataaggactgagcagcatgattctagatggctgaacgatcctaaattcatatctgcccatttaatatctgaatccgacaatccagaggacgataaggtgtacttcttcttcagagagaacgccatcgatggagaacactccggtaaagcaacacacgctaggatcgggcaaatctgcaagaatgattttggcggacaccggagcctggtaaataaatggacaaccttcttaaaggcgcgactgatctgctcagtgcccggacctaatggaattgacacacacttcgacgagctgcaggatgttttcttaatgaatttcaaggaccctaaaaacccagtggtttacggagtcttcacgacatcatctaatatatttaaaggatctgccgtctgcatgtatagtatgagcgacgttcggagggtctttcttggaccatacgctcaccgggacggcccaaactaccagtgggtgccttaccagggcagagttccctatcctaggcccggaacctgcccaagcaaaactttcggcggtttcgactcaaccaaagatctccccgacgacgtcatcacattcgcgagaagccaccctgcaatgtataaccctgtgttcccgatgaacaatcggcctatcgtcatcaagaccgacgtaaactatcaattcacacaaattgtggttgacagagtcgacgcagaggacggccagtatgatgtgatgttcatcggaaccgatgttggaaccgtgctgaaggttgtctcgatacctaaggaaacctggtatgatctcgaagaggtgctcctcgaggagatgaccgtatttcgagagcctaccgcaatcagcgctatggagctctctacgaagcagcagcagttgtatatcggcagcactgccggtgtagcacagctacccttacatcgctgcgacatatatggcaaagcctgcgcagaatgttgcttggctcgagacccctattgtgcctgggatgggtccgcatgcagcagatacttcccaactgccaagaggagaactcgtcgacaggacatcaggaatggagaccctctgactcattgctcggatctccaccatgacaaccaccatggacattcgcctgaagaacgaattatttatggagttgaaaatagttccactttcttagaatgttcccctaagagtcagagagctttggtttactggcaattccagcggcgaaacgaagaacgaaaagaggagattcgagtggacgatcatattattaggaccgaccaaggcctcttgctgcgaagcttacaacagaaggactctggaaattatctttgtcatgcggtggagcatggatttatccagacgctgctgaaggtaaccctggaagtaatcgatactgaacacctggaggagttactgcacaaagacgatgacggagacggaagcaagacgaaggagatgagcaattcaatgactccctctcagaaggtttggtacagagattttatgcagctcattaaccatccaaacctcaataccatggatgagttctgtgaacaggtctggaaaagagacaggaaacaacggcgtcagcgcccagggcacacaccgggaaactctaataagtggaaacatctgcaggagaacaagaaaggtcggaatcgtcggactcacgaatttgaaagagcccctagatctgtctag

SEQ ID NO: 11331 - DNA, 1014 bp, synthetic construct
  misc_feature 1..1014: note = source = /note="Description of Artificial Sequence: Synthetic coding sequence"
  source 1..1014: mol_type = other DNA
atggcaagacccatgatcaaagaggcacgcatggcaagcttgctgctggagaatccttactatggctgtcgaaagcccaaagaccaagtgcggtcctcgctgaaaaacgtgtctgacttgttcgttatggggggagctctggtgttggagtcagcagctttgctccactggctggagcgggaaggctatggcccactggggatgacgggtatttctatgggcggacatatggcttccttggcagtctcgaattggccaaaacccatgccactgatcccttgtctgtcttggtcaactgcgtccggggtattcacaacgggagtactgtccaagtctatcaactggagggagctggagaagcagtactatacgcagaccgtctacgaggaagagatcatacacatgctggaatattgtgggaccgactcttttaaaatgggccaggagttcgtgaaacacttcacctcttcagccgataaactcacaaaccttaatcttgtctccagaactttgaatttagatatcagcaaccaggtggtgagtcagaaaccagcggattgccacaatagtagtaaaacaagcgtgagcgccaccagcgaaggccttctgcttcaagacactagtaaaatgaagcgctttaaccagaccctgtcaaccaataaatcaggctacacaagccgcaatccacagagctatcaccttctgtccaaggagcagtctcgcaattccctgcgcaaggagtcgctcattttcatgaaaggagtgatggacgagtgtactcacgtggccaatttctccgtacctgttgacccatcccttattatcgtagtgcaggccaaggaagacgcctacattccaagaaccggcgtccgatcactacaggaaatttggcctggttgcgaaatcaggtatctcgaaggcggacacatctccgcgtatctgttcaagcagggactattcaggcaagccatctacgacgccttcgatcgctttctgcacaagtatgcgaattag

SEQ ID NO: 11332 - DNA, 462 bp, synthetic construct
  misc_feature 1..462: note = source = /note="Description of Artificial Sequence: Synthetic coding sequence"
  source 1..462: mol_type = other DNA
atgggtccagaagcactaagctcacttttgctgctcctgctggtcgcaagcggcgatgctgacatgaaaggacattttgacccagccaagtgtcggtatgccctgggcatgcaggaccggactatacctgactctgatatctctgctagtagcagctggagtgattccaccgccgctagacactctaggctggagtcgtcagacggagacggtgcctggtgtcctgctggcagcgtgtttcccaaagaggaagagtatctgcaagtggacctgcagcgcctgcacctggtggcactcgtcggcactcagggcaggcatgccggtgggttggggaaggaattctcccggtcttataggttgaggtatagtagagatggaagacgatggatggggtggaaagatcgctgggggcaggaggttatctctggaaacgaggaccctgaaggagtggtgctgaagtag

SEQ ID NO: 11333 - DNA, 345 bp, synthetic construct
  misc_feature 1..345: note = source = /note="Description of Artificial Sequence: Synthetic coding sequence"
  source 1..345: mol_type = other DNA
atggacaagtccctccttctcgagctacccatcctgttgtgttgtttccgagcattgagtggctccttgagcatgcggaacgacgctgttatagagattgtgcagtgcaggatgtgtcacttgcagtttcccggagagaagtgttcacggggaaggggaatttgtactgcaacgaccgaagaagcctgtatggttggcagaatgtttaaacgcgatggcaatccttggctcacatttatgggctgtctcaaaaactgcgcagatgtgaaaggaatacgctggagcgtgtacctggtgaacttcagatgttgtaggtctcacgatctctgcaacgaggacctctag

SEQ ID NO: 11334 - DNA, 630 bp, synthetic construct
  misc_feature 1..630: note = source = /note="Description of Artificial Sequence: Synthetic coding sequence"
  source 1..630: mol_type = other DNA
atgggtcccgaggctttgagcagcctgttgctactgctgctggtagcctctggggacgctgatatgaaggggcattttgatcccgctaaatgtcgttatgccctcgggatgcaggaccggacaatccctgactctgacatctccgcgtcaagctcctggagtgactctacggcggctcgccactctagacttgaatccagcgacggggacggcgcttggtgtcctgccggatctgtctttcccaaggaggaggagtatctgcaggtggatctgcaaaggttacatctggtcgccctggtaggcactcagggtcgccacgcgggaggactgggtaaagagttcagcaggtcgtacaggctgcgctactcacgggacggccgtcggtggatgggatggaaggaccggtggggtcaggaggtaatctcggggaatgaggaccctgagggtgtcgttctcaaggatttgggacctcctatggtcgcccgacttgtcaggttttatcccagagctgatcgcgtgatgtccgtgtgtctcagggtagagttgtatgggtgcctctggagggacggacttctgtcgtatactgccccagtcgggcaaaccatgtacttatccgaggcagtgtactag

SEQ ID NO: 11335 - DNA, 639 bp, synthetic construct
  misc_feature 1..639: note = source = /note="Description of Artificial Sequence: Synthetic coding sequence"
  source 1..639: mol_type = other DNA
gactttgggtactgtccccgtgtgtactgcgagaaccagcccatgctccctatcggagttcttgtgatggtagggttcacagtgggcaaagtgcccgtgcccgatatcaggacttgccacttttgcctggtagaggacccctcagtcggatgcatatccgggtctgagaagtgtacaatcagctctagtagcctgtgcatggtgattactatttactacgacgttaaagttagatttattgtccgtggctgtgggcagtacatcagttaccgatgccaagaaaagaggaatacttacttcgctgagtactggtaccaggcgcagtgctgccagtacgactattgcaactcctggtccagccctcagttgcaaagttcactccctgagccccacgatagacccctggcactgcctctgtcagactcacagattcagtggttttaccaggcgctcaacttgagcctgcctctccctaactttcatgccggtacggaacccgatggcctggacccaatggtaaccctcagcctcaatttagggctatctttcgcggagctgcgaaggatgtatctattcctgaattcctccggcttgcttgtcttaccacaggccggtcttctgaccccccacccttcgtag

SEQ ID NO: 11336 - DNA, 240 bp, synthetic construct
  misc_feature 1..240: note = source = /note="Description of Artificial Sequence: Synthetic coding sequence"
  source 1..240: mol_type = other DNA
atgaaactgcactctctaattagtgtattgcttctctttgtgacgttaatcccaaaaggcaagactggcgtgatccctgggcaaaagcagtgcattgcactgaagggagtctgtcgcgacaagctgtgttcaactctggacgataccatcggtatttgcaatgagggaaagaaatgctgtcggagatggtggatcctggagccttaccctacccccgtgccgaagggcaagtccccctag

SEQ ID NO: 11337 - DNA, 1620 bp, synthetic construct
  misc_feature 1..1620: note = source = /note="Description of Artificial Sequence: Synthetic coding sequence"
  source 1..1620: mol_type = other DNA
atgtccgagccccaggagaaaaagctgtctgagaacacggatttccttgcccctggcgtctccagttttactgattcgaaccagcaggagtctatcacaaaacgggaagagaaccaggagcaaccaaggaattactcacatcatcagttgaatcggagttccaagcacagccagggcttaagagaccaggggaatcaggaacaggacccaaatatcagtaacggcgaggaggaggaggaaaaagagcccggagaagtgggtacccacaacgacaatcaggagcggaaaacggaactgcccagggagcacgctaactcgaaacaagaggaggacaacacacagtccgacgatatattggaggagagtgaccagcccacccaagtgagcaagatgcaagaggacgagttcgatcagggcaaccaggaacaggaagacaactccaatgcagaaatggaggaggaaaacgcttccaatgtgaacaagcacatccaagagactgaatggcaaagccaagaaggaaagaccgggcttgaggccatctcaaatcacaaggagaccgaggaaaaaacggtgtcagaagcccttctcatggagcccaccgacgacggaaacaccacaccgaggaaccacggcgtggatgacgacggggatgacgacggagatgatggaggtacagatggtcctcgacacagcgcatccgacgattactttatcccatctcaggctttcctcgaggcagagcgtgctcaatctatcgcatatcacctgaaaatcgaagaacagagggaaaaggtccacgaaaacgagaatatcggtaccaccgaacccggagagcatcaggaggccaaaaaggcagaaaattcttccaatgaggaagaaacatcctccgagggcaatatgcgagtgcatgctgtcgatagttgtatgagtttccaatgtaagcgaggccatatctgcaaagcagatcagcagggcaaaccccattgcgtttgccaggatccagtcacgtgcccccctacgaaacctctcgaccaagtctgcggaaccgataatcagacttacgcctcttcatgtcatctgttcgccacaaaatgcagactggaaggcacaaaaaaaggtcaccagctgcagcttgactacttcggggcttgcaaaagcattcccacctgcacagattttgaagtcatccagttccctttgaggatgcgagactggctgaagaatattctgatgcaactctacgaagccaacagcgagcacgctggttacttgaatgaaaagcaacgaaataaagtaaaaaagatctatctggacgagaaaaggctgctggccggtgaccatccgatcgacctgctgctccgggatttcaagaagaactaccacatgtacgtgtaccctgtgcattggcagttttctgagctggaccagcacccaatggaccgggttcttacccacagcgaactggcgcctctgcgtgccagcctcgtccctatggaacactgcataaccaggttctttgaagaatgtgatcctaacaaagataaacacattactcttaaggagtggggacactgtttcggaattaaagaagaagacatcgacgagaacttgttgttctag

SEQ ID NO: 11338 - DNA, 2535 bp, synthetic construct
  misc_feature 1..2535: note = source = /note="Description of Artificial Sequence: Synthetic coding sequence"
  source 1..2535: mol_type = other DNA
atggggccaggcgctcctttcgcacgggtagggtggccgctgcccttgttagtggtgatggcggcaggcgtggccccagtctgggcctcccactctcctcacttgcccaggccacactccagagtgccccctcacccctccagcgaacggagggcagtgtatatcggagcattattccctatgagcggaggttggcccggagggcaggcctgtcaaccagccgtggagatggctctcgaagatgtgaattctcgcagggatatcctgcccgactatgagctcaaactgattcaccacgatagcaagtgcgatccgggtcaggctaccaagtatctctacgagcttctgtataatgaccccataaagatcatattgatgccaggatgttcgtctgtgagtacactggtcgccgaggcagccaggatgtggaatctgattgtgctgtcctacgggtcatcctcaccagccttgagtaaccgccagcgcttcccaacgttttttagaactcatccttccgcaactctgcacaaccccacccgagtcaagctgtttgagaagtggggctggaaaaagatcgcgaccattcagcagacaacagaggtcttcacatctaccctagatgatctcgaggaaagggtgaaggaagcaggaattgaaatcaccttcaggcagagttttttttcggaccccgcagtgcccgtaaagaacttgaagcggcaggatgcccgaattatcgtgggcctattttacgagaccgaagccaggaaggtgttctgcgaggtgtacaaagaaaggttatttggcaaaaaatatgtgtggttcttgattggatggtatgccgataattggtttaagatatacgacccctctattaactgcactgtggatgagatgactgaagccgtagaaggccacatcaccacagagatagtgatgctgaaccccgctaatacacgctcaatctccaatatgacctcgcaggagttcgtggaaaaactgacgaaacggcttaagcgacatcctgaggagactggcggattccaagaagcaccactggcttacgatgctatttgggccttggccctggccctaaacaagacctcagggggagggggacggtccggagtcagactggaagacttcaactataataaccagacaatcaccgaccagatatatcgcgctatgaatagcagcagctttgaaggagttagtggacacgtggtgtttgatgccagtggctctagaatggcatggacgcttatagagcagctccaaggtgggagctataagaagatcggttactacgactcaacaaaggatgacctaagctggagcaagacagacaaatggattggtggaagccccccagccgatcaaaccctggtaataaaaacgtttcgattcctttcacagaaattatttataagcgtgagcgtgttatcgagtctgggcattgtcctagccgtcgtgtgcctctcgttcaatatatataattcccacgtccggtacatccagaacagccagccaaacctgaataatctcacagctgtggggtgctccctggcattggccgcagtttttcccctgggcctggacggataccacatcgggaggaaccagtttcctttcgtgtgtcaggcccgtctctggctcttggggctgggattttctctggggtacggcagcatgtttaccaagatatggtgggttcacaccgtattcacaaagaaagaggaaaagaaggaatggaggaagacactagagccttggaaattatacgctaccgtcggactgctcgttgggatggatgtgctgaccctagctatctggcagatcgtcgaccccctgcataggaccatagagacctttgctaaagaggaaccaaaagaggatatagacgtgtctatcctaccacaactggagcattgcagctcccggaagatgaacacgtggctgggcatattctacggctataaggggctactcttgctccttggaatatttctcgcctatgaaactaaaagcgtgagcacggagaagatcaatgaccaccgcgctgtgggcatggctatctacaacgtggccgtgctgtgcttgattaccgccccagtgaccatgatcctgtcttctcagcaggacgccgctttcgcctttgcctcgttggccatcgtgttcagctcttatataactttagtcgttctgtttgtcccgaaaatgaggagactcatcactagaggcgagtggcagagtgaagcgcaggacacaatgaagacaggcagctccacaaacaataacgaagaagaaaagtctcgattgctggagaaggagaaccgggagctggagaaaataatagccgagaaggaagaaagagtgtcagaactgagacatcaactacagagcagacaacagctccgctcccggagacatccacctacgccacccgaaccgtccggcggtttgcccagaggacctccggaacccccagatagacttagttgcgatggcagtcgagtgcacctgctgtataaatag

SEQ ID NO: 11339 - DNA, 993 bp, synthetic construct
  misc_feature 1..993: note = source = /note="Description of Artificial Sequence: Synthetic coding sequence"
  source 1..993: mol_type = other DNA
atgcagctgttcctcctgttgtgcctagtgctcctctcgccgcagggagcctcactgcacaggcaccatcctcgggagatgaagaagagggtggaggatctccacgtcggcgctacagtggctcctagctcgagaagggacttcactttcgacctgctcggaaatgctctattcacagacctggtcgtggacttacaggatactttcgtgagcgccatgaagacactctatcttgccgatacttttccaaccaactttagggactccgccggagctatgaagcagatcaacgattacgtggcaaaacagaccaaaggaaagatcgtggatctcctgaagaatttagactctaatgctgtcgtcatcatggtgaactacatcttctttaaagccaagtgggagacaagttttaaccacaagggcactcaggagcaagatttttatgtgactagcgagaccgtcgttcgggtccccatgatgtcacgcgaggatcagtatcactacctcctggacaggaatctttcatgtagagtagtgggagttccttatcagggaaatgccaccgccctgtttatcctcccaagcgagggaaagatgcagcaggtcgagaatggactgagcgaaaagacgctgcgcaaatggctgaaaatgtttaagaaacgacagcttgagctgtacctgccaaagttttctatcgagggtagctatcagttggaaaaagtcttgcccagtttgggaatttcgaacgtctttacatcacatgcggatctatctggcatatccaaccactccaatatccaggtcagcgagatggtccataaagcagtggtggaggttgacgaatccggaactcgtgccgcagccgctaccggtaccatctttacctttaggtctgctagacttaattcccaaagactcgtgtttaacaggccattcctaatgtttatcgtcgataacaatattctgttcctgggaaaagttaatcgcccttag

SEQ ID NO: 11340 - DNA, 2676 bp, synthetic construct
  misc_feature 1..2676: note = source = /note="Description of Artificial Sequence: Synthetic coding sequence"
  source 1..2676: mol_type = other DNA
atgttgcccacggaagtgccacagtcccacccagggccaagcgcactcctccttctgcagttgcttttgcccccaacatcagcattcttccctaacatctggagtcttctggcagcccctggcagtataacgcatcaggatctcacagaggaagccgctctgaatgtaacactgcagctcttccttgagcagccacccccaggcaggccacctcttaggttggaggatttcctgggaagaactctcctcgccgatgatctattcgctgcctattttgggcctgggtccagccggagatttagggcggctcttggggaggtctcccgagcgaatgctgcccaggattttttacctacctcgagaaatgaccccgatctgcattttgatgccgaacgactcggacaaggccgagcccgattggtgggtgctctgagggagaccgttgtggccgctcgcgctctagatcatacactcgccagacagagactcggggctgctctccacgctctgcaagatttttacagccacagtaactgggtggaactgggtgaacagcagccccatcctcatctgctgtggcctcgacaggagctccagaacctggcccaagttgcagatcctacgtgctctgactgtgaagaactctcctgcccacgtaactggctgggctttaccctcctcactagcggctattttggtacacaccccccaaaacctcccggaaagtgctctcatggagggcactttgacaggtctagctcacagccacctagaggcggtattaataaagactcaacctcacccggtttctcaccacaccatatgctgcatctgcaagctgccaaactggcacttctcgcatccatacaggccttctctcttctccgctctcggcttggcgatcgcgactttagtagactgctggacatcacgcccgcatctagtctgagttttgtgctggataccacaggaagcatgggtgaggagatcaatgctgctaagattcaggcgagacatttggtggagcaacgacgaggcagccctatggaaccagtccattacgtcctcgtaccgttccacgatcctgggtttgggcctgtcttcaccacaagcgaccctgacagcttctggcaacagctgaatgagatacacgccctaggtgggggagatgagcctgaaatgtgcctgtccgcactgcagttggctctgctgcacacccctcccttgtccgacatcttcgtctttactgatgccagccctaaagatgcctttctgacaaatcaagtggaatccctcactcaggaaagacgatgtcgcgttacgttcctggtcactgaagatactagccgggtccaaggtcgtgctagaagagagatccttagccccctccgctttgaaccatataaagcagtagcgttggcaagtggcggagaagtcatctttacgaaggatcagcacataagggatgttgcggctatagttggcgagagcatggcagcgcttgtcactctgccccttgatccacccgtggtggtccctggccagccactcgtgttcagcgtggacgggctactgcaaaagatcaccgttcggatccacggcgatatctcctctttctggatcaagaatccagctggagtaagccaagggcaggaagaaggaggtggtcctctggggcatacgaggcgatttggccagttctggatggtgacgatggatgaccctccccagaccgggacatgggagattcaggtgaccgctgaggacaccccaggtgtgagggtccaggctcagacgagcctcgattttctttttcacttcggtattccaatggaggacggccctcaccccggtctgtaccctttaacgcagccggtagctggtctccagacgcagctgctggtggaggtgactggcttgggttcacgagctaatccgggtgaccctcagccacatttcagtcatgttatcctgagaggggtgccagaaggcgctgagctgggtcaggtaccattggaacctgtggggcctcccgagagagggctgctggctgcttccctgtcaccaacccttctatccacaccaaggcctttcagcctggagctgattggacaggatgcagcaggacggcgattacatagggcggcaccacagccaagcacggtcgtgcccgtactacttgaactatcgggtccctctgggttcctcgctccgggaagcaaggtgcctttgtcacttcgaatcgcctctttttctgggcctcaggaccttgacctccgtacatttgtgaatcctagtttttctctgacatctaaccttagtagagctcatttggagctcaatgagagcgcgtggggcagactttggcttgaggtgcctgactccgcagcccctgacagcgtggttatggtcactgttactgccggagggcgtgaagccaacccagttcccccaacacacgctttcttgagactgcttgtgtccgctcctgcacctcaggaccgacacaccacacctactggctcaagcgatcccatactgaccacagccacccctgctttttcaccctttaccttggtcacacagggaagggcaggcgcaggcctagctgcgggaagtccatggtgggggacagtcgggggagtgttactgctgttagggctagcttcttggtag

SEQ ID NO: 11341 - DNA, 708 bp, synthetic construct
  misc_feature 1..708: note = source = /note="Description of Artificial Sequence: Synthetic coding sequence"
  source 1..708: mol_type = other DNA
atgaagtatgtattctatctcggggtactggccggaacttttttttttgctgacagcagcgttcagaaggaagatcccgcaccgtatcttgtatacttaaagagtcactttaacccttgtgtgggcgtcctgatcaaaccctcctgggttttggctccagcacattgttacctccccaaccttaaagtgatgctggggaacttcaagtctagggtgcgcgacggaaccgagcagactattaaccccattcagatcgtgcgatattggaattactcccattctgcaccacaggatgatcttatgctgatcaagctggcgaagcccgctatgctgaatccaaaagtgcaacctctgactctagccaccactaatgtcaggccaggcaccgtctgcctccttagtggactggactggtcacaagagaactcagggagacaccccgatcttcgtcagaacctcgaagcaccggtgatgtccgaccgagaatgccaaaagactgaacaggggaaaagccaccgcaatagcctttgtgtgaagttcgtgaaggtattctcaagaatattcggtgaggtcgcagtcgctacggtgatctgtaaagacaaacttcagggcatcgaagtgggacattttatgggcggagatgtgggcatttacaccaacgtgtataagtatgtgagctggatcgagaataccgccaaggataagtag

SEQ ID NO: 11342 - DNA, 1386 bp, synthetic construct
  misc_feature 1..1386: note = source = /note="Description of Artificial Sequence: Synthetic coding sequence"
  source 1..1386: mol_type = other DNA
atgtccctggacatccagagtctggacattcagtgtgaggaactgtcagacgcaaggtgggccgagctactccccctcttacagcagtgccaggtcgttaggctcgatgattgcgggctcacggaggccaggtgtaaggacataagttctgcacttcgagtaaaccccgcactggcagaattaaacctgcgcagcaatgaattaggcgatgtgggcgtacactgtgttcttcagggcctacagacaccatcttgcaaaattcaaaagctaagcctgcagaattgctgtctgactggtgctggatgtggagtactaagctcgaccctccgcacccttcccacactccaggagctacacctgtcagataatctcctgggcgatgccggactccaactgctttgcgagggcctgctggatcctcagtgccgattggagaaacttcaacttgaatactgtagcttatccgccgcaagttgcgagcctctcgcgtcggttttgcgcgcaaagccagacttcaaggaacttactgtgtcaaacaacgacatcaatgaggccggagttagagttctctgtcagggactcaaagacagtccgtgccaactggaagcactgaagctagagtcctgtggagtaactagcgacaactgccgcgatctgtgtggaattgtcgcttcaaaagcttcactgagagaactggcccttggcagcaacaagctgggggacgtgggcatggcggaattgtgccccggactactccacccgtcatccagattaaggaccctctggatttgggagtgtggcatcacagccaaaggctgcggagatctgtgccgggtattacgggctaaagagtcccttaaagaactctcattagcaggtaacgagttgggggacgaaggtgcgaggttgctttgtgaaacgctgttggagcccggttgccagctcgaaagcctgtgggtcaagtcctgctcctttactgccgcttgctgtagtcacttcagttcggttctggcacagaatcggttcctgctggagctgcaaatctcaaacaatcgattggaggatgccggagtgagggagttgtgtcaaggcttggggcagcctgggtccgtcctccgcgtcctgtggctggcggattgcgacgtgagcgatagcagctgttccagtcttgccgcaacactcctggcaaatcactcactgcgcgaactagatctgagcaataattgcttgggtgacgccggaattctccaactggtggagagcgtgcggcaaccaggctgcctgttggagcagctcgtcctgtacgacatttattggagcgaagaaatggaggacaggctacaggctctcgaaaaagacaagcccagcctgcgtgtcatcagctag

SEQ ID NO: 11343 - DNA, 2676 bp, synthetic construct
  misc_feature 1..2676: note = source = /note="Description of Artificial Sequence: Synthetic coding sequence"
  source 1..2676: mol_type = other DNA
atgctgcccaccgaagttcctcagtcccaccccggtccaagcgctctgctgctgcttcagctcctgctgccccctacttccgctttcttcccgaatatctggtccctgctggctgctcccggttccatcacccaccaggatctcactgaagaagccgcactcaatgtcactctgcagctgttccttgagcagcccccacctggtcggcctccactgaggttggaggattttctaggccgaaccctgctcgctgacgacctgtttgccgcttacttcgggcctggctcgtctcgcaggtttagagccgcactgggagaggtgtcacgggctaatgcagcccaggactttcttcctacatccagaaatgatcctgatctgcactttgacgccgaaaggcttggtcaaggccgagcaagactcgtcggcgcactgagagagacagtggtggcagcaagagctctagatcacactctagccagacagcgtctcggagcagctctgcacgctcttcaggacttttattcacattccaattgggtggagctgggcgaacagcagccgcatccacaccttctctggccccgacaggaacttcaaaaccttgctcaggtggcggatcctacatgttcggattgcgaggagctaagttgcccgaggaattggctaggatttactctcctcaccagtgggtacttcggcacccaccccccaaagccacccggaaaatgcagccatgggggtcacttcgatagatcttcatcacagccccctaggggaggcatcaacaaggactccactagtccagggttctcccctcatcatatgctacacttgcaggcggcaaagctggctctcctcgccagcattcaggcgttctccctactccggagtcgtttaggtgatagggacttttctcggctactagatattaccccagccagctcactgtctttcgttctggatacaaccggatctatgggtgaagaaattaacgccgcaaaaattcaggcgagacacctggttgaacagcggagggggagcccaatggaaccagttcactatgtccttgtgcctttccatgaccctgggttcgggccagtgtttacaacaagcgacccagattccttttggcagcagctgaacgagatccatgccctaggtggcggagatgagcctgagatgtgtctgtccgcactgcaattggccttactgcacaccccgcctctgagcgatattttcgtgttcacggacgcatcacctaaggatgcctttctgacaaaccaagttgaatctctgactcaggagcgccgatgcagagtgacttttttggtcaccgaggatacctcgcgggtgcaagggcgtgcacgtcgcgagattctgtctcctctgcgcttcgaaccctataaagccgttgccctggcatccgggggtgaggtcatattcacaaaggatcagcatatccgagacgtggcagcgatcgtgggggaaagcatggcggcactggttactctgcctctggaccctcctgtcgttgtaccaggacaacccctggttttctcagttgacgggctgctccagaagatcacagtccgcatccacggcgatatctcatccttttggatcaaaaatccggcaggggtcagccaaggacaggaggaggggggaggacccctgggccacacaagaaggttcggccagttttggatggtgaccatggacgaccctccgcagacaggcacatgggagattcaggtgacagccgaggacaccccaggcgttcgggttcaggcccagacctcactggacttcttatttcattttggcatacccatggaggacggtcctcaccccggtctttaccccctaacccagcccgttgccggattgcagacacaactactagtggaagttaccggcttgggtagcagggctaaccctggcgatccacaacctcatttttcccacgtcatcctccggggagtgcctgagggggctgagctcgggcaagtacctctggaacccgtgggccctcccgaacgtggactccttgcagcctcactgtcgcccaccctgctatccacccctcgaccattctcactggaactcatcgggcaggacgccgcagggaggcgcctgcacagggcagcacctcagccatccacggtcgtccccgtcctgttggaactgagcggtccctccggcttcctggcccctgggtctaaggttcccctgtcgctgcgcattgcctcgttcagtggccctcaagatctggacctgaggacttttgtaaacccttctttctcactgacaagtaatctctccagagcccacctcgagctgaacgagtctgcctggggaagactctggctcgaggtccccgactctgccgcacccgacagcgtggttatggtgactgttactgccggtggtcgggaagccaaccccgttcctcccacacacgcattccttcggctactcgtgtccgcccctgcccctcaggacaggcacaccacccccactgggagttctgacccgatccttactacagccacacctgccttctccccatttactttggtgacgcaggggagagccggtgcaggtctcgcagcaggcagcccctggtggggcaccgtcggtggggtgctgctgctactgggtttggcgtcctggtag

SEQ ID NO: 11344 - DNA, 501 bp, synthetic construct
  misc_feature 1..501: note = source = /note="Description of Artificial Sequence: Synthetic coding sequence"
  source 1..501: mol_type = other DNA
atgggacccgaggccttgtcctcgctcctgcttctcttgttagtggcgtccggtgacgctgacatgaagggccactttgatccggcaaagtgcagatatgccctgggaatgcaggatcgaaccatccccgacagcgatatatctgcctcctcatcgtggtctgactctaccgcagcaaggcactcccgcctcgaatcttctgacggcgacggagcctggtgtcctgctgggagtgtatttcctaaggaggaagagtatctccaagttgacctgcaacgcctgcatctggtggcgttggtcggcacacaggggaggcacgcaggtggtttgggcaaggagttttcaagaagttaccgtctcagatatagtagagatggacgacgctggatggggtggaaagatcggtggggacaggaggtgataagtgggaacgaggatcccgagggagtggtactgaaagacctcggacctccaatggttgcgcgtctcgtcaggttctag

SEQ ID NO: 11345 - DNA, 420 bp, synthetic construct
  misc_feature 1..420: note = source = /note="Description of Artificial Sequence: Synthetic coding sequence"
  source 1..420: mol_type = other DNA
atgcaggcagcctgttggtacgtgctgttcttacttcagccaactgtttacctggttacttgcgcgaacctgaccaatggtggaaaaagcgaactcctcaagtccggaagcagcaagagcactttaaaacatatttggacagaatcttccaaggatctatctatcagtcggctcctatcccaaactttccgtggaaaggagaacgacaccgacctcgatttaaggtatgatactcctgagccatactccgagcaagacctgtgggactggctacgcaactcaacggatctgcaggagccacgtccaagggccaagcgccgtcctatcgttaagacaggaaagtttaagaagatgttcggatggggtgatttccattccaatattaagaccgtgaagctcaacctgctaataacgggatag

SEQ ID NO: 11346 - DNA, 2412 bp, synthetic construct
  misc_feature 1..2412: note = source = /note="Description of Artificial Sequence: Synthetic coding sequence"
  source 1..2412: mol_type = other DNA
atggccgcagcaggcctggtggccgttgctgccgcagcagagtattccggtaccgttgctagtggcggaaatctgcctggagtccactgtggtcccagcagcggtgcaggcccaggatttggaccgggtagctggtctaggtccctagatcgggctctggaggaagccgctgtgactggggtcttatcactatcgggcagaaagctgagggagtttcccagaggggcagccaatcacgacctaaccgacaccactcgggcagacttgtcaagaaacaggctctccgaaatcccaattgaggcgtgccatttcgtgtcccttgagaatctcaacttgtaccaaaactgtataagatacattcctgaggccattctgaacctgcaggccttaaccttcctgaacattagccgtaatcagctgagtacactccccgtgcacctctgtaatttgcctcttaaagtactgatagccagcaataataagctcgtgtcgctccctgaggagattggccacctgaggcatctcatggaactggatgtgtcctgcaacgagatccagactatcccgtcacagataggaaatctggaggcactgagagaccttaacgtccgtcgcaaccatctggtgcacctacctgaagagctggccgagttgccactgatcaggctggacttctcatgcaacaaaattaccactattcctgtttgttacaggaaccttcggcacttgcaaacaattactctggataacaaccccctacagagcccccctgctcaaatctgtatcaaaggtaaagtgcacattttcaagtacttaaatatacaggcatgcaagattgctccagacctgcccgactatgacagacgtcctttagggttcgggtcatgtcatgaagaactttactcctcccgcccatatggagccttggacagcgggttcaacagcgtggactccggcgacaagcggtggagtggcaatgaacccaccgatgaattcagtgacttacctcttcgcgttgctgaaattactaaagaacaaagacttcgcagagaatctcagtaccaggagaacagagggtccctggtggtgacgaatggaggggtggagcacgatctggatcagatcgattatatcgacagctgcacagctgaggaggaggaggctgaagtccgtcagcctaaaggcccagatccggactctctttcatcccagtttatggcctatatcgaacaacgtaggatttcccatgagggcagcccagtaaagcccgttgctattagagaatttcagaaaaccgaggacatgaggcggtatctccatcagaacagggtccccgctgaaccaagctcacttctgtcactctctgcaagccacaaccagctgagtcatactgatctggaattgcaccaacgtagagaacagctggtggaaaggacaagaagggaggcgcaactggcggctctccaatatgaggaagaaaaaattaggacgaagcagattcaacgcgatgccgtcctggatttcgtcaaacagaaagcctcgcagtctccccaaaagcagcaccctttgctggatggcgtagatggggaatgtcctttcccttcccgaagatcccaacacactgacgacagcgccctctgtatgtctctgtcaggactcaatcaggtcggttgtgccgcaacgctgcctcactcctctgcctttacccccctgaagtccgacgatcggcctaacgctctcctgtcatcgcccgctacggagacagttcatcatagtccggcttacagctttcccgctgccatccaacgaaatcaaccccagaggccggagtcttttctgtttcgagcaggtgttagagctgaaaccaataaaggacatgcctcacctctcccaccaagcgcagctcctacaactgacagcacagattccataaccggccagaactctcgccagcgcgaggaggagcttgaattgattgaccagttgaggaaacatatcgagtaccgattaaaggtctctttaccctgcgatttgggtgccgcactgaccgatggcgttgtcctgtgtcatctcgccaaccatgtgaggccacgctccgtcccatctattcacgtgccctcgccagcagtgcctaagctcacaatggccaaatgccggagaaacgtggaaaactttctggaagcatgccgcaaaattggggtgccccaggataatctctgtagcccctctgacattcttcagctcaatttgagcgtgaagcggaccgtcgaaaccctactctcattgggcgcacatagtgaggaatcgtcctttgtgtgcctttctctgcagctactcggatttgtcgccttctactgcaccgttatgttgaccctttgtgtgctgtattactggcttttccctgctaggtag

SEQ ID NO: 11347 - DNA, 633 bp, synthetic construct
  misc_feature 1..633: note = source = /note="Description of Artificial Sequence: Synthetic coding sequence"
  source 1..633: mol_type = other DNA
atgtataaggctcggcctccagccggaagcggcggacccggtgccgaacccccagcaatggccgcaccccgaggcagggccgctccgtggaccacagccctcctgcttctgcttgccagccaagtgctctccccaggaagttgcgctgatgaagaggaggtgccagaagaatgggtcctgctacatgttgtgcaggggcagattggagctgggaactattcatatctgcgactgaaccacgaggggaaaatcgtcctccgaatgcggtctttgaagggcgatgccgatctgtatgtgtctgcaagtagcctgcatcccagtttcgacgattatgagctgcagagcgcaacttgtggcccagacgctgtgtccattcctgcacattttcgcagaccagtgggcatcggagtgtatgggcacccatcacacttggaatctgaatttgagatgaaagtgtactacgatggtactgtcgaacaacaccccttcggcgaagccgcatatccagcggacggagcagatgcgggtcagaaacacgccggtgccccagaagacgccagtcaggaggaggagtccgtgctgtggaccatactgatcagtatactgaagcttgtcctagaaattttgttctag

SEQ ID NO: 11348 - DNA, 486 bp, synthetic construct
  misc_feature 1..486: note = source = /note="Description of Artificial Sequence: Synthetic coding sequence"
  source 1..486: mol_type = other DNA
taatgtccgaccgagataattgcatttggcgacagactggaggaattccgcagtatcaataccgaggtggtagcatgcagcgtggactcccagttcacacaccttgcatggatcaacacacctaggagacagggaggactaggacctattagaatcccgctcctgtcagacctcacacaccagatctccaaggactatggagtttacttggaagactcgggccacaccctgaggggcctcttcatcatagatgacaaagggatcttgagacaaattacactgaatgatctccccgttggaagatccgtcgacgagacactgcgcctggtgcaggccttccagtataccgacaaacatggggaggtatgccccgctgggtggaaaccgggtagcgagaccatcaagccagaagacaccatgaaagcctggtggcccagggagagttacaatcctagaagcagttggaaagcagaagtgtttcgctag

SEQ ID NO: 11349 - DNA, 2886 bp, synthetic construct
  misc_feature 1..2886: note = source = /note="Description of Artificial Sequence: Synthetic coding sequence"
  source 1..2886: mol_type = other DNA
atgctgctcctcctcttgctggcccctctgttcctgaggcccccaggcgcaggaggcgctcaaacgcccaacgccacttctgaaggatgccagatcatccaccctccgtgggaggggggtatccgatatagaggcctgaccagggaccaggtcaaagcgatcaatttccttcctgtagattacgaaattgagtatgtgtgccggggagagagggaagtggtgggcccaaaagtcaggaagtgtctggccaatggcagttggactgatatggacactccatctcgctgcgtgcggatttgctccaagtcttacctcacactggagaatggcaaagtgttccttaccgggggagatcttcccgcactcgatggagctcgtgttgacttccggtgcgatcctgatttccatctcgtgggctcaagccggagcatttgctcccagggacagtggagcacgccaaagccccactgtcaggtcaaccgtacccctcattccgaaagacgggcagtatatattggcgctcttttccctatgtcaggaggatggccagggggtcaggcctgtcagcccgctgtagagatggcattagaagatgtaaacagtcggagggacatcctgcccgattatgagctaaaattgatacatcacgattccaagtgtgacccaggccaggccaccaagtacctgtatgaactcctatataacgaccctatcaagatcatcctgatgcccggatgctctagtgtgtctaccctcgtcgcggaggctgcaagaatgtggaatttgattgtgctgagttatggctctagctcacccgcactgtcaaataggcagagattcccaactttttttaggacgcatccctccgctactctgcacaaccccacccgggtaaagcttttcgaaaagtgggggtggaaaaaaatcgctaccatccaacagaccaccgaggtgttcacctctacgctcgatgacttggaggaaagagtgaaggaagcagggatcgagatcaccttccgccagtcatttttttccgatcccgcagtacctgtgaaaaatctgaaaaggcaggatgctcgcattatagtcggcctgttttatgagaccgaggccagaaaagtcttttgtgaggtgtacaaggaaaggctcttcggtaagaaatacgtttggtttttaattggctggtatgcagataattggtttaaaatatatgacccaagcatcaattgtactgttgacgagatgactgaggccgtggaggggcacattaccacagagatagttatgttgaatcccgctaacacaagaagtattagtaacatgacttcccaggagttcgtagaaaaactaaccaagagactcaagcgccatcctgaagagacggggggtttccaggaggctcctttggcctatgacgctatttgggctctcgcgctcgcgttaaacaaaacaagcggaggcggaggcagatccggagtgcggcttgaagatttcaactataataaccagacaattacggatcaaatctacagagcgatgaactccagttcatttgagggcgtaagcggacacgtggtttttgatgccagcgggtctcgaatggcttggaccttgattgagcagcttcaggggggaagttacaagaaaatcggctattatgattctacaaaggatgatctgagctggtctaaaactgacaagtggataggaggaagccccccagccgatcagacactggtcatcaaaaccttccggttcctgagtcagaaattgttcatctctgtcagtgtgctctcatctttgggcattgtgctggctgtggtatgtctctccttcaatatatacaatagtcacgtgcggtatatccagaatagccagcccaatctcaataatcttaccgccgtgggctgttctttagctctggccgctgtgttcccactggggctcgacggctaccatatcggtcgcaaccaattcccattcgtgtgtcaggctagactctggttactgggcctcggttttagcttaggctacggttccatgttcactaaaatctggtgggtgcatactgtgttcacaaagaaagaggaaaaaaaggagtggagaaagaccctcgaaccctggaagctatatgcaacagtggggctcctcgtgggcatggacgtgttgaccctggctatttggcagatcgtggatcctttgcacagaacgatcgagacttttgccaaggaagagccgaaggaagacatagacgttagcatccttcctcagctggaacattgcagtagccggaaaatgaacacttggttgggaattttttatggctacaaggggctgctgttactcttgggcatattcctggcttatgaaactaagagcgtctctaccgagaagatcaacgaccatcgggctgtcgggatggccatctataacgtggcagtgttgtgcctgattaccgccccagtcactatgatcctgtcttcccagcaggatgccgcattcgcttttgcttctctggcaatagtcttttcgtcctacatcacgttggtagtcctcttcgtccccaagatgcgacgcctgattacaagaggagagtggcaatccgaggcacaagacaccatgaaaactggaagcagtaccaacaataatgaggaggagaagtctcgcctgctggagaaagagaaccgcgagctagaaaagatcattgccgagaaagaagagcgagtctccgaattaagacatcaactacagagcaggcagcagctcagaagccgcagacaccctccaaccccacctgaaccctcaggagggctaccgagagggcctcctgaacccccagaccgactgtcctgcgatggctcacgggtccaccttctgtataagtag

SEQ ID NO: 11350 - DNA, 2853 bp, synthetic construct
  misc_feature 1..2853: note = source = /note="Description of Artificial Sequence: Synthetic coding sequence"
  source 1..2853: mol_type = other DNA
atgacttggcgcatgggacctcgttttacgatgctgctcgccatgtggctcgtttgtggctccgagccccatcctcacgctactatacgcggaagtcacggaggcagaaaggttcccctggtatcgcccgactcaagccgcccagctcgattcctgagacacaccgggaggagccgagggatcgagcggtctaccctggaggagcccaatctgcagccgcttcagaggcgtcggtccgtcccagtgcttaggttggccagaccgaccgaacccccagcacgctctgatatcaacggcgcagctgtccgacccgagcagcgccctgctgcacgtggatccccgcgagaaatgatcagggatgaagggagcagtgcacgatcaaggatgctgaggttcccatctggatccagctctcccaatattctggccagctttgcaggaaaaaacagggtgtgggtgataagcgctcctcatgccagtgaaggatactatcggctgatgatgagcctgctaaaagatgatgtgtattgcgagctggctgaaagacacatccagcagatagtattgttccatcaagctggagaggagggcggaaaagtcaggcgcatcacctctgagggccagattctggagcagcctctcgaccctagcctcatcccgaaactaatgagcttcctcaagcttgaaaagggtaaattcgggatggtgctcctcaagaaaacgcttcaggtcgaagaaagatatccctaccctgtccgactggaggcaatgtatgaggtcattgatcagggacctatcaggcgtattgagaaaatacgacagaagggcttcgtgcaaaaatgcaaagcctccggcgtggaagggcaggtggttgctgaaggaaatgacggtgggggtggtgctggccgtcctagccttggctctgagaaaaagaaagaagatccacgcagggctcaagttccaccaacacgcgaatctcgagtgaaggtgctgcgtaagttagctgctaccgcgccagcactgcctcaaccgccttccacaccccgagccaccaccctcccccctgccccagccaccacagtaacccggtctacttcccgggctgtaaccgtcgctgccaggcctatgactacgacagccttccctactacccaacgaccctggactccttctccctcacaccgcccacctaccacaaccgaagtgattacagctcggagaccctccgtgtcagagaatttgtatccccctagccgtaaggaccagcacagggagagaccccagaccacccgaaggccatcaaaggcaacctccctggaaagctttacgaatgcaccccctactaccatcagcgagccatccacgcgcgcagctggcccaggacgatttagggataaccggatggatagaagggagcacggtcaccgagaccccaacgtggtgccaggtccacccaaaccagcaaaggaaaagccaccgaagaagaaagcccaggacaagatcctgagcaacgagtatgaagaaaagtacgatctgagccgcccaactgcgtcccaactggaagacgagttacaggtggggaacgtgcctctgaaaaaggctaaagaaagcaaaaaacacgaaaaactcgaaaaacccgaaaaagagaagaagaagaaaatgaaaaatgaaaatgcggacaaactgctgaagtccgagaaacaaatgaaaaagagcgagaaaaagtcaaaacaggaaaaggagaagtcaaagaaaaagaagggcggtaaaaccgaacaggatgggtaccagaaacctaccaataagcactttacccaatccccaaagaaaagcgtcgcagatctgcttggctcttttgaggggaagagacgcctgttactaatcaccgctcctaaggccgaaaataatatgtatgttcagcagcgcgacgagtatctcgaatcgttttgcaaaatggctacccgcaagatttccgtcattacgatatttggacccgtgaacaattcgacaatgaaaattgatcattttcagctcgacaatgaaaagcctatgcgggtggtggatgatgaagacctggtggaccaacgactcatctccgagctgcgcaaagagtatgggatgacctataacgactttttcatggtgctaaccgacgtggacctgcgagtcaagcaatattacgaagtcccgatcactatgaagagcgtcttcgatttaatagatactttccagtcacgtatcaaggatatggaaaagcaaaagaaagaaggcatagtatgcaaggaggacaaaaaacagtcacttgagaattttctctctagatttcggtggcgtcggaggcttctggtcatctctgcacctaatgacgaggactgggcctactcacagcaactgtccgctctaagcgggcaagcctgtaacttcggcctgcgacacattacaattctgaaactactcggggtcggcgaggaagtcggaggggtgctcgaactgtttcccattaacggaagcagcgttgtcgaaagggaagatgtgcccgcacacctggtaaaagatatccgcaactattttcaagtcagcccagaatacttctccatgttactggttggaaaagatggaaatgtgaagtcgtggtaccctagcccaatgtggagtatggttattgtctatgacctgattgattccatgcagctcagacgtcaggaaatggcaatccagcagtccttgggtatgcggtgtcccgaggatgaatacgccggatacggttaccattcctatcatcagggctatcaggacggataccaagacgactaccggcaccacgagtcctaccatcacggctatccctactag

SEQ ID NO: 11351 - DNA, 351 bp, synthetic construct
  misc_feature 1..351: note = source = /note="Description of Artificial Sequence: Synthetic coding sequence"
  source 1..351: mol_type = other DNA
atggcggctggaagcgcccctatgcagctgcatctgcgcgcaaccatacgaatgaaggatggcctgtgtgtgccacgaaaatggatctatcacctgacagagggcagcacagatctccgtaccgaggggcgacctgatatgaagaccgagttgttcagttcctcatgcccgggagggatcatgctgaatgagaccggccaagggtaccagcgtttcctgttgtacaacaggtccccgcacccccctgagaagtgtgtagaagagtttaagagcctcacgtcctgtctggactcaaaagcttttttgctaaccccgaggaaccaggaagcttgtgaactctccaacaactag

SEQ ID NO: 11352 - DNA, 1251 bp, synthetic construct
  misc_feature 1..1251: note = source = /note="Description of Artificial Sequence: Synthetic coding sequence"
  source 1..1251: mol_type = other DNA
atgaaattccaggggcctctggcttgtctgttgctggccctatgcctcggctcaggggaagcaggcccactccagtctggcgaagagtccacgggcacaaatatcggtgaagcactgggccatggccttggcgacgcgttatcggagggtgtcggaaaagcaattggcaaagaagcaggtggagctgccggaagcaaagtcagcgaggccctgggtcaggggacacgggaagccgttgggacaggcgtccgccaggtcccagggtttggggtggccgacgccctgggcaaccgtgttggggaggccgctcacgcattgggaaacactggccacgagattggcagacaggccgaggatgtcatccgtcacggtgccgatgccgtgaggggttcttggcagggggtccccggtcacaatggggcatgggaaacaagcggagggcacggcatctttggcagccaggggggtctgggcggacaaggacagggtaatcccggaggattgggtactccttgggttcatggatatcccggtaattccgcgggatctttcggaatgaacccccagggtgccccatgggggcaagggggtaatggaggccctccaaattttggaactaacacccagggtgccgttgcacagccaggttatggatccgtccgggctagcaatcaaaacgagggctgtacgaacccgccaccttccgggtcgggcggaggctcatcgaactccggtgggggatcaggctctcagagtggcagtagtggcagcggcagtaacggcgacaacaataacggctcctctagtggaggcagtagttctggtagcagctctggaggatcttccggcggatctagtgggggtagtagcgggaatagcggtgggagcaggggcgactcaggcagcgagagcagttggggctcctccacaggctccagttctggcaatcacggagggtcagggggagggaacgggcataagccaggctgcgaaaagccgggtaacgaggcacgtgggtcaggggagtccggaatacagggctttcggggacagggggtatcctcaaacatgagagaaatctctaaagaaggtaatagactgttaggaggaagcggggataactatcgtaatagtgagacctcacctggaatgtttaattttgataccttttggaagaattttaaaagcaagttgggcttcattaattgggacgccattaacaaggatcagaggtcaagccgaataccttag

SEQ ID NO: 11353 - DNA, 933 bp, synthetic construct
  misc_feature 1..933: note = source = /note="Description of Artificial Sequence: Synthetic coding sequence"
  source 1..933: mol_type = other DNA
atggtcgataaagacacggagagggacattgagatgaaacgtcagctgagacggttgagagaactacacctgtattctacctggaagaagtatcaagaagcaatgaagactagcctgggggtaccccagtgtgagcgcgacgagggatcgctgggcaaacctctgtgtccacctgagatactgagcgagaccctgcccggaagtgtgaaaaaaagagtgtgctttccctctgaggatcacctcgaggaatttatcgcagagcacctgccagaagcgtccaaccagtccttgctgactgttgcccacgcagacgccggtacacaaacaaatggggaccttgaggacctggaagaacacgggccaggccaaacggtctcagaggaggcaaccgaggtgcacacaatggagggcgaccccgatacgctcgcagaatttcttatccgcgacgtgctccaggagctctcttcgtataacggggaagaagaagatcctgaagaggtaaagacgagtctcggagttccgcagcgcggagacttggaggacctggaggaacatgttcctggccagacagtgtctgaagaggccaccggcgtgcacatgatgcaagttgatccggcaacactggcgaaatcagatctggaggacctggaggagcatgtgccagaacagactgtatccgaggaggctacgggtgtccacatgatgcaagtggatcctgccactctagccaagcagctcgaagacagcacaatcacagggtcacatcagcaaatgtcagcctcacccagctctgctcccgctgaggaggcaaccgagaagaccaaggttgaagaggaagtcaaaactcgcaaaccaaagaagaagaccaggaagccctccaagaagtcacgctggaatgtattaaaatgctgggacatcttcaacattttctag

SEQ ID NO: 11354 - DNA, 150 bp, synthetic construct
  misc_feature 1..150: note = source = /note="Description of Artificial Sequence: Synthetic coding sequence"
  source 1..150: mol_type = other DNA
atggctcctcccagcgttcctctcgttctgctccttgttctcttgcttagcctggccgaaaccccagccagcgctccagctcaccgctccagtacttttccaaaatgggttactaagaccgaacgcggacgccaacccctgagaagttag

SEQ ID NO: 11355 - DNA, 978 bp, synthetic construct
  misc_feature 1..978: note = source = /note="Description of Artificial Sequence: Synthetic coding sequence"
  source 1..978: mol_type = other DNA
atgcaaggaagggttgccggaagctgtgccccacttgggctgctgctcgtgtgtttacatttgcccggactgtttgctcggtcaatcggtgtcgtcgaggaaaaggtttcacagaacctcggcacgaatctaccccagcttggccagccctcatcgactggaccctccaattctgaacatcctcagcctgccctggatcccagatctaatgacctcgcccgagttcccttaaaactctccgtgcccgctagtgacggttttccgccagccggtggatcggctgtgcagcggtggccaccctcttggggtttgcccgctatggacagctggcccccagaagacccgtggcagatgatggccgctgcagccgaagacagattgggcgaggcgctaccagaggaactgtcatatctctcttcagcagcagcactcgcgccaggaagcggaccacttcccggagaaagcagcccggatgcaacgggcctctcgcctaaagctagcctgttgcaccaggacagtgaaagtagacgcctgccaagaagcaatagccttggcgctgggggtaaaatcctgtctcagcgcccaccatggtctctgattcaccgcgtgctcccagaccatccctggggcaccttaaacccaagtgtcagctggggcggaggtggcccaggcaccggatggggaacacggccaatgcctcatcccgagggcatctgggggattaacaaccagcccccaggcacctcatggggcaatataaataggtaccctgggggtagttggggaaacatcaaccggtacccgggaggatcgtggggaaacattaacaggtatccaggaggttcctggggtaacatacacttataccccggaattaacaatccttttccgcctggcgtgctgcggccacccggatcctcttggaatatcccagcgggttttcccaatcccccaagccctagactgcaatggggatag

SEQ ID NO: 11356 - DNA, 390 bp, synthetic construct
  misc_feature 1..390: note = source = /note="Description of Artificial Sequence: Synthetic coding sequence"
  source 1..390: mol_type = other DNA
atggctgcaggatccgctcccatgcagctgcacttgcgggctacgatccgaatgaaggatggactttgcgtccctcggaagtggatatatcacctgactgaaggttctaccgacctgcggacagagggacgtcccgatatgaaaaccgaacttttcagctcctcttgccctggcggtattatgctgaacgaaacaggccagggctatcagagattcttgctgtacaaccgctctccacatccccctgagaaatgtgtggaagagttcaaatctctcacatcctgcctcgattccaaggcttttctgttgacaccgaggaatcagggtaaggggctgaaaagtcataaaactgggctgggactaacaaagtcatctggagttacaggatag

SEQ ID NO: 11357 - DNA, 1056 bp, synthetic construct
  misc_feature 1..1056: note = source = /note="Description of Artificial Sequence: Synthetic coding sequence"
  source 1..1056: mol_type = other DNA
atggcagggatacctggactgctgttcctgttgttcttcttgctctgcgcggtaggccaggtgtcaccatattcagcaccatggaagcccacctggcccgcttatcgcctccccgtggttctcccgcagagtacgctcaatcttgcaaagcagtacctgagctacgagactttgtacgccaatggcagccgcactgagacacaggtgggcatttacattttgtcctcctccggggacggcgctcagcaccgggacagcggaagctctggaaaaagcaggcggaagcggcagatctatggttatgattctcgcttctccatctttggaaaggacttcttgctgaattaccccttttctacttcggtgaaactgagcaccggctgcaccgggacgctggtggctgaaaaacacgtcctgacagctgctcactgtattcacgacggcaagacttatgttaagggaacacagaaacttagagtcgggttcctaaagcccaagttcaaggatgggggtcggggagcaaacgattcaacgtctgccatgcccgagcagatgaaattccagtggatcagagtgaagcgcacccacgtgcccaaaggttggattaaagggaacgcaaatgacattggaatggactatgactatgccctcttggaactcaagaaaccacataagcggaagtttatgaagatcggagtgtcccctccagcaaagcagttgcctggaggtcggattcatttttctggctacgataacgatcgccctggcaatctggtgtaccggttttgtgatgtcaaggacgagacttacgatctcttgtatcagcagtgcgatgcccaacctggggcaagcgggtctggcgtgtacgtaagaatgtggaagagacagcaacagaagtgggagaggaaaattattggaatttttagcggacaccagtgggtggacatgaacggctccccccaggacttcaatgtggcggtgagaattacccctcttaaatatgcccaaatctgttattggatcaaagggaactatctagactgtcgtgaaggttag

SEQ ID NO: 11358 - DNA, 345 bp, synthetic construct
  misc_feature 1..345: note = source = /note="Description of Artificial Sequence: Synthetic coding sequence"
  source 1..345: mol_type = other DNA
atggagaggggcgctggagcaaagctgcttccactcctgctgttactcagagccactggattcacatgtgctcaaacggacggacgaaatgggtacaccgcggtgatcgaggttacatcgggtggaccttggggggactgggcctggcctgaaatgtgccccgatgggttttttgcaagtggcttttccctgaaagtcgagccaccacagggcatacccggagacgataccgcactgaacgggattcggttgcactgcgctcggggaaacgtgctgggtaatacccatgttgtggagtctcagtctgggcgttggggagctggagtcgaagatcccttggggtag

SEQ ID NO: 11359 - DNA, 825 bp, synthetic construct
  misc_feature 1..825: note = source = /note="Description of Artificial Sequence: Synthetic coding sequence"
  source 1..825: mol_type = other DNA
atgtggaggtgccctctggggctcctactgttgctgcccctggccggacacctcgcccttggggctcagcaaggtaggggcaggagggaactggcccctggtctccatctgagaggaatcagggatgctggtggcagatattgccaggaacaggatttgtgctgccgcggaagggctgatgactgcgccttaccatacctgggtgcgatctgctactgtgacttattctgtaaccgcacagtttcagactgttgtcccgacttctgggatttctgtctgggtgtccccccacctttcccgccaatacaggggtgcatgcatggaggcaggatttaccctgtgcttggaacatactgggacaattgtaaccggtggcctccgttagaatgttgggatctgctgcctccggctctgccaggccctgtgtgggcggctctaggggcaaaggaagaaatggcaggcaaggataggacagtttactgccctctgttgatgaaggctctgggtgccagagtgggcgagtgtcccggatgccagagcccgcagagaatgttaccggagagttctagagtgctactaccacggtgtgccgagggtgagcaacctggggttcaaaggggcaaaggcagaatgcgaaaagcattccccgctctccagacgccacttgctctcccatctagtgctcccgcaagccctggggctggaaagccttctcacactggctcttggttgcctctacggctgctaaagagacagcactggagatgggagccatggaccgcttgtaaagaggctgtgcaacacctagttatcacagaactgtag

SEQ ID NO: 11360 - DNA, 438 bp, synthetic construct
  misc_feature 1..438: note = source = /note="Description of Artificial Sequence: Synthetic coding sequence"
  source 1..438: mol_type = other DNA
atggcgcagctattcttgccactcctggccgcactcgtcctggctcaggcccctgccgcactggccgatgtactagaaggcgattcaagcgaggaccgggcattccgggtgcggatcgctggcgacgcccctctacagggtgtgctcggcggagcactcactatcccctgccacgtgcattacttgcgccctccaccgagtcggagggccgtactgggcagtccccgtgtgaaatggacattcctgtccagaggacgtgaggctgaagtcttggtggccagaggggttagagtaaaggtaaacgaagcttatcgatttcgcgtagccctgccggcataccccgcatcccttacagacgtgagcctggcactgagtgaactgcggcctaatgattctggaatatatagatgcgaagtacagcatggaatcgatgactag

SEQ ID NO: 11361 - DNA, 567 bp, synthetic construct
  misc_feature 1..567: note = source = /note="Description of Artificial Sequence: Synthetic coding sequence"
  source 1..567: mol_type = other DNA
atgttccaccaaatatgggcagccttgctgtatttttatggaatcatcttaaactcaatttatcagtgcccggaacatagccagttaacgaccctgggcgtggatgggaaagagttccctgaggttcacttggggcagtggtactttattgctggagcagctcccacgaaagaggagctggccacctttgatccagtagacaatattgtattcaatatggccgcaggatccgcacccatgcagctgcacctgcgcgctaccatccggatgaaagacggcctgtgtgtgcccagaaagtggatttaccatctgaccgaaggctcaaccgacctccgcaccgaagggagaccggatatgaaaaccgaactctttagctcatcctgcccaggtggcatcatgctgaacgaaaccggccaggggtaccagcggttcctgctctacaaccgtagcccgcaccctcccgaaaaatgcgtcgaggaatttaaaagtctgacatcgtgtttggattctaaagcctttctacttaccccacgtaatcaagaagcatgcgaattgtcaaataattag

SEQ ID NO: 11362 - DNA, 558 bp, synthetic construct
  misc_feature 1..558: note = source = /note="Description of Artificial Sequence: Synthetic coding sequence"
  source 1..558: mol_type = other DNA
atgggacctgccggatgcgcctttaccttacttctgctcctcggtatatctgaccgggactatcacagcgcactacaggaggccgaagtacctatcatagaccggcaggcctgtgagcagctgtataaccctatcggtatctttctgcctgccctcgagcccgttatcaaggaagataagatatgcgcaggcgatacacagaatatgaaggattcttgcaagggggattctggcggaccacttagctgtcacatagacggggtgtggatccaaaccggcgtggttagctggggattagaatgtggcaagagtctgcccggtgtgtatacaaacgtcatttactatcagaaatggatcaatgccaccattagccgtgccaataatctggatttctcagactttctcttcccaatagtacttctgtccctggcattactgagaccctcatgtgccttcgggccaaataccatccatcgggttggaacagtcgccgaagccgtcgcgtgcatacagggctgggaggaaaatgcatggagattttctcccaggggaagatag

SEQ ID NO: 11363 - DNA, 1653 bp, synthetic construct
  misc_feature 1..1653: note = source = /note="Description of Artificial Sequence: Synthetic coding sequence"
  source 1..1653: mol_type = other DNA
ccggctccggcatctaggaagcttcttccacggagacacctctctgaaaagtcccaccacattagcatcccctctcccgatattagtcacaagggactgcgaagtaagcgcacacagccgtctgaccctgaaacctgggaatcattacccagattggattcccagagacatgggggacctgagttctccttcgatctgctcccagaagccagggcaatccgcgtgacgatttcctctggacctgaggtgagcgtgcgcctctgccatcaatgggcattggaatgcgaggagctctcatctccctacgacgtacagaagatcgtgtcaggcggacataccgttgagctcccttacgaatttctcctcccctgtctgtgcattgaagcctcataccttcaggaagatacggttaggcgcaagaagtgcccctttcaatcttggccagaggcatatggatccgacttctggaagtctgtccacttcacagattattcccaacatacccagatggtcatggccctgaccctccgttgccctttgaagttagaagccgctctttgccagcggcacgactggcatactctctgtaaggaccttcccaatgcaacagcacgggaaagtgacgggtggtacgtgctggaaaaggtggatctgcacccacagctgtgttttaagttcagtttcggcaactctagtcatgtggagtgtccacaccaaactggctcgttgacttcttggaacgtgtccatggatacacaggcccagcagctcatcttgcactttagcagtagaatgcatgccactttctccgccgcatggagcctgcccggtctgggacaggatactctggtgcctcccgtgtacacagtgagccaggctaggggttcttcaccggtatccctggatttgataatcccatttcttcgtccaggatgctgtgtgctcgtgtggcggagcgatgtccaattcgcgtggaagcacctcctgtgtccagatgtctcttatcgccatcttggactcctgatcctggctttgttggctctgttgacccttctgggcgtggtgctcgcgctgacgtgcaggcggccacagtccgggccagggccagcaaggcctgtgcttctcctgcatgccgctgactccgaagcgcaacgaaggctggttggtgccctggcagaacttcttagagcagccttaggcggaggtagggatgtcattgtcgacttatgggaagggagacacgtggcacgggtaggaccactcccttggctgtgggccgctcgaacgagagtggctcgcgagcaaggaaccgtgctgctgctgtggtcaggcgctgatctacggcctgtgtcaggcccagaccccagggccgcaccactccttgccttgctccatgccgcacccaggccgcttctgctgctggcctatttttctcgactctgcgcgaaaggcgacattccaccccctctgagagcattgccgaggtatagactgctcagggacctacctcggctcctgcgggcattagacgccaggccctttgccgaagctaccagttggggacgactgggagcaaggcaacgtcgacagagtaggttggaactgtgctctcggctggaacgagaagcggctaggctggccgatcttgggtag

SEQ ID NO: 11364 - DNA, 816 bp, synthetic construct
  misc_feature 1..816: note = source = /note="Description of Artificial Sequence: Synthetic coding sequence"
  source 1..816: mol_type = other DNA
atgggaatcgtgtgcgcccagtgttcgtttattctgttgcttagtattataagggccaggccgccacctttcctgttttgcccactttcaagtcaaagaaccgagagcccctacaaacccgtgcatctcggactggggcctaccgataaagtggcggctatcgctatggctcgcataatcgatctggtgccttgggatgatggatctacccacgtctacgcaagccctgcaatcctgctgccaatggagcgccaacgcaatcagctagccggagtgaaacaacaattgtatcaccccgcattaccgaccttaaggcacatggaccgcgatacggttaaggcatgtctgcccgatgagcactgccagagtaccacatattgccggaaggatgaattcgataatgcgcatttcacgctgcttggcgtgccaaataaacctttgcaatgtctggacatcactgctactggccagaagctcaggaatcgatatcatgaggggaagttagcacctattgccccaggtattaatcgcgtggactggccctgcttcactcgcgcaatagaagattggtcacactttgtaagctccgcaggtgaatttaaactgccctgcctcagaaagagggcagaaggactgtccggttatgcagtgcggtacttgaagcccgatgtaacccagacctggcgttattgcctatcacagaatccctcactagatcgctatggtcagaagccgctgccctttgactccctcaatacctttagatcttttggatcttcgtactctcgcgttaactatttaacaccatggcactag

SEQ ID NO: 11365 - DNA, 1743 bp, synthetic construct
  misc_feature 1..1743: note = source = /note="Description of Artificial Sequence: Synthetic coding sequence"
  source 1..1743: mol_type = other DNA
atgcatctcagcgccgtcttcaacgcgctgctggtgtcggtgctggcagcggtcctgtggaaacacgtgagactgcgtgagcacgcggcaaccctcgaggaggaactggcgctgtcccggcaggcaaccgaacccgcaccagcccttagaatcgactaccctaaggcactccagatcctgatggagggaggcacccacatggtgtgcactggtagaacgcataccgaccgtatctgtcggtttaagtggctgtgctactccaatgaggcggaggagtttatcttttttcatggcaacacaagtgtcatgctgccaaatttaggctcacgacggttccaaccggctctgctggatctgtctaccgtggaggaccataatactcaatacttcaacttcgtggagttgcctgctgctgcactcaggtttatgcccaagcctgtgtttgtgcctgatgtggccttaatcgccaaccgcttcaaccctgacaatttaatgcacgtgttccatgatgacctgctgccacttttttatactctcagacaatttcctgggttagctcatgaagctcgcttgttcttcatggagggctggggggaaggagctcactttgatctatataagttactatcccctaagcaaccattactccgggctcagttaaaaactcttggtagactcctgtgtttctcccacgctttcgtgggattgtctaaaattacgacctggtatcagtatgggttcgtgcagccccaggggcctaaggctaacattctggtttcaggcaacgagatcagacagtttgcacgctttatgacagaaaagttgaatgtttcccacacaggggtacctctgggggaggaatacatcctggtctttagtcgtacccagaacaggctgatactgaacgaagcagagttgctgctggctttggcccaggagttccagatgaaaactgtaacagtttcactcgaggaccacacctttgccgacgtggtaagactcgtgagcaatgccagtatgctcgtgagtatgcacggggctcagctcgtgacgacgctgtttctcccacggggtgctacagtggtggagctgttcccgtacgcggtgaacccagatcattacacaccgtacaaaacgctcgccatgctacctggaatggatcttcagtatgtcgcctggcgaaacatgatgcctgaaaacactgtgacacaccccgagaggccctgggaccagggaggcatcacccacctggatcgtgcggagcaggcacgtattctccaatcaagggaggtgcccagacacctgtgctgtcgaaaccccgaatggctctttagaatataccaggacaccaaagtcgatattccttcgttgatccaaacaatccgccgtgtggtaaagggcagacccggacctagaaagcagaaatggaccgtgggcctttaccctggcaaagtcagagaagccagatgtcaggccagcgtgcacggtgctagcgaagccagattaactgtctcatggcagatcccctggaacctcaagtacctgaaagtgagagaggttaagtacgaggtgtggctgcaggagcagggagaaaatacctacgttccttacattttagctctccaaaatcacacttttacagaaaatattaagccattcactacatacctggtgtgggttagatgtatttttaacaagatccttttaggacccttcgcagacgtgctcgtttgtaatacttag

SEQ ID NO: 11366 - DNA, 513 bp, synthetic construct
  misc_feature 1..513: note = source = /note="Description of Artificial Sequence: Synthetic coding sequence"
  source 1..513: mol_type = other DNA
atggaattcgttgatgtgacagaatcgaacgctcggtgggtgcaggacttcagattaaaagcttatgctagccccgcaaagttagagagtattgacggggctaggtaccacgccctgctaatccctagctgccccggagccttaactgatctcgcctccagtgggtcgctggccaggatactgcagcatttccactcggagtcaaagccaatctgcgccgtaggacatggtgtcgcagccctatgctgcgctacgaacgaggatcggtcttgggtgtttgatagttacagccttacgggcccaagcgtgtgtgagctagtgcgcgctccaggatttgcaaggctgcctctcgtggtggaggatttcgtgaaggactcaggagcgtgcttttcagcctcagagcctgacgccgtccatgtggtgttagatcgtcacctcgtaactggccaaaacgcgtcctcgaccgtcccagccgtgcaaaatttgctgtttctttgcggtagtcgcaagtag

SEQ ID NO: 11367 - DNA, 1041 bp, synthetic construct
  misc_feature 1..1041: note = source = /note="Description of Artificial Sequence: Synthetic coding sequence"
  source 1..1041: mol_type = other DNA
atgcgcctgctgttcttagccgtgcttaggccacatacaggcaacgcggtcaccgcccaacgggtgcgggctcatctggaggccgcaggccacgtgtgtgtgctcaaggacgcatttgacttcgaaagtcgctccgaaatcgctaatctgattctggccgaaaattgtgaggctgcccttgctcttcacctctaccgcggaggcaggttgctgcaaggccaccggatccctttcggtgttatcttcgggggtaccgacgtcaacgaagacgccaatcaggccgagaagaatactgtcatggggagagtattagaagaagccaggtttgcggtggccttcacagaaagcatgaaagaaatggctcaagctcaatggcctcatgctaaggggaaggtctatgtgcagtcacagggtattgccacgactccaaacgctgcctttaactggaacacttttttacagagatccgagattaaccagtcagcagataacctccacatctttttgcttatatgcggattgcggcaggttaaagaccccctttatctggtggacgccttttccgcgtggcatcaagaggaaccaaatgttcatctcgtgatagtggggccagaggtggatccagtgttcactagggaggtcaaagccaaagttaaaagggccgcaggggtgcgactcatcggtgagatgccccaggaagatctgcacgccgtggtgaagaattgctttgctgtagtgaattccagtgtgtcggaaggaatgtccgccgcaatcttggaagcaatggacctggaagtgccagtgctcgccagaaatatccccggtaatgccgctgtggtcaaacatgaggttactggtctgctattcagtaacccgcaggagttcgtccatctggccaaacgattagtcagtgatcccgcacttgaaaaagagatcgtggtaaatggaagagagtacgtgcggatgtatcacagttggcaggttgagagagatacttatcaacagctgattcggaaactggaagggagcaccgaggattag

SEQ ID NO: 11368 - DNA, 1482 bp, synthetic construct
  misc_feature 1..1482: note = source = /note="Description of Artificial Sequence: Synthetic coding sequence"
  source 1..1482: mol_type = other DNA
tcagaggccgtgtacctgaatgacagtacatatgacggacatacagtggggggtctccagtacggaggcttaggccagctggccgacggtgttgtcggcctggatgatttccgaaagtctcaggagttgagggtctggccgggttacgactatgtgggctggtccaatcacagcttctctagtggatacgtggagatggagtttgagtttgaccggctgcgggcattccaagcaatgcaggtccattgcaacaacatgcacaccctgggcgcacgactacccggtggggtggagtgccggtttcgacgcggtcccgctatggcttgggaaggcgaaccaatgaggcacaacctaggcggaaaccttggcgacccccgagctcgggcagtctcagtgccccttggcggaagggtggcccgtttccttcagtgtcggttcctgtttgctgggccatggctgctgttctccgaaatcagcttcatctcagacgtggtgaataattccagcccggcattaggtggtacttttccccctgccccttggtggcctccgggaccgcctccaacaaactttagctctttggagctcgagcccagaggacaacaacctgtcgccaaagctgagggaagtcctaccgctatcctgatcgggtgcctcgttgccattatcctcctcctgctgttaataattgcacttatgctctggagacttcactggcgacgactgctgagcaaggtgctcgaaagccacccaagaacacgctctcccggtctcgtgggcataaggcccactccccttccagtctctcctatggcccttcgctgttgctctccgatccagcctactgccagcttttggccactgactcccgtacctttggaggcccgagccccaccacaccctccagggccaaatcccccaacccccagaggtgtgaccggtgggaatacatacgctgtccctgctctgccacccggagctgtcggcgatggtccaccccgagtggatttccctcgttcaagactccgctttaaagaaaagctgggcgaaggtcagtttggcgaagtccatctctgcgaggtggactctccccaggacctcgtgagtttagactttccccttaacgtgcggaagggacacccattactggtggccgtaaagattctgagacccgacgctacgaaaaacgccaggaatgacttcttgaaagaggtcaaaattatgagtaggctaaaggaccccaacatcattcgcctgctgggcgtgtgcgtccaggatgacccactctgtatgattacggattacatggaaaacggggaccttaaccagttcttaagcgcccatcaactggaggacaaggcggctgaaggcgctccgggagacgggcaggcggctcagggacccaccatttcctaccccatgctccttcatgtcgccgcacaaatcgcgagcggcatgcgctatctggcaaccctgaattag

SEQ ID NO: 11369 - DNA, 354 bp, synthetic construct
  misc_feature 1..354: note = source = /note="Description of Artificial Sequence: Synthetic coding sequence"
  source 1..354: mol_type = other DNA
atgctgatcttttggacaatcacactgtttttactgggggctgctaagggtaaagaagtgtgttacgaagatctaggttgtttcagtgacacagagccatgggggggtaccgctatcagaccgctgaaaatcctgccctggtcccccgaaaaaatagggaccaggttcctgctctacaccaacgaaaatccaaataacttccagatcctcctgctgtccgatccatccaccatcgaagcaagtaattttcagatggatagaaaaactagattcatcattcacggtttcatcgacaaaggggatgagagctgggtcactgacatgtgtaagccaggggcttcccccagggcttag

SEQ ID NO: 11370 - DNA, 1581 bp, synthetic construct
  misc_feature 1..1581: note = source = /note="Description of Artificial Sequence: Synthetic coding sequence"
  source 1..1581: mol_type = other DNA
atgcaaggacctctcctgctgcccggactgtgctttctgttgagcctattcggagccgtgactcagaaaactaagacctcctgcgccaagtgcccacccaatgcttcatgcgtgaataacacccattgcacttgtaatcatggctacacatctggcagcggccaaaaactgttcactttccccctcgaaacctgcaacgctatcgaaactcaggctataactgacaattgctccgaggagcgtaagaccttcaacctaaatgtccagatgaattcgatggatattcgctgcagcgatattattcagggtgatacacaaggaccctccgctatcgcctttatatcctacagctcgctcggcaatattataaatgcgaccttcttcgaggagatggataagaaagaccaggtctacctcaacagtcaggttgttagcgccgctattggtcccaagcgcaacgtttcactatctaagagtgtcacccttacgtttcagcacgtcaagatgacaccttctaccaagaaagtgttttgcgtctactggaaatccaccgggcaaggttcccagtggagtcgcgacggatgcttcttgattcatgttaacaagagtcacactatgtgtaactgctcccatctcagtagtttcgcagtactcatggccctgacatcacaggaggaggaccccgttttaacagtgatcacgtacgtaggcctttccgtttccctactgtgcttactccttgcagccctgactttccttctgtgcaaggccatccgaaacaccagtactagcctccacctgcagctatcactatgcctgtttctcgcccatctgctcttcctcgtgggcattgatcggaccgaacctaaagtcctgtgcagtattattgccggtgctctccactacctgtacctcgctgcattcacatggatgcttctcgaaggagtacacctgtttttaacggctcggaacctgactgtagtcaactactcttcgatcaacagactgatgaagtggattatgtttcccgtgggctacggagtgcctgcagtgacagtagctatttccgccgcttcatggccccacttatacggtacagcggatcggtgctggttacatttggaccagggctttatgtggagcttccttggcccagtctgtgccattttctcagcaaacttggtgttgttcatccttgttttttggatcctgaaacgcaaacttagctctctgaactctgaagtgagcactattcagaacacaagaatgctcgccttcaaagccacagcccaattattcatcctaggttgtacctggtgtctcgggttactccaagtgggccctgccgctcaggtcatggcatacctgttcacgatcattaatagtctgcaggggtttttcatttttctggtctactgtttgctaagtcagcaggtgcagaagcaataccagaaatggtttcgcgagatcgtcaagtctaaatcagaatctgagacctatacacttagcagtaagatgggcccagattctaagccaagcgagggagatgtgttcccaggccaggtcaaacggaagtattag

SEQ ID NO: 11371 - DNA, 5832 bp, synthetic construct
  misc_feature 1..5832: note = source = /note="Description of Artificial Sequence: Synthetic coding sequence"
  source 1..5832: mol_type = other DNA
taaccctccttggcgggacgtggggcagggaggatggcacctggtgccttgagaggtggctgtgaacaacgcgcacctgggggtggcgcaaggaccgctgctttggggccatggccttggccttcccccggtccagcaccaagtcccggagctgctcctcccagatctcgcaaaatgtctggcgctctactgtggccattgttgcctctgctgcttctactgctcagtgctcgtgatggagttagagccgctcagccacaggcaccaggctacctaatcgcagctccatccgtgttcagggctggcgttgaagaggttatctctgtgactatcttcaattctcccagggaggtgactgtccaggcgcaactggtagcccagggggagcctgttgtgcaatcacaaggagcaattctcgataagggaacaatcaagctgaaggtgccaaccggtctccgtggacaggcactgctgaaagtttgggggagaggctggcaagccgaggagggccctctctttcataatcaaaccagtgtgactgtagatgggaggggagcttccgtctttatccagaccgataagcctgtttataggcctcagcatagggtgctgatatccatattcacagtgtccccgaacctccggccagtgaacgagaagctcgaggcctacatactcgaccccagaggcagccgtatgattgaatggaggcatctgaagccattctgctgcgggataacaaacatgtcctttccactgtcagatcaacccgtcttgggcgaatggttcatatttgtggagatgcaaggtcatgcctacaataagtcatttgaggtgcagaagtatgtcttgcctaagtttgagctcctcattgatccacctcgctacattcaagatttagacgcctgtgaaacaggaaccgtaagagccagatacacattcgggaaaccagtcgctggcgctttaatgataaatatgacggtgaacggcgtaggatattactcacacgaggtgggcagacccgtccttaggactacaaagattcttggctccagagattttgacatatgcgtgcgcgacatgatcccggctgatgtgccagaacacttcaggggtcgcgtgagtatctgggctatggtgaccagtgttgatgggagccagcaagtggcctttgatgactctactcccgttcagagacagctggtagacatacgatactctaaagacacccgaaagcagtttaagccgggactggcttatgtgggcaaggtcgagttatcttaccccgacggctcaccagcagaaggagtgaccgtgcaaatcaaagccgagctgacacccaaggacaatatttatacttcagaagtggtgagccagagggggttagttggcttcgagatcccaagtatacccacctccgcccagcacgtctggctcgaaacaaaagtcatggctttaaatggaaagccagtaggggcacagtatctgccatcttatctgtcactcggtagttggtactccccatcccaatgttacctccagttgcagccgccttcccatcccttacaggtaggagaagaggcctacttctcggtgaaaagtacttgtccatgtaacttcaccctgtattacgaagtcgcggctcgcggaaacatagtcctatccgggcaacagcctgcgcacaccacacagcagagatctaagagagcagcacctgccctcgaaaaacccattaggctcactcacctgtcggagaccgaacccccacctgcgcctgaagctgaggtggatgtgtgcgtaacaagcctgcacctggcggttacacccagcatggtgccactgggcaggctgttagtcttctatgtccgagagaacggggaaggtgtcgcggacagcctccaattcgccgtggaaacttttttcgaaaaccaggtgagcgtgacatactccgcaaatgagacacagcctggcgaagtggttgatctgagaatccgcgcagctcggggatcctgtgtatgcgtcgcggcagtggacaagagtgtgtacctactgcgctctggctttaggctgacaccggctcaggtgtttcaggaacttgaagattacgatgtttccgatagtttcggggtctctcgggaagacggaccattttggtgggcagggttgaccgcgcagcgtcgccgacgaagctcagttttcccatggccctggggtatcacaaaggactccgggttcgcatttaccgagactgggctggttgtgatgactgacagggtgagccttaatcaccggcaggacggcggtttgtacacagacgaggcggtcccagcctttcaaccccatactgggtcattagtcgccgtggccccttctaggcaccctccaaggacagaaaaacgaaagcgcacttttttccccgagacctggatttggcattgcttgaacatatctgatccaagcggcgagggaacccttagtgttaaggtccccgactcgattacctcctgggtgggggaggcagttgccctgtcaacaagtcaaggccttggaattgccgaacccagtctgctgaagacattcaagcctttctttgtcgacttcatgctgcccgctcttatcatccgcggtgagcaagttaaaataccgctgtcagtctacaactatatggggacctgcgccgaagtttacatgaaactgtctgtgcctaagggaattcaatttgtgggtcatccaggcaaacgtcatgtgacaaaaaagatgtgtgtcgccccaggggaagcggaacctatttgggtcgtgctgagtttcagtgacctaggactgaataatatcacagcaaaggctcttgcctacggggataccaactgttgtagagatgggaggtctagcaagcatcccgaggaaaatcacgccgacaggcgagtgccaatcggggtggatcatgtgcgcagatccgtaatggtggaggcagagggggtaccgagagcttacacatacagtgccttcttttgtccttccgagcgtgttcacatctctaccccgaacaaatacgaattccaatacgtgcaacgtcctctgaggctaacacggttcgacgttgccgtccgcgctcataacgacgcacgggtagctctcagcagtgggcctcaggataccgcaggcatgatagaaatagttctaggcggtcaccagaacacccgtagttggatttcaacaagtaaaatgggggagccggtcgcatccgcacacacagccaagatcttgtcctgggacgaatttcgcactttctggatctcttggcggggtggattaatccaagtaggacatgggccagagccatctaacgagagtgtgattgtggcgtggacactacccaggccaccggaggtccagtttattggattctcaactggctggggatccatgggagaatttcgtatttggcgcaaaatggaagttgatgaaagctacagcgaagcctttaccctgggagtgccccacggagctatccccggttctgagcgggcaactgccagtattattggcgatgtcatgggccctactctcaaccacttgaataacctgctgagactgcctttcgggtgcggagaacagaacatgatccacttcgcccctaatgtgttcgtcctgaagtatttacagaagacacagcagttgtccccggaggtggagcgcgaaaccacagactatctggtgcagggttatcagagacagctcacatataaaaggcaggacggatcttactccgctttcggcgaacgggacgcctcaggctccatgtggcttacagcatttgtgctcaaaagctttgcgcaggccagatctttcatttttgtagacccgagggagctcgccgcagcaaagtcctggatcatccaacagcaacaggccgatggaagtttccttgctgttggtagagtgctgaacaaggacatccagggaggaatccacggtactgtgccacttaccgcttacgtggtagtcgccttactggagactgggactgccagtgaagaggagcggggttcaacggacaaggctcgccatttcctggaatcggccgcaccattagcaatggatccttattcctgtgcactgaccacttatgctctgacgctgttgaggtctcctgcagccccagaagcactgagaaagttgaggtccctagcaatcatgagagatggggttacacactggtcactgagcaatagctgggacgtggataagggcacctttctgtcattcagtgaccgtgtgagccagtctgtggtgtccgcagaggtggaaatgactgcttacgccctgctgacctataccttgcttggggacgtggcagccgctctgcctgtagtcaagtggctgtcacagcagcggaatgccttaggcggattctccagtacacaagacacctgcgttgctctccaggcattagctgaatatgcaatcttgtcctacgctggcggaattaatttgactgtgtcgcttgcatcaactaatctcgactaccaggaaacatttgagcttcacaggactaaccagaaagtcctccagaccgccgctatcccctcgctaccaaccggcctcttcgtgagcgccaaaggagacggatgttgcctgatgcaaattgatgtcacttacaatgtgcccgatcctgtggcaaagcctgcattccagctgctggtgtccctgcaggagcccgaggctcaaggaagacctccaccaatgcccgcaagcgctgctgaagggtcacgcggagactggccaccagccgatgatgacgatccagctgcagaccaacatcatcaggaatacaaagtgatgctggaggtctgcaccagatggctgcatgccggttcctccaatatggcagtcctggaagtgcctctattgtctgggttccgcgcagatattgaaagcttagagcagctgctactggataaacacatgggaatgaaacggtacgaagttgccggacggagagtactcttttacttcgacgagattccgagtcggtgtctgacttgtgttaggtttcgggcactgcgggagtgcgtagtgggtcggaccagtgccttacctgtcagtgtttacgattactacgagccagccttcgaggctacaagattctataatgtgagcacccatagccccttagctcgagagctgtgtgccggtcctgcatgtaacgaggtggagagagcacctgctcggggacccggttggttcccaggagagagcggccctgctgtcgctccggaggagggcgctgccatcgctcggtgtggctgcgatcatgattgtggagcccaggggaacccagtctgcgggtccgatggcgtggtctatgcttctgcatgcaggttgagggaggctgcgtgtcggcaggctgctccattagaacctgccccacctagctgttgcgctcttgagcagcgcctacccgctagcagctcttcaacatacggagacgacttagcctctgtcgctcccggaccattgcaacaggacgttaagctgaacggcgctggcctggaagttgaagatagcgatccagagcccgagggtgaggccgaagatcgcgttactgccggaccccgtccacccgtgagttccgggaaccttgaatcctccactcaaagtgcctcacctttccataggtggggtcagacacctgcacctcaacggcattcgggcagggtggttggagcccacagacctggactgttatctcccgttttcgtgtatagcccggctttccaaagcggtggggaagaaggcctgtggatgtctaacacatgcactcttcgataa

SEQ ID NO: 11372 - DNA, 456 bp, synthetic construct
  misc_feature 1..456: note = source = /note="Description of Artificial Sequence: Synthetic coding sequence"
  source 1..456: mol_type = other DNA
atggaggcaacaggtactgacgaagttgataagttgaaaactaagttcatttcggcctggaataacatgaaatacagctgggtgctgaaaaccaagacatacttctctcgcaattctcccgttcttctgctggggaagtgctatcattttaagtatgaagacgaagacaaaaccctaccagcagaaagcggctgtactattgaggaccacgtcattgcaggcaacgtggaagagtttagaaaggattttatttcccggatttggctgacgtatagggaagagttccctcagatcgagggaagcgcattgacaaccgactgtggatggggctgcaccctcagaacagggcagatgctgctggctcaggggttgatcttacactttttgggaagagcctggacttggccggatgctctgaacatcgaaaattcagattctgagagttggacttcttag

SEQ ID NO: 11373 - DNA, 2616 bp, synthetic construct
  misc_feature 1..2616: note = source = /note="Description of Artificial Sequence: Synthetic coding sequence"
  source 1..2616: mol_type = other DNA
atgagaaaacctcgtcgcaagtcccggcagaacgccgaaggaaggaggagccccagcccctacagtcttaagtgcagtccgacacgggaaaccctgacgtatgcgcaggcacagaggatcgttgaggtggatatagacgggaggcttcatagaatctctatctatgatcctctaaagatcattactgaggacgagcttacggcgcaagacattacggagtgcaattccaataaggagaactccgaacaacctcagtttccaggaaagtctaaaaaaccgagcagtaagggaaagaaaaaagaaagctgttcaaaacacgcttcgggaactagtttccacctcccccaaccttcgtttcgcatggtggactccggaattcagccagaggctcccccactgcccgctgcttattaccgctacatagagaaacccccagaagacctcgatgcggaagttgagtatgatatggacgaagaggatctggcatggttggatatggtgaacgagaagcggagggtggatggccactccctggtgtccgcagatacattcgagctgctcgtcgacagactggagaaagagtcatacctggagtccagatcatccggagcgcagcagagcttgatcgacgaggacgcgttttgttgcgtgtgtctggatgacgaatgtcacaactccaacgttatcttgttttgtgatatatgtaacctggccgtgcaccaggagtgttacggagtgccctacatccccgagggacagtggctgtgccggtgttgcctacaaagcccatcccgacctgttgattgtatcctttgcccaaacaaagggggagcatttaagcagacatcggatgggcactgggcacacgtggtgtgtgctatctggatccccgaggtgtgcttcgcaaacacggtgtttctagagcccattgaaggaatcgacaatatccctcctgctcggtggaaactgacatgctacatatgcaagcaaaagggcctaggagctgccatccagtgtcacaaggtgaattgttatacggcatttcatgtgacctgtgctcagcgggcaggcctgtttatgaaaatagaaccaatgcgagagacttccttaaatgggacaattttcacagtcaggaagactgcttattgcgaggctcactcacctcctggtgcggctacagcccgaaggaagggtgattcccctaggtccatatcggagactggagacgaggaaggtttaaaagagggcgatggggaggaggaagaggaggaagaagttgaagaggaggaacaggaggcacaaggcggagtatccggatcactgaagggagtgccaaaaaaaagtaagatgagcctaaagcagaaaatcaaaaaagaacccgaggaagctgggcaggacactccctcgacattgcctatgctagctgtcccccagatcccttcttaccggctgaacaaaatttgcagtggcttgagctttcaacgtaaaaatcagttcatgcagcgtctccacaattactggctcctgaagagacaggccaggaatggggtccccttaattcgccgtctccatagccatctccagtcacagcgcaacgcggagcagcgggagcaggacgaaaagaccagtgctgtgaaagaggaactgaagtactggcagaagcttcggcacgaccttgaaagagcgcgtctgcttatcgaattgattcgcaaaagagagaagctgaaaagggaacaagttaaggtacagcaggcagcgatggagttggagcttatgcccttcaatgttctgctacggacaaccctcgatcttctgcaggagaaggaccccgcacacatatttgccgagcccgtaaacttatcggaggtgcccgattatctcgagtttatctcaaaacctatggactttagcactatgagacggaagctggaatctcatttatacagaaccctggaagaattcgaagaagatttcaacctgattgtcacaaattgtatgaaatacaatgctaaggacacaatttttcacagagcagccgtgagactgcgggatctagggggtgctatattaagacacgcacggcgacaggctgaaaatatcggctatgatccagagcgagggactcaccttcctgaaagccctaaacttgaggacttctaccggttttcctgggaggacggcaggtccttgttgttgccctttgaggatcggggtgaccttgagcccctggagcttgtctgggccaagtgccgcggttacccttcctatcctgcccttatcatcgatcccaagatgcctagggagggactgctgcacaatggagtccctattccagtgccccctctcgatgtgctaaagctaggcgaacaaaagcaggccgaggcaggagaaaagctcttcctggtgctgttctttgataacaaacggacgtggcagtggctgccacgagacaaggtgcttcctctcggggttgaagacacggttgataagctcaagatgcttgagggtaggaaaacaagtatacggaagagcgtgcaagttgcctacgaccgagccatgattcatcttagccgcgtgagaggaccccacagcttcgtaacttcctcctacctgtag

SEQ ID NO: 11374 - DNA, 2700 bp, synthetic construct
  misc_feature 1..2700: note = source = /note="Description of Artificial Sequence: Synthetic coding sequence"
  source 1..2700: mol_type = other DNA
atgctcctgcttctcctactggccccattgttcctgcgcccacccggtgcaggcggagctcagaccccaaacgcgacatccgagggctgccagattatacaccccccatgggaaggcggaattcggtacaggggcctcactcgggatcaggtgaaagcaatcaatttcttgccagtggactatgaaattgagtacgtgtgccgcggagagcgagaggtggtgggcccaaaagtgcggaaatgcctggccaacgggtcatggaccgatatggacaccccaagcaggtgcgtaaataggaccccccattcagagagacgcgctgtgtacatcggcgcactcttccccatgagcgggggatggcccggaggacaggcctgccaacccgctgtagaaatggctttagaagatgttaactcccgcagagatattctgcctgattatgagctcaagctgattcatcacgacagtaaatgtgatccaggccaggccactaagtatttatacgagcttctgtacaatgatccaatcaagattatcctcatgcccggttgcagtagtgtcagtactctggtggcggaggccgcaagaatgtggaacctgattgtcctttcttacggctcaagtagtcccgctctctctaaccggcagagattccccacattctttagaacccatccttccgccactctgcacaatccaaccagagtgaaactatttgagaagtgggggtggaagaaaattgcaacaattcagcagactacagaggtctttaccagtactctcgacgacttggaggaacgagtcaaagaggccggtatcgaaataacattccggcaatccttcttcagtgatcctgctgtccccgttaagaatctcaagaggcaggatgctcggattatcgtcggacttttctacgaaactgaagcgcgtaaggtgttctgcgaggtgtataaagaacggctgttcggcaagaagtacgtttggtttctgatcggttggtatgcggataactggttcaaaatctatgaccctagcattaattgcaccgtggatgagatgacagaagcagtggagggacacatcacaacggaaatcgtcatgctgaaccccgctaataccaggagtattagcaacatgactagccaggaattcgtcgagaagctcacaaagcgtctcaagcggcatcccgaagaaacggggggattccaggaggcacccctggcttacgacgccatttgggcgctggcgctggccctgaacaaaaccagtggaggcggaggcaggagtggtgtacgcctggaggattttaactataacaatcagaccattactgatcagatttacagggccatgaactcatcttcttttgaaggtgtgagtggacacgtcgtgttcgatgccagcggttcgcggatggcctggaccctcatcgagcaactgcagggtgggtcctacaaaaagattggctattacgactccaccaaggatgacctcagttggagcaagacagataaatggataggcggaagtcctcccgcagaccagacactggtgattaaaaccttcagattccttagccagaagctttttatctccgtgagtgtgctgagcagcctcggcattgttctggctgttgtttgtctctcctttaacatatacaacagccacgttagatatattcaaaactcacaacccaatctgaacaacttgacggcggtaggctgctccctcgcactggccgctgtctttcccctgggcctagatggctaccatattggacgcaatcagtttcctttcgtgtgccaggcacgtctgtggctgctaggccttgggttcagtctgggttatggttccatgttcactaagatttggtgggttcacacggtgtttactaaaaaagaagagaagaaagagtggcgaaagaccctggaaccctggaagctatacgccacagtgggtcttctggtagggatggatgtgctgactctggctatttggcagatcgtggacccgcttcacaggaccatcgagacgtttgcaaaagaagagccaaaagaggacattgatgtgagtattctgcctcaactggaacattgttcatcacgcaaaatgaacacatggctgggcatattttacggatataaggggctgctgctgctgttgggaatcttcctggcttatgagacaaagtccgtctctaccgaaaaaatcaatgatcaccgcgctgtggggatggccatttacaacgtggctgtgctgtgtctaattactgcacccgtaacaatgattctctcttctcagcaagatgctgcattcgcttttgcctcgctggcgatcgtgttctcatcttacattaccctggtggtgctgtttgtgccaaagatgaggcgcctcataacccgaggggagtggcagagcgaggcacaggacacaatgaagacgggctcaagcaccaacaataatgaagaggagaagtcgagactcctggagaaggaaaacagggagctagaaaagatcatcgcagaaaaagaagaacgtgtctctgagctacggcaccaactgcagtctcgacagcagttacgctctaggagacacccgcctactccacctgagccctccgggggtctaccgaggggaccgccagagcctcccgaccgactgtcctgtgacggatctcgcgtccacctgctctacaagtag

SEQ ID NO: 11375 - DNA, 537 bp, synthetic construct
  misc_feature 1..537: note = source = /note="Description of Artificial Sequence: Synthetic coding sequence"
  source 1..537: mol_type = other DNA
atggagaccttcccactactgctcttgtccttaggactcgtgctggccgaggcctcagagagtacaatgaagattatcaaggaagagttcactgatgaagaaatgcagtatgatatggcaaagtcgggccaggaaaaacaaacgattgagattttgatgaaccctattctgctggttaagaacactagtctgtccatgtctaaagatgatatgtcatcaacgcttctaacattccgttcattgcattacaacgatcccaagggcaacagcagcggtaatgacaaagaatgctgtaatgatatgaccgtgtggaggaaagtgagcgaggccaacggaagttgtaaatggagcaacaattttatccgctcttctactgaggtgatgagacgggtccaccgggctccgagctgtaaattcgtgcaaaatccagggatttcttgttgtgaaagtctagaattggagaataccgtctgccaattcactacaggaaagcagtttcctcgatgccaatatcatagcgtcacatcgttggagtag

SEQ ID NO: 11376 - DNA, 2184 bp, synthetic construct
  misc_feature 1..2184: note = source = /note="Description of Artificial Sequence: Synthetic coding sequence"
  source 1..2184: mol_type = other DNA
atgatactgagtctactctttagcctcggaggtcctctcggctggggccttcttggggcatgggcccaggcctcttctacgagtctcagcgatctccagtcttcacgaacacctggcgtttggaaagcagaggctgaagacactgggaaagatccagtgggtcggaactggtgcccataccccatgagtaagttagtgaccctgctggccctgtgtaagaccgaaaagtttctcatacattcacagcagccctgccctcagggtgcccctgactgtcagaaggtcaaggtgatgtacaggatggcgcacaaacctgtttaccaggtgaaacagaaagtcttgacctccttagcatggcgatgttgtccagggtacacaggcccaaactgcgagcatcatggtccgatggcagtttggtgttggccagaacccgattctctgcaggcaagactggggcagctccagcgaaatctcagcgaactgcacatgacaactgcacggcgagaggaggagctccagtataccctggaagacatgcgggctacccttacccggcatgtggatgaaataaaggagctgtactctgagtccgatgagacctttgaccaaatctccaaggtcgagcgacaggtggaagagcttcaggtcaaccacaccgcactgcgcgaactgagagtcatcctgatggagaagagcctgataatggaggagaacaaggaggaagtcgaacggcagctgctggagctcaacctgaccctccagcatcttcagggcggacatgcagacttaataaagtatgtgaaggactgtaactgccagaagctctatttggatctcgatgtcatccgtgaaggccagagagatgccaccagagcattggaggaaactcaggtgtctcttgatgaacgacggcagctagatggttcctctctgcaggctctccaaaatgcagttgacgccgtcagcttagctgttgatgctcataaagccgagggagaaagggctcgcgctgcaacttctcgcctcagatcccaagtgcaggccttggatgacgaggtgggcgcacttaaagccgctgcagcagaggccagacacgaggttcggcagctgcattctgctttcgcggctctgctggaggatgccctccgccatgaggccgtccttgccgctttattcggtgaggaggtactggaagaaatgtccgagcagacacccggtccacttcccctcagttatgaacaaatccgagtggccttgcaagacgcagcatcagggttacaggagcaggctctcggctgggatgagttggccgctcgtgtgaccgccctcgaacaggcgtctgaaccaccacggcctgccgagcacctggagccttcccacgacgcaggtagggaagaggccgcaactaccgctcttgctggtctggcacgtgaattacagagcttgtcaaacgacgtgaaaaacgtgggcagatgctgcgaagcagaggcaggcgcaggtgccgcatccctgaacgcaagtctccacggtctgcacaatgccctattcgcaacccagcgttcgttagagcagcaccaacgactgtttcatagtctcttcggaaacttccagggcctcatggaagctaacgttagtctcgatctcggcaaactgcagactatgctgtccaggaaaggcaagaaacagcagaaagatctggaagctcctcgcaagcgagataaaaaagaggcagagccactggtggacataagagtgacggggccagtgcccggtgctttaggcgctgctttgtgggaggcaggatccccagtggcattttacgcaagcttttctgagggcacagctgctttacagaccgtgaagttcaatacaacatacatcaacattgggtcttcctacttcccagagcatggatattttagggcccctgagagaggggtctacctttttgcagtcagtgtggaattcgggcctggtcccggaaccggccagttggtcttcggaggtcatcacaggacgccagtgtgtactactggacaggggtccggctctacagccacggtattcgccatggccgaactgcagaaaggcgagcgagtgtggttcgagttaacacaagggtcaattacgaagcggagtctttcagggactgcttttggaggcttcttaatgtttaaaacctag

SEQ ID NO: 11377 - DNA, 828 bp, synthetic construct
  misc_feature 1..828: note = source = /note="Description of Artificial Sequence: Synthetic coding sequence"
  source 1..828: mol_type = other DNA
atgggaagcgctccatgggcaccggtcctgctgctcgccctcggactgagaggcctgcaggctggtggcgagtggcgtcggcctccagcccattcacccgttcccgcaccaccccttcgctttgcttcaccacactcccctcagggcccaggtccgaggctccccggtgcattgctgccagccgctagtgggcctctacaattgagggcactgcggcagcaggatctgccgtcagcccttcctggcgttggccaggttttaggtcctggtcggggtgctcaccttctgttgcattgggagcggggtcggagggtcgggctgagacaacagttgggcctccgcagaggagcaggaggcagagctggtggctctaccgggttaagaggggctcctttgttaagggaggtggccgctgtaaggtgcgcagtgcacgccgctagggcccatggcgcagccgacggtggggctggaccaggacggttacgcagagctgccccaagagcaaccactagaccccgaggccctggttgtcccagacacaggttgcgttggaaactttggggtgacgcgcagtgtctcccggaagatgaggtcagccccccaggtggtggcggagctggcggtcagcgcgctcggtcctcctgcggcagacccaggcgccttcagcccgttttacctggccgtcatggcggaagtctgcggcatggcccactgggagtgcgccacctacctgctgccgtaaggcgcgagggcccagaccctgcactgcacgttagacccgaatgcttgcacagagccggacacgacggactgcctctgccacattag

SEQ ID NO: 11378 - DNA, 351 bp, synthetic construct
  misc_feature 1..351: note = source = /note="Description of Artificial Sequence: Synthetic coding sequence"
  source 1..351: mol_type = other DNA
atggccgctggctctgcccctatgcaacttcatttgcgggctacaattagaatgaaagacgggctgtgcgtaccacgtaagtggatctaccatcttaccgagggaagcacagacctaagaactgaaggacgtccagacatgaaaacagagctgttcagttcctcctgtcccggaggcataatgctaaatgagacaggccaaggctaccagcgctttcttctctataatcgctctccacaccccccagaaaagtgcgtggaagaatttaaatcattgacctcgtgtctcgatagcaaggcattcctgcttaccccacggaatcaggaagcatgtgagctatccaataattag

SEQ ID NO: 11379 - DNA, 522 bp, synthetic construct
  misc_feature 1..522: note = source = /note="Description of Artificial Sequence: Synthetic coding sequence"
  source 1..522: mol_type = other DNA
atgcattggaagatgctgctcctgctactcctctactacaacgcagaggcttcaatgtgccaccggtggagtcgtgcagtgctctttcctgccgcacaccgaccaaagcgtagctccagtctcccactcaatccggtacttcagacctctctggaggaagtggaattgttatacgaattcttactggccgagctggaaatctctccggacctccagatttcaatcaaggacgaggagctagcttccttacgcaaagcatccgatttccgaactgtttgtaataatgtaatccccaagagtatccccgacattaggaggttgtccgctagcctgagctctcatccaggaatactgaaaaaggaggattttgagcgtacagtgcttaccctcgcttacaccgcttacagaactgctctgtcacatggccaccagaaggacatttgggcccagagtttagtgagcctttttcaggcattgcggcatgatctgatgcgaagttctcagccaggcgtccctccctag

SEQ ID NO: 11380 - DNA, 1482 bp, synthetic construct
  misc_feature 1..1482: note = source = /note="Description of Artificial Sequence: Synthetic coding sequence"
  source 1..1482: mol_type = other DNA
tctgaggccgtctacttaaatgattctacatatgacggtcatacggttggagggctccagtacggtggcttaggccagctggctgacggagttgtgggcctggacgactttcggaagagccaggaactgagagtgtggcctggctatgactatgtgggctggtccaaccactctttttctagcgggtacgtagagatggagttcgagtttgaccgactgagagcctttcaggccatgcaagtccactgtaataacatgcatacactgggagcgcgactgccagggggtgttgaatgcagatttcgccgagggccagctatggcatgggaaggggagcccatgaggcataatctgggcggaaatctgggagatcctagagccagggccgtctccgtgccccttggcggtcgggtggctcggttcctacaatgtagatttcttttcgctggtccgtggctgttgttctccgaaatttcctttatctccgacgtggttaataattcttctccagcgttggggggtaccttccctccggcaccctggtggcctcctggtcccccaccaaccaacttttcctctttagaacttgagccccgtggacagcagcctgtggctaaggccgaaggctcccctacggctatactcatcggctgccttgtcgccattattttgctgttgcttttgatcatagcccttatgctctggcggctgcattggcgccgtctgctaagtaaagtgctggaaagccacccccgaaccagaagccctgggctcgtcggcatcaggccaaccttgcttcccgtgagcccaatggcactcagatgctgctctcccatccagcccactgcgtcattctggcccttgacgcccgtgcccctggaagcgcgagcccctcctcacccacccggtccaaatcctcccacccccagaggagttactggcggaaatacgtacgcggtccccgctctaccgcctggggctgtgggagacggcccacctcgggtggatttccctcgctctaggctcaggtttaaggagaagctgggcgaaggacagtttggcgaagttcatttatgcgaggttgactctcctcaggacctagtctctttagattttccactgaatgtgagaaaagggcatcccctcctggttgccgtgaagatcctccgacccgatgccactaaaaatgcaagaaacgacttcctgaaagaggtcaagatcatgtccagattgaaggacccaaacatcatccggctgctgggagtgtgcgtgcaggatgacccgctttgcatgattacggattatatggaaaatggagatctcaaccagttcctttctgcacatcaactggaggataaggctgcagagggagccccaggcgacgggcaggcagctcaaggcccaaccatcagttacccaatgttgttgcacgtagccgcacagatagcatctgggatgcgataccttgcaaccctgaactag

SEQ ID NO: 11381 - DNA, 639 bp, synthetic construct
  misc_feature 1..639: note = source = /note="Description of Artificial Sequence: Synthetic coding sequence"
  source 1..639: mol_type = other DNA
atgggcctgcaccttcgcccttacagagtagggctcttgccagatggcctgctattccttcttctcttacttatgctgctggccgaccccgcacttcctgcaggtaggcaccctcccgtggtgttgggagataataaccggatcccagttattggacctcttaagatcagagaacagcaaagaagcgcagtgtcaacatcctggttgcttccgtataattatacatggtcacccgagaaagtcttcgtccagactccaactatcaattataccctgcgtgattatcgcaagttctttcaggacatcggattcgaggatggatggctcatgcgtcaggacacagagggactggtcgaggcaactatgcctcctggtgtccagctgcactgtctctatgggaccggggtgccgaccccggactccttctattatgaatcttttcctgaccgtgacccgaagatctgctttggtgacggcgatggaacagtaaaccttaaatccgcattacaatgccaggcctggcagagccggcaggaacaccaggtgctactgcaggagttacctggctctgagcatatcgagatgctcgccaatgccacaactttggcctatctaaaacgagtgcttctgggcccttag

SEQ ID NO: 11382 - DNA, 654 bp, synthetic construct
  misc_feature 1..654: note = source = /note="Description of Artificial Sequence: Synthetic coding sequence"
  source 1..654: mol_type = other DNA
atgagcgacctgctgctgctgggcttgattgggggactgactcttctcctgcttctcacacttctcgctttcgcaggatatagcgggctgctggctggggtggaggtcagcgccggttcccctcctatccgcaacgttactgtggcctacaaattccacatggggttatatggcgagactggcaggctcttcaccgaaagctgtagcatttctcccaaattacgatccatcgccgtatattacgacaacccacacatggtaccgccagacaaatgcaggtgtgctgtcggcagcatactttctgagggggaggaatctccatcccctgaattgattgacttatatcaaaaattcggttttaaggtgttttccttccccgcaccttcacacgttgtaactgccacattcccttacaccaccattttaagtatttggctagcgaccagacgagtgcaccctgccctcgatacctacatcaaagaaagaaagctgtgtgcctatcccagactcgagatctaccaggaagaccagatccacttcatgtgccctctggcgaggcagggcgacttttacgtgcctgaaatgaaggagacagaatggaaatggagagggctggtagaggctatagacactcaggtagatggcacagggtag

SEQ ID NO: 11383 - DNA, 345 bp, synthetic construct
  misc_feature 1..345: note = source = /note="Description of Artificial Sequence: Synthetic coding sequence"
  source 1..345: mol_type = other DNA
atgaaaacgtttacctggactctaggagtgctgttctttctgctcgtggataccgggcactgtcgcggtggccaatttaaaatcaagaagatcaatcagcgccgatacccccgagctactgatggaaaggaggaggctaaaaaatgcgcctacacgttcctcgtgcctgaacagaggatcaccggcccaatatgcgttaatacaaaaggtcaggacgcatccacaataaaggacatgattactagaatggatctcgaaaacctgaaagacgtactaagtagacaaaaacgcgagatagatgtccttcagctggtggttgacgtagatggcaacatcgtgaactag

SEQ ID NO: 11384 - DNA, 870 bp, synthetic construct
  misc_feature 1..870: note = source = /note="Description of Artificial Sequence: Synthetic coding sequence"
  source 1..870: mol_type = other DNA
atgtttgttttgctgtatgtgacatcattcgctatctgtgcttccgggcagccacgcggaaaccagctcaagggcgagaactactctccgagatacatttgtagcattcctggtttgccaggaccaccagggcctccaggagccaatggaagtcctggacctcatggtcggattggactgcccggacgggacggcagagacgggagaaagggggagaaaggtgagaaaggaactgcgggattacgcggaaagacgggcccacttggcttggctggcgaaaaaggtgaccagggcgagacaggaaaaaagggcccaattggaccggaaggagagaaaggcgaagtgggcccaatcgggcctcccggaccaaaaggcgatcgcggtgaacagggcgaccctggcctacctggtgtgtgccggtgtggcagtatagtgctgaagtccgccttttccgtggggattactacctcttacccggaggagcggctccccataatcttcaataaagtcctgttcaacgagggagaacactacaatcctgcaacgggcaagttcatttgcgcgttccctggcatatattacttcagctacgatatcacattggccaacaagcacctggctatcggcctcgtgcacaacgggcagtaccggattaagacttttgacgcaaataccggaaaccatgatgttgccagtggctcgaccgtcatatatcttcagcccgaggacgaggtgtggctggagatcttttttacagatcagaatgggctcttctccgatcctggatgggccgacagcctcttctctgggttcctactctatgtggatactgactatctagattctatctctgaagatgacgagctgtag

SEQ ID NO: 11385 - DNA, 1002 bp, synthetic construct
  misc_feature 1..1002: note = source = /note="Description of Artificial Sequence: Synthetic coding sequence"
  source 1..1002: mol_type = other DNA
atggtgtccaaaagccgttggaaactgctcgccatgctcgctctagtgttagtggtgatggtctggtacagcattagccgcgaggacagatatattgagctgttctattttccaattccggaaaagaaggagccttgccttcaaggagaagcagaaagtaaggcaagtaagctgtttggtaactattctcgggaccaacccatctttctgaggctagaagattacttttgggtgaagaccccctccgcttacgagttaccgtatggaacaaaggggagcgaggacctgctgctccgtgtcctggccattacctcttcatctattcccaagaacattcaatctcttcgctgtcggaggtgcgtggtagtgggcaatgggcaccgtctaagaaacagcagtctaggggatgcgatcaacaaatacgatgtggtgatcagactcaataatgccccagttgctggttacgaaggcgatgttggctccaagacgacaatgcgcctcttttacccagagagtgcacactttgaccccaaggttgagaacaaccccgacacactacttgtgctcgtcgccttcaaagcaatggactttcactggattgagacaatcctgtccgacaagaagcgagtgcggaaaggtttctggaaacagcctcctctgatctgggacgtgaatcctaaacaaatcagaatcctgaacccatttttcatggagatcgccgctgataaactgctatccctaccaatgcagcagccaagaaaaattaaacaaaaaccgactacgggtctccttgctattacccttgctttgcacctctgcgacttagttcatattgcaggattcggctaccccgacgcctacaacaagaaacagacgattcactactacgaacagataacactgaaaagtatggccggatccgggcataatgtctcacaggaggccctcgctataaaaaggatgctcgaaatgggcgctatcaagaacctgactagtttctag

SEQ ID NO: 11386 - DNA, 531 bp, synthetic construct
  misc_feature 1..531: note = source = /note="Description of Artificial Sequence: Synthetic coding sequence"
  source 1..531: mol_type = other DNA
atgagactactgattctaacctgtctcgtggccgtagcactcgcaaggccgaagttaccactgcggtacccagaaaggttgcagaatccctctgagtcctcggagcccattccacttgagagccgcgaagagtatatgaatggcatgaacagacggaacatccttcgggagaagcagactgatgaaatcaaggatacaagaaatgagtccacgcaaaactgtgtcgtggctgaacccgaaaagatggagtcttcaatttcctcgagctcagaggagcagttctgtcgccttaatgagtacaaccagctgcagctgcaagccgcacatgcgcaggaacaaataaggagaatgaatgagaattcccatgtgcaggtgccatttcaacagctgaaccaattagccgcttacccttatgctgtgtggtactacccccagataatgcagtacgttccttttccccctttttccgacataagtaatcccaccgcacacgagaattatgaaaagaataatgtgatgctgcagtggtag

SEQ ID NO: 11387 - DNA, 279 bp, synthetic construct
  misc_feature 1..279: note = source = /note="Description of Artificial Sequence: Synthetic coding sequence"
  source 1..279: mol_type = other DNA
atgaagttatgcgttaccgtgttaagcctgctggtgctggtggcagccttttgcagtctggccctgtccgcgcctatgggatcagacccacctacagcctgctgctttagttacactgccagaaagctgccacgcaacttcgtggtggattactatgaaacttcaagtttgtgctcccagcctgccgtagtgttccagaccaagcgaggcaagcaggtctgcgctgatcctagcgagagttgggtgcaggagtatgtgtacgacctggaactcaattag

SEQ ID NO: 11388 - DNA, 1656 bp, synthetic construct
  misc_feature 1..1656: note = source = /note="Description of Artificial Sequence: Synthetic coding sequence"
  source 1..1656: mol_type = other DNA
atgacgtggaggatggggcctagattcacaatgctgctggccatgtggctagtctgcggatctgaaccccacccacacgccaccatccggggttcccatggcggacgcaaagttccactggtatcacccgatagctccaggccagccaggtttctgagacatacaggcagatcaaggggaatcgagcgctcaaccttggaggagccaaacctgcaaccactgcagagaagacggtctgtcccagtgctgaggttagccaggccgtctagattcagagacaatcgaatggatagacgagagcacggtcatagggaccctaacgtcgtgcccggtcctccaaagcctgccaaagagaaacctcccaagaagaaagcccaggacaagattctgagtaatgagtatgaggaaaagtacgatttgtctaggcctaccgcctcacagcttgaggacgagctacaagtggggaacgttcccctaaaaaaagccaaggagtcaaagaagcacgagaaactcgagaagccagagaaagagaagaaaaagaagatgaaaaacgaaaacgcagacaaactacttaagtccgagaaacaaatgaagaaatctgaaaaaaagtccaagcaggagaaagagaagagcaaaaagaaaaaggggggtaagacagagcaagacgggtaccaaaagcctaccaataaacatttcactcagtctcctaagaagagtgttgcagacctcctgggaagttttgaagggaagcggaggctactcctgatcactgcgccaaaagcggagaacaacatgtacgtgcagcagcgcgacgagtaccttgagagcttctgcaagatggctactcggaaaatctccgtgatcaccatcttcggtccagtcaacaacagtacgatgaagattgaccattttcaacttgataatgaaaagcccatgcgagtggtggatgacgaggacctggtggatcaaagactaatcagtgaactccggaaggagtatggaatgacttacaacgacttctttatggtgctcaccgatgtggaccttcgcgtaaaacagtattatgaggtgcccatcacgatgaaatccgtgtttgacctcatcgacacattccagtccaggattaaggacatggagaaacagaaaaaagagggcattgtctgtaaggaggacaagaagcagtcactcgaaaatttcctatcaaggttccgctggaggagacggcttcttgtgatatcggcccctaacgatgaagattgggcctattcccagcagttatccgcgctgtctggacaagcatgtaatttcgggagctctgtggtggaaagggaagatgtgcccgctcacctggttaaagacataagaaattatttccaggttagccctgagtacttttccatgttgttggtgggaaaggacggaaatgttaagagttggtaccccagtcccatgtggagcatggtgattgtgtatgatttgattgactctatgcagttgcgcagacaggagatggcaatacagcagagtctgggtatgagatgtcctgaggacgagtacgcaggctatgggtaccactcatatcatcagggataccaggacggttaccaagatgattatcggcatcacgagagttatcatcatggctatccatactag

SEQ ID NO: 11389 - DNA, 1245 bp, synthetic construct
  misc_feature 1..1245: note = source = /note="Description of Artificial Sequence: Synthetic coding sequence"
  source 1..1245: mol_type = other DNA
atgggggtgagcaaactagatatcctttaccggagactgctgctgaccaaactgtttattcgcggttgggggagacccgaagacctgaagcgcctgttcgagttcagaaagatgatcggcaatagggagcggtgtcagaatctggtctcctccgattatcccgtccacattgacaaaattgaggagcagtccgattgcaaaatactagacggccatttcgtgtcaccgatggctcattacgttcctgatatcatgccaattgagtctgtcattgccagattccagtttatcgtccctaaagagtggaacagtaagtatcggcctgtgtgcatccacctggcaggcacaggtgatcatcactactggagaagacgaactctgatggcccgaccgatgattaaggaggccagaatggccagcctgctgctcgaaaatccttattatggatgtagaaagcccaaggaccaggtccggtccagcctcaagaatgtatctgatctttttgtgatgggaggggcattagtgttggagtcagctgcacttctgcactggctggagcgggagggttatgggccacttggaatgaccgggatttcaatggggggacacatggccagcctggcggttagtaattggcccaagcctatgcccttaataccatgtttgagttggagcaccgctagtggggtgttcacaacaaccgattcatttaagatggggcaggaatttgtgaagcacttcacctctagtgctgataaactaacaaacctgaatctggtcagtagaacactaaatctggacatatccaatcaagtggtgagtcagaagcccgctgattgtcacaacagctctaagaccagcgtgagcgcaacctccgaggggttgcttcttcaggatacgagtaagatgaaaaggttcaaccaaacgctatctactaataagtctggctacacctccaggaatccccagagttaccacctactgtcaaaagagcagtcgaggaatagtcttcgcaaagaatccttgatttttatgaaaggtgttatggacgagtgcacccacgtcgccaatttttcagtgccggtggacccatccctgattattgtcgtgcaggcaaaagaagacgcgtacataccacgtaccggagtcagatcactccaggagatttggccagggtgtgagattagatacttggaagggggacatatcagtgcctatctgtttaaacagggtctttttcgttag

SEQ ID NO: 11390 - DNA, 300 bp, synthetic construct
  misc_feature 1..300: note = source = /note="Description of Artificial Sequence: Synthetic coding sequence"
  source 1..300: mol_type = other DNA
atggagcggatatccgccttcttttcttcaatctgggacaccatccttacaaaacaccaggaaggaatatacaatactatatgcctcggcgttctgttagggctgcctcttctcgtaattattaccctactgtttatctgttgccactgctgctggtcccctccaggcaaaagaggccagcagccagaaaagaacaagaagaagaagaagaagaagaagaagaaagacgaggaggacttatggatctctgcacagccaaaactgctccagatggagaaacgcccatcactccctgtctag

SEQ ID NO: 11391 - DNA, 912 bp, synthetic construct
  misc_feature 1..912: note = source = /note="Description of Artificial Sequence: Synthetic coding sequence"
  source 1..912: mol_type = other DNA
atgagtgagcctcagccagacctggagccgcctcagcacgggctttacatgctgttcctgctcgtgcttgtctttttcctaatgggcctggtaggcttcatgatctgccacgtcttaaaaaagaagggctacaggtgcagaacttcacgtgggagcgagcctgatgatgcccagcttcagccgccagaggatgacgatatgaacgaagacaccgttgagcgcatcgttcgttgcattatccagaacgaggcaaatgctgaagccctgaaagagatgctaggcgactctgagggagagggcacagtgcagctgagctcagtggacgctacgtcgtcattgcaagacggcgctcctagccaccatcacactgttcatttaggcagcgccgcaccctgcctgcactgcagccgttcgaagagacccccactggtgcgccaaggcagaagtaaagagggaaagagccgccctaggacaggcgagacaacagttttctccgtggggagattccgagtgacacatatcgaaaagcgttacggcctacacgagcatcgcgatggcagtcctacagaccgctcgtggggttccggcggagggcaagaccccggagggggacagggatcaggtggcggacagcccaaggccggaatgccagctatggaacgcctgccgccagagagaccacaacctcaggttctggcttctccccctgtgcagaacggtggcttacgggacagcagcctaacgccacgcgctcttgaaggcaatccaagagccagtgcagaacccactctgcgcgcaggaggcagagggccaagcccaggactgcctactcaggaagcaaacggccagccttccaagcccgacacttctgatcaccaggtgtccctcccccagggcgctggtagcatgtag

SEQ ID NO: 11392 - DNA, 444 bp, synthetic construct
  misc_feature 1..444: note = source = /note="Description of Artificial Sequence: Synthetic coding sequence"
  source 1..444: mol_type = other DNA
atgggcccagaagccttgagctcccttctgctgctgctgcttgtcgcctctggggatgccgacatgaaggggcatttcgatcccgcaaagtgcagatacgcgttgggcatgcaagacagaacgatccctgattccgatatttcagccagctcctcttggtcagatagtacagcggcacgccactcccggttggagagcagcgacggtgacggtgcatggtgccccgctggaagtgtattcccaaaagaagaagagtatctgcaagtggatctccagcgacttcacctagttgcattagtgggaacccagggacgacatgctggagggctagggaaggagttcagccgttcctataggctcagatactccagggatggtaggagatggatgggctggaaagatcggtggggacaggaggtaatcagcggaaatgaggacccctag

SEQ ID NO: 11393 - DNA, 1173 bp, synthetic construct
  misc_feature 1..1173: note = source = /note="Description of Artificial Sequence: Synthetic coding sequence"
  source 1..1173: mol_type = other DNA
atgggagctacaactatggaccagaagtctttatgggcaggagtcgtcgtgttgctgttattgcagggtggtagcgcctacaaactggtgtgttactttacgaactggagccaagatcgtcaagagccagggaagtttactccggagaacatagacccattcttatgttcacaccttatctacagcttcgcctcaatcgaaaataacaaggtaatcatcaaagacaagagcgaagtgatgctgtaccagactattaacagcctgaaaacgaagaaccctaagctgaagatcctactgagcataggcggttacctgttcgggtctaagggcttccatccgatggtagactcttccaccagcagattggagttcataaactccatcattttgtttctccggaaccataatttcgacggtctggacgtgtcctggatttatcctgaccaaaaggagaacacacattttaccgtccttattcacgaactggccgaggccttccagaaagatttcaccaagagtaccaaagagagattgctgctgacagctggggtctccgctggacgccagatgatcgataactcctaccaggtcgaaaagctcgcaaaggatctggatttcataaatctcctgtcttttgatttccacggcagttgggagaagccattaatcactggccataactcgcctcttagcaaaggttggcaagaccgtggcccatcctcttactataacgtggaatacgctgtgggttactggatacacaagggcatgccaagtgagaaggtggtgatgggaattccaacctatggacacagcttcaccctagcgtctgccgaaactaccgtgggcgctcccgcatctggccctggcgctgctggcccaattacggagagctcgggctttctagcctattacgaaatttgccagtttcttaaaggggcaaaaatcaccaggttgcaagaccagcaagtgccctatgctgtgaaaggaaatcaatgggtgggctacgatgatgttaagtccatggaaactaaagttcagtttttaaagaatctgaacctgggcggagcgatgatatggtctatcgacatggatgatttcactgggaaatcctgcaatcagggtccttaccccctggtacaggccgtaaagcgatctctcgggtctctgtag

SEQ ID NO: 11394 - DNA, 297 bp, synthetic construct
  misc_feature 1..297: note = source = /note="Description of Artificial Sequence: Synthetic coding sequence"
  source 1..297: mol_type = other DNA
atgaataaacattttctctttttgtttcttctttattgtctaatcgtagctgttactagtttgcagtgcattacgtgccacctgcgaacccgcactgatcgctgccgccgaggcttcggagtctgtacagcgcagaagggtgaggcctgcatgctcctgaggatataccaaagaaataccctccagatctcctatatggtttgccaaaaattttgcagggacatgacgtttgatttacgtaacaggacatacgtccatacatgttgtaactataactattgtaacttcaagctttag

SEQ ID NO: 11395 - DNA, 600 bp, synthetic construct
  misc_feature 1..600: note = source = /note="Description of Artificial Sequence: Synthetic coding sequence"
  source 1..600: mol_type = other DNA
atggcgtggggcggagttcatacctgctgttttcatctctgctgttgttgtagttggccacagggagctgtgccagaagagctgcacaagcatcctggccagaccttgcttctccagtgtcagtactcacctaaacggggaccctaccagcccaaaagttggtgtcagcagacatctccgtccagatgcacactactcgttacctcaagtaagccctggacagcagtgcagaagagccattacaccatttgggacaagcccaacgctggctttttcaacattactatgatccagttgacgcagaatgacagcggtttttactggtgtggcatttataatgctagcgagaatatcattactgtgctcagaaatattagcctcgtagtctcccccgctccaactacatcgccaatgtggacactgccctggctgccgacaagtaccgcatgggagcctcaaattcaggaaatcaagttccgcgcaccaaccgactccaccctctggaagtccagggcacctgcttgtcttgggagtggcggtcctcggttcctggtcttagtcctctgcggtcttctgctggcaaagggactgatgttgtag

SEQ ID NO: 11396 - DNA, 2025 bp, synthetic construct
  misc_feature 1..2025: note = source = /note="Description of Artificial Sequence: Synthetic coding sequence"
  source 1..2025: mol_type = other DNA
atgaccactgacgatactgaggtgcctgccatgaccttggcaccgggtcatgcagcactggaaacccagacgctgtctgctgagacatcctcacgcgcttccaccccggcagggcctatacccgaagccgaaactagaggggctaagcgaatctccccagccagagagacccgctcatttactaagacttcccccaacttcatggtgctcatagcaacatccgtagagacatccgcagcatccggatcccctgaaggagctggaatgaccacagtgcagaccatcacaggcagcgatccacgggaagctatcttcgataccctttgcactgacgacagcagcgaagaagcgaagaccctgaccatggacatcctcaccctggctcacacatccacggaagccaagggtttgtcttctgaatcctcggcctcttctgactcaccccaccctgtcataactccaagccgcgcttcagagtctagcgcgtcctctgatggcccacatcccgtcattactccgtcacgggcaagtgaaagtagcgcctcgtccgacggcccacaccctgtgatcactccatctcgggcaagcgaatcaagcgcctctagtgacggccctcatccggtcattactccttcgagagcaagcgaaagctccgctagttctgatgggcctcacccagtcatcacaccttcccgcgcttcagaatcttctgctagcagcgatggaccgcaccctgtgattactcctagcagggctagcgagtcttcagcaagctccgacggcccacatccagtgattaccccctcccgtgcgagcgagagctccgcctcctctgatgggccacatcctgttatcaccccttcccgcgcaagtgaatcctcagcatcctcagacggccctcatcccgtgattactccatctcgagcgagcgagagctcagcaagttctgacggccttcaccctgtgatcacccccagcagggctagcgagtcctccgcctccagcgacgggccacacccggttatcacaccatcgcgcgcttctgaaagctcagcaagcagtgacggcccacacccagtgataacccccagttggtctccaggttccgacgtcaccctgctcgccgaggctctggtcaccgtgactaacatcgaagttatcaattgcagtatcacagaaattgagactaccacctcaagcattcccggagcttctgacacagacctgatacccacagaaggggtgaaggcatcttcaacttccgatccgccagcgctgcctgatagcactgaagccaagccccacattacggaggtgactgcctcagccgagaccctgagtaccgcaggcaccactgagagcgctgcaccagacgctacagtgggcacgcctctacccactaatagtgccacggaaagggaagtaaccgctcccggagccaccactctgtccggagccctcgtgaccgtgtccaggaacccccttgaggagacctcagccttgagcgtcgagacgccttcctacgtcaaggtttccggtgctgctcccgtgtcaatcgaggcaggttccgctgtgggcaagaccaccagcttcgccggtagcagcgcatcatcttactctccctcggaagctgctctgaaaaacttcacaccgagtgaaaccccaacaatggatattgccactaagggaccattcccaacctcgcgggaccccctgcccagcgtgccaccgacaaccaccaactcctcacgtgggacaaactcgacactggctaagattactacatcggccaagactacgatgaaaccaccaacggccaccccgaccacagctcgcacacgaccaactacagatgtctccgccggagaaaacgggggttttctgttgcttaggttgagcgtcgcaagcccagaagacctgaccgatcctagggtggcggagaggttgatgcagcagttgcaccgggagttacacgcgcacgcaccccatttccaggtttccttacttcgcgtacgcagaggatag

SEQ ID NO: 11397 - DNA, 738 bp, synthetic construct
  misc_feature 1..738: note = source = /note="Description of Artificial Sequence: Synthetic coding sequence"
  source 1..738: mol_type = other DNA
atgcaggccgcttggctgctcggagccttagtggtgccacaactcctcggattcggtcatggggctcgtggcgcagaacgtgagtgggagggagggtggggcggagcccaggaggaggagcgagaaagagaggctctgatgctcaagcatctccaggaggcactgggactccccgctgggaggggcgacgaaaatcccgctgggaccgtggaaggcaaggaggactgggagatggaggaagaccagggagaagaagaagaagaggaggctactccaacccctagcagcggcccaagcccaagcccaacccccgaggacatagtgacctacatcctcggacgattggcgggactcgatgccggacttcatcagctgcacgtccggctgcatgccctggatacacgtgtggtggaactcacgcaaggcttaaggcagctcagaaacgctgccggagacacccgtgacgctgtgcaagcgttacaggaagcacaaggcagggcagagagggaacacgggcgacttgagggatgtcttaagggactgcggctcgggcacaaatgttttctgctgagtcgagatttcgaagctcagcccagcgcgtcaccccatccgctcagccctgatcagcccaatgggggaaccctggaaaattgcgtggctcaggcaagcgacgacggatcctggtgggaccatgattgtcaacgccgactgtactatgtctgcgaattccctttctag

SEQ ID NO: 11398 - DNA, 279 bp, synthetic construct
  misc_feature 1..279: note = source = /note="Description of Artificial Sequence: Synthetic coding sequence"
  source 1..279: mol_type = other DNA
atgatctggcggtcacgtgctggcgcagaactgttttctctgatggctctgtgggagtggattgccctgtcactgcattgctgggtccttgcagtggcagccgtgtccgaccaacacgctacttcccctttcgattggctactgagcgacaaagggccattccatcggtctcaggaatataccgactttgtggatcggtccaggcagggattttctacacgctacaagatttaccgcaacatgggtcacatcagttgttatttactcctgtgggagtag

SEQ ID NO: 11399 - DNA, 177 bp, synthetic construct
  misc_feature 1..177: note = source = /note="Description of Artificial Sequence: Synthetic coding sequence"
  source 1..177: mol_type = other DNA
atggcagacatgcagaatctcgttgaacggcttgaacgcgctgtgggtcgtttggaagccgtctcgcatacgtcagatatgcacagagggtatgctgattctccctccaaagccggagcggctccgtacgtgcaggcgttcgattctcttctcgctggtcccgtggccgaatattag

SEQ ID NO: 11400 - DNA, 732 bp, synthetic construct
  misc_feature 1..732: note = source = /note="Description of Artificial Sequence: Synthetic coding sequence"
  source 1..732: mol_type = other DNA
atgggacccgaggccttgtccagccttttgctcttgctattagtggcctctggtgacgccgatatgaagggccattttgaccccgctaaatgccggtatgctcttggtatgcaggatcggaccatcccggattctgatatttccgcttcctctagttggtcagatagcactgcagcgaggcattctcgcctggaatcttccgacggcgacggcgcatggtgcccagccggatcggtgttcccaaaggaggaggagtacttacaggttgacctccagagattacacctggtggcacttgtcggcacacagggtagacacgccggaggtctgggcaaagaattctctcggtcttaccgtctgaggtacagccgagacggcaggcgttggatgggctggaaggataggtgggggcaggaagttatttccgggaacgaagatcccgagggagtagtgctgaaggatctcgggcctccgatggtcgcacgacttgtacgattctaccctcgagcggacagagtgatgagtgtgtgcctccgagttgagctatatgggtgtttgtggagggattgctccatgggggtgtgggcgtcttggcaaatggtgtggtggggctggatgactctggggagggtacggagttgcggcagtggacaggcaatgactatgtgggatggcgcaacaacggccagccccgttgctatgtggcgctggtccctcagtctgactgggtag

SEQ ID NO: 11401 - DNA, 2535 bp, synthetic construct
  misc_feature 1..2535: note = source = /note="Description of Artificial Sequence: Synthetic coding sequence"
  source 1..2535: mol_type = other DNA
atgggacctggcgctcctttcgccagagtcgggtggcctcttccactactcgttgtgatggcagctggtgttgcccctgtgtgggcgtcacacagcccacacctgccccgacctcacagtcgagtccctcctcatccttcctcggagcgaagagccgtgtatattggggctctcttccctatgtcaggcggatggccgggagggcaagcctgtcagcctgccgtggagatggccttggaggacgtgaattcacgcagagacattctgccggattacgaattgaaactaatacaccacgactccaagtgcgatccaggccaggccacaaagtatttatatgagctgttgtacaatgacccgataaagatcatattgatgccgggatgcagcagcgttagtactctggtggcggaggcggcacgaatgtggaacctcatcgtgctaagttatgggtcgagctcccctgccttgagcaatcgccaacgatttccaaccttcttcaggacgcacccaagcgccactttacacaatcctacaagggtgaaactttttgaaaaatggggatggaaaaaaatcgccaccatccagcagacaactgaggtgttcacttctactctggatgacctggaagagcgtgttaaggaagccggaattgaaataactttcaggcagagcttctttagcgatccagcagtgcctgtaaagaatctcaagcgtcaagacgcaagaattatagtgggactattctatgagactgaagctagaaaggtgttttgtgaggtgtataaggagcgattgttcgggaagaagtacgtatggtttttaattgggtggtatgctgacaactggttcaagatctacgatcctagtattaactgcacagttgatgagatgactgaagctgtagagggacatatcactacagagatcgtgatgttaaaccccgctaatacacggtccatctctaacatgacgtcccaagagttcgtggaaaagctaacaaagagactgaaacgacacccagaagaaaccggtggcttccaggaggcgccactggcctacgatgcaatttgggcactggcactcgccctcaacaaaacctccggcggtggcggtaggtccggcgtgcgcctggaggacttcaactataataaccagacgatcaccgaccaaatctacagggctatgaatagctcctccttcgagggcgtaagtggacacgtcgtgtttgacgcaagtggttcccggatggcatggacactgattgagcaactccaggggggatcatacaagaagattggatattatgactcaaccaaagatgatctctcatggagcaagactgataaatggatcgggggttctccccctgcagatcagactctggttataaagacgtttagatttctgagccagaaactgtttatatcagtgagcgtgttgagcagccttgggattgtactcgccgtcgtgtgcttgtcttttaatatatacaatagtcacgtgcgctatatccaaaacagccagcccaaccttaacaacctcactgcggtaggctgttctcttgccctggcagcggtttttccgctggggttggacggctaccacattggacgaaatcagttccctttcgtctgccaggcaaggctgtggcttcttggtctggggttctccctgggctacggctccatgtttacgaagatctggtgggtgcataccgtcttcactaagaaggaagaaaaaaaggaatggagaaagacactggagccctggaaactgtatgccacggtaggactccttgtcgggatggatgtgctgaccttggccatctggcagatcgtcgaccctctacatagaactattgaaacgttcgctaaggaagaacccaaggaagacattgacgtgagtatcctgccccaattggaacactgcagctccagaaagatgaacacctggcttggcattttttatggatataaaggcctcttgttactgctggggatattcctggcatacgaaacaaaaagcgtttccaccgaaaagattaatgatcacagagcggtcggaatggccatctacaatgtggccgtgctttgcctaattacagctcccgtgaccatgattctcagctcccaacaggatgcagcctttgcttttgctagcctagcaattgttttcagctcatatattactctggtcgtactcttcgtgcccaagatgcgtcggctgataacccgcggagagtggcagtccgaggcccaggacaccatgaaaacaggatctagtaccaacaataacgaggaggagaagtcgaggttactcgagaaagaaaaccgcgaattggagaagataattgccgagaaggaggaacgggtaagcgagctgcggcatcagctgcagtctcggcagcaactgcgctccaggcggcatccccctacccccccagagccttccggcggtttgcctaggggaccccctgaaccccctgatagactgagttgcgacgggagcagggtgcacctgctgtataaatag

SEQ ID NO: 11402 - DNA, 921 bp, synthetic construct
  misc_feature 1..921: note = source = /note="Description of Artificial Sequence: Synthetic coding sequence"
  source 1..921: mol_type = other DNA
aggagaacctgcgctgggccaggtcgggctgggggagccaggagcgctagttggatgtcccggctccgggctctgttgggacttgggctgctcgtggccggtagccgggtgccgaggatcaaaagccaaactatcgcatgccgctcagggcctacctggtggggccctcagcggcttaacagcgggggtaggtgggactctgaggtgatggccagtactgtcgtcaagtatctttcccaggaagaggcgcaggcagttgaccaagaactgtttaatgagtaccagtttagtgtagatcagctgatggagctggccggattaagctgtgcaacagccatcgccaaagcttaccctcccaccagtatgagcagatctcccccaaccgtactcgtcatctgtggacccggaaataatgggggagacggcctggtgtgtgctcgtcacctgaagctcttcgggtatgagcccacaatttactaccccaagcgacccaacaaacctctgtttaccgccctggtgacacagtgtcagaaaatggatatcccatttctgggcgaaatgcctgccgaacctatgacaatcgacgagctttatgaattagtcgtcgacgccatcttcggtttttctttcaaaggagacgtccgggagccttttcactccatccttagtgttcttaaaggactgactgtcccaatcgcctcgattgatatcccttctgggtgggatgtggagaagggtaatgccggaggcattcagcccgacctccttatctccctgacagcccctaagaaatctgcgacacaattcaccgggaggtatcactacctcggcggaaggtttgtgcccccagcattagagaagaagtatcagcttaacctgccaccgtaccctgacacggaatgtgtataccgccttcaatag

SEQ ID NO: 11403 - DNA, 1137 bp, synthetic construct
  misc_feature 1..1137: note = source = /note="Description of Artificial Sequence: Synthetic coding sequence"
  source 1..1137: mol_type = other DNA
tagtactccggcgattatatggaacccgaaaaacccggtgctcccctgttgcccccacctcctcaaaatagcgtccctcactacgccgaggctgacatagtcaccctgcaaggcgtcacaggcggtaacacctacgccgttcccgctttgcctcctggcgcagtcggcgacggacctccccgagtcgattttccacggagtcgactccggttcaaggaaaaactgggagaagggcagtttggggaggtccatctgtgcgaggtggattctccgcaggacctcgtgagtttagatttcccattaaatgtgagaaagggacatcccctgctagttgctgtcaagatcctgcggcctgacgccacaaagaacgccagtttttctctcttttccagaaacgatttcttaaaagaggtcaaaataatgtctcggctgaaggatcctaacatcatccgactgctgggagtgtgcgtccaggatgatcccctttgtatgatcacagattacatggaaaacggggatctcaatcaattcctgagcgcccaccagctggaggataaagccgctgagggagcccctggcgacggccaggctgcccagggcccaaccatctcctatcctatgctcctgcatgtggctgcacagattgcctctggcatgcgctacttagccacattgaatttcgtgcatagggacctggcaacaaggaactgcctcgtgggagaaaactttacaataaaaattgccgattttggcatgagtcggaatttgtacgcaggagactattacagggttcaaggcagagcagttctgccgatccgctggatggcatgggagtgcatcctgatgggaaaattcactactgctagtgacgtttgggcctttggggtcactttgtgggaagtactgatgctctgtcgcgcacagcctttcggacagctcacagacgagcaggtgatcgagaatgcgggtgagtttttccgcgaccagggaagacaggtgtacctgtcccggcctcccgcttgtccccagggactgtatgagttgatgttaaggtgctggtctcgggaatctgaacagaggcccccatttagtcagctgcaccggttcctggctgaggacgcactgaacacagtgtag

SEQ ID NO: 11404 - DNA, 762 bp, synthetic construct
  misc_feature 1..762: note = source = /note="Description of Artificial Sequence: Synthetic coding sequence"
  source 1..762: mol_type = other DNA
atggccccttggtctcaccccagcgctcagctccagcctgttggaggcgacgccgttagtccggctctgatggtactgctgtgcttaggaaacctgagtaaagccaccctctgggcggagcccggatccgtgatctcgcggggaaactctgtgaccattagatgtcagggaactctggaagcccaggaatataggcttgtgaaggagggcagccccgagccatgggatactcagaatcccctggagccaaaaaacaaggccaggttttcgattccaagcatgactgagcatcacgctgggagataccggtgctactattatagtcccgctggatggagtgagcctagcgaccccttggagctggtggtgaccgggttctataacaagcctacactgtctgctctcccatctccggttgtgaccagcggcgaaaacgtcaccctccagtgcgggtcccggctaagatttgacagatttatcctaacagaagagggcgatcataagcttagctggactctcgatagccagttgaccccctcggggcagtttcaggctcttttccctgtgggacctgttactccttcacataggtggatgctgcggtgttacggctctaggcgccacatccttcaggtgtggagcgaaccctctgacctgttggaaatccccgttagtggagaggaggcgaccgtcttttcaagtaccatccaaggaagccagacagggtgcggcgagctgtacagacagggtagcccttgctag

SEQ ID NO: 11405 - DNA, 288 bp, synthetic construct
  misc_feature 1..288: note = source = /note="Description of Artificial Sequence: Synthetic coding sequence"
  source 1..288: mol_type = other DNA
atgcggaaaccaaggagaaaatcaagacaaaacgccgaggggagacgtagcccctctccatattcgctcaaatgttctccgacgagggagactctcacatacgcacaggcccagcggatcgtggaagtcgatatcgacggacgcctccaccgtattagcatctacgacccgcttaagatcattaccgaagatgaactgactgcccaagacatcacagaatgcaattcaaacaaagaaaattccgagcagccacagttccccggaaaatcaaagaaaccatcatcttag

SEQ ID NO: 11406 - DNA, 1311 bp, synthetic construct
  misc_feature 1..1311: note = source = /note="Description of Artificial Sequence: Synthetic coding sequence"
  source 1..1311: mol_type = other DNA
atgaagttccagggaccattggcatgtctcctcttggcgctttgcctcggatccggggaagcgggtcccctgcagtcaggggaagagtctacagggaccaatatcggcgaggctctgggacacggcctgggggatgctctgtcggaaggggtcgggaaggccatcgggaaagaagctggcggagccgcagggtcaaaagttagtgaggctctgggacagggtacgcgagaggcggtgggcacaggagtcaggcaggtgcctgggtttggggtcgccgatgccttgggcaatcgggtcggagaagctgcacatgccctgggcaacactggacatgaaattgggagacaggccgaggatgtgatacgccacggagccgacgccgtccgtggatcctggcaaggcgtgccaggccacaacggagcctgggaaacctctgggggacatggtatctttggtagtcagggcggactggggggacaggggcagggaaaccccggtgggctgggtacaccctgggtccatggatatcctggaaattccgccggtagcttcggcatgaacccacagggtgccccatggggtcagggcggaaatgggggtccaccaaactttggcaccaacacgcagggcgctgtggcccaaccaggctatggttccgtgcgtgcatcaaatcaaaacgagggttgcaccaatccccctccctccgggagtggagggggtagtagcaattcaggcggaggaagcggaagtcagagcgggtcttctgggtctggctccaacggggataacaacaacgggtcaagctcagggggatccagttctggcagttctagcgggggaagcagcggagggtctagcggcggaagctctggcaattccgggggatcaagaggtgattcgggctcggagagtagctgggggtctagcaccggctctagctcaggaaaccacgggggaagtgggggaggaaatggccataagccgggatgtgaaaaacccggtaacgaggctagaggttccggagaaagcgggatccaaggattccgaggtcagggcgtcagttctaatatgagagaaatttcgaaggaaggcaacaggcttctcgggggtagtggagacaactaccggggacagggctcctcgtgggggagtggaggcggagacgccgttggcggagtgaataccgtgaactcggaaacgtcacctggaatgtttaatttcgacactttctggaaaaacttcaaatccaagctgggattcatcaattgggacgccataaacaaagatcagcgttcatcccgaatcccctag

SEQ ID NO: 11407 - DNA, 240 bp, synthetic construct
  misc_feature 1..240: note = source = /note="Description of Artificial Sequence: Synthetic coding sequence"
  source 1..240: mol_type = other DNA
atgcctgcctgccggctgggacccctagctgcggcactcctgctgtccctgctgcttttcggtttcaccctggtgtcaggtacgggggctgagaagacaggggtctgtcctgagttgcaagcggaccagaattgtacacaagagtgtgtttccgattccgaatgcgccgacaatctgaaatgctgctccgccggttgcgcaactttctgcagtctgcccaacggacagctggccgagtag

SEQ ID NO: 11408 - DNA, 2130 bp, synthetic construct
  misc_feature 1..2130: note = source = /note="Description of Artificial Sequence: Synthetic coding sequence"
  source 1..2130: mol_type = other DNA
atggggtgcctgtgggggctagctctgcccctcttcttcttctgctgggaggttggagtctcagggagcagcgctggtccatctactcgtagggcagatacagcaatgacgaccgacgataccgaagtgccagccatgaccttggctcctgggcacgcagcgctggaaacacagaccttaagcgcggagacttcctctcgtgcctccacccccgcaggaccaatccccgaggccgaaaccagaggagcgaaacgcatctctccagctcgggaaactaggtcctttaccaagaccagcccaaatttcatggtcctgatcgccacttcagtggagacaagcgctgcctcaggaagcccagagggggctggaatgacaacagtgcaaacaattacaggctccgacccccgtgaggccatctttgacactctgtgcaccgatgacagcagtgaggaggcgaagacactgaccatggacatcctgactctcgcccatacttcaaccgaggccaaaggtctttctagtgagtcttccgcgagctcagacagtccacatcctgtaataacccccagccgagctagcgagtcctcggcgtccagcgatgggccacaccccgtgattaccccctctcgggcttccgagtcctccgcttcctctgatgggcctcaccctgtgatcacaccatctcgggcatccgagtcaagtgcgtccagcgatggaccgcacccagttatcactccaagccgagcctccgaatcttctgccagttccgacggtccacaccccgtgataactccctcacgcgctagcgagtcatccgcatcttccgatgggcctcatccggttatcaccccttcgagagcatctgagagctctgcatctagtgatgggcctcatccagtgataacacctagtagggccagtgaaagcagtgcctcttcagatggtccccatcctgtcatcacaccatcaagagcctcagaatcttctgcttcatcggacggccctcacccagtcattacacctagccgcgctagcgaatcaagtgcctcgagcgatggcttgcacccagtaattaccccatctagagctagcgagtcatctgcaagctcagacgggcctcacccagtaatcaccccatctagagccagtgagtccagcgcatcttctgatggacctcaccctgtgatcactccttcttggtccccaggttcggatgtgaccttgctagccgaggctctggtaacggttacaaatatcgaggtcataaactgttcaattacagagatagagacaacaaccagttccattcctggggcttccgacacagacttgatccctacagaaggcgtgaaggctagttccactagtgatcctcccgctctccctgactctacagaggccaagcctcacataaccgaagtcacagcaagcgcagaaacactgtcaactgccggtacaaccgaaagtgccgctcccgacgccaccgtgggcacgcccctccctacgaattctgcaacagaacgcgaggtgaccgctcccggtgcgacaaccctttcaggagcacttgttacagtcagcaggaatccgctggaggagactagcgccctgtccgtagaaaccccaagctacgtcaaggtgagcggggctgctccagtgagcatcgaagccggaagcgctgtcggaaagacaacttcctttgccggatcttcagcttcttcttattctccctcagaggccgctctgaagaattttacaccaagtgagacacccaccatggacatagctacaaagggaccctttcccaccagcagagacccactgcctagcgtccccccaactactaccaactcttcacggggaactaactcaactctcgcaaaaattacaacttccgccaagactacaatgaagccaccaaccgcaacacctactacagccaggaccaggccaacaacggacgtgtcagcgggagaaaacgggggattcctgcttcttaggttatcggtcgcgagccccgaggacctgaccgaccctcgggtcgcagagaggttgatgcagcagttgcaccgggaactgcacgcgcacgctccccattttcaggtgagcctgctgcgagtgaggcgcggatag

SEQ ID NO: 11409 - DNA, 2067 bp, synthetic construct
  misc_feature 1..2067: note = source = /note="Description of Artificial Sequence: Synthetic coding sequence"
  source 1..2067: mol_type = other DNA
atgctgccaactgaggtgccacagtcccatcccggaccgagcgccctgctgcttttacagctgctgttaccgcctactagcgctttcttcccaaacatctggtcactgttggctgcacctggctctattacacaccaagatctgacagaggaggccgcattgaatgtcaccctgcaactgttcttagaacagccccctccaggcagaccccctttgaggctggaagatttcctggggaggaccctcctcgctgacgacctatttgccgcttatttcgggcctggatcaagccggagatttagagctgctctcggagaagtgtccagggctaacgcagcccaggattttctacccacgtcccgcaacgatccagacttgcacttcgacgccgagaggttgggccagggcagagcaaggctcgtcggcgctttgcgagagaccgtcgttgctgcccgagcactggatcatacacttgccaggcaacgccttggagcggctcttcacgccctgcaagacttctatagccacagcaactgggtggagctcggcgagcaacagccccatccacacttactgtggccccgacaagagctgcagaacctagcgcaggttgcggaccccacttgtagcgattgtgaggagctgtcctgccccaggaactggctggggttcaccctcctcaccagcggatacttcggcactcaccctcctaagccaccgggaaagtgctctcacgggggtcactttgacaggagttcgagccaacccccaagaggtggcattaataaagacagcacgtctcccggattctccccccatcacatgttgcacttacaggccgctaagctcgctcttctggcttcaatccaggccttctctctgctgaggagcaggctgggagatagagattttagccgcctcctcgacatcacacccgcatcaagcctgtccttcgtgttggacaccaccgggagcatgggtgaagagatcaatgcagcaaagattcaggccagacatctagtggagcagaggcggggaagtccaatggagcctgtacattacgtgctggtaccgtttcacgatcctggttttggaccagtgtttactacctctgaccctgattctttttggcagcagctgaacgaaattcacgcccttgggggaggagacgaaccagaaatgtgtttatcagcccttcagcttgcactgttgcacaccccacctcttagtgatatctttgtatttaccgatgcctcccctaaggatgccttcctgacaaatcaggtagagtccctgacgcaggagcggaggtgtcgagtgacttttctagttacagaagacacaagccgcgtacaaggccgagcacggcgagaaattctaagtcccctcaggttcgaaccatataaagccgtagctctggcttctggcggagaagtcatatttacaaaagaccaacacattcgagacgtagctgccatcgtgggcgaatccatggccgcacttgttaccctgcccctggaccccccagttgtggtccctggccaaccactggttttttcagtcgacggactcctgcagaaaatcaccgtcagaattcatggagatatttcgagtttctggatcaagaatcctgctggtgtgtctcaggggcaagaggagggaggtgggccactgggccatactcggaggttcggccaattctggatggttaccatggatgaccccccacaaactggtacttgggagattcaggtaactgcagaagacacacccggagtccgggtccaagcccagacatcactcgactttctatttcacttcggtatcccaatggaggatgggccacaccccggactgtatcctcttacccagcccgttgccggactgcaaacccaattgttagtggaaagccagtcatggggttcctctgctgcttttttgccacgccacccctcacgcggacctcgcggatgtcgcacaagacctggtgcactgggtgctaggggaaccagtggtgctcgttcccccagatcactggccgttgctcacgccgctgttcatccgtag

SEQ ID NO: 11410 - DNA, 1257 bp, synthetic construct
  misc_feature 1..1257: note = source = /note="Description of Artificial Sequence: Synthetic coding sequence"
  source 1..1257: mol_type = other DNA
aataatctgaatgttggtagcgacaccacaagcgagacctctttcagcctgtccaaagaagcaccgagggaacatctcgatcatcaagccgctcatcagccattcccaagacctaggtttcgacaggaaactggtcatccgagtctccagagagattttcctcggagctttctcttagacctgcccaactttccagatttaagcaaggccgacatcaacggccaaaatcccaatatccaggttaccattgaggtggtcgacgggcctgactccgaagcagataaagaccagcatcctgagaacaaaccatcttggagtgtgcctagtcctgattggagagcatggtggcagcgttcattatccctggcaagagctaattcaggagaccaagattacaaatatgacagtacaagtgatgactctaattttctgaaccctccacggggttgggatcatacagcccctggacaccggacgttcgagaccaaggaccaaccggagtatgactctactgacggcgagggcgactggtccctttggtcagtatgcagcgtgacatgcggtaacgggaaccagaagaggaccaggtcatgtggatatgcctgtactgcaactgagtcaaggacatgcgacaggcccaattgtcccggaattgaagatacatttcgaactgccgctaccgaagtcagcctccttgctggtagcgaagagttcaacgccacaaagctttttgaagttgataccgactcctgtgaacgctggatgtcttgtaagagtgaattcttaaagaagtacatgcacaaagtgatgaacgacttgccttcttgcccgtgttcttatccaaccgaggtcgcctactctacggcagacattttcgatcgcattaagcgcaaggacttcagatggaaagacgcctccggcccaaaggaaaaattagagatttataagccaacagctaggtattgtatccgaagtatgctgtccctggaatctaccacactggctgcccaacattgctgctacggggataacatgcagttaatcacacgcggtaaaggagcaggcactcccaacctgatcagtaccgagttcagtgcggagcttcactacaaggtagatgtgctcccatggatcatctgtaagggtgattggtctaggtataatgaggcccgtccaccgaacaatggccaaaagtgcaccgaatcaccgtcagatgaggactatataaagcagttccaggaagcaagggagtattag

SEQ ID NO: 11411 - DNA, 693 bp, synthetic construct
  misc_feature 1..693: note = source = /note="Description of Artificial Sequence: Synthetic coding sequence"
  source 1..693: mol_type = other DNA
atgaggcttgcagggccactccgcattgtagtgctggtggtgagtgtaggagtgacatggatcgttgtaagtatcctgctcggaggcccaggctctggcttccccaggatccaacagctgtttacatccccggaaagttccgtcactgccgcacccagggctagaaaatacaagtgcggcctgccacaaccatgtccagaggaacatctggccttcagggtggttagcggcgctgccaacgttatcggaccgaaaatctgcctggaggataagatgttgatgagttctgtgaaggataatgtcggacgcggattgaatattgcactcgtgaatggggtgagtggtgaactaattgaggccagggcattcgacatgtgggccggagacgtgaacgacctgctaaagttcatccggccactgcacgagggcactcttgttttcgtagcatcttacgacgaccccgcaaccaagatgaatgaggaaaccagaaaattgttctctgaactggggtctagaaacgccaaggaactcgccttcagagactcctgggttttcgtgggtgccaagggcgttcagaataaatccccatttgagcagcatgtgaagaattctaaacacagcaataagtacgaggggtggccagaggctttggaaatggaggggtgcatcccaaggcgctctaccgcatcctag

SEQ ID NO: 11412 - DNA, 192 bp, synthetic construct
  misc_feature 1..192: note = source = /note="Description of Artificial Sequence: Synthetic coding sequence"
  source 1..192: mol_type = other DNA
atgggacccgaggcgctaagcagtcttcttctgttgctgcttgtggcttccggggacgccgacatgaaggggcatttcgacccagccaaatgccggtacgctctcggtatgcaggaccggacaatccctgactccgacatctctgcctcaagcagctggtctgatagcacagctgctagacatagccggtag

SEQ ID NO: 11413 - DNA, 1014 bp, synthetic construct
  misc_feature 1..1014: note = source = /note="Description of Artificial Sequence: Synthetic coding sequence"
  source 1..1014: mol_type = other DNA
atgttgagcctcggtgctcatagtgtgaccaagacccagatcctgcagggactgggcttcaacttgacccacacccccgaatcagctatccaccaggggttccagcacctggtgcacagcctgactgtgccatcaaaagaccttactttaaaaatgggctccgccctcttcgtaaaaaaggaattgcaacttcaggccaattttctggggaatgtgaaacgtctgtatgaagctgaggttttcagcacagactttagcaatccgtctatcgctcaagctcgaatcaatagccacgtcaagaaaaaaacgcaaggtaaggtggtggacatcattcagggtttagacttgctgacagctatggtcctcgtaaatcatatctttttcaaggccaagtgggaaaaacctttccaccccgaatacacgaggaagaacttcccgtttctggtgggggaacaggttacggtacatgttcccatgatgcaccagaaggaacagttcgcctttggtgtggatactgagcttaattgcttcgtgttacagatggattacaaaggcgacgccgtggcttttttcgttctgccaagcaaagggaagatgcggcaactggaacaggcgctcagtgctaggactctgcggaaatggtcgcacagcctgcagaagcggtggattgaggtgtttatacccagattttctatttcggcaagctacaatcttgagaccatcttacctaaaatggggatacaaaacgtttttgacaagaatgcggacttttccggcatagccaagcgagactcgcttcaggtatctaaggccacccacaaggccgtgctggatgtgtctgaagaagggactgaagcaaccgctgccactaccacgaaatttatcgtgagaagcaaggacgggccaagctactttacagtgtcattcaatcggacgtttttgatgatgatcactaacaaagccaccgatggaatcctgttcctcggaaaggtggaaaatcccactaagagctag

SEQ ID NO: 11414 - DNA, 336 bp, synthetic construct
  misc_feature 1..336: note = source = /note="Description of Artificial Sequence: Synthetic coding sequence"
  source 1..336: mol_type = other DNA
atgtttttcaccatctctcgcaagaacatgtcccagaaactctcgctgctgctgcttgtgtttggactgatctggggactgatgttgctgcactacacgttccaacagcccaggcaccagagcagcgtgaaactcagggagcaaatcctggatctaagtaagaggtatgtcaaagcactggctgaggaaaataaaaacaccgtcgatgtagaaaacggcgctagcatggccggatatgccgatctgaaaaggaccatagccgtcctgctggatgacattctgcagcgactagttaagctggagaataaggtcgattatatagttgtgaacgggtag

SEQ ID NO: 11415 - DNA, 498 bp, synthetic construct
  misc_feature 1..498: note = source = /note="Description of Artificial Sequence: Synthetic coding sequence"
  source 1..498: mol_type = other DNA
atggagatgttccagggtctgctgctgctcctgcttctcagcatgggtggtacctgggcttctaaagagccactcaggccacggtgtaggcctattaacgcgactttggccgtggagaaagaaggttgtccagtgtgtatcactgtgaacaccaccatctgcgccggatattgtcccaccatgacgcgggttctgcagggggtcctacctgctctgccacaggtcgtttgcaactacagggacgtgcggtttgaatccataaggcttcctggctgtccgcgtggtgtgaacccagtcgtcagttacgctgtcgccctgtcatgccagtgtgccctgtgccggaggagcaccacggattgcggtggccctaaggatcatccccttacctgtgacgatcctcggtttcaggattcctcaagctccaaggccccaccgccaagcctgcctagcccatctcggctcccagggccatctgacactcccattctgcctcagtag

SEQ ID NO: 11416 - DNA, 699 bp, synthetic construct
  misc_feature 1..699: note = source = /note="Description of Artificial Sequence: Synthetic coding sequence"
  source 1..699: mol_type = other DNA
atggtactgttgctcgtgattctcatccctgtgcttgtgtctagcgccggaacgtccgcgcactacgaaatgctggggacatgcagaatggtctgcgacccctatggcggtacgaaagctccatctacagctgcaacaccagatcgtggcctcatgcaaagtttgccaaccttcattcagggcccaccaatgggcccacccggtgagaaaggcgagccgggaagacagggattgccagggcctcccggagccccagggctgaatgcagctggcgctattagtgccgctacatattctaccgtgcctaaaatcgcattttatgctggtctgaagaggcagcacgagggatatgaagtgctgaagttcgatgacgtcgttaccaatctgggtaaccactatgaccctacgactggaaagttcacatgctctatcccaggtatttacttttttacctatcatgtgctaatgagaggaggagacggcaccagcatgtgggccgacctctgcaagaacaaccaggtgcgcgcaagtgcaatcgcacaggatgctgatcaaaattacgactatgcaagcaactccgtcgttctacacttagagcctggcgatgaggtttatattaaattggacggtggcaaagcacacggcggtaacaataataagtatagcactttcagcgggttcatcatctacgccgattag

SEQ ID NO: 11417 - DNA, 501 bp, synthetic construct
  misc_feature 1..501: note = source = /note="Description of Artificial Sequence: Synthetic coding sequence"
  source 1..501: mol_type = other DNA
atgggccctgaggccctgtccagcttattgttgctactcctcgtggcttccggggacgccgatatgaaggggcacttcgacccagctaagtgccgttacgcactcgggatgcaggacagaaccatccctgactctgacatttcggcctccagctcatggtcagacagcacagccgctcgccattcaagactggaaagctccgacggggatggagcatggtgtccagctggatctgtgtttcccaaggaggaggagtatttgcaggttgatcttcaacggctgcatctcgtagcacttgtaggaacccagggaagacacgccggtggactgggtaaagagttctctcgctcctacagactgaggtacagtagagacggacgccgttggatgggatggaaagatcgttggggccaggaggtgatcagtggtaacgaagatcccgagggcgtagtgctgaaggatcttggcccaccaatggtggcgagactagtgagattttag

SEQ ID NO: 11418 - DNA, 627 bp, synthetic construct
  misc_feature 1..627: note = source = /note="Description of Artificial Sequence: Synthetic coding sequence"
  source 1..627: mol_type = other DNA
atgattataaaacacttttttggaactgtgctcgtcctcctggccagcaccaccatttttagtctggatcttaagctgattattttccagcagagacaggtgaaccaggagtcgttaaagctgctgaacaaactgcagaccctgagcattcaacaatgtctgccacatcggaagaactttctcctacctcagaagagcctgtctccccaacagtaccagaaagggcacacacttgctatactgcacgaaatgcttcagcagattttcagtctctttagagcaaatatttctcttgacggttgggaggaaaaccatacggagaagttcctgatccagcttcaccagcagttagagtacctggaggcccttatgggactggaggcggagaagctgagtgggactctggggtcagacaacctcagactccaagtgaagatgtattttcggaggatacatgactatctggaaaaccaggactacagtacttgcgcatgggcgattgtacaagttgagatctcccgatgtctctttttcgtattcagcttaaccgaaaagttatctaagcagggtcgcccactcaatgacatgaagcaggaattaaccaccgaattcaggagtcccaggtag

SEQ ID NO: 11419 - DNA, 2241 bp, synthetic construct
  misc_feature 1..2241: note = source = /note="Description of Artificial Sequence: Synthetic coding sequence"
  source 1..2241: mol_type = other DNA
atgccttttagacataaacctgggagcgtcttttctgttgaaggagaaaatttagacctggccatgtccaaagaggaggttgtggcgatgatcggggacggtccatgcgtggttaagactctgacccgccatcacctctattgtgagccacccgtggaacagcctctgccacgacatcatgcgttaagggaggcacctgacagtttacctgaattcaccgtgcaaatgggcaacctgagattttcacttggtcatgttcaatatgatggagaatcacccggtgccttcccagttgctgctcaggtcggtctgggcgttggcactagtctcctggccctgggggtcatcatcatcgtgttgatgtaccgacgcaagtcaaagcaggcccttcgggattataagaaagttcagattcagctcgagaatctcgagtcgtcagtgagggaccgttgtaaaaaggagtttactgatttaatgacggagatgaccgatttgacttcggacctgctgggctctgggatcccttttttagactacaaggtgtacgccgaaaggatcttcttcccagggcatcgagaaagcccgctgcacagagatctcggcgtgcccgagagccgtcggcctacagtggaacagggtctgggtcagttatcgaacctcctcaatagtaaactttttttgaccaaattcatccacacactggagtcgcagaggacattttctgcccgtgaccgggcatacgtcgcaagtctcttgactgtggccctccatggcaagctggagtacttcactgacatcctgaggacactcttgtcagatttagtggcccagtacgtggctaaaaaccccaaactcatgctgcggagaactgaaacggtagtggagaagctgttaacaaattggatgagtatttgtctgtataccttcgtcagggatagtgtcggggaacctctgtatatgctgtttagaggaatcaagcatcaggtggataaaggaccagtcgactccgtgaccggaaaagctaaatatacactaaatgacaaccgcttgctgagggaagatgtggagtaccggcctctgaccctgaatgccctactagcagtagggcctggcgcaggcgaggctcaaggagttcctgttaaagtccttgattgtgatacaatcagccaggcaaaggagaagatgctggaccagttgtacaagggggttccacttactcagcggcctgatcctagaactctagacgtggagtggaggtctggcgtcgccggacacctgatcttgagcgacgaagatgtcactagtgaggtacaaggattgtggaggagactcaatactctgcagcattacaaagtaccggacggagccaccgtagccttagtgccatgcctgacaaagcatgtcttgcgggagaatcaggattacgtcccaggcgaacgtacccccatgctggaagacgtggatgaggggggaatccgtccatggcatctggtcaagccatcggacgagccagaacccccaagacccaggcggggaagcctccggggaggcgagcgggagagagccaaggccatcccagagatataccttacacgcctgctgtcgatgaagggaacactccagaaatttgtagatgacctcttccaggtgatcctgagtacaagccggcctgtcccactggccgttaagtatttcttcgatctgttagatgaacaggctcagcagcatggcatctcagatcaggatactattcatatttggaagactaattctctgccacttaggttttggatcaacattattaagaacccccaattcgtgttcgatgtgcagacatcggataatatggatgcagttctgttggtgatcgcacagacgttcatggatgcgtgcaccctggccgaccataaattgggccgagatagcccgatcaataagttgctgtacgcccgtgatattcctagatacaagcgtatggtcgagcgctattatgctgacattagacaaactgtgccagcttctgatcaagagatgaattcggttctggctgagctctcctggaattactcaggggatttaggggctcgcgtggctcttcatgagttgtacaagtatataaacaagtactatgatcaaattattacagcactcgaggaagatggcacagcccaaaaaatgcagctgggatatcgtctgcagcaaattgcagctgcagtagagaacaaggtcactgacctctag

SEQ ID NO: 11420 - DNA, 603 bp, synthetic construct
  misc_feature 1..603: note = source = /note="Description of Artificial Sequence: Synthetic coding sequence"
  source 1..603: mol_type = other DNA
atggcgtgggggggtgtccatacctgttgcttccacctctgttgctgttgctcctggccccagggtgctgtccccgaggaactgcataagcatcctgggcagacactgcttttacagtgccaatatagtcccaaacgtggaccctaccagccgaaaagctggtgccagcagacatccccaagccggtgcactctgctggtgacctcaagcaaaccatggaccgccgtacagaagtcccattacaccatatgggacaagccaaatgctggcttcttcaacatcactatgatccagctaacccagaacgatagcggcttttactggtgtggcatctataatgcgtccgagaacatcattacggtccttagaaacatatctcttgtggtgtctcctgcccctaccacatctccaatgtggaccctaccatggcttcccacttccacagtgcttattacatcgccggagggaacttctggacatccatcaatcaatggcagtgagacccggaagagtcgcgcacctgcctgcctggggtctggaggaccgcgatttctggtcctcgtcctctgcgggttgctgctcgcgaaggggctaatgttgtag

SEQ ID NO: 11421 - DNA, 114 bp, synthetic construct
  misc_feature 1..114: note = source = /note="Description of Artificial Sequence: Synthetic coding sequence"
  source 1..114: mol_type = other DNA
atggggtggctgactcggattgtgtgcctcttttggggggtcctcctgacagctagggcaaactaccaaaatggaaagaataatgttccgagattaaaactgtcttacaaatag

SEQ ID NO: 11422 - DNA, 525 bp, synthetic construct
  misc_feature 1..525: note = source = /note="Description of Artificial Sequence: Synthetic coding sequence"
  source 1..525: mol_type = other DNA
atgcggctcctcgccttcctctcactcctcgccctcgttcttcaggagaccgggaccgcatctcttcccaggaaagagcggaaacgacgcgaggagcagatgcctcgagagggggattcttttgaggtgctgccgttgagaaatgatgtgttgaacccggataattacggtgaagttattgatctcagtaattatgaggaactgactgattatggagatcagctgcccgaagtgaaggtgacttctcttgcaccagcaacctcaatcagccccgctaagagcactactgccccaggaacccctagctccaatcccacgatgacacgccctacaaccgctgggttgttactgagctcccagccgaatcatgaagatataccccctctccccaggcgaactgcctatctctatgcccgttttaacaggatcagtcggattagggcagaagactttaaaggccttactaaactgaagcgcattgacctttccaacaacctaatcagctctattgacaatgacgcatag

SEQ ID NO: 11423 - DNA, 657 bp, synthetic construct
  misc_feature 1..657: note = source = /note="Description of Artificial Sequence: Synthetic coding sequence"
  source 1..657: mol_type = other DNA
atggggagggttttcctcaccggtgaaaaggccaattccattttgaagcgctacccgagagcaaacggtttctttgaggagatcagacagggaaacatagagcgcgagtgtaaggaggagttttgcactttcgaggaagcaagagaagcattcgaaaataacgaaaaaaccaaagagttctggagcacttataccaaggcccagcagggggaaagtaaccggggaagcgactggttccagttttacctcacgtttccacttatatttggattatttatcattctgctggtgatcttcctgatatggaggtgtttcctgaggaataaaacccgtcggcagaccgtgaccgagggacatatcccttttcctcagcacctcaatattatcacacctccaccgccaccagatgaggtgttcgatagttccgggctttcaccaggcttcttaggctacgttgtgggcagaagcgactcagtctcaactcgtctgtccaactgcgaccctcctccgacatacgaggaggctacaggtcaggtgaatctgcagcgctctgaaaccgagccacacctggacccacccccagagtacgaggatatagtaaacagtaactccgccagcgcaatccctatggtgcctgtagtgactaccatcaagtag

SEQ ID NO: 11424 - DNA, 2535 bp, synthetic construct
  misc_feature 1..2535: note = source = /note="Description of Artificial Sequence: Synthetic coding sequence"
  source 1..2535: mol_type = other DNA
atggggccaggggctcccttcgctagggtcggctggccactgcccctgctggttgttatggcagcgggagtggcccctgtgtgggctagccatagtccacatcttccaagacctcatagccgagtacctccgcatccgagctctgaacggagagctgtatatataggggcactgttcccaatgtccgggggatggccaggtgggcaagcctgtcagccggcagtagaaatggcactggaggacgtaaattctcggagggacatactgcctgactacgaactaaagctgattcaccatgacagtaaatgcgaccctggtcaggcgactaaatatttgtacgagttgttgtacaacgaccccattaagatcattttaatgcctgggtgcagttcagtgtctaccctggtcgcagaagccgcacggatgtggaacctgattgtgctgtcatacggatcttcctctcccgctctgtcaaatcgccaaaggtttccaacattttttcgcacacatccttcggcaacgttgcacaatccaactcgtgtgaagctgttcgaaaaatggggatggaagaaaatagctactatccaacagacaactgaggtgttcaccagtactctagatgatttggaggagcgtgtaaaagaggctgggatcgaaataacctttaggcagtcctttttcagtgatcctgccgtccctgttaaaaacctcaaaagacaagacgctagaataatcgttggactgttctatgagactgaagcgagaaaggtattctgtgaggtctataaggaacggctgtttgggaaaaaatatgtttggtttctaattgggtggtatgccgacaattggtttaaaatctacgacccatctattaactgtacagtagacgagatgaccgaggcagtggagggacacattactactgagattgtaatgctgaatcccgcaaacacgaggagtatctctaatatgacctctcaggaatttgtggagaagctgaccaaacggctaaagagacaccctgaggagactggcggtttccaagaggccccattggcgtatgacgcaatctgggccctcgcacttgctctcaacaaaacctctgggggaggcggtcgatctggggtccgactggaggattttaactacaataaccaaacgatcactgaccaaatctatcgtgcgatgaactcgagctcctttgaaggggtatcaggccatgtagtcttcgatgctagcggaagccgtatggcatggacgcttattgagcaattgcaagggggatcctataaaaaaattgggtactatgacagtactaaggacgacctttcttggtcaaagacggacaaatggatcggcggaagcccacctgcagaccagactctcgtcataaagaccttccgcttcctgtcccagaaactgttcataagcgtgagcgtgttgagcagcctggggattgtgctggcagtggtgtgtctgtcctttaacatttataattcgcacgtgcgttacatccagaactcgcaaccgaaccttaacaatttaactgcagtgggctgcagccttgcactcgccgctgtatttcctctgggtttggacggataccatattggacgaaaccagttcccttttgtctgccaggccagactgtggctccttggactggggttctcgctcggttatggctccatgttcaccaagatatggtgggtgcacactgtctttacgaagaaagaagaaaagaaggaatggcgcaaaacccttgaaccatggaaactgtatgcaactgtggggctccttgtcgggatggacgtgcttacgttagccatctggcagatagtggaccctctgcacaggactatcgagacattcgccaaggaggagccaaaagaggatatcgacgtttccattcttccccagctggagcattgcagctcccgaaagatgaacacttggctggggattttttacggatacaaaggcttactgctgctcctgggaatttttctcgcgtatgagacaaaaagcgttagtacagagaaaattaatgatcaccgtgccgtgggcatggcgatctacaatgtggccgtactatgcttgataaccgcacctgtcacaatgatcctgtcgagccagcaggacgcagcctttgcctttgcttcactggccatcgttttttcctcctacataacgctggttgtgttgttcgtgccgaaaatgagaaggctcatcacacgcggagagtggcagagcgaagcccaggacactatgaaaaccggctcaagtaccaacaacaacgaggaggagaaatcccgcctattagagaaagagaatcgcgagctcgaaaagataattgccgagaaagaagagcgtgtatccgagctacggcaccagctgcagagtaggcagcagctgcggtcacggaggcatcctcctaccccacctgagccatctggcggtctgcctagaggaccacccgagcctccagacagactgtcttgtgacggatcgagggtacatctcttatacaagtag

SEQ ID NO: 11425 - DNA, 2007 bp, synthetic construct
  misc_feature 1..2007: note = source = /note="Description of Artificial Sequence: Synthetic coding sequence"
  source 1..2007: mol_type = other DNA
atggacctggtgttgaagcggtgtttgctccacctggccgtgattggagccttgctcgcagttggagccactaaggtccccaggaaccaggactggctgggagtgtcccgccagctccgcaccaaggcctggaaccggcagctgtatcccgagtggacggaagctcagaggctggattgttggcgcggtggacaggtgtcgctgaaggtgtctaacgatggaccgaccttgatcggagctaacgcctcgttcagcatcgcactgaatttccctgggtcccagaaagtgctgccggatggccaggttatatgggtgaataacacaatcatcaacgggagccaggtttggggaggtcagcctgtgtaccctcaagaaaccgacgatgcctgtatatttccagatggtggaccatgcccctccggaagttggtcccagaagagatcgttcgtatacgtgtggaaaacctgggggcagtattggcaagtactaggtggcccagtcagtggtttatcgatcggaaccgggcgagcaatgctcggaacacacacgatggaggtgaccgtctaccaccggagaggatctcgcagctacgtcccgctcgctcacagcagcagtgccttcaccataacagaccaggttcccttcagcgtctctgtcagccaactgcgagcccttgatggaggaaataagcactttctgcgcaatcagcccctcacctttgctctgcagttgcacgacccatctgggtatctcgcggaagcagatctctcctatacgtgggatttcggtgacagtagcggaaccctcataagtcgagccctagtagtgactcacacttacctggagcccggacccgttacagcccaggtggtgctgcaggctgctattcccttaacttcttgtgggtcatcaccagtgcccggtaccaccgatggacaccgccctaccgccgaagccccaaatacgactgccggtcaagtgcccacaactgaagtcgtgggaaccaccccaggccaggcacccacagcggagccaagtggaaccacatctgtgcaggtcccgaccaccgaggtgatctcaaccgctccggtccagatgcccactgccgaatccactggtatgactcccgaaaaggtgcctgtgagtgaggttatgggaaccaccctggctgaaatgagcacgcctgaagcaacaggcatgacacccgcagaggtatctattgtggttctgtcaggcactaccgccgcacaggtcaccaccacggaatgggtagaaactacggccagggagcttcctatccccgagccggagggcccagacgcttcttccattatgtctaccgaaagcatcacaggctccctgggaccgctccttgacggtaccgccactctaaggctggtcaagcggcaggtgcctttagattgtgtactgtaccggtacgggtccttctccgtgaccttggatatcgtgcaggggatagagtccgccgagatcctgcaggcagtgccgtccggagagggtgacgcctttgagctcacagtgagttgtcagggaggtttgcccaaggaagcctgcatggagatctctagcccaggttgccagccaccggctcagcgcctgtgtcagcccgtgctcccttcccccgcatgtcagttagtcctgcaccagatcttaaaaggagggagtggaacctactgtttgaacgtgtcgctggccgacacaaatagtctggcagtcgtctcgactcagctgatcatgcctgtgccgggtatcctcctcactggacaggaagccggtctgggtcaagtgccgctgatagtgggcatcctcttagttctgatggccgtggtgttggctagtctgatctaccggaggcggctaatgaagcaggatttctcagtgccacagctgccccattcatcgagtcactggcttagacttccgcgaatcttttgcagttgcccaatcggagaaaactctcccttactcagtggtcagcaagtatag

SEQ ID NO: 11426 - DNA, 525 bp, synthetic construct
  misc_feature 1..525: note = source = /note="Description of Artificial Sequence: Synthetic coding sequence"
  source 1..525: mol_type = other DNA
atggcagacatgcagaaccttgttgagcgcttggaaagagccgtaggtcgcctggaggccgtgtcgcatactagcgacatgcatcgaggctatgccgattctccatctaaggctggcgctgccccttatgtccaggctttcgattccctgcttgccggtccagtcgctgagtacctaaagatctccaaagaaatcggcggagatgttcaaaagcacgctgagatggtgcataccggactcaagttggagagggcccttctggtaacagcctcacaatgtcagcagcctgccgagaacaagctatctgatctcctcgccccaatcagtgagcagatcaaggaagtgatcaccttccgtgaaaaaaatagagggtccaaactctttaatcacctgtccgctgtgtccgagagcattcaggctctcggatgggtcgccatggctcccaaacccggaccctatgtgaaggagatgaacgacgctgcaatgttttatactaaccgcgtgctgaaggagtacaaggactag

SEQ ID NO: 11427 - DNA, 1368 bp, synthetic construct
  misc_feature 1..1368: note = source = /note="Description of Artificial Sequence: Synthetic coding sequence"
  source 1..1368: mol_type = other DNA
atgctacaccctgagacctccccaggtcgtgggcaccttttagccgttctccttgccctgctcggtacggcatgggccgaagtgtggccgcctcagcttcaggagcaggcacccatggctggggctttgaatagaaaagagtctttcctcctgctgtcactgcataaccgcctccggtcttgggtccagcccccagctgccgacatgaggcgactggattggagtgatagtctcgctcagctcgcccaggcccgagctgccctgtgcgggacgcccacccctagtctcgcttccggactgtggagaaccctgcaggtcggctggaacatgcaactgctccctgcgggactagtgtcattcgttgaggtcgtgtcactgtggtttgccgaaggacagcggtactctcacgccgcaggagagtgcgccagaaacgctacatgtacccattacacccagcttgtctgggcaacaagctcccagcttggctgtggacgacacctgtgttctgctgggcaggccgcaattgaggccttcgtctgcgcctactcccctcgagggaattgggaggttaatggtaaaaccattgtgccgtataagaagggagcttggtgtagcctatgcaccgcttccgtgtctgggtgtttcaaggcctgggaccatgccggtggcctgtgcgaggtgcctaggaacccttgtcgcatgagctgccagaatcacggacggttaaacatttctacctgccattgccactgcccgcctggatatactgggcgatactgccaggtgcggtgctccctacagtgcgtgcatggtcggtttagagaggaggaatgttcttgtgtatgtgacatcggctatgggggtgcgcagtgtgcgacaaaagtgcacttcccattccacacttgcgatttacgaatcgatggggattgctttatggtgagcagcgaagccgatacatactatcgagcaagaatgaaatgccagaggaaaggtggggtccttgcccagataaaatcacagaaggtgcaggatattctcgctttttacttaggacggcttgagacaactaacgaggtaatcgattcggattttgaaactcgcaacttctggataggtctcacctataaaacggccaaagatagttttcgatgggccacaggcgagcaccaggccttcaccagctttgccttcggacagccggacaatcatggactcgtgtggctgtcagctgccatgggatttggaaactgcgtggaactgcaggccagcgctgccttcaactggaatgaccagcgttgcaagacacgaaatcgttatatttgccagtttgcgcaggagcatatttcacgatggggccctgggtcttag

SEQ ID NO: 11428 - DNA, 297 bp, synthetic construct
  misc_feature 1..297: note = source = /note="Description of Artificial Sequence: Synthetic coding sequence"
  source 1..297: mol_type = other DNA
atggttctggccatgctcggagccttacatccaagagcaggcttgagcttgttcctccatcttatcctcgctgtggctttgctacgttctcagcctctacgcagccagagatctgtgcctgaagctttcagcgctccgctggaacttagccaacccttgtccgggctggtggatgactacggtatattacccaaacaccccagacccagagggcctaggccacttctctcacgagcacagcagcgtaaacgggacggaccggacctggcagagtattattacgatgcccacctgtag

SEQ ID NO: 11429 - DNA, 2742 bp, synthetic construct
  misc_feature 1..2742: note = source = /note="Description of Artificial Sequence: Synthetic coding sequence"
  source 1..2742: mol_type = other DNA
atggggcctgaggccctgtcaagcctcctcctgctgttgcttgttgccagtggtgatgctgatatgaaaggacacttcgatccagcaaagtgtcgttacgctttgggcatgcaggataggactattccggactctgacatctctgctagtagcagttggtctgactccaccgctgcccgacactcgcgtttggagtcctctgatggcgatggtgcctggtgccctgcaggcagtgtattccctaaggaagaagagtatctacaggtggatctgcagaggctccaccttgtcgcgctcgtaggtacccaaggacgtcacgccggtggcttgggcaaagagttctctagatcctacagactgcggtacagccgcgacggacgacgctggatgggctggaaagataggtggggccaggaagttatcagtggaaacgaggaccctgagggggtggtactcaaggatctgggcccaccgatggtcgcaaggttggttcggttttatccgagggccgaccgggttatgtccgtgtgtcttcgtgtcgaactgtacggatgtttgtggcgggacggtctccttagctatactgctcccgtggggcaaaccatgtatctgagcgaagccgtctatctgaatgattcaacatatgatggacacacggtcgggggattgcaatatggcggtctcggacaactggcagatggggtggtgggcctggatgatttccgaaagagtcaggaactgagggtgtggccaggatatgactacgttgggtggtccaaccattctttctctagcggatatgttgagatggagtttgagtttgatcggctccgcgctttccaggccatgcaagtgcactgcaacaatatgcataccctcggtgcgcgactgcctggaggggtggagtgcaggtttcgacgaggacccgcaatggcctgggagggggaacctatgcggcataatctgggcggtaatctgggcgaccctcgggctcgagccgtctccgtgcctctcggcggacgcgttgcacgtttcctccagtgtcggttcctctttgcgggaccatggctcctgttttcggaaattagttttatttccgatgtcgtgaataactctagtccggcattgggcggtacatttcctccagccccttggtggcccccaggcccaccacccactaatttctcatccctggagctggaaccaaggggacaacagccagtggcaaaggctgaagggtccccaacagccattcttatcgggtgcctagtggccatcatccttttactgcttcttataattgccctcatgctatggaggctccattggaggcgactgctgtcaaaggccgagaggagggttttggaagaagagctcactgttcacctgagcgtccccggtgacactattctcattaacaaccggccagggcctagagaaccacccccatatcaggagcctaggccacggggtaatccacctcacagcgccccatgcgtccctaatggtagcgccttgctgctgagtaatcctgcctacagactgctgctggcaacatatgctcgtcccccaagagggccaggccctccaacgcccgcatgggccaagcccacgaacacacaggcttacagcggcgattacatggaacctgaaaaacctggggcacctctactccccccacccccacaaaatagcgtgccccactatgccgaagcggacattgttacgctgcagggcgtcaccggcggtaatacatatgccgtccctgctttacccccaggagcagtaggtgatggtcccccacgcgtggattttccgcgttcccggctgagattcaaggagaaactgggcgagggtcagttcggggaggtgcacctctgtgaggtggactcaccacaggacctagtgtccttggattttccgctcaacgtacgcaagggacatcctttgctcgttgcagttaaaattcttaggcccgacgcgaccaaaaacgccagaaacgacttccttaaagaggttaagatcatgagccgcctgaaggaccctaatatcatcagactcctgggtgtttgtgtgcaggacgacccactgtgtatgatcacagactatatggagaatggagatctcaatcagtttctgtcggcccatcagttggaagataaggcagcagagggcgctcccggtgatggccaggctgcacaagggccaactatctcttaccctatgctgttgcatgtggctgctcagatcgcaagtgggatgcgttacttagccactctgaactttgtgcatcgagatctagcaactcggaactgcctcgtgggcgaaaatttcaccataaaaatagctgattttggaatgtctcgaaatttatacgctggtgattactaccgcgtccagggtcgagcagtactcccaatacggtggatggcctgggaatgcattctgatggggaagttcactactgcttccgacgtgtgggcattcggagtgacattatgggaagtgttgatgctctgcagggctcagcccttcggacagttaaccgacgaacaggtcattgagaatgctggggagtttttcagggatcagggacgacaggtctatctgtctcgacccccagcctgcccgcagggactttacgagcttatgctgcggtgctggagcagggaatcagagcagcgacctcctttcagccagcttcataggttcctggccgaggacgctcttaacaccgtgtag

SEQ ID NO: 11430 - DNA, 678 bp, synthetic construct
  misc_feature 1..678: note = source = /note="Description of Artificial Sequence: Synthetic coding sequence"
  source 1..678: mol_type = other DNA
tgagccgatctcccatcctgctggggtgctggaccctgctacactggtcacaaggtaggagccctcaggcgggataccgtgatttgctgttgcagacacggagactactctaccccatgcctgtttaccccaggaaagcccagtaggaacccgtctccctggaaacgaactctgtggacactttcggccccttgggcagggccagcaggatggaccggagaggagcagaacgccacaaagaccggactaataacccgcagacccaggcctttgcgcagaagacctcaccccgctccagcgagtcccctaccagaaattatcaggggcaatataccacgaatgttagggaaattcgtgcccgttaactgggaacctccccagccccttcccttccccaagtaccttagatgttaccgttgtctattggagacaaaagagttaggctgcctcctcgggagcgacatatgccttactccagcaggctcgtcgtgtataaccctgcacaagaaaaactccagcgggtcagacgtgatggtcagtgactgtcgctcaaaagagcagatgtcggattgcagcaatacaagaaccagtccagtttctggcttttggatattctcacagtactgcttcctggatttctgtaatgatccccagaatcgaggtctgtatactccgtag

SEQ ID NO: 11431 - DNA, 405 bp, synthetic construct
  misc_feature 1..405: note = source = /note="Description of Artificial Sequence: Synthetic coding sequence"
  source 1..405: mol_type = other DNA
atgccacgatgtcgctggttaagtttaatcctgctgaccatccctctggcgctcgtggccagaaaagaccctaagaagaacgagacaggcgttctgaggaaactcaagcctgtgaacgcatccaatgccaacgtgaagcagtgtctgtggttcgctatgcaggagtacaacaaggagtcagaggataagtatgtatttctagtcgtgaaaacactgcaggcacagctccaggtcactaatctcctcgagtatctgattgatgttgagattgctaggtccgattgccgtaaacccctaagcacaaatgagatttgcgctattcaggagaattcaaaactgaaacgaaaattgtcttgcagtttccttgtgggcgctctaccatggaacggagagtttacggtctag

SEQ ID NO: 11432 - DNA, 1182 bp, synthetic construct
  misc_feature 1..1182: note = source = /note="Description of Artificial Sequence: Synthetic coding sequence"
  source 1..1182: mol_type = other DNA
atgcgaactctgtttaatctcctctggctggccctcgcctgtagtcccgtgcacactaccctttccaaaagcgatgccaagaaggctgcgagcaaaaccctgctggaaaagagtcaattcagtgacaagcccgttcaggacagaggcctggtggtcacagacctgaaagctgagtcggtcgttctagagcaccgcagttattgtagcgccaaagcacgggaccgacatttcgccggagatgttttaggctacgttactccctggaacagtcacgggtatgatgttaccaaagttttcggatcaaagttcactcaaattagtccggtgtggctgcagctgaagaggagaggccgtgagatgtttgaggtgacaggactgcatgacgtagatcagggatggatgagagccgtaagaaagcacgcgaaaggcttgcatattgtgcctcggttgctcttcgaggattggacatacgacgatttccgcaatgtcctcgattccgaggatgaaattgaagagttatccaagacagtggtgcaggtcgccaagaaccaacactttgacggttttgtggtcgaggtatggaatcagcttctttcacagaaacgtgtaggcctgattcacatgcttacacacttggctgaagcactacaccaggcccgattattggcactgctagtgatccctcctgctatcacaccgggaaccgatcagctgggcatgttcactcacaaagagtttgagcaactggctcccgtgttggatgggttcagcctgatgacatacgattacagcactgcccatcagcccggacctaacgctcctttaagctgggttcgggcttgcgttcaagtccttgatcctaaatccaaatggcggagcaagattctgctgggcctgaatttttatggcatggactacgctacctccaaggatgctagggagccagtggtgggggctcggtacatccagacactaaaagatcatagaccaagaatggtatgggacagccaggcctcagagcacttttttgaatacaagaagagtcgctccggccgtcacgttgtcttctatcccactctcaagtccttacaggttagattagagctggccagagaactgggagtgggtgtgtccatctgggagctgggccagggccttgattatttttacgacctgttatag

SEQ ID NO: 11433 - DNA, 678 bp, synthetic construct
  misc_feature 1..678: note = source = /note="Description of Artificial Sequence: Synthetic coding sequence"
  source 1..678: mol_type = other DNA
tgagcagatcttccttcctgttggggcgctgggccatgttacactggacacaaagtgggtgcattgcgacgcgacacagtaatttgctgctgtcgccacggggactatagtacaccttgtctctttacgcccggaaaacccagtcggaatcctagtccttggaaaaggaccctgtggactctgtcagccccttgggctggcccagccggatggacaggtgaagagcagaacgccacaaaaactggactgatcacccggagacccaggcctcttcgcaggagacctcaccccgcacctgccagtcccctgccagagatcatcagaggcaacatccctagaatgcttgggaagttcgtcccagtaaattgggaacctcctcaaccattgccgttccccaaatacctccgctgttatcgatgccttctggaaactaaggagttaggttgtctgctcggcagtgatatctgcctcactcccgctggcagctcttgtattacattgcacaaaaagaattcctctggatctgacgttatggtaagcgactgtcgcagcaaggagcaaatgagcgactgttctaatacaagaaccagccctgtgtccggattctggatcttctcgcaatactgcttcctcgacttctgtaacgatccacagaatagaggtctctatacaccttag

SEQ ID NO: 11434 - DNA, 1410 bp, synthetic construct
  misc_feature 1..1410: note = source = /note="Description of Artificial Sequence: Synthetic coding sequence"
  source 1..1410: mol_type = other DNA
atgatgcgcttgggtggacgcttggttctcaatacgaaagaagaactcgctaacgaaaggctgatgactctcaaaatagccgagatgaaagaagctatgcgtacgctgatcttccctcccagcatgcacttcttccaggctaagcacttaatcgagcggagccaggtttttaatattctgagaatgatgccaaagggcgctgctctgcacctccacgatattgggattgtgacaatggactggctggttcgaaatgtcacctataggccacactgtcatatctgttttacccctcgaggaattatgcagttcaggttcgcacaccctactccaaggccttccgaaaagtgtagtaaatggattctgttagaagactacagaaagagagtccaaaatgtgaccgagttcgacgactctctgcttcggaattttacactggtgacgcagcaccccgaagtcatatacactaatcagaatgtggtatggtctaagttcgagaccatttttttcaccatatctggtctgatccactacgctcctgttttcagagactacgtttttaggtcaatgcaagagttctatgaggataacgtcctttatatggaaattagagcaaggctgttgccagtgtacgaactctcaggtgaacatcacgatgaggaatggagcgtgaagacataccaggaggtggcgcaaaagttcgtggagacccacccagagtttatcgggataaagatcatctactccgaccacagaagtaaagacgtcgcagtgatcgccgaatctatccgaatggcaatgggattgcgcatcaaatttccaacagttgtcgccggattcgatctcgtcggtcatgaggacactggacattctctccacgattataaagaggccctgatgatccccgctaaagatggggtgaagctgccatactttttccacgcgggagagacggactggcagggtacatccattgaccgcaacattctggatgccctgatgttgaatacaactcggatcggtcacggattcgcactttccaagcacccagctgttcgaacctactcctggaagaaggacatccccatagaagtctgtcctatcagcaatcaagtcctcaagctggtgagtgacctccgcaatcacccggttgctacacttatggccacaggacatcctatggtgatctcatcagatgacccagctatgtttggcgcaaaaggactctcctacgatttctacgaggtgttcatgggaatcggtggaatgaaggcggacctgcgcactctgaagcagttggctatgaatagtatcaagtacagtaccctgctggagtccgagaagaacactttcatggaaatttggaaaaagcgctgggataagtttattgctgatgtggctacgaaatag

SEQ ID NO: 11435 - DNA, 1137 bp, synthetic construct
  misc_feature 1..1137: note = source = /note="Description of Artificial Sequence: Synthetic coding sequence"
  source 1..1137: mol_type = other DNA
tgatactccggcgattacatggaacctgagaagcccggagccccactgctgcctccgccacctcaaaacagtgtaccacactacgctgaggccgatatcgttaccctgcagggcgtcaccggagggaacacgtacgccgtgccggcactgcctcctggcgctgttggtgacggcccacctcgggtggacttccctcgcagcagattgcggttcaaagagaagctgggagaaggccaatttggggaagtgcatttgtgcgaggtggactcgccccaggatctggttagcctggacttcccactcaatgtgcgcaaagggcaccccttgcttgtggccgtgaagatactacgtcccgatgctacaaaaaatgcctcgttctctctgttcagccggaatgacttcttgaaagaagtaaagatcatgagcagactcaaggatcccaatattattcggctgctcggagtgtgcgtccaggacgaccctctgtgtatgatcacggattacatggaaaacggagacctcaaccagttcctgtcagcacatcagctggaggataaggctgcagaaggtgctccaggtgatggccaggcggcacagggaccgaccatctcataccctatgcttcttcatgttgctgcgcagatcgctagcggaatgagatacctagccacactgaactttgtgcatagggacttagccacacgtaattgtctggtcggcgagaactttacaattaaaatcgctgactttggcatgagcagaaatttgtatgccggtgattattaccgcgtccaggggagggccgtcctgcctattcgctggatggcttgggagtgtattcttatgggaaaatttactaccgcatccgacgtatgggcattcggggtgaccttgtgggaggtcctcatgctttgccgcgctcaaccattcgggcagttgacagatgagcaggtgatcgagaacgccggtgaattttttagggaccaaggtaggcaagtgtatctgagtcgtccgccagcatgcccccagggtttatacgagctgatgctacgttgctggagccgggagagcgaacagagacccccattttcacagttgcataggttcctcgcagaggatgcactgaataccgtgtag

SEQ ID NO: 11436 - DNA, 678 bp, synthetic construct
  misc_feature 1..678: note = source = /note="Description of Artificial Sequence: Synthetic coding sequence"
  source 1..678: mol_type = other DNA
taggctgacttaccttcttgctggggtgccggtccatgttatacaggtcataaggtcggtgcattgcgccgagataccgtaatttgctgctgtcgccatggcgactactcaaccccttgtctcttcacacctgggaagccttctcgcaatccaagcccctggaagcgcactctgtggaccctcagtgccccatgggccggacccgcagggtggactggcgaggaacaaaacgcaacaaaaacgggcctgataacaagacgccctcggccactgcgccgacggcctcatcctgctcctgcatcaccactccccgaaataatcagaggcaatataccgcgaatgctcggaaagttcgtgcctgttaattgggagccaccacagcccctacccttcccaaaatatctccgttgttatcggtgtttgctagagactaaagagctgggatgtctgctcgggagcgatatttgtcttacaccggctggctcctcatgcatcacactccataaaaaaaactctagtggctctgatgtcatggtgtcagattgtaggtctaaagaacagatgtctgactgcagtaacaccaggacaagccccgttagtggcttctggattttcagtcagtactgcttccttgacttttgtaatgatccacaaaacagaggtctatataccccctag

SEQ ID NO: 11437 - DNA, 846 bp, synthetic construct
  misc_feature 1..846: note = source = /note="Description of Artificial Sequence: Synthetic coding sequence"
  source 1..846: mol_type = other DNA
atgcttcctaaatcgagaagggcgttaacaattcaggagattgctgccctagcccgatcaagtttacacggaatcagccaagtggttaaagaccacgtgacaaagccaaccgcgatggcccagggcagggtagcgcacttgatcgaatggaaagggtggtctaagccgagcgactctccagctgccctggagagtgccttttctagctacagcgacctttccgagggcgaacaggaagccagatttgcagctggcgtcgctgagcaattcgcaatagccgaagctaagttgagagcatggagtagtgttgatggcgaagatagtacggatgacagctatgacgaagacttcgcgggtgggatggataccgatatggctggacagctccccttggggccacatctgcaggatctttttacagggcaccgcttctccaggccagttagacagggcagtgtcgagcccgagtccgactgctctcagacagtaagcccagataccctgtgtagcagcctttgttctctggaagatgggcttctcggcagccctgctcggctggcctcgcagctgctgggagatgaactactactggcaaagctccctccatccagagagagcgctttccgcagtctggggcctttggaggctcaggatagcctgtacaattcccctctgacggagagctgtctttcacccgctgaggaggagcccgctccatgcaaggattgccaaccattatgtcctcccttgaccggctcatgggaacgccagaggcaagccagtgacctggccagttctggcgtggttagtttggatgaggacgaagcagaacccgaagagcaatag

SEQ ID NO: 11438 - DNA, 1110 bp, synthetic construct
  misc_feature 1..1110: note = source = /note="Description of Artificial Sequence: Synthetic coding sequence"
  source 1..1110: mol_type = other DNA
atgaaatttcagggtccactggcctgcttgctcttggctctgtgcctcggcagcggggaggccggtccgctgcagtcaggagaagagtctacgggaaccaatataggcgaggcactgggtcacggcctgggagacgccctatcagaaggagttggcaaggctataggcaaagaagcgggaggagcagctggctccaaagtctctgaggctctgggtcaggggacacgtgaagcagtgggtaccggggttcgccaggtgcctggcttcggagtggccgacgccttggggaatcgcgtaggcgaggctgcgcatgcacttggcaataccggacatgagattggcagacaagccgaagatgtcattcgtcacggggctgacgccgtgcgcggaagctggcagggtgtaccagggcataacggggcatgggagacttctgggggtcacggaatcttcgggagtcagggcggactcggcggacaggggcaggggaacccaggaggactgggcacgccatgggtgcatggataccctggtaactcagctggctctttcggtatgaacccccagggagccccatggggacagggaggaaacggtggacctcccaatttcggtaccaacactcagggagccgtggcccagcctggttacggctccgtgagagcaagcaatcaaaacgaagggtgcacgaatccgcctccttctggatccggaggcggaagctcaaacagtgggggaggcagtgggagtcagagcggaagctccggttccggctctaatggagacaataacaatgggagctcatccgggggtagcagttcaggctccagctcgggagggagcagcggagggtcctcaggcggatcctccggaaatagcggcggttctagaggggactcggggtcagagtcatcatggggatcctcaactgggagctcatcaggaaatcatggcggaagcgggggaggaaatggccacaagccagggaactcagagacctcacccggaatgtttaacttcgacactttttggaagaattttaagagcaagctcggcttcattaactgggacgcgattaataaagaccagagaagctccagaataccctag

SEQ ID NO: 11439 - DNA, 420 bp, synthetic construct
  misc_feature 1..420: note = source = /note="Description of Artificial Sequence: Synthetic coding sequence"
  source 1..420: mol_type = other DNA
atgggtccagaagcattatccagtctcttgctgctgctgctggtagcttccggggatgctgatatgaaggggcattttgatccggctaaatgccgttatgcccttgggatgcaggatcgcaccatccccgactctgatattagcgcttcctctagctggtccgactctaccgcagctcggcactcacgactcgagtcaagcgatggcgatggagcctggtgtcccgctggatctgtgttccccaaagaagaggaatatctccaggtggatctccagcgtctccatctggttgccctagttgggacgcaggggaggcatgcgggaggactggggaaagaattcagtcgcagttaccgcctcagatattccagagatggtcggcgatggatggggtggaaagacaggtgggggcaggaatag

SEQ ID NO: 11440 - DNA, 516 bp, synthetic construct
  misc_feature 1..516: note = source = /note="Description of Artificial Sequence: Synthetic coding sequence"
  source 1..516: mol_type = other DNA
atgcgccataacctgggcggaaatctcggggatccgagagctcgggctgttagcgtcccattaggaggcagggtggcccgttttcttcagtgtcggtttctgtttgccggaccttggctgctattctctgagattagcttcattagcgatgtagtgaataacagcagtcctgcgctggggggtaccttcccaccagctccttggtggccacccggtccaccccctacaaacttctcaagtctggaattagagcctcgaggtcagcagccggtggctaaggccgaaggatcccctacagctattctcattggctgcctcgtagcgattatcctcctactgctcctgatcatcgctttgatgctgtggagactgcactggcggagactcctcagtaaggtgcttgaaagccaccctcgtacgcgctctccaggactggtggggatccgaccaacaccactgcccgtgtcaccgatggccctggtgcacctgtgtgaggtagacagtccccaagactag

SEQ ID NO: 11441 - DNA, 192 bp, synthetic construct
  misc_feature 1..192: note = source = /note="Description of Artificial Sequence: Synthetic coding sequence"
  source 1..192: mol_type = other DNA
atgggacccgaggctctgagctccttgctcttgctgctgctcgtggcgtctggcgacgctgatatgaaaggccatttcgacccggcaaaatgccggtacgcactggggatgcaggacagaaccatacccgatagcgatatatcagcttcgtcttcgtggtcagattcgaccgccgctcgtcattctcgatag

SEQ ID NO: 11442 - DNA, 1137 bp, synthetic construct
  misc_feature 1..1137: note = source = /note="Description of Artificial Sequence: Synthetic coding sequence"
  source 1..1137: mol_type = other DNA
tgatactccggggattacatggagcccgagaagcccggtgcccctctcctgcctccccctccacaaaactcagtgccccactatgcagaagctgatatcgttacactgcaaggcgtgacaggaggcaacacttacgccgtccccgcactgccccctggcgcagtaggtgacggaccaccgcgtgtggacttcccaaggagcaggctacgatttaaggaaaaactaggcgagggacagttcggggaggtccacctttgtgaggttgactcaccacaagatctggtctcccttgactttcctctgaatgtacgcaaaggtcatcccctgctggttgctgtgaagatcctaaggccagacgctaccaagaatgcctccttttcactttttagcaggaacgacttcctgaaggaagtcaaaatcatgtccagactgaaggaccccaatattatccgattactgggagtgtgtgttcaggatgatcccctgtgcatgatcactgactacatggaaaatggcgacctcaatcaatttctgagtgcacaccagctggaggacaaagcggcagagggagcccctggtgacggtcaggctgctcaggggccaacaattagctacccaatgttgctgcacgtcgcagcccagattgcatccgggatgcgctacctagccaccttgaacttcgtccaccgggatctagcaactcggaattgtctggtgggagaaaactttactatcaagattgcggatttcggcatgtctaggaatctctatgctggagactactaccgagtgcagggaagagccgtactgcccatccggtggatggcttgggagtgcatcctgatgggtaaatttacaaccgccagtgacgtctgggcattcggcgtgactttatgggaagtcctgatgctctgcagggctcagcctttcggtcagcttacagacgaacaggtaattgaaaacgctggagagtttttccgagatcagggaaggcaggtgtatctttctagaccccctgcctgtccacagggactgtatgagctgatgttgaggtgctggtcacgcgagagtgaacagaggcccccattttctcagctacatagatttcttgctgaggacgccctgaatactgtttag

SEQ ID NO: 11443 - DNA, 2535 bp, synthetic construct
  misc_feature 1..2535: note = source = /note="Description of Artificial Sequence: Synthetic coding sequence"
  source 1..2535: mol_type = other DNA
atggggccaggcgcaccattcgccagggtaggatggccactccctttattagtcgtaatggcggcaggtgtggcacctgtgtgggccagtcattctccccacttgcccaggccccacagtcgtgttcctccgcatccttccagcgaaaggcgggctgtgtacatcggagccctgtttcccatgagcggcggttggcctggtggacaggcttgccagcccgcagtcgagatggccctggaggatgtgaacagccggagggatatcctccctgattatgagctgaaactcattcatcatgactcaaagtgtgaccccggacaggccacaaagtatctctatgagctattatacaacgatccaatcaaaatcatactaatgcctggatgctcgagcgtctccactctggtggctgaggcggctaggatgtggaacctgattgtgctgtcatacgggagctcttctcctgccctttctaatcggcaaaggtttccgacattttttcgcacccatcctagcgccactctccacaacccaacacgggtcaagctatttgagaaatggggctggaagaagatagctaccatccagcagacaacggaagtgtttacctccactcttgacgacctggaggaaagagtcaaggaggccggaatcgaaatcaccttcaggcagagcttcttctctgacccagcagtgccagtgaagaatcttaagcggcaggatgccagaatcatcgtcgggctgttctacgagaccgaggccaggaaagtgttctgtgaagtttacaaggaaaggctgtttggtaagaaatacgtatggttcttaatcggttggtatgccgataactggttcaagatttacgatccctccattaattgtacagtggatgaaatgacagaggctgtggagggccacattactactgagatagttatgctaaatcctgctaatacacggtccatatcaaacatgacgagccaggagttcgtcgagaaactgacaaagcgcctcaagcggcatcccgaagagactgggggattccaagaggcacctctggcttatgacgccatctgggctcttgcactcgctcttaacaagacatctggaggcggtggtcgatctggcgttcgactcgaagacttcaactataacaaccagacaattacagatcagatctatagggccatgaacagcagctcatttgaaggcgtttccggacacgtagtgttcgatgcatctggctctaggatggcctggacactgatcgaacagttgcagggagggtcctataagaagatcgggtactacgacagcacgaaagacgacttatcctggagtaaaactgataagtggatcggagggtccccaccagcagaccagaccttagtcatcaagacgttcagatttctgagtcagaaactgtttatttccgtgtctgtactttcatcgctgggtatagtgctggcagtagtgtgcctgtcattcaacatttataattcccatgtccgctacatacaaaatagccagccaaacctgaacaatctaactgccgtcggctgcagcctggccttggcagctgttttccctttaggactcgatggctatcacattggtcgcaaccagtttccatttgtgtgccaagcacgactttggcttttggggctagggttctctttgggatatggttcaatgttcaccaagatttggtgggtgcataccgtgttcactaaaaaggaggagaaaaaagagtggcggaagaccctggagccctggaagctttatgcgaccgtgggcctgctcgtggggatggacgtccttactctggctatttggcaaatcgtagaccctctgcatcgaacaatcgaaaccttcgccaaagaggagcccaaagaggatatcgatgtgtctatccttcctcaactcgagcattgctcctcaaggaagatgaacacctggctggggatcttttatgggtacaaaggcttattgttgctgctgggtatttttcttgcatatgagacaaagtcagtgagcactgaaaaaatcaatgaccaccgggcagtcggcatggccatatataacgtcgctgttctgtgccttatcactgcccctgtgacaatgattctttcttcccagcaggatgccgctttcgcctttgcatcattggcaatcgtttttagctcttatattaccctagtggtcctgtttgtgcctaaaatgcgccgactgataactcgtggagaatggcagtccgaggcacaagataccatgaaaaccggatcatcaaccaataacaatgaagaggaaaagtcccgcttgttagagaaggaaaaccgagaattagagaagattatcgccgagaaggaggaacgcgtgagtgaactcaggcatcagctgcaaagtagacaacagcttagatctaggagacatccgccaactccgcctgaaccttcagggggattacccagaggtccgcctgagccgccagatcgcctgtcctgtgacggatcaagagtacacttactttacaaatag

SEQ ID NO: 11444 - DNA, 339 bp, synthetic construct
  misc_feature 1..339: note = source = /note="Description of Artificial Sequence: Synthetic coding sequence"
  source 1..339: mol_type = other DNA
atgctcactgccgcactcgctcctggcgcagctaattcaccaacgaccaatccggtgattctaattgtggacaaggtactcgaaacccaagaccttaatggcgacgggctaatgacgccagctgaactgatcaatttcccaggagtggccctgagaccgtaccccccttacatcggagtggggcctaacagcaatatgtgttcccgctcggacctgccagaggatagcaatacgctctaccccggttctcacctatggttacggcacgctctgaattcaaagggcaacctcgatgcgagactggacggaggcgagaaagccatgcagccacagtggtag

SEQ ID NO: 11445 - DNA, 2676 bp, synthetic construct
  misc_feature 1..2676: note = source = /note="Description of Artificial Sequence: Synthetic coding sequence"
  source 1..2676: mol_type = other DNA
atgctccctaccgaagtcccgcaatctcatcccggaccctctgcgcttcttctacttcaactgctgctgcccccaacgtccgccttctttcctaatatttggtctctcctggctgctcccggttcaatcacccatcaggacctgaccgaggaggccgcactgaacgtgaccctacagcttttcctggagcagcctccgccaggaagaccccctctgaggctggaagactttctcgggagaactctgctggcagatgatcttttcgccgcttacttcggcccagggagctctcgtagatttcgggctgcactcggtgaggtttctagggctaatgctgcccaagatttcctccctacctctagaaacgatcccgaccttcactttgatgccgaacgactggggcaaggccgtgctagactagtgggagcattgcgggagacggtcgtggcggctagagccttagaccacactctcgcacgccagcgactgggggcagcgcttcacgctctgcaggatttctattcccactccaattgggtggagttgggcgagcagcagccacacccccatctcctctggcccaggcaggaattacaaaacttggctcaggtcgccgaccccacctgttccgactgcgaagagttatcctgcccacggaattggcttgggttcacactgctgacatccggttattttggcactcacccccctaagcctccgggaaaatgctcccatggaggtcacttcgataggtccagcagtcagccacctagaggagggattaacaaggactctaccagcccagggtttagcccacaccacatgctacatctccaggccgcaaaattggcactgctggcctccattcaggccttttctctgctcagaagtaggctgggagatcgcgatttttcgaggttgctggatattacacctgcttcctctttatcatttgtgctcgacaccactggtagtatgggagaagagatcaacgcagcaaaaattcaagctcgccatctggtcgagcagagacgagggagtcccatggagccagtgcattacgttcttgtgccctttcacgatccaggattcggacccgtgtttactacaagcgaccctgattcgttctggcagcagctgaatgagattcacgcactgggaggaggagacgagcccgaaatgtgtctttccgcccttcaactcgcacttctgcatactccccctctcagtgacatcttcgtcttcacagacgcctcgcctaaggacgccttcctgaccaaccaagtggagagcttaactcaggaacggcgatgcagagttacctttctggtcaccgaagatacttcacgggtccagggaagagcccgtcgggagatcctgtcacccctacgttttgaaccctacaaagctgtggccttagcctctggaggcgaggtcatttttactaaggaccagcatatcagggacgtggctgccatcgttggcgaaagtatggcagcacttgtaactctgccactagatcctccggtggtggtgcctggccagcctctggtattctccgtagatgggctcctgcagaagatcactgtgagaatccatggtgatattagctcattctggataaaaaatcctgccggagtgagccaaggccaagaggagggtggtggaccccttgggcatacccgtcgatttgggcagttttggatggtcactatggatgatcctccacaaacaggcacatgggagatccaggtcactgctgaggacacacccggagtgcgtgtgcaagctcagacttccctcgactttctctttcatttcggtatcccgatggaagatggacctcaccccggactgtatcccctgacccaaccagtcgctggactacagacacaactgttggtcgaggtgaccggcttggggtcgcgggctaatcctggcgatccgcagcctcacttttcacacgtaattctccgcggagtgccagagggcgctgaactcggtcaggtgcccctggagcccgttggcccaccggagcgagggttgcttgccgctagcctgtcacctactctcctctcaacaccccgacctttcagcctggaactgataggccaggatgctgcgggacggaggctccatcgcgcagctcctcagccatctacagtagtgcccgtcctcctagagctctctggtcctagtggctttctggcgccagggtcaaaggtgcctttgagcctgcgtattgcctccttttcaggaccacaggaccttgatctgcgcacttttgtgaatcccagtttttcactcacgagtaacctgtctcgcgctcacctagagttgaacgagagtgcttggggaaggctctggctggaggtgccagacagtgctgcacctgacagcgtggtaatggtcaccgtcacagcgggaggtagggaggctaacccagtgcctccaacccatgctttcctgcgtctgctggtttccgccccagcccctcaggatagacacactacaccgaccggttcctcagaccccatcctgaccacagccacccctgcgttttccccttttacactggtgacccaggggagagccggagccggactagcggctgggtctccatggtggggaacagtgggaggcgtgcttcttctgctgggcttggcctcctggtag

SEQ ID NO: 11446 - DNA, 2742 bp, synthetic construct
  misc_feature 1..2742: note = source = /note="Description of Artificial Sequence: Synthetic coding sequence"
  source 1..2742: mol_type = other DNA
atggggcctgaggctctgagttctcttctgctgctgctgctggtcgcctccggcgatgcagatatgaaagggcacttcgatcccgcaaagtgcaggtatgctcttggcatgcaggacagaactattcccgactctgacatctcggcctcgagctcctggagcgactccacagccgcacggcactcgagacttgagagctccgatggggatggcgcttggtgtcccgcagggtcagtctttcccaaggaggaagaatatctccaggtcgacctgcagaggttgcacttggtggcattggtgggcactcaaggcagacacgccggaggcctgggtaaagagttctctcgctcttacagattgagatatagccgggatggcagacgatggatggggtggaaggacagatggggccaggaggtcatcagtggcaatgaagatcccgaaggcgtcgtacttaaggaccttggtccacctatggtggcaaggctcgtgcggttctatccaagagccgaccgggttatgagcgtctgtctgagggtagagctgtatggctgcctttggagagacggactcctgagctatacggctccagtggggcagacaatgtatctatctgaagctgtctacctcaatgacagcacatatgacgggcataccgtgggaggcctccagtatgggggtttgggacaactggcagatggagtagtggggctcgacgactttcgcaagtcccaagagttgcgggtgtggcctggatatgactatgtgggttggtccaaccactcattcagcagcggttatgtggaaatggagtttgagttcgaccgtctcagggcatttcaggccatgcaggtccactgtaacaatatgcatacattaggcgctcgactgcctggcggtgtggagtgcagattcagacggggacccgctatggcttgggaaggagagccaatgcggcacaatctcggtggcaatctgggcgaccccagagcgagagcggtgtcggtacccctcgggggtcgagttgcacgcttcttgcagtgtcgctttctgttcgccggaccatggctgctgttctccgaaatatctttcatctcagatgtagttaacaattcaagccccgcactcggcggaacgttccccccagccccttggtggcctccaggcccacctcccaccaattttagcagtcttgagttggaaccacggggacagcaacccgtggcaaaggccgagggctctccaactgcaatcctgattgggtgcctcgtggctattattctgctgctactgctcatcatagcattgatgctgtggcggctgcattggcgtaggttactctccaaggcggagaggagagtgcttgaagaggaacttactgtgcatcttagcgttcctggcgataccatcctgatcaacaataggcccggtcctcgggagcctccaccttaccaggagcctagaccccgtggcaatccgccacatagcgctccttgcgttcccaacggctccgccctcctgctctcaaatccagcctatcggcttttgctcgccacgtacgccagaccccctcgcggacccggaccacctaccccggcatgggctaaacctactaatactcaggcttatagcggagactacatggaacctgaaaagcccggagcccctcttctgcctccaccccctcagaacagcgtcccacattatgccgaggccgatatagtcactctccaaggtgtgacaggcggaaacacctatgccgtcccagctctgccacctggtgctgtcggagacgggcctccacgggtcgacttcccccgatcccgccttcggttcaaagaaaaattaggcgagggacagttcggtgaggtgcatctttgtgaagtggacagtccacaggaccttgtgtcccttgactttcctctgaatgtgcgcaaaggacacccattgttggtcgctgtaaaaattctacggccagatgcaactaaaaatgcacgaaacgacttcctgaaggaggtcaagataatgtcccgtctgaaagaccccaatataataagattactgggcgtttgcgttcaggatgaccctttgtgtatgatcactgattacatggaaaatggagacctgaatcagtttctaagtgcccatcaattggaggataaggcagctgagggagcaccaggagatgggcaggctgcacagggcccaaccatctcttaccctatgctactccacgtggccgctcagattgcttccgggatgcggtacctagccaccttgaacttcgtgcatcgggacctggctacgagaaattgcttagtgggcgagaattttaccattaagattgccgacttcggcatgtctagaaacctttacgcaggggattactacagggtgcagggtcgcgctgtgctacccatcagatggatggcctgggaatgtattctcatggggaagttcaccaccgcgtctgatgtgtgggcgttcggagtgacactgtgggaggtccttatgctatgtcgggcacagccttttggacagctcactgacgagcaggttattgagaatgctggcgagtttttccgggaccaaggacgccaagtgtacctcagcaggcctcccgcatgcccccaaggcttatacgagcttatgctgcgctgctggagtcgggagagtgaacagagaccccctttttcccagttgcataggttcttagcagaggacgccctgaacactgtttag

SEQ ID NO: 11447 - DNA, 390 bp, synthetic construct
  misc_feature 1..390: note = source = /note="Description of Artificial Sequence: Synthetic coding sequence"
  source 1..390: mol_type = other DNA
atggccgctggctcggccccaatgcagttgcacctaagagccaccatcaggatgaaagacgggctgtgcgtgcccaggaagtggatctaccatctgaccgagggatctactgatcttcggactgaagggagacctgacatgaaaacagaactctttagcagctcatgtcccggagggattatgctcaacgaaacaggacagggataccagcgctttctcctctacaatagatctcctcacccgccagaaaaatgcgtggaggagtttaaatcgctcactagttgcctcgatagcaaagccttcctcctgacgcctagaaaccaggggaaaggactgaaatctcacaagacaggtttgggactcaccaaatcttctggggttaccggttag

SEQ ID NO: 11448 - DNA, 846 bp, synthetic construct
  misc_feature 1..846: note = source = /note="Description of Artificial Sequence: Synthetic coding sequence"
  source 1..846: mol_type = other DNA
atgcttccaaaaagtaggcgagctcttactatccaggagattgccgctcttgcgagatcgtcccttcacggaatcagccaggtcgttaaagaccatgtcacaaaacctaccgcaatggcacagggtcgagtagcgcacctgatcgaatggaaaggctggtctaagccttccgattctcctgccgctcttgaaagtgcttttagcagttatagtgatctctctgaaggcgagcaggaggcacggtttgctgccggagtcgcagaacagtttgccattgcagaggctaaacttcgcgcttggtcctctgtggacggggaggacagcacggatgacagctacgacgaggacttcgctgggggtatggacaccgacatggccggacagttgccattgggcccacaccttcaggacttgtttaccggccaccgcttctccagacccgtccgacaggggagcgttgagcccgagtcagattgcagccaaaccgtttctcccgacaccttgtgctcctctctgtgctcactagaggacgggctcctcggatctcccgctagacttgcttcacagctgttaggggacgaacttctgcttgccaaactgcccccttcacgcgagtccgccttccgttccctcggaccactcgaggctcaggacagtctgtataattcccctctgactgagtcatgcctgtcgcccgctgaggaggaacctgcaccatgcaaggattgccagccgctctgcccgcctctcaccggaagttgggaacgccagaggcaggcttccgaccttgcaagcagtggcgtggtttccttggacgaggatgaggccgagccagaggaacagtag

SEQ ID NO: 11449 - DNA, 444 bp, synthetic construct
  misc_feature 1..444: note = source = /note="Description of Artificial Sequence: Synthetic coding sequence"
  source 1..444: mol_type = other DNA
atgggcccagaagctcttagctctctcctacttcttctgctggtcgcgtctggtgatgccgacatgaaagggcattttgaccccgctaaatgtcgctatgccttaggtatgcaggaccggactatcccggattcagatatctccgcctctagtagctggagcgacagcaccgcagctcggcatagcaggctggaatctagcgatggtgacggagcctggtgtccagctggctctgtgttccccaaggaagaagagtacttgcaggtcgatctgcagcgcctgcatctagtggcgttggtggggacacagggacgacacgctggaggtctcggcaaagaattttctagatcttacaggctgcgctattcacgcgatggccgtagatggatgggctggaaggaccggtggggccaagaggtgatcagcgggaatgaagacccatag

SEQ ID NO: 11450 - DNA, 2631 bp, synthetic construct
  misc_feature 1..2631: note = source = /note="Description of Artificial Sequence: Synthetic coding sequence"
  source 1..2631: mol_type = other DNA
atgggacctgaagcgctgagctctctgcttctgttactgcttgtcgcgagcggcgatgcagatatgaagggccattttgaccctgcaaagtgcagatacgcgttgggaatgcaggatcggactatccccgatagcgacatttcagcgagttcatcctggagtgacagcaccgctgctagacattccagactagagtcctccgatggagacggagcttggtgtccagccggatcggtctttccaaaagaagaagaatatctccaggtggatctccagcgactgcatctggtggcactggtcggtacccagggcagacacgccggtggtctcggaaaggagttctccagatcttaccgcttgagatacagtcgagacggtcggagatggatgggttggaaagacaggtgggggcaggaagtgattagtgggaatgaagatcctgagggagtggtacttaaggatctcggtccgcctatggtggcccgattggtgcggttttatccacgtgccgacagagtgatgagcgtatgtttgcgagtggagctgtatggctgcctgtggcgcgatggactgctgagctataccgctcccgtcggacaaactatgtatctgtcggaggccgtgtatctgaacgactcaacctacgatggccataccgtgggtggacttcaatatggcggacttgggcaactggccgacggcgtggtgggattagatgatttcaggaagtctcaggagctgcgggtgtggcctggatacgactacgtagggtggtccaatcatagctttagctcagggtatgtagaaatggagttcgaatttgaccgcctgagggccttccaagccatgcaggttcattgtaacaacatgcacactctcggcgctcggctgccaggcggagttgagtgcaggttccgtcgcggtcctgcaatggcctgggagggcgagcccatgagacacaatctgggtggaaatctgggagacccgagggctagggccgtgtccgttcctctgggagggagagtggccaggttcctccaatgcagattcttgtttgccggaccatggttacttttcagtgaaataagttttataagcgacgttgtgaacaacagctctccagcactgggtgggacctttccacccgcaccctggtggccccctggccctccccctactaacttctcgtcccttgagctcgagcccagaggccagcagccggtcgctaaagctgaaggcagtcctacagcgatcctgattggatgtctggtcgctatcattctgctactgctcctcattatcgctctgatgctgtggcggctccactggagaaggctgctgtctaaagctgagaggagagtgctggaggaggaactgacagttcacctgagcgttcccggtgacactatactgataaacaatcggccaggtccccgtgagcctcccccttatcaagaacccaggccaaggggaaatccccctcacagcgcaccatgtgtgccaaacgggtcagcatattccggcgactatatggaacccgagaaacctggagcgccactgctgccccctcctccgcagaactctgtcccacactatgccgaagcggacatagtaactctgcagggggttacaggcggaaatacctatgctgtgcccgctctgcctccaggcgcagtaggtgatggcccaccccgtgtggactttccacggtctcgactgcgcttcaaagagaaattaggcgagggacaatttggtgaagtgcatttatgcgaagtagactcgccccaggaccttgtttccctggattttcctttgaacgtgcgaaaaggtcatcctctgctcgtcgctgtaaagatacttcgacccgacgcaaccaagaacgcccgaaatgatttcctcaaagaagtgaagatcatgtccagactcaaagatccaaatatcattcgcctgctgggtgtttgtgtgcaagacgaccccctgtgtatgattaccgattacatggaaaacggcgatctcaatcagtttctgagtgcccaccaactggaggataaagcggcagagggggctcccggtgacgggcaggctgcacagggccctactatcagctaccctatgctgctgcatgtggccgcacagatagcctcaggcatgagatacctagcgaccctcaatttcgttcacagggacctcgctaccagaaattgtctggtcggcgagaattttactataaaaatcgccgattttggcatgagcaggaacttatatgccggagactactacagagtacagggacgggctgttctccctataagatggatggcttgggaatgtatcctgatgggcaagtttaccacagccagcgatgtgtgggcatttggggtcactctctgggaggtgctgatgctttgtcgtgcacaaccgtttggtcaactcacagatgagcaggtgattgaaaatgcaggggagttctttagggaccagggacggcaggtgtatctctcacggcctccagcctgtccacagggcctctacgagcttatgctgagatgttggtctcgagagagcgaacagaggcccccattctctcaactccataggtttctcgctgaagatgccctcaatacggtgtag

SEQ ID NO: 11451 - DNA, 1749 bp, synthetic construct
  misc_feature 1..1749: note = source = /note="Description of Artificial Sequence: Synthetic coding sequence"
  source 1..1749: mol_type = other DNA
atggactttcttctggctctggtgctggtctcttccctgtacctacaggctgcggctgagtttgacggccgttggccgagacagattgttagctcaattggcctgtgccggtatggaggaagaatcgactgttgttgggggtgggcccgacaaagttggggacagtgccagcccttctatgttttgcggcagcgcatcgcccgaatccgctgccaattgaaagccgtgtgtcagccgcgatgtaaacacggtgaatgtatcgggccaaataaatgtaagtgccaccccggatatgccggaaaaacttgcaatcaggatctgaacgagtgtggcctcaaaccaaggccgtgtaagcacaggtgcatgaacacatatggcagctataaatgctattgcctgaatggctatatgctcatgcccgatggaagttgtagctctgctctgacttgtagcatggccaactgccagtatggctgcgatgtcgtcaagggacagataaggtgtcagtgcccatccccaggactgcagctagcccctgatgggaggacatgcgtcgacgtagatgagtgcgctacagggagggcttcctgcccaaggttcaggcagtgcgtgaatacgtttggatcgtatatttgtaagtgccataagggctttgacctcatgtatatcggtggcaaatatcagtgtcatgatatcgacgaatgctcactgggccagtaccagtgttcttcatttgcccgttgttataatatcagaggcagctataagtgcaaatgcaaagagggataccagggggatggactgacatgtgtttacatccccaaggtcatgattgagccaagcgggcctatccacgtcccaaaaggaaacggcactatactcaaaggtgatactggtaataataattggatacccgatgtcggttctacttggtggccaccaaaaacaccgtatataccgcctatcatcaccaacagaccaacctctaaacccactacacgcccaacgcctaaaccaactcctatccccacccctccaccaccaccgcctctgcccaccgagcttcgaacgcctctgcccccaaccactccagagaggccaaccacgggtttgactaccattgctccggcagcctctaccccccctggtgggattaccgtggacaaccgggtgcagaccgacccccaaaaaccacgtggggacgtcttcattcccagacaaccaagtaacgatttgtttgagattttcgaaatcgaacgtggtgtcagcgctgacgacgaagccaaagacgaccctggcgttctagtgcatagttgtaatttcgaccacgggctgtgcggatggattcgggagaaggacaacgacctgcattgggagccaattcgtgatccggcaggaggacaataccttacagtgagtgccgctaaggcacccggtggcaaggcagccaggcttgtcttgcccctcggacgactcatgcattccggggacctctgtttgagcttcagacacaaggtcaccggcctgcactccggaaccctccaggtgtttgtaagaaaacacggcgcacacggcgcagccctgtgggggaggaacggtggtcacggctggcgccagacccagatcaccctaaggggagcagacattaagagcgttgtttttaagggcgaaaaacgaagggggcacaccggagagatcggacttgatgatgtgagcctgaagaaaggacattgcagcgaagagagatag

SEQ ID NO: 11452 - DNA, 1602 bp, synthetic construct
  misc_feature 1..1602: note = source = /note="Description of Artificial Sequence: Synthetic coding sequence"
  source 1..1602: mol_type = other DNA
atgggaagttcccgattggccgcattactattgccactgttgcttatcgtaattgatctgtcagattcggccggtatcgggtttaggcatctgcctcactggaacacaagatgcccactagcgagccataccgatgatagctttactggatccagtgcgtatattccctgccggacgtggtgggcactcttcagcaccaagccttggtgcgtgcgagtgtggcactgttccagatgtctctgccagcacctgctgtccggcggatccgggctgcaacgcggactttttcacttattggtgcagaagtccaaaaaatcttccacattcaaattttatcgcagacataaaatgccggcacctgctcaacgcaaacttctccctcgccgtcacctttccgaaaaatcccaccatatctctatccctagccccgatatttcccacaaaggcttacgtagtaaacgaacacagccttctgaccctgaaacttgggaaagcctgcccagattggattctcaaaggcatggtggcccagaatttagttttgatctgctccccgaagcgcgtgccattcgagtgacgataagctctggccctgaagtgagcgtgcgactgtgccaccaatgggccttggagtgtgaagagctctcatctccctatgacgttcagaaaatcgtttctggaggacacaccgttgaattgccttatgagtttctcctgccatgcttgtgtattgaagcttcctacctgcaggaggacacggtgaggcgcaagaaatgccccttccagtcttggcccgaggcctacggaagcgacttctggaagagcgtccatttcacggactacagccaacatactcagatggtcatggcgctgacactgagatgcccactgaagttggaagctgctctctgccagaggcacgactggcacaccttatgcaaagacctccctaatgccactgccagagagtctgatggctggtatgtgctggagaaagtagacttacatccccagctgtgcttcaagtttagcttcggaaattcttcacatgtcgaatgccctcatcaaactggttctttgacttcttggaatgtgtccatggacacgcaggctcagcagttgatccttcacttctctagccgcatgcatgccacctttagtgccgcatggagtttgcctgggctgggccaggacacccttgtgccccctgtgtacacagttagccaggcaagaggaagttcacccgttagcttagatctgatcatccccttcctgaggccaggatgctgtgtcttgctccacgcaagtctgtctagccctggcggagaggacgcttggctgattggtgtgggaggatctgttcccagcggcgtggcggtccggtgccccgtgtgcctggaagccccacttgtcagcggatgcctccttcaaacacccggagcgttggacccgggtaccgctgggcctcctcacccaactggatgctgttctggccctcatctgccagctcccactgtcaggcctggaccctcagctgcatctgcacctcccgctaggggtggtctgggaggagcagcagcgccaggcggaagtgcaggctag

SEQ ID NO: 11453 - DNA, 1293 bp, synthetic construct
  misc_feature 1..1293: note = source = /note="Description of Artificial Sequence: Synthetic coding sequence"
  source 1..1293: mol_type = other DNA
atgggagtcagtaagctggatattctctaccgacgtctcctgctgaccaaactatttataaggggatggggcaggcccgaggaccttaagagactatttgagttccggaagatgattggcaacagagaaagatgtcaaaacctggtgagcagcgactaccccgtgcatattgacaagatagaagaacagtctgattgtaagatcttggacggacactttgtgtccccaatggcccactatgtgcctgatataatgccgattgaatctgtcattgcacggtttcagttcattgtacctaaggagtggaactctaagtaccggccagtctgtattcatttagctgggacaggtgatcaccattactggcggaggagaacattgatggcaaggcccatgattaaggaagccaggatggccagcttgctcctggagaatccatattatggctgcagaaagccaaaggatcaggttcgttcatcacttaagaatgtctcagatctgtttgtaatgggcggtgctctggtgctcgagagcgctgcgcttctgcactggctggagcgagagggctacggcccactggggatgactgggatttctatgggtggccatatggctagtttagccgtgtctaactggccaaagccaatgcctctgatcccgtgcctgtcatggtctaccgcctcaggagtgtttactaccacagacagcttcaaaatggggcaggagtttgtaaagcatttcacgtcatcggccgacaaactcaccaatctgaaccttgtttcccgtactctgaatttagatataagcaatcaggtggtatcacagaagcccgctgactgccacaattctagcaagacatcggtctcagccacatccgagggcctgctgttgcaggacactagtaaaatgaaacggttcaaccagacactgtcaaccaacaagtctggatataccagccgaaaccctcagagttatcacctgctgagcaaggagcagtcacggaactccctgagaaaagagtcgttaatcttcatgaagggtgtaatggacgagtgcacccacgtcgccaacttcagtgtgccggtggacccgagcttgatcattgtagtgcaggctaaggaggacgcgtatatcccacgaaccggcgtacgctctctgcaagaaatttggccgggttgtgagatccgttacctggaaggaggccacatcagtgcctatctgttcaagcagggactgtttaggcaggccatttatgatgcattcgatcgctttctgcataagtatgccaactag

SEQ ID NO: 11454 - DNA, 2631 bp, synthetic construct
  misc_feature 1..2631: note = source = /note="Description of Artificial Sequence: Synthetic coding sequence"
  source 1..2631: mol_type = other DNA
atgggccctgaagcactttcctcccttctgctactgttattggttgcctcgggtgatgccgacatgaaggggcatttcgacccagctaagtgcaggtacgccctgggaatgcaagaccggacaataccagacagcgatatctccgcttcaagttcatggagcgatagcactgccgctcgacactcacggctggaaagttccgatggcgacggcgcttggtgtccagctgggagcgtctttcccaaggaggaagagtatcttcaggtggacctgcagaggctgcacttggtggccctagttggaactcaaggaagacacgccggtgggctgggcaaagagttcagcaggtcatataggttacgttacagccgtgacggcaggcggtggatggggtggaaggatagatggggccaggaggtgatctctggtaacgaggatccggagggtgtagtgctcaaagatctgggaccacccatggtggcgcgtttggtgagattctatccacgcgctgaccgggtgatgagcgtgtgtctgagggtggaactctatggctgcttgtggagagatggtcttctttcatacacagcacctgttggacagactatgtacctgtccgaggcagtctacctcaacgatagcacctatgacggccacaccgtggggggacttcagtacggcggacttgggcaattggccgacggtgtagtggggctggatgatttccgcaaaagtcaggaactaagagtgtggcccggatacgactatgtagggtggagcaaccactctttcagctcaggttatgtggaaatggaattcgagttcgatagactccgggcatttcaggccatgcaggtgcattgcaataacatgcatacgttgggcgcacggttaccaggaggtgttgaatgtcgtttcaggcgcggaccagccatggcttgggagggggagcccatgcgtcacaacctgggcggtaacctgggtgatccaagggcgcgtgccgtatccgtgcccctcggcggaagggtggctagattcctgcagtgtagattcctgtttgcagggccatggttattgttttcagagatctcctttattagtgatgtggtaaataactcttcacctgcgctgggcggaacatttccaccggcaccatggtggccacccggtcccccacccaccaacttcagctctcttgagctcgaaccaaggggccagcagccagttgcaaaggcagaaggatctccgactgccatactcataggctgcttagtcgcaatcatcctactgctccttctcatcattgcactgatgctgtggagacttcactggcggcgtcttttgtcaaaggcagaaagacgggttctggaagaggaactgacagttcatctgagtgtcccaggggataccatcctaattaacaataggcctgggccacgagaaccccctccctaccaggaaccacgtccccgaggtaatcctccacattccgccccatgcgtacccaatgggtcagcctatagtggggattatatggaacccgaaaagcctggcgcacctctgctgcctccacccccacagaactcggtaccacactacgctgaggctgatatcgttacgctccaaggcgtgaccgggggtaatacatacgctgtgcctgctttaccgccaggtgccgttggagatggaccaccccgtgtggacttcccacgctcacgtctgcggtttaaagagaagctcggcgagggtcagttcggagaggtacatttgtgtgaggttgactctccccaggatctagtctctctcgacttccctctaaacgtgaggaagggtcacccgctccttgtcgctgtcaaaatactgcgtcctgacgcaactaagaacgctagaaacgactttcttaaggaggtcaagattatgtcccggctcaaagatcctaacatcataaggctcctgggggtgtgcgtgcaggacgaccccctgtgcatgattacagactacatggaaaatggagatctaaatcaatttctcagcgcccatcagttagaggataaggccgctgagggagctccaggtgatggacaggctgcacaggggcctaccatatcatatcctatgctcctccatgtcgcagcacagatagcctctggaatgcggtatctcgccacgctgaactttgtgcacagagacttggccacacggaattgtctggtgggagagaacttcaccatcaaaattgcagatttcggcatgtctcggaatttgtatgctggtgactattacagggtacagggccgtgcggttcttcctattcgatggatggcatgggagtgtatcttgatgggcaaattcactactgcaagtgatgtatgggcatttggcgtgacattgtgggaagtcctgatgctgtgtagggcccagcctttcgggcaactgaccgacgagcaggtgatcgagaacgctggagagttcttccgcgatcaaggccgacaggtctatctgtcccggccaccagcctgtccgcaggggctgtacgaattaatgctgcggtgttggtctagagaatccgaacagaggccaccttttagtcagcttcatagatttctcgcggaggacgcacttaacaccgtgtag

SEQ ID NO: 11455 - DNA, 237 bp, synthetic construct
  misc_feature 1..237: note = source = /note="Description of Artificial Sequence: Synthetic coding sequence"
  source 1..237: mol_type = other DNA
atgggttcgggcttaccccttgttctactcctcaccttgctcggttccagtcacggtacggggccaggcatgacccttcagctgaaactcaaagaatccttcttgacaaacagttcctacgagtcctccttcctcgaactgctggagaagctctgcttgctgctgcatttgccttcagggaccagcgtaacattgcatcacgcgaggtcacagcaccatgttgtttgcaacacatag

SEQ ID NO: 11456 - DNA, 2631 bp, synthetic construct
  misc_feature 1..2631: note = source = /note="Description of Artificial Sequence: Synthetic coding sequence"
  source 1..2631: mol_type = other DNA
atggggccagaagccttgtctagcttactcctcctgctgctcgtagcgtcaggggacgccgatatgaaagggcatttcgatccagctaagtgcagatatgccttgggaatgcaggatcgtacgatcccagactccgacataagcgctagctcctcttggtctgattcaactgctgcacgccactcacggctggagagcagcgatggcgacggagcttggtgtcccgcaggtagtgtgttccccaaagaggaggagtatctgcaggtggatctgcagcgtcttcacctcgtagccttggtgggtacacagggcagacatgccggtggcctcggaaaggagtttagtagaagttataggctcagatactcccgggatgggaggcgatggatgggatggaaggaccgctggggacaggaagtcatttcaggcaacgaagacccagaaggagtcgtgttaaaagatctcggtccacctatggttgccaggctggtgagattttatcccagagcagaccgcgtgatgtctgtgtgcttgagagtggagctgtacgggtgtctatggagggacgggctgctctcatataccgctcctgtgggccaaacaatgtacctgtccgaggctgtgtacctcaatgatagcacatatgacggccacacggttggaggcttacaatacggaggactgggtcagctcgctgacggcgttgtgggacttgatgactttcggaagagccaggagttgcgtgtttggccaggatacgattacgtaggctggagtaaccactcgttcagcagcggttatgtagaaatggagttcgaatttgaccggctgagggcctttcaggcaatgcaagtgcactgtaataacatgcatactcttggagcgcgtctgcctggtggcgttgagtgtcgcttcaggagggggccagctatggcatgggagggggagcccatgcgtcacaacctgggcggaaacctaggggatcccagggcaagggcagtctctgtgccgttgggcggtagggtcgcaaggttcctgcagtgtcgtttcctgttcgctggaccttggctgctcttctcagagattagtttcatctcagacgtagtaaataattcttcacccgctctgggagggactttccctcctgctccctggtggccaccaggcccaccgcctaccaattttagtagcctggagctggagccacgtgggcaacagccagttgcaaaagcagagggctcacctaccgcaattctcatcgggtgcctggtcgccatcattttattgttgctactcattattgctctgatgctatggcgcctacactggagacggcttctttcgaaagcagagagacgcgtgctagaggaggagctcacagttcatctttccgtccccggagacacaatcctgattaataatcggcctgggcctagggaaccacctccttaccaggagcctaggccgaggggcaatcctccacactccgctccttgtgtcccaaatggttcagcatacagcggagactatatggagcctgagaagcccggagcacccctcctgcccccacctccccaaaatagcgttccgcactatgccgaggcagacattgtcaccctccagggagtaaccggaggaaatacttacgccgtccctgccctgccaccaggtgcagtgggggatggccctcctcgtgtggattttcctcgatcacggttacgcttcaaagaaaaactgggtgaaggtcagttcggtgaagtccacctttgcgaagtggactcgccacaggatctggtcagcctggacttcccactgaacgtgagaaaggggcaccctctactggtagcagtgaagatcctgcgcccagacgcaactaaaaatgcaaggaacgacttcctcaaagaagttaaaatcatgagtcgactgaaagaccccaatatcatcagattattgggcgtgtgcgttcaggacgatccactgtgtatgatcacggactatatggaaaatggtgacttaaaccagttcttgtccgcacatcaactggaggacaaagccgcagaaggggctccaggcgacgggcaggcagcacagggtcctacgatcagctaccccatgttgcttcacgttgcggctcagatagcctcaggaatgcgctatcttgccacgctcaatttcgtgcacagagatcttgcaactaggaactgtctggtaggtgagaactttaccataaagattgcagacttcgggatgtctagaaatctctatgcaggcgactattacagggtgcaggggcgtgcagtgctgccaattcgctggatggcgtgggagtgtattctgatgggcaagttcaccaccgcctctgacgtctgggcgtttggtgtcactctatgggaggtgttgatgctgtgtcgagcccagcctttcggacagctgaccgatgagcaggtcatcgaaaacgctggcgagttctttcgtgaccagggaagacaggtctacttgtcccgtccacccgcatgtccccagggcctgtatgaactcatgctgagatgctggtccagggagtcagagcagcggccacccttttctcagctgcatcgctttctcgccgaagacgccctgaataccgtgtag

SEQ ID NO: 11457 - DNA, 1257 bp, synthetic construct
  misc_feature 1..1257: note = source = /note="Description of Artificial Sequence: Synthetic coding sequence"
  source 1..1257: mol_type = other DNA
atgcgtactctgttcaatttgctctggcttgctctcgcatgctctcccgttcatacaacactttccaaatctgatgcgaaaaaggctgcctccaagactctgctcgaaaaggtgaaattctgttcatgctgcccaggatggtcagctatggctagatcctggctgactgcaacttctgccacccagtctcaattttccgacaaacccgtgcaagacagaggcctcgtcgtaactgacctcaaagctgaatctgtggtgctggagcaccgctcgtactgttctgctaaagcacgcgacaggcactttgcaggagatgtgctcggctacgtgacgccatggaactcccacggctacgatgttacgaaagtctttggaagcaagttcacccagatcagccccgtatggttacagctgaagagacgcggacgcgaaatgttcgaggttacagggctgcatgacgtggatcagggttggatgcgcgctgtgagaaagcatgccaagggtctgcacattgtccctagactgctcttcgaagattggacctacgatgacttcagaaatgtattagactctgaagatgagatcgaagagttatcaaaaaccgttgttcaggtggcgaaaaaccagcactttgacggttttgtcgttgaagtatggaaccaacttcttagccagaagcgggtgggcctcatccacatgctaacgcatctggccgaggccctgcatcaagcgaggcttttggcactgctggtaatcccacccgcaataacccctggcaccgaccagttggggatgttcacacataaggagtttgaacagcttgcacctgtactggacggatttagtctgatgacatacgattactctacagctcatcaaccaggcccaaatgcacccctctcatgggtgcgtgcttgcgtgcaagtgctggacccgaagtccaagtggagatcaaaaatcctgttgggtctgaatttttatgggatggattatgcaactagcaaagacgccagggagccagtcgtaggagctcgctacatccagactctcaaagaccaccggccacgcatggtttgggatagtcaagcctctgaacattttttcgagtataagaagtctagatctggcagacatgtggtcttttatcctacattgaagagtctccaggtcagactggaactggccagagagctgggagtgggcgtgtctatatgggaactcggtcagggtctggactatttttatgatctgctgtag

SEQ ID NO: 11458 - DNA, 390 bp, synthetic construct
  misc_feature 1..390: note = source = /note="Description of Artificial Sequence: Synthetic coding sequence"
  source 1..390: mol_type = other DNA
atgaggaagcccaggcgcaagagtaggcagaacgcagaagggaggcgatcaccctccccatactctcttaagtgcagccctacacgagagacccttacgtacgcccaagctcagcggatagtggaagtggacatcgatggacgattgcaccgaatcagtatctatgaccccctgaaaatcatcacagaagatgagctgacagctcaggatattaccgaatgtaactccaataaggaaaactccgagcagccccagtttcccggaaagagcaagaaacctagcagcaagggaaagaaaaaggaatcctgcagcaagcatgcctctgggacgagcttccacctgcctcagccatcatttcggatggtcgacagcggtatacaaccggagtag

SEQ ID NO: 11459 - DNA, 315 bp, synthetic construct
  misc_feature 1..315: note = source = /note="Description of Artificial Sequence: Synthetic coding sequence"
  source 1..315: mol_type = other DNA
atgcgtgtcgtgaccatcgtgatcctcctgtgtttttgcaaagccgcagagttgaggaaagcttctcctgggagtgttagaagcagggtgaaccacggacgcgctgggggaggaagaaggggatctaacccagttaaacggtacgctcccggacttccatgcgatgtgtatacgtacctgcacgaaaagtatttggattgtcaggaaaggaagctcgtatacgtcctaccgggttggccccaagatttactacacatgctcctggccaggaataaaataaggactctgaaaaataatatgttctccaagttctag

SEQ ID NO: 11460 - DNA, 639 bp, synthetic construct
  misc_feature 1..639: note = source = /note="Description of Artificial Sequence: Synthetic coding sequence"
  source 1..639: mol_type = other DNA
gactttgggtactgtcccagagtgtattgcgagaatcagcccatgttgccgatcggggttcttgttatggtcggcttcacagtcggaaaagtgccggtgcctgacattagaacctgtcatttttgcctggttgaggacccaagcgtggggtgcatctccggaagcgagaaatgcacaattagtagcagcagcctgtgcatggtgatcactatctattacgacgtcaaggtgcgctttatcgtgcggggttgcgggcagtacattagctacagatgccaagaaaaaaggaatacttatttcgcagaatattggtaccaggcccagtgttgtcaatacgattactgtaatagctggagctccccccagctgcagtccagtctccctgagcctcacgaccggcctttagccctgccactttctgattcacaaatccagtggttttatcaggctctgaacctctcgctgcctctgcctaactttcatgcaggaacagaacctgacggtctcgatccgatggtgaccctaagccttaacctggggctctcatttgccgaactgcgcagaatgtatctgttcttgaattcctccggacttctggtcctgccgcaggcagggctgcttaccccccatcctagttag

SEQ ID NO: 11461 - DNA, 1005 bp, synthetic construct
  misc_feature 1..1005: note = source = /note="Description of Artificial Sequence: Synthetic coding sequence"
  source 1..1005: mol_type = other DNA
atgttagcactggccaaaattttacttatttccaccctgttttattctctgctctcaggatctcacggcaaagaaaaccaggacattaacactacccagaatatcgcagaggtattcaagaccatggaaaacaaaccgatttccctcgaatccgaagccaacctgaattccgacaaagagaatattaccacgagcaatttgaaggcctcccacagcccaccactcaatctgccgaacaattcacacggaatcaccgacttcagcagcaacagctccgcagagcattcacttgggtcactgaaacccacgagtacgattagcactagtcccccacttattcacagctttgtgtccaaggttccttggaatgccccaatcgccgatgaggatctattgcctatttctgctcatcccaacgccactccagccctcagctctgagaactttacgtggtccctggtgaacgacactgtcaaaacgcctgacaatagctctatcacagtttcaatactgagcagtgagcctacatctccatctgtcacaccgttgatcgtggagccaagcgggtggctgacgacaaactctgattccttcactggcttcacaccataccaggagaaaactactcttcaaccgacgctgaagttcaccaataatagtaaacttttcccaaatacaagcgatccccaaaaggaaaatagaaacactggtatcgtgttcggtgcaattctgggcgcaattctcggcgtttctttactaaccctcgtgggttacctcctgtgcggaaaacgaaaaaccgattcattctcacacaggcgcctctacgacgaccgcaacgagcccgtcctgagactggacaatgctccggaaccatatgatgtttctttcggtaatagctcgtattataatccgacactgaacgacagtgcaatgcctgagtcggaggaaaatgcccgtgatggcatacccatggacgacatccccccactgcgtacatctgtgtag

SEQ ID NO: 11462 - DNA, 987 bp, synthetic construct
  misc_feature 1..987: note = source = /note="Description of Artificial Sequence: Synthetic coding sequence"
  source 1..987: mol_type = other DNA
atgggcccagctggctgcgcatttacgctgttgctcttactcggcatctcggtgtgcggacagccagtatatagctctcgcgttgtgggaggccaagatgccgctgctggacggtggccctggcaagtctcccttcactttgatcacaacttcatctgtggtgggtctttggtcagcgagaggttgattctcacggctgcgcactgcatccagcctacctggactaccttcagctacaccgtgtggcttgggagcattacagtcggagattctagaaagcgggtgaaatactacgtatctaagattgtgatacacccaaagtatcaagatacgaccgctgatgtggccctgctgaagctgagcagtcaagtgacatttaccagtgcaattctgcccatttgtctgccctcggtgacaaagcagctcgcaattccacccttctgctgggtgacaggatgggggaaagtcaaggagtctagcgacagagattaccactcagctctccaggaagccgaagtgccaataatagacaggcaggcttgcgagcagctgtacaaccctattgggatcttcctgccggctctggagcccgtgatcaaggaggacaagatttgcgctggggatacccagaatatgaaagattcctgtaaaggtgactcagggggaccactgagctgtcacatagacggggtctggatacaaacaggcgttgtctcctggggcctggaatgcggcaaatccctgccaggagtgtacactaatgtgatatattatcagaagtggattaacgccacgattagccgcgcaaataacctggatttcagtgacttcctctttccaattgtcttgctcagtctcgccctgcttagacccagctgtgccttcggacccaacaccatccatagagtaggaaccgtagccgaagcggtggcctgtatccagggctgggaagaaaacgcatggcgcttcagtccccgagggagatag

SEQ ID NO: 11463 - DNA, 453 bp, synthetic construct
  misc_feature 1..453: note = source = /note="Description of Artificial Sequence: Synthetic coding sequence"
  source 1..453: mol_type = other DNA
atgaggttcatggccggtcctgctgggtcccaatccttaggtcccctttgctttcacagctctccacaagctctctatacagtgctgctgatcgttcttgtcatgatgtctcttgtcttcggcaagttcgtgcctgtgaactgggagccccctcagcctctgcctttccccaaatatcttaggtgttatagatgccttctggaaacaaaggagctgggttgtctcttggggtcggatatttgtcttacaccagcagggagctcatgtattacactgcacaaaaagaattccagtggttccgatgtgatggtgtcagactgtagatctaaggagcagatgagcgattgcagcaacacgagaacgtcccccgtgtccgggttttggatcttttcacagtattgcttcctggacttttgtaacgacccccagaacaggggcctgtatactccctag

SEQ ID NO: 11464 - DNA, 234 bp, synthetic construct
  misc_feature 1..234: note = source = /note="Description of Artificial Sequence: Synthetic coding sequence"
  source 1..234: mol_type = other DNA
atgagagtagcaggtgcagccaagctggtggtggcagttgccgtattcctcctgacattctatgtgatatctcaggtgtttgagatcaaaatggatgccagtctggggaacctgttcgcccgtagcgcgctggataccgctgctcgttccacaaagcctccacgatacaagtgtggtatcagcaaggcctgtcctgaaaagcactttgcgttcaagatggctagcggtgcttag

SEQ ID NO: 11465 - DNA, 1143 bp, synthetic construct
  misc_feature 1..1143: note = source = /note="Description of Artificial Sequence: Synthetic coding sequence"
  source 1..1143: mol_type = other DNA
atggctctgacaccgggatggggatcatctgcaggcccagtaagacccgagctttggctgctgctgtgggccgctgcctggcgcttgggcgcatcagcatgccctgctctgtgcacatgtaccggcacgaccgtagattgccacggcacaggccttcaggccatccccaagaacataccgcgtaacaccgagcggctggaacttaacggcaacaacattaccagaattcacaaaaatgatttcgcagggcttaagcagttacgggtgctccagctcatggaaaatcaaatcggagcagtggagagaggcgcattcgatgacatgaaggaactggagcggctggatctgtccgagaatgccatccaagctataccgaggaaggccttccggggagccaccgatttaaaaaacctccagctagacaagaatcagattagctgtattgaagaaggagccttccgggctctgcgcggattggaggtgctgaccctcaataacaacaatatcaccacaatcccagtcagttcattcaaccatatgcccaagctgcggactttcaggctgcactccaatcacctcttttgtgattgccacctggcttggctgtcccagtggttgcgccagaggccaacgatcggtctgtttactcagtgctcaggacccgcatccctccgcggattgaatgtggccgaagtgcagaagtctgaattcagttgctctggtcagggagaagccggacgcgtccctacctgtaccctgtctagtgggtcatgccctgccatgtgcacctgcagcaatggcattgtggactgcaggggtaagggcctgactgccattcccgcaaacctcccagagaccatgaccgaaataagattagaactcaatgggattaagtccatcccacctggggcttttagtccatacagaaagttgcggaggatcgatctctccaataaccagatcgctgagatagccccagatgccttccaggggctgagatctctcaacagtttagtgctttatgggaacaagattaccgatcttcccaggggggtgtttggaggcctgtacaccctccagctcctactgctcaatgcaaacaaaattaattgcattcgaccggatgcctttcaggacttgtag

SEQ ID NO: 11466 - DNA, 558 bp, synthetic construct
  misc_feature 1..558: note = source = /note="Description of Artificial Sequence: Synthetic coding sequence"
  source 1..558: mol_type = other DNA
atgccagggtggctcactctacccactctttgccgctttcttctgtgggcttttacaatattccacaaagcacagggggaccccgcttcacacccgggtccccactacctgctcccacccatccacgaagtgatccactcacaccggggtgccaccgccacccttccatgtgtcctgggcaccactccacccagctacaaggttaggtggagtaaagtagaaccaggcgagttaagagagacccttatccttatcactaacggactgcacgccaggggctatggtccattgggcggtcgcgcacggatgcgacgtggtcaccgcctagatgcgtcattggtgatcgctggtgtgaggcttgaggatgaaggccgatatcgctgcgagttaattaatggtatcgaagatgagagcgttgctctgacactttcgcttgaaggagtggtctttccgtatcaaccaagtcgcggtaggtaccagtttaactattacgaggccaaacaggcatgcgaagagcaggacgggcgtctcgccacatattcgcagctttaccagtag

SEQ ID NO: 11467 - DNA, 375 bp, synthetic construct
  misc_feature 1..375: note = source = /note="Description of Artificial Sequence: Synthetic coding sequence"
  source 1..375: mol_type = other DNA
atgctcatgcttttcgtgttcggcgttctgctgcacgaagtgtcactgagtgggcagaatgaagcccctcccaacacacattccatccccggagagcccctgtacaattatgcctcaatccgactgcctgaggaacatatcccattttttctccacaataacaggcatattgccacagtttgcaggaaggattcactctgtccctataaaaaacacttggagaaactgaagtattgctggggctatgaaaagtcatgtaagccagagtttagattcgggtatccagtctgtagctacgtggacatggggtggaccgataccctcgagagtgccgaggacatcttctggaagcaagcagatttcggctacgcgtag

SEQ ID NO: 11468 - DNA, 5858 bp, synthetic construct
  misc_feature 1..5858: note = source = /note="Description of Artificial Sequence: Synthetic coding sequence"
  source 1..5858: mol_type = other DNA
atgcctgccctgggccctgccctgctgcaggctttatgggccggatgggttctgacactgcagcctttacctccaaccgccttcaccccgaatggcacatatctacagcacctcgctagagacccaacctccgggacgctatatttgggcgctacaaatttcctttttcagttgtcacccggtttgcaactggaggccacagtaagcacaggccctgtgcttgacagtcgggactgtctccccccagtcatgcctgatgagtgtccacaggctcagcccactaacaatcccaaccagctcctcctcgtcagccccggtgcactcgtcgtgtgtggctcggttcatcagggcgtgtgcgaacagcgcaggttaggtcagctggagcagcttctgctgaggccagagcgcccaggagatactcagtacgtggccgcaaacgaccctgccgtgtccactgtcggtcttgtggcacagggactggctggggaacctctgctgtttgtaggaagaggttacacatcccgtggagttggagggggaattcctcccatcaccacccgggcactttggcctccagacccccaagccgcattctcctacgaggagacagcaaagctggccgttggcagattgtctgagtacagtcatcatttcgtgtcggctttcgctagaggagcctcagcgtacttcctcttcctccgcagagatttacaggcccaatctcgcgcattccgagcctacgtaagtcgggtgtgtctgcgcgaccagcactactatagttatgttgaactgcctctggcctgtgaagggggaaggtacggtctgatacaggctgcggcagtggctacgtccagggaggtggctcatggtgaagtgttatttgcagcattctcttccgccgctccccctacagtaggacgccctccaagtgccgctgcgggagctagcggagcgtctgccctttgtgcatttccactcgacgaggtggataggctggccaatcggacccgcgacgcctgttatactagagaaggtagggctgaggatggtacagaggtggcttatattgaatatgatgtgaattcagattgcgcacaattgcctgtggatacactggacgcatacccttgcggatctgatcatacacctagccccatggccagccgcgtccctctggaggcaacaccaattctggaatggcctggaatccaattgacggcagttgcggtgaccatggaagatggacacactatcgccttccttggagacagccagggacagctgcatcgcgtgtacctggggccagggtcagacggccacccctacagtactcagagcattcagcagggctcagcggtgtcccgggatctgacttttgatggaacctttgaacatctatacgtgatgacacaatccaccctgcttaaggtccccgttgcttcctgtgctcagcacttggactgtgccagttgtcttgcccaccgcgatccctactgcggttggtgtgttttgctgggtcgctgctctagacgatccgaatgttccagagggcagggccctgagcagtggctctggtcatttcagcctgagcttggctgtctgcaggtcgctgcgatgtctcctgccaatatatcccgggaggaaacaagggaagtgttcctgagcgtacctgacctcccaccactctggccgggagaatcttacagctgccactttggtgagcaccagtcccctgcgctcctgacagggtcaggagttatgtgcccaagtccagacccttcggaggcacctgttctgcccagaggagcggattatgtaagcgtgtccgtcgagctacggtttggcgctgtcgttatagctaaaacctcgctgtcattttacgattgcgtggccgtcaccgaactcagaccaagtgcccagtgtcaggcctgcgtctcgtccaggtggggttgtaactggtgcgtctggcagcacctgtgcactcacaaagcttcctgtgacgctggaccaatggtggcttcacaccagagcccccttgtctcccctgatcctcctgcgcgaggtgacggcgattccgctgaactcgaggggcctccggctccccttattctgcccagcagcctggactatcagtacgatacgcctggcctctgggaactggaagaggccaccctcggagctagctcctgtccctgtgtggagtctgtgcagggatcaaccctgatgccagtccacgtggaaagagagatcaggcttctggggagaaacctgcatctattccaggacggcccaggggataatgagtgcgtgatggaactcgaagggctggaggtagtggtggaggcaagggtcgagtgtgagcctccacccgacactcaatgccatgtcacttgtcagcaacaccagctgagctacgaggccctccaacctgaattgagggtggggttatttctacgtcgtgcaggtcgcctccgcgtcgatagtgccgagggactgcatgtagttttatatgattgttctgtgggccatggcgactgctccagatgtcagaccgccatgccacagtatggatgtgtctggtgtgagggcgagcgcccaagatgcgtgaccagagaggcgtgtggtgaggctgaggctgttgctacccagtgtccagctccgcttattcattcagtcgaacctctgaccgggccagtcgatggcggaacaagagtaactataagaggcagcaacctaggccaacacgtacaagacgttttgggtatggtcactgtggccggagtgccttgtgccgtggacgctcaggagtatgaggtgagtagcagtctggtttgtataaccggggcttcaggggaggaagtggcaggcgcaacagcagtggaagtgccaggacgaggccgtggcgtttctgagcacgacttcgcctaccaagatcccaaagtacactctatctttcccgcacggggtccaagagcaggaggtactagactgacgctgaatggcagcaagctcttgacaggcaggttggaggatatccgcgtggtggtgggggatcagccatgtcatcttctacccgaacagcagtccgagcagttgcggtgtgaaacgagccccaggcccactccagctacactgccagtggcagtctggttcggcgctaccgagaggcgtttgcagcggggtcagttcaaatataccttggatcccaatattacaagcgccggtcctacgaaatcttttctttcagggggaagggagatctgcgtccgaggacagaacctggatgtcgttcagacacctcggatacgggtgaccgtcgtatcccgaatgttacaaccttcccagggtttgggtcgcagacggcgagtcgttcctgagacggcgtgcagcctcggcccatcctgtagctctcagcagttcgaagagccttgtcatgtcaactcctcccaacttatcacctgtcgcaccccagccctgcccggtctgccagaggacccatgggttagggtcgagttcattctggacaatcttgtgttcgactttgctaccctgaaccccacaccttttagttatgaggctgaccccactctacagcctctgaaccccgaagaccccaccatgccttttaggcacaagccgggaagtgttttttccgtggagggtgaaaacctcgatctggccatgtctaaggaagaagttgtcgcaatgataggagacgggccatgtgtggtgaaaactctaacccgccaccatctgtactgtgaacctccagttgaacaacccctgcctcgccaccatgccttgagagaggcgcctgactccctgccggagttcacagtgcagatgggtaatctccggttcagccttgggcatgtgcagtacgatggtgagtccccaggagcttttccagtggcagcgcaagtggggctgggcgtcggcacctcacttcttgctcttggcgtcatcatcatcgtgctcatgtaccgacgcaaaagcaaacaggctttgcgtgattacaaaaaggtgcagattcagctggagaaccttgagtcaagcgttagagatcggtgcaagaaagagtttacagacttgatgaccgaaatgacagacctgactagcgacttgctgggtagcgggattccattcctggattacaaagtttatgcggagcgcatcttcttcccaggacaccgggagtctcctctgcacagagacttaggagtgcctgagtctcgcagacctactgtggagcagggcttgggccagctttcaaatttactgaatagcaaactattcctgaccaagtttatccacacgttggaatcccagcggactttcagtgccagagacagggcttatgtcgcctctctgttgaccgtggctctgcatgggaagttggagtactttaccgatattcttaggacgcttctgagcgatctggtcgctcagtatgtggcaaaaaatccgaagctaatgctgagaagaacagagacagttgtggagaagcttctcacaaattggatgagtatttgtctatacacattcgtaagggattccgtcggcgagcctctatatatgctcttccgaggaatcaagcatcaggtcgataaagggccagtagatagtgtaactggcaaggcaaagtacactttgaatgacaaccggcttttgagggaagatgtggaatacaggccactgacactgaatgcgctgttggccgtcggcccaggagctggtgaggcacagggcgtccctgtgaaggtacttgattgtgataccattagccaggctaaagaaaaaatgcttgatcagctgtataagggagtacccctgactcagcgccctgatccgcgaaccctagacgttgaatggcggtctggggttgcaggccatttgattttaagcgatgaagatgtgaccagcgaagtgcagggactgtggcgtagactcaatacactacaacattacaaggtgccagatggggcaacggtggcactcgtgccttgtctgacaaaacacgttctgcgggagaaccaggactatgtcccgggagagcgtactcccatgctggaggatgtggacgaggggggaatccggccttggcacctggtaaaacccagtgatgagcctgagcccccaagaccgagacgcggatcactaaggggcggagaaagagagcgcgcaaaagccattccggagatctacctcacccggctgctgtcaatgaaagggactctgcagaaattcgtggacgacttgttccaggtgattctatccacctcccgccctgtgcctttagcagtaaagtatttctttgatctccttgacgaacaagctcaacaacacggcatcagcgaccaagatactatccacatttggaagacaaattcgctgccactaaggttctggataaatataatcaaaaatcctcagtttgtgtttgatgttcagacctccgacaacatggatgctgtgctgctcgtgattgctcagacatttatggatgcttgcacgctcgctgaccacaagctaggtcgggattccccaatcaacaaactcctgtatgcacgcgacatcccgcgatataagaggatggtcgagcgctactatgccgacatcaggcaaaccgtgcctgcgagtgaccaggagatgaacagcgtgctggcagagctgtcatggaactattcgggcgatctgggggctcgggtggctttacacgagttgtataaatatatcaacaaatattacgatcagataattacggccctggaggaggatgggacagcccagaaaatgcaactcgggtacagactgcagcagatagcagccgctgtggagaacaaggtgacagatctgta

SEQ ID NO: 11469 - DNA, 612 bp, synthetic construct
  misc_feature 1..612: note = source = /note="Description of Artificial Sequence: Synthetic coding sequence"
  source 1..612: mol_type = other DNA
atgagaacggtggtgctgaccatgaaggcttcagtgatcgaaatgttcttagtcctgctggtgactggagtgcatagcaacaaagagactgcgaaaaaaatcaaaaggcctaaattcacggttccacagatcaactgcgacgtcaaagctgggaaaataatcgatcccgagttcatcgtgaagtgcccagcaggatgtcaggatcccaagtaccacgtctatggaaccgatgtctacgcatcctatagcagtgtgtgtggtgcggcagtgcattccggtgtgctagataattccgggggaaagattctcgttaggaaggtggccggtcagagcgggtataaaggctcttattcaaacggtgtgcagtcccttagcctgccgaggtggagagagagcttcatcgtgttggagagcaagcccaagaaaggagtgacatatccctcagccctgacatattcctcctctaagagcccagccgcacaagccggtaaatgctcccgcgtgatcgaatctaaaccgtcggaatccatgaatactcgacgtgttttgggcgattctggagagatcaatatcctaactgggcaggccccactggccctagccattttttag

SEQ ID NO: 11470 - DNA, 2511 bp, synthetic construct
  misc_feature 1..2511: note = source = /note="Description of Artificial Sequence: Synthetic coding sequence"
  source 1..2511: mol_type = other DNA
atggaaactcaggagctgcgaggagcactcgccctgctcctcctctgcttttttacgagcgctagtcaggatttacaggtgattgatctccttacagttggtgagtcaagacagatggtggcagtcgcagaaaaaattaggaccgccctcctcaccgcgggagacatctacctcctttccacattcaggcttcctcctaagcagggcggagtcctatttggattgtattcgaggcaagataacacccgatggttggaggcttcagtggtaggaaagatcaacaaggttactaatgcacttcacagcattttgggtgagcagactaaagctcttgtgacacagcttactctgtttaaccagattctcgtggagttgcgagatgatatcagggatcaggtcaaagaaatgagtctcattaggaacactattatggagtgccaggtttgcggttttcacgaacaacgctcccactgttcgccaaatccctgcttcagaggcgtggactgcatggaagtttatgagtatcccggttacaggtgtggcccttgcccccctggtctgcaaggcaatggtacacactgtagtgatatcaatgagtgtgcccacgccgacccatgcttcccgggttctagctgtatcaataccatgcccggttttcactgcgaggcatgcccacgcggatacaaaggcacacaggtgtccggggttggcatagactatgctagggccagtaagcaggtatgtaacgatatagacgaatgcaatgacgggaataacggaggttgtgatcctaatagcatttgtacaaacaccgttggctccttcaagtgcggcccttgtcggttgggcttcctcggaaatcagtcccagggttgtctccctgcccgtacttgtcatagcccggctcacagcccctgccacatccacgcccactgtttgtttgaacgaaatggcgcagtgtcttgccagtgtaacgtggggtgggctgggaatggaaacgtgtgtgggacggacacagacattgacggataccccgaccaggctctcccgtgtatggataacaacaaacactgtaaacaagacaattgtttactcacaccaaacagcggccaagaagatgcagacaatgacggggtgggggaccagtgtgacgacgatgcagatggcgatggcatcaagaatgtggaggacaattgccgcttgtttcctaacaaagaccaacagaactctgacactgattcattcggcgatgcctgtgacaattgcccaaacgtcccgaacaatgaccagaaggacaccgatggaaatggagaaggcgacgcctgtgataatgacgtggatggggatggaattcctaatggactcgataactgcccgaaggtccccaaccctctgcagaccgacagagacgaggatggagtcggcgatgcatgcgacagctgtccagaaatgtcaaacccgactcagactgatgcggacagcgaccttgtgggggatgtttgtgacacgaatgaggactctgacggagatggccaccaagacaccaaagacaactgccctcagctgcctaattcatcacagctggatagtgacaatgacggcctcggcgacgaatgcgatggcgacgacgacaatgacggcatcccagattatgtcccacccggtcccgataactgtaggctagtgcccaacccaaatcagaaagacagtgacgggaacggggtaggcgacgtatgcgaagatgactttgataacgatgctgtggtggacccgcttgacgtatgccctgagtcagctgaagtcactctaaccgacttcagggcgtaccaaacggtcgtgttggaccctgaaggagacgctcagatagacccgaactgggtggtgctgaaccagggcatggagatcgtgcagacaatgaactccgatccgggtttggctgtgggatataccgctttcaatggagtagacttcgaaggcacttttcatgtgaacaccgtgactgatgatgattatgctggcttcctgtttagttaccaagactcaggccgtttttatgtggttatgtggaaacagacagagcagacctattggcaggccacaccattccgggcagtggcccagccaggcctgcagttgaaggcggtgacaagtgtatccggcccaggggagcacctgaggaacgccctctggcacaccggacatacccctgaccaggtcaggctcctgtggacggaccctcgaaacgtggggtggcgggataagacatcctatcgttggcagctgctgcacaggccacaggttggatatatcagggtaaaactatatgagggcccacagcttgtggcagacagcggcgtgatcattgacactagcatgcgaggcggaagattaggggttttctgtttcagccaggaaaacattatttggagtaacctgcagtacaggtgcaatgataccgtccctgaggacttcgaaccttttcgcagacagttgcttcaggggcgtgtatag

SEQ ID NO: 11471 - DNA, 1311 bp, synthetic construct
  misc_feature 1..1311: note = source = /note="Description of Artificial Sequence: Synthetic coding sequence"
  source 1..1311: mol_type = other DNA
atgtggagatgtcccttaggattactgctcttgctgcctctggctgggcatcttgcactgggcgctcaacagggtcgtggcagaagagagctggccccagggctgcatctgcggggaatcagagacgctggcggtagatactgccaggagcaggacctgtgctgtagaggcagagcagacgactgtgccctgccttacctgggtgccatctgctactgtgatctgttctgtaaccgtacagtaagtgactgctgccctgacttctgggatttctgtcttggggtgcctcctccctttccgcctattcagggctgcatgcacggaggaaggatttacccggttctgggcacctactgggataattgcaatagatgctggcaagcaggcaaccactctgccttctgggggatgactcttgatgagggcatcagataccgcctcggcacaattagaccctccagctctgtgatgaacatgcacgaaatctacaccgtgctgaacccgggagaggtactcccaacagcctttgaggcctcggaaaagtggcccaatctaatacacgagcctctcgatcaggggaattgtgctggctcctgggctttctcaaccgctgccgtcgccagtgatagggtctccatccacagtttaggacacatgactccagtgctctccccccaaaatctgctttcttgcgacactcaccagcagcagggttgtagggggggacgtctggacggagcatggtggtttcttcgtcgcagaggcgtggtcagcgatcactgttacccattcagtgggagagagcgggacgaggccggaccagctccaccttgcatgatgcactctcgagcaatgggacgcggtaagcgtcaggcaactgcccactgtcctaacagttacgtcaataataacgatatctatcaggtgacccctgtgtaccgtctcggcagcaacgacaaggagatcatgaaagaactcatggagaatggtcctgttcaggccctgatggaggtccatgaagacttctttctgtacaagggaggcatttactcacacacaccggtgagcctggggagacccgagaggtacaggcgccatggcactcacagcgtgaagattactgggtggggcgaagaaacattacctgatggacgtaccttgaagtactggacagccgctaattcctgggggcctgcgtggggggagcggggacactttcggattgtacgcggagtcaacgaatgcgatattgagagctttgtcctgggcgtgtggggtagggttggcatggaggacatgggtcaccattag

SEQ ID NO: 11472 - DNA, 942 bp, synthetic construct
  misc_feature 1..942: note = source = /note="Description of Artificial Sequence: Synthetic coding sequence"
  source 1..942: mol_type = other DNA
atgtcggacctacttctcctgggcctgatcgggggactgactctcctccttcttctgaccttgttggcttttgctggctactctggtctcctggctggcgttgaagtctcagcgggttccccccctattcgtaacgtaaccgtcgcttataagttccatatgggcttgtacggtgagaccggacgtctgtttaccgagagctgtagcataagtcctaaactgaggagtatcgctgtttactatgataacccacacatggtgccaccggataaatgtagatgtgctgtggggtccatcctcagcgagggggaggagtccccttccccggagctcattgatctttatcaaaaattcggtttcaaggttttctccttccctgctccttcccacgtggtgaccgctacgttcccctacacaaccatcctgtcaatctggcttgcaacccggagggtgcatcccgcactcgacacatatatcaaggaacgaaaattatgtgcgtatccccgactcgagatctaccaggaggaccaaattcatttcatgtgtcctctcgcacggcagggcgatttctacgtccctgagatgaaggagactgagtggaagtggcggggtttggtggaggcaatcgacactcaagtggatgggaccggagctgacacaatgtccgatacatcatccgtctcgctggaagtaagccctgggtccagagagaccagcgctgcaaccctgagtccaggggcttccagtagaggctgggacgacggggacaccaggtccgagcatagctactctgagtctggagcatcagggtctagctttgaagaactggaccttgagggagagggccctctgggcgagtctaggcttgaccctggaacagagcctttgggaaccaccaaatggttgtgggagcccacagccccagagaaagggaaagaatag

SEQ ID NO: 11473 - DNA, 213 bp, synthetic construct
  misc_feature 1..213: note = source = /note="Description of Artificial Sequence: Synthetic coding sequence"
  source 1..213: mol_type = other DNA
atggttgccccagccgcacgtgtgttcttaagggcagtccgggctgctctgacctctactgtacctgatctgctctgtctcctggccagaggtagtccacgcggattagcatccgggcgtctgccccttgccgtgcacagcgctcagcatggacccggttctggggcaccatggctgcggattgccagacgagcactctcccagcgtatctag

SEQ ID NO: 11474 - DNA, 642 bp, synthetic construct
  misc_feature 1..642: note = source = /note="Description of Artificial Sequence: Synthetic coding sequence"
  source 1..642: mol_type = other DNA
atggcccaactgttccttccactactcgccgcactggttctggcccaagccccagctgccctcgccgacgttttagagggcgatagctcggaagaccgagcgttccgtgtgagaatcgcaggagacgcaccactgcagggagttctgggtggggcactaaccatcccttgtcacgtccactacctcagacctcccccttcgcggagggctgttctggggtccccaagggttaagtggacctttctgagcagggggcgagaagctgaagtgctcgtggccaggggtgtgcgagttaaggtgaatgaagcgtatcgttttcgggtcgccctgcccgcatatccagcgagtctgactgacgtgtcactggcattgtctgaattgcggccaaatgactctgggatctaccgctgcgaagtccaacacgggatagacgacagttcagatgctgtggaagtgaaggtaaaaggggtcgtgttcctttatcgcgaaggctcagcgaggtatgccttttcatttagtggtgcccaagaagcgtgtgcaaggatcggggcacatatagcaacccccgagcagctgtacgcggcttatctaggtggctatgagcaatgcgatgcgggatggctgtcagaccaaactgtgtag

SEQ ID NO: 11475 - DNA, 237 bp, synthetic construct
  misc_feature 1..237: note = source = /note="Description of Artificial Sequence: Synthetic coding sequence"
  source 1..237: mol_type = other DNA
atgggatctggactgcccctggtgcttcttttgaccctcttaggatctagtcatggaactggccctgggatgacactgcaactaaaattgaaagagtctttcctgactaacagttcttacgagtcatcattcttggagctcctggagaaactgtgtttactcctccatctgcctagcgggacatccgtgaccttacatcatgccaggtcacagcaccatgtcgtgtgtaatacctag

SEQ ID NO: 11476 - DNA, 651 bp, synthetic construct
  misc_feature 1..651: note = source = /note="Description of Artificial Sequence: Synthetic coding sequence"
  source 1..651: mol_type = other DNA
atgagcgatctacttctgctcggtcttatcggtggactgaccttgctgttgctattaactctgcttgcctttgcaggatacagcggcttacttgccggagttgaagtctcggccggttcgcctcccataaggaacgtaaccgtcgcctacaaatttcatatgggactctacggggaaaccggccgactgttcactgaatcttgtagcatctcacctaaattaaggtccatcgccgtgtactatgacaatccccatatggtgccccctgataagtgtcgatgtgccgttggttcaattcttagcgagggagaggagagtcccagtccagaactgattgatttatatcaaaagttcggatttaaggtgttctctttcccggcaccgagccatgtggtgactgcaactttcccttataccacaatactgagcatctggctggccaccaggagagttcaccccgcacttgatacatacattaaggagagaaaactatgtgcctatcccaggttggaaatctaccaggaagaccagattcatttcatgtgtccacttgctcgccagggggacttttatgttccagagatgaaggaaaccgaatggaagtggcgaggcctagtggaggccattgatacccaggtggacggaacctag

SEQ ID NO: 11477 - DNA, 453 bp, synthetic construct
  misc_feature 1..453: note = source = /note="Description of Artificial Sequence: Synthetic coding sequence"
  source 1..453: mol_type = other DNA
atgcgatttatggccggtccggctggatctcagtctttggggccactgtgcttccactctagtccacaggccctgtataccgttctgctgatagtactggtcatgatgtccctcgtgttcggtaaattcgttcctgtgaattgggagcccccacagcctttgcccttcccgaaatatctaaggtgttaccgatgtcttcttgagacaaaggagttagggtgtctgttgggatcggacatctgtctcacccccgcaggatcatcctgtatcactctgcacaaaaaaaatagcagtggctccgacgtgatggtttccgattgccggtccaaagagcagatgagcgattgtagcaatacccgtacaagtcctgtctcaggcttttggatattttctcaatactgcttcttagacttttgtaatgacccccaaaataggggtttgtatacaccctag

SEQ ID NO: 11478 - DNA, 171 bp, synthetic construct
  misc_feature 1..171: note = source = /note="Description of Artificial Sequence: Synthetic coding sequence"
  source 1..171: mol_type = other DNA
atgaaaacaggcttattctttctgtgcctcctggggaccgcggcagcaatcccaaccaacgccaggcttctctctgaccacagcaaaccaaccgctgaaacagtggccccagacaacacagcgatcccatcgcttcgggcagaggccgaagagaatgagaaagagacatag

SEQ ID NO: 11479 - DNA, 2346 bp, synthetic construct
  misc_feature 1..2346: note = source = /note="Description of Artificial Sequence: Synthetic coding sequence"
  source 1..2346: mol_type = other DNA
atggccgttgcagaagtcagccgcacttgcctccttacagtgcgggtcctgcaggcccaccgattgccaagtaaggatctggtcaccccttcagactgttacgtgaccttatggcttccaactgcatgtagtcataggctgcagacgagaacggtgaaaaactcgtctagtcctgtctggaatcagtccttccacttccggatccaccgacagctcaaaaacgttatggagctcaaagtattcgaccaggacctggttactggagacgatcccgtgctctcagtcctcttcgatgccggaaccctgcgagccggtgagtttcgccgagagtcattttctttgagccctcagggagagggccgtctcgaggtggagtttcgcttacagtccttggccgaccggggagaatggctagtgtcaaacggagtactggtggcaagggaattgtcgtgcctccatgtccagctcgaggaaactggcgaccagaagtcgagcgaacaccgggttcaactggtggtgcctgggagttgtgaaggcccacaggaggcctctgtgggaacggggaccttccggtttcactgtcctgcatgctgggagcaggagctatcaatcagattgcaggatgcgcctgaagaacagctgaaagcccctctcagcgccctaccgtctgggcaagtcgtcagactggtcttccccacctcccaagagcccttgatgcgagttgaactgaaaaaggaggctggattgagggaactcgcggtgcggcttgggtttggaccatgtgcagaggagcaagcatttctctcccggaggaagcaagttgtggctgcagctctgaggcaagccttgcagttggacggggaccttcaagaggatgaaattccagtggtggctattatggccacggggggagggattagagcaatgacaagtctgtatggacagcttgcaggccttaaagagctgggattactggattgcgtgtcatacataacgggggcatctggcagtacttgggcactagcaaacctgtatgaagaccctgaatggtctcagaaggaccttgccggtcccacagaactgttgaaaacccaggtcacgaaaaataagctcggcgtgctcgccccatcgcagctgcagcgctataggcaagagcttgctgagcgagcacgcttaggctacccatcatgcttcacaaacctgtgggctctcattaacgaggcccttctgcatgatgagccacatgatcacaagcttagcgatcagcgagaggccctctcccacggacaaaatccccttcccatctactgtgcactgaataccaagggacagtctctcactacttttgaatttggcgaatggtgcgagttcagtccatatgaagtgggcttccccaaatatggcgcatttatcccttccgaactcttcggtagcgagttctttatggggcagctgatgaaaaggcttcctgaaagtcgcatatgctttttggagggtatttggtccaatttgtacgctgccaatctccaggactccctatattgggcttcagagccttcccagttctgggaccgctgggtaaggaaccaggccaatctggataaggagcaggtccctctcctgaagattgaggaaccaccgtccactgccggacggatagccgaattcttcactgaccttttgacttggagacccctcgctcaggcaacgcacaactttctgagaggtcttcactttcacaaagactatttccagcatccacatttctccacctggaaagctaccaccctggatggcctacccaaccagctgaccccatcagaaccccatctgtgtttacttgatgtgggctacttaattaacacatcatgcctcccccttctgcagcccaccagagacgtagacctcattttaagcctggactataatctgcatggtgccttccaacagcttcagctcttgggcagattctgtcaggagcaggggatcccatttcctcctatctcaccctcccccgaggagcagcttcagcctagagaatgtcacaccttctccgatccaacatgccccggtgcacccgcagtgctgcatttccctctggtatccgactcattccgggagtattcggctccaggggtacggaggaccccagaggaggccgctgccggtgaagtgaatctgtcctcatcggatagcccttaccattacacgaaagttacctacagccaagaggatgtggataaactacttcacctaacccactacaatgtgtgcaacaaccaggagcagctgttggaagctctgaggcaggctgtccagcgcagacgccagagaagaccgcactag

SEQ ID NO: 11480 - DNA, 219 bp, synthetic construct
  misc_feature 1..219: note = source = /note="Description of Artificial Sequence: Synthetic coding sequence"
  source 1..219: mol_type = other DNA
atggcagcagccacacgtggctgcaggccttggggctcccttctcggccttctggggctagtgagcgccgcagcagccgcttgggatctggcgagcctcaggtgtacgctgggagcattctgtgaatgtgacttcagacccgatctgccagagggttccgaggagttgggacctcgcgaaccccactgtctgtggcccttgccactgcccctccgttag

SEQ ID NO: 11481 - DNA, 243 bp, synthetic construct
  misc_feature 1..243: note = source = /note="Description of Artificial Sequence: Synthetic coding sequence"
  source 1..243: mol_type = other DNA
atgaaagttttcttcctctttgccgttctcttttgtctggtccagacaaacagtggagacgtgcccccaggaattcgcaataccatttgccacatgcagcagggaatttgtaggctgtttttctgtcattccggggagaagaagcgtgatatctgtagcgatccatggaatcggtgttgcgttagcaacactgatgaagaagggaaggagaagccagaaatggacgggagaagcgggatttag

SEQ ID NO: 11482 - DNA, 861 bp, synthetic construct
  misc_feature 1..861: note = source = /note="Description of Artificial Sequence: Synthetic coding sequence"
  source 1..861: mol_type = other DNA
atgggtccagaagccctcagctctctgcttctgttactcctagtggcctctggggacgccgacatgaaaggccattttgatccagcaaaatgtcgctacgctttaggaatgcaagatagaaccattcctgacagtgacatcagcgcgtcttcgtcttggtcagactcgactgccgcacgtcacagtcgcctcgaatcaagcgatggagacggggcatggtgcccggctggctccgtgtttcctaaggaagaagaatacctccaggtggatctgcagcgactacacttggttgcactggtgggaacccaaggacgtcacgctgggggtctggggaaagaattctccagaagttaccgccttcgctactcccgggatggacgcaggtggatgggctggaaagaccggtggggccaggaggtcatatcgggtaacgaggacccagagggcgtggtgcttaaggacctcggtcccccaatggttgcccgattggtaaggttctatccacgggcagacagagtgatgagtgtgtgcctccgcgttgagctgtatggatgcctgtggcgggatggcctcctgtcttataccgcgccagtaggacagacaatgtacctctccgaagccgtgtatctcaatgactccacttacgacggccacacagtgggaggattacagtatggcggactgggccaactggccgatggagtagttggtctggatgatttccggaagagccaagagctgcgtgtttggcctggctacgattatgtgggctggtccaatcactcgttcagcagcgggtatgtggagatggaattcgagttcgatcggctaagggcctttcaggccatgcaggttcactag

SEQ ID NO: 11483 - DNA, 858 bp, synthetic construct
  misc_feature 1..858: note = source = /note="Description of Artificial Sequence: Synthetic coding sequence"
  source 1..858: mol_type = other DNA
atgcgaggacaggggaggaaggaatccctcagcgacagtagggatctcgacggctcatacgatcaactgaccggacatcctccaggccctaccaagaaggccctgaagcagcggtttttgaagctgttgccgtgctgcggccctcaggctcttccctctgtgagcgaaatcggacgcgtcttccggtttctgggcgattcttctttgcctagtgccctggccgctcctgccagcctgaggccccacaggcccaggcttttggaccctgattccgtggacgacgaatttgaactgtccaccgtttgtcatcgaccagaaggcctcgagcaattacaggaacagaccaagttcacgaggaaagagctgcaggtcctttataggggatttaaaaacgaatgtccaagcggcattgtaaacgaagagaattttaagcaaatctactctcagttcttccctcagggagatagctccacatacgctacgttcctgttcaatgcattcgatacaaaccatgatgggtctgtgagcttcgaagatttcgtcgcagggctgagtgtaattctgcgagggacagtcgatgaccgccttaattgggctttcaacctgtacgacctgaacaaggatggatgtattacaaaggaggagatgttggacataatgaaaagcatatacgatatgatgggcaaatacacctatccagctctccgcgaggaagccccacgagaacacgtggagtccttcttccagaagatggaccggaataaggatggcgtcgttaccatagaagagttcatcgagtcatgtcagaaggacgaaaacatcatgcggtcaatgcagttattcgataacgtcatttag

SEQ ID NO: 11484 - DNA, 1311 bp, synthetic construct
  misc_feature 1..1311: note = source = /note="Description of Artificial Sequence: Synthetic coding sequence"
  source 1..1311: mol_type = other DNA
atgcaaggtacccctggtgggggtacgcgcccagggccttctcccgtcgaccgcaggacactgctggtgttctcgttcatactggctgcagctctagggcagatgaacttcaccggggatcaggttctacgtgtccttgccaaagacgagaaacagttatcccttctgggagatcttgaggggctgaagccgcaaaaagtcgacttctggaggggccctgcaagaccctccctcccggtcgatatgcgcgttcccttctcagagttgaaagatataaaggcatacctggaatcccatggacttgcatatagtataatgatcaaggacatccaggttctgctggatgaggagcgacaggcaatggccaaaagcagacgtctggaaaggagcaccaactctttctcttattcttcttaccacaccttagaagaaatctatagttggattgataactttgtgatggagcattccgatattgtttctaagatccagatcggaaacagttttgagaaccagtccatactggtgctcaagttcagcacaggtggttccagacaccccgcaatttggatcgacaccggaatccactcacgcgagtggataactcatgccacaggaatctggactgccaataagatcgtttccgattatggaaaggatcgagtgcttacagatatcctgaatgcaatggatatttttattgaacttgttacaaatccagacgggttcgcctttactcattccatgaatcgtctgtggagaaaaaacaagtcaatcaggccaggcatcttttgcattggcgtggatctgaatcgcaattggaagagtggcttcggaggcaatggctctaatagtaacccctgtagcgagacttaccacgggcctagcccacagtccgagcccgaggtggccgctatcgtgaacttcatcaccgctcacggcaattttaaagctcttatctctatccactcttactcccagatgctcatgtacccatacgggagactgcttgaacctgtgtcaaaccagcgggagctttacgatctggcaaaagatgcggtcgaagcgctctataaagtgcacgggatagaatatattttcgggagcatttccaccaccctgtatgtcgcctctggaattacagttgactgggcttatgactcaggcatcaagtatgcatttagctttgagctgcgggacaccgggcagtatggattcctgctccctgcaacacagattattccgactgcacaggagacatggatggcgctgcgcaccattatggagcataccttaaatcatccctattag

SEQ ID NO: 11485 - DNA, 1218 bp, synthetic construct
  misc_feature 1..1218: note = source = /note="Description of Artificial Sequence: Synthetic coding sequence"
  source 1..1218: mol_type = other DNA
atggacacaatatttctgtggtctttgctgctacttttcttcgggtctcaggcttcaagatgttctgcccagaaaaacaccgaatttgccgtggacctgtatcaggaagtgagcctttcacataaggacaatatcatcttctcacctcttggaattacgctggtcctggagatggtccagctcggcgctaaaggtaaggctcaacagcagatcaggcagaccttaaagcagcaagagacctcagctggtgaggagttcttcgtgctgaagagcttttttagcgcaatctccgagaagaagcaggaatttacgttcaatctggccaatgctctgtacctccaggagggatttacagttaaggaacagtatctgcacgggaataaagaattcttccagtcagctatcaaactcgtggactttcaggacgccaaggcttgcgcagagatgataagcacatgggtcgagcgcaagaccgacgggaaaatcaaagatatgttctctggcgaagagtttgggcctcttaccagactcgtcctggttaatgcaatttacttcaaaggagactggaaacaaaagtttagaaaagaggacacccagctcataaattttacaaaaaaaaatggcagcaccgtcaagatccctatgatgaaggccctcttacgaacaaagtacgggtatttctctgaatcgtctttgaactaccaggtcctggagcttagctacaagggagacgaattctctctgattatcatccttcccgcagagggaatggatatcgaggaggtggagaagctgataaccgcacaacagattctgaagtggctgtccgaaatgcaggaagaagaagtggagatttctctgcccagattcaaagtggagcagaaggttgacttcaaagatgtgctgtacagtttaaatattaccgagattttcagcggcggatgcgaccttagtgggatcaccgattcctccgaagtgtacgtcagtcaagtgacccagaaggtgttttttgagattaacgaagacggatcagaagcggcaactagtacaggcatccatatacccgtcatcatgagcctggcccaatctcaatttattgcgaaccacccatttctgtttatcatgaagcacaacccaactgagtccatcctgttcatgggaagggtaaccaatcccgatacgcaggaaattaaagggagagacctagattctctctag

SEQ ID NO: 11486 - DNA, 300 bp, synthetic construct
  misc_feature 1..300: note = source = /note="Description of Artificial Sequence: Synthetic coding sequence"
  source 1..300: mol_type = other DNA
atgctagcactgcttgtcctagtgaccgtggcgctggctagcgcccaccacggtggagaacactttgagggggagaaggtgttccgggtaaatgttgaggatgaaaaccatatcaacattatccgagaactggcttcaactacccagattgatttctggaagccagattctgtaacccagatcaagcctcattctaccgtcgatttccgtgtgaaggcggaagacaccgtaaccgtggagaacgtgctgaagcagaacgaactccaatataaagttcttatcagtaacctccgaaattag

SEQ ID NO: 11487 - DNA, 471 bp, synthetic construct
  misc_feature 1..471: note = source = /note="Description of Artificial Sequence: Synthetic coding sequence"
  source 1..471: mol_type = other DNA
atgctgcttttgctcttgctcgctcctttattcttacggccacctggcgctggaggagctcagacccctaatgcaacttcggaaggatgtcagatcatccaccctccttgggaaggcggaatacgctaccggggactcacaagggatcaggtgaaagccattaactttctgccagtagattatgaaatcgaatacgtgtgcaggggcgagagggaagttgtggggcctaaggttcggaagtgtctggccaacgggagttggaccgatatggacacgccgagccgatgcgtcaggatatgctccaagtcctatctgaccctggaaaatggtaaggtcttcttaacaggtggtgacctacccgctctggacggcgcaagagtcgattttcggtgtgacccagatttccacttggttggctcatcccgcagcatctgctcccaaggacagtggtcaacccctaaacctcactag

SEQ ID NO: 11488 - DNA, 249 bp, synthetic construct
  misc_feature 1..249: note = source = /note="Description of Artificial Sequence: Synthetic coding sequence"
  source 1..249: mol_type = other DNA
atgggaagagtttttttaaccggtgaaaaggcgaatagtattctgaagcggtaccctagagcaaacgggttcttcgaggaaattcgccagggaaacattgagcgagagtgtaaggaggaattttgcacctttgaagaagcaagggaggctttcgaaaacaatgagaaaacgggcctagtactcctgccgcgactggagtgcagctgtgagcacggaagcctgcagcctcagctcccagtgcccaagtag

SEQ ID NO: 11489 - DNA, 372 bp, synthetic construct
  misc_feature 1..372: note = source = /note="Description of Artificial Sequence: Synthetic coding sequence"
  source 1..372: mol_type = other DNA
atgcagggaacacccggaggtggcacaagacccggtccttcccccgtggataggcggaccctactggtgttctccttcatcctcgctgccgctctcggccagatgaacttcacaggggaccaagtccttagagtgctggccaaagatgagaaacaactcagcctcttaggcgaccttgagggcctgaaaccacaaaaagtggacttttggaggggccctgccaggcctagcttacctgtggatatgcgcgtgccattcagcgagctaaaagacatcaaggcatatttggagtctcacggtctcgcctacagcatcatgattaaggatatccaggtgctcttagatgaggagcgtcaagctatggccaagtag

SEQ ID NO: 11490 - DNA, 840 bp, synthetic construct
  misc_feature 1..840: note = source = /note="Description of Artificial Sequence: Synthetic coding sequence"
  source 1..840: mol_type = other DNA
atggggcgagtgttcctgactggagagaaggccaattcaattctgaagaggtaccctagggcaaacggcttcttcgaagaaatccggcaagggaatatagagcgggaatgcaaagaagagttttgtactttcgaggaagcccgagaggccttcgagaacaacgaaaagacaatcactggagtgatcctgctcgccgtcggcgtgtggggaaaattaactctcgggacctatatatcattaattgcagagaactctaccaacgctccatacgtcctgatcgggacagggaccacgatcgtggtgtttggcctattcggatgctttgccacctgccgcggatccccatggatgctgaagctgtatgctatgtttctctcacttgtcttcctggcagagctcgtggctgggatatctggattcgttttccgccacgaaattaaggacacattcttgcgaacctatacggacgcaatgcagacttacaacggcaacgatgagcggtctagggctgttgatcatgttcaaagaagcctcagctgctgtggggtgcagaattacactaactggtcaacctccccatacttcttagagcacggtataccccctagctgctgtatgaatgagacagattgcaacccccaggacttgcataatctgaccgtggcagcaacgaaagtgaaccagaagggatgctacgacctggtgaccagtttcatggagactaatatgggaattattgccggtgtcgcattcgggatcgctttcagccaactgattggcatgctgctggcctgttgtttatcccggtttatcaccgctaaccagtacgagatggtgtag

SEQ ID NO: 11491 - DNA, 564 bp, synthetic construct
  misc_feature 1..564: note = source = /note="Description of Artificial Sequence: Synthetic coding sequence"
  source 1..564: mol_type = other DNA
atgtggtgtgctagtcctgtggctgtggtggcgttttgcgcgggtctgttagtgtctcaccctgttttaactcaggggcaagaagccggtgggaggccaggcgcagactgcgaggtgtgtaaagagttcctgaaccgattctataaatcgttgatcgaccgcggagttaacttcagtctggacacgattgaaaaggagctgatttccttctgcctggatacaaagggaaaagagaaccggctgtgctactaccttggagccaccaaggacgcagccaccaagatcctatctgaggttacaaggcctatgagcgtccacatgccagctatgaagatctgcgaaaagctgaagaagctcgactctcaaatttgtgagcttaagtatgagaaaactctggatttagcatctgttgatctgaggaaaatgagggtggcagaattaaagcaaatcctccattcctggggagaggagtgtagggcttgcgccgagaaaaccgattatgtcaatctcatccaggaactcgcacccaaatatgccgcaacccacccaaaaacagaactgtag

SEQ ID NO: 11492 - DNA, 1311 bp, synthetic construct
  misc_feature 1..1311: note = source = /note="Description of Artificial Sequence: Synthetic coding sequence"
  source 1..1311: mol_type = other DNA
atgcagggcacacctggaggagggacacgaccaggcccaagccctgtcgaccgcaggactttgctggtgttctcattcatactggcggctgccctcgggcagatgaattttacgggtgatcaggtcttaagagtgctagccaaggatgaaaaacagctgagcctcctgggggacctggaagggctgaaaccacagaaagtggacttttggcgtggacccgcaagaccctcactgccagtggacatgcgtgttccctttagcgaactcaaggatatcaaggcctatctggagtcccacggccttgcctattccattatgattaaggacattcaggtgctgttggatgaagagcgacaggccatggctaaatcccgtagacttgaacgaagcaccaacagcttctcctacagtagctatcacacgttggaggaaatatatagctggatcgacaattttgtgatggagcattctgatatcgtgtccaagattcagattggcaactcttttgagaatcagagtatactggtgttgaaattcagcactgggggaagccgacatcctgcaatctggatcgacaccggcatccactctcgggagtggataactcacgccactgggatttggaccgccaacaagattgtgagtgattacgggaaggatcgcgttctgaccgacattcttaatgccatggacatcttcatcgagctggtcacaaacccggatggtttcgccttcactcatagcatgaatcgcttgtggcgaaagaataaatctatcaggcccggaatcttctgcatcggagtcgacctgaacaggaattggaagagcggatttggcggaaatggcagcaattcaaacccatgttcagaaacgtatcacggtcccagtcctcagtcagagcctgaggtggcagcaatagtgaactttatcactgcccacggcaactttaaggcccttatatccatacattcctactcccaaatgctcatgtacccctatgggaggctgctcgaacccgtcagtaaccagagggaactttatgatttagccaaagatgcggtggaggctctgtacaaagttcacgggatcgagtacattttcggctcaatctctacgaccctgtatgtcgcttctgggatcactgttgattgggcctacgacagcggaataaagtatgcattctccttcgagctgcgcgatacaggtcagtacgggtttctcctgccagccacccaaatcatcccaaccgcccaagaaacttggatggcactccggaccattatggagcacacactgaaccacccatactag

SEQ ID NO: 11493 - DNA, 450 bp, synthetic construct
  misc_feature 1..450: note = source = /note="Description of Artificial Sequence: Synthetic coding sequence"
  source 1..450: mol_type = other DNA
atgggaagagtctttctgacaggggagaaggcaaactcaatcttgaagcgatacccacgtgccaacgggttcttcgaagaaatccgccaaggtaatatcgagcgcgaatgcaaggaggaattctgcacgttcgaggaagccagggaggcctttgagaacaatgaaaagactaaggagttttggagcacatataccaaggcacagcaaggtgaatccaaccggggaagcgactggtttcaattttacctcacattccctctcatattcggtcttttcatcatcttactggttattttcctaatctggagatgttttctccgtaacaaaacccgccgtcagaccgtgacagaaggccacatccctttcccacagcatttaaacattattactccacctccacccccagacgaagtgtttgatagtagtggactgtccccaggcttcctctag

SEQ ID NO: 11494 - DNA, 936 bp, synthetic construct
  misc_feature 1..936: note = source = /note="Description of Artificial Sequence: Synthetic coding sequence"
  source 1..936: mol_type = other DNA
atgttgtatcaaactatcaactcactgaaaacaaagaatcctaagctgaaaatcctgctgtctattggaggctacctgtttggatcgaaaggcttccaccccatggtggattcttcgacctcacgattagagttcatcaacagcatcattctattccttcgcaaccacaattttgatggtctggatgtctcctggatctaccccgatcagaaagagaatacacacttcacggtcctgatccatgagcttgcggaagccttccagaaggactttacgaagagtacaaaagaaagactactactgactgccggagtctccgctggtcgccagatgattgacaacagttaccaggttgagaaactggccaaggacttagacttcataaacctgctaagttttgactttcacggctcgtgggagaaacctctaatcacaggccataacagtcctttatccaagggctggcaagatcgcggtccttcatcttactataacgttgagtacgccgtgggatattggatccacaagggaatgccttccgaaaaagtggtgatggggattcccacatacggccatagtttcacgttggcctcagcggaaacaacagtgggagccccagcctccggccctggggcagccggtcccattacggagagctccgggtttttggcttattatgagatatgtcagttccttaagggcgctaaaatcaccagattgcaagatcagcaggtgccctacgccgtaaagggcaatcaatgggtggggtacgacgatgtaaagagcatggagacaaaggtgcagttcctcaaaaatcttaacctgggtggcgctatgatctggtcaattgatatggatgacttcactggaaagagctgtaaccagggcccttacccgctcgtgcaggctgtaaagaggagtctcggttccctctag

SEQ ID NO: 11495 - DNA, 621 bp, synthetic construct
  misc_feature 1..621: note = source = /note="Description of Artificial Sequence: Synthetic coding sequence"
  source 1..621: mol_type = other DNA
atggacacgatcttcctctggagcctgctgcttctgttctttggttctcaggcatctcgttgctcagcccagaaaaatactgagtttgcggttgacctctaccaggaggtgagtctttcccataaggacaacatcatcttttctccactgggtattactctggtgttagaaatggtgcaacttggcgcaaagggaaaagctcagcagcaaatccgacagacgttgaaacagcaggagacatctgccggagaggaattcttcgtactcaaatcatttttcagcgctatcagcgagaagaaacaagagttcacttttaacctggctaatgcgctgtaccttcaggaagggtttaccgtgaaagagcagtaccttcacggcaacaaggagttcttccagtcagcgattaagctcgttgatttccaggatgccaaagcctgcgccgagatgatctcaacgtgggtcgagaggaaaaccgacggtaaaattaaggacatgttttccggagaggagttcgggcctctgacccgactggtgttagtgaacgccatttactttaagggtgactggaaacagaaattccgaaaggaggacacccagctcattaacttcacaaagaagtag

SEQ ID NO: 11496 - DNA, 1218 bp, synthetic construct
  misc_feature 1..1218: note = source = /note="Description of Artificial Sequence: Synthetic coding sequence"
  source 1..1218: mol_type = other DNA
atggacactatcttcttgtggagcctgctgttactgttttttggttctcaagcctcccgctgctcagctcaaaagaacactgaatttgccgtggatctttatcaggaggtgtcactgtcccacaaagacaatataatcttctccccgcttggaataacgttggtccttgagatggtgcagctgggcgcaaaaggaaaagctcagcagcagattcgccagacactgaagcaacaagagacctcagccggtgaagagtttttcgtgctgaagtcttttttctctgcaatctcagaaaaaaagcaggagtttacattcaatctggccaatgctctgtacctgcaggagggcttcaccgtcaaagagcaatatttgcacggcaataaggagttctttcagtctgcaattaagctcgtggacttccaagatgccaaggcttgtgccgagatgataagcacttgggtcgaacgaaagactgacggtaaaattaaagacatgtttagtggtgaagaatttggacccctcacccgcctggtgcttgtgaatgcaatttactttaagggagactggaagcagaagttccgcaaagaagatactcaactaatcaactttactaaaaaaaatggctcaacagtgaagattcccatgatgaaagccctgcttcgcacgaaatacggttacttcagcgagtcaagcttgaactaccaggttctggagctgtcatacaaaggcgacgaattttcgcttattatcattctccctgcagagggaatggacattgaagaggtcgaaaagttgattacggcccagcagatcctgaaatggctgtctgagatgcaggaggaggaggtggagatctctctgcctaggttcaaggtcgaacaaaaggtggactttaaagacgtgttatatagtctgaacatcaccgagattttttccggaggttgtgacctctcaggcatcacagacagttccgaggtgtatgttagtcaagtgacccagaaggtgtttttcgaaatcaacgaggacgggagtgaggctgctaccagcacaggtattcatatccccgtgataatgagcctggctcagtcacagttcatcgcaaatcacccattcctgttcatcatgaaacataaccccaccgagtcgattctgttcatgggacgagtgactaacccggatacacaggagataaagggccgagacttggattccctctag

SEQ ID NO: 11497 - DNA, 399 bp, synthetic construct
  misc_feature 1..399: note = source = /note="Description of Artificial Sequence: Synthetic coding sequence"
  source 1..399: mol_type = other DNA
atgctgattttctggacaattacgttgtttctcttaggcgcagcaaagggaaaggaagtatgttacgaagacttaggttgcttctctgacacagaaccatggggtggtaccgccatccggccactgaagattctgccctggtcccctgagaagattggcactagatttctcctgtacactaacgagaacccgaacaattttcaaatcttattgctgagcgaccctagtaccattgaggctagcaatttccaaatggatcgcaaaacccggttcataatccatgggtttatcgataagggcgatgagagctgggttacagacatgtgcaaaaagctctttgaagtggaggaagtgaactgcatttgcgtggactggaaaaagggatcccaagctacgtag

SEQ ID NO: 11498 - DNA, 606 bp, synthetic construct
  misc_feature 1..606: note = source = /note="Description of Artificial Sequence: Synthetic coding sequence"
  source 1..606: mol_type = other DNA
atgaaagtccatatgctggtgggggtgctggtgatggtggggtttaccgtcggtaaagttcctgtgcccgacattaggacctgtcatttctgcttagtggaggatcccagtgtagggtgcatcagtggttccgagaagtgcacaatttcatcatcctccctatgtatggttattaccatttattacgatgtgaaggtgcggtttatcgttagagggtgtggccagtatatcagttacagatgccaggaaaagagaaatacgtattttgctgaatattggtaccaggctcagtgttgccagtacgattactgcaacagctggagtagccctcagctgcagagcagcctaccggagcctcacgaccggcctttggcactgcccctatccgatagccagatacagtggttctaccaggccctaaatctgtcactccccttgccgaatttccacgccggtactgaacctgacggattggatccaatggtaaccctttctcttaatctcggcctaagcttcgccgagctgcgaagaatgtatttgttcttgaacagctctggactgctggttctacctcaggccggtctcctcacaccacacccctcttag

SEQ ID NO: 11499 - DNA, 1086 bp, synthetic construct
  misc_feature 1..1086: note = source = /note="Description of Artificial Sequence: Synthetic coding sequence"
  source 1..1086: mol_type = other DNA
atggcaagcttgggtcttctactcctgttactgctgacggccctcccaccactgtggtcaagtagtttgccagggctggacacggctgaatccaaggcaaccattgctgatctcattctgagcgctctggagagagctacagtgttccttgagcagcggctacctgagattaaccttgacggaatggtaggcgtacgggtcttagaggagcagctcaaaagcgtaagggaaaaatgggcccaggagccactgctgcaaccactgagtctgagggtcgggatgcttggggagaagttagaagctgccatccagcgaagtttgcactatctaaagctgagcgacccgaaatacctgcgcgaattccagcttactctccagcccggtttttggaaactgcctcacgcatggatccacacagatgcctccctggtgtacccgacctttggccctcaagattcattctccgaagaacggtccgacgtttgtctggtccagttgctcgggaccggcacggattcaagtgaaccctgtggcctgagtgatctctgtaggtccctcatgacaaagccaggttgttccgggtactgtctatcgcaccagcttctcttcttcctgtgggctcgcatgagggggtgtacacaggggcctttacaacagtctcaggactatataaatctgttctgcgccaatatgatggaccttaatcggagagccgaagcgatcgggtacgcgtaccctacacgggatattttcatggaaaatattatgttctgtggtatgggtgggttctctgacttttacaaactgaggtggctggaggccatactgtcgtggcagaagcagcaggaaggatgcttcggagagcctgacgcagaggatgaggagctgtccaaggccattcagtaccaacagcacttcagtaggcgcgtgaaacggagagaaaaacagtttcccgatgggtgctcatcgcataacacagccaccgcagtggcggcactgggaggcttcttgtacatcctggccgaatatccacccgctaatcgagaacctcatcccagcacaccacctccccctagctcaaggtag

SEQ ID NO: 11500 - DNA, 162 bp, synthetic construct
  misc_feature 1..162: note = source = /note="Description of Artificial Sequence: Synthetic coding sequence"
  source 1..162: mol_type = other DNA
atgtggacaaattttttcaaactgcgactcttctgttgtctcctggccgtcctcatggtcgtggttttagtcattaatgtgacccaggtcgagtacctcgaccatgagacggtctctgcaactttcattgattcttctggacagttcgtgagcagtcaatag

SEQ ID NO: 11501 - DNA, 1305 bp, synthetic construct
  misc_feature 1..1305: note = source = /note="Description of Artificial Sequence: Synthetic coding sequence"
  source 1..1305: mol_type = other DNA
atggcctctctgggtctgctgcttttactcctcttgaccgccttaccacccctctggtcaagttctctgcccggattagacactgccgagtcaaaagcgactatagccgatctaatactatcagccctagagagggccactgtttttctcgagcagcgccttcccgagatcaacctggacggcatggtgggtgttagggtgctggaggaacaattgaagtcggtgagggagaagtgggcccaggagcccttactgcagccattgagcctcagagtgggaatgctgggggagaaactcgaggccgctattcagagatcgcttcactatttaaagctatcagatccaaagtatttgcgcgaatttcaactgaccctgcagccagggttctggaagctgccgcatgcctggatccacaccgatgcatctctggtatacccaacattcggaccccaggacagctttagcgaggagcgaagcgacgtttgccttgtccagttgttgggcacggggacagactcctctgagccatgtgggctgagtgatctgtgtaggtccctgatgactaagccaggctgcagcgggtattgcctatctcaccagctgctctttttcctttgggcgcgaatgcgcggatgtacacagggtcccctgcagcagtctcaggattatatcaacctgttttgcgcgaacatgatggatttgaatcggagggccgaggccatcggttatgcttacccgacccgggacattttcatggaaaacagcgtaaccggccaccccgttttttatctgcccctgtgcgattcctttctcccaccgaaagcagcccctgtcactgagctctataccgacggaccagtcatgttttgtggcatgggcggattttctgacttctacaagctgcgctggctggaagcgattctgtcttggcagaagcagcaagaaggttgtttcggagagcccgatgccgaggatgaggagctatccaaggccatccaatatcagcagcacttctcacgcagagtgaagcgcagagagaaacagtttccagacagtcgctccgtggcccaggcgggagtccagtggagaaatctgggctccctccaaccactgccaccaggcttcaagcaattctcctgcttgatcctccccagcagctgggattaccgatccgttcccccatatctggccaacttctacatttttttggtggagacggggtttcaccacgtggcccatgctgggctggagcttctgatcagccgagacccacccacaagtggctcacagtctgtcggactctag

SEQ ID NO: 11502 - DNA, 1311 bp, synthetic construct
  misc_feature 1..1311: note = source = /note="Description of Artificial Sequence: Synthetic coding sequence"
  source 1..1311: mol_type = other DNA
atgcaggggaccccaggcggaggaaccaggcccggaccatctccagttgataggaggactctgctggtgtttagctttatcctggctgcagccctgggacagatgaactttactggggatcaggtgctacgggtcttggccaaggatgagaaacagctttccttgcttggtgacttggaggggctcaagccgcagaaggtggacttttggcgcggacctgctcggccttccctgcctgtggatatgcgggttccattctctgagctcaaagatatcaaagcatacttggaatcccacggtctggcatatagtatcatgatcaaagatatacaggtgctgctggatgaggagaggcaggcaatggctaagtcgagacggttggaaagatcgactaactcattctcttactcctcctaccatacacttgaagagatttacagctggatcgataatttcgtgatggagcactcagatattgtctccaagattcagattggcaacagcttcgagaaccaatccattctggtactgaaattttccaccggagggagtcggcaccccgctatttggatcgacactggaatccacagtagagagtggataacacatgccaccggcatatggactgccaataaaatcgtcagtgactatgggaaagatcgggtcctgacggacatccttaatgctatggacatatttatcgagctggtcacaaaccctgatggttttgccttcacacatagcatgaaccgactctggcgcaagaataaaagcattcggcctggcattttttgcattggcgtggacttaaataggaattggaagtccggcttcggtgggaacgggagcaactcgaacccctgtagcgaaacttatcacgggccttctcctcaatcggaacccgaagtggctgcaattgttaacttcatcacagcgcacggaaatttcaaggcgctgatctccatacacagttatagccagatgctgatgtacccgtatggcaggctgctggagcccgtaagtaatcaacgcgaactctatgacctagccaaagatgcagtggaagccctgtataaggtgcatggtatcgagtacatctttggaagcatttcaactactctgtatgtggcctctggcatcactgtggactgggcatacgactccgggatcaagtacgccttcagcttcgagttgcgcgacacgggccagtacggattcctgttgcccgctactcagatcatacccaccgcacaggagacatggatggcactacggacgattatggagcacacactcaatcatccttactag

SEQ ID NO: 11503 - DNA, 1218 bp, synthetic construct
  misc_feature 1..1218: note = source = /note="Description of Artificial Sequence: Synthetic coding sequence"
  source 1..1218: mol_type = other DNA
atggatactatcttcctgtggagtctcctgctcctgttcttcggttctcaggcctctcgctgctccgcacagaaaaatacggaatttgcagtagatttgtaccaggaggtaagcctcagccacaaggataacataatctttagccctttaggaattactctggttctggaaatggtacagttgggtgctaagggaaaagcacagcaacagatccggcagactcttaagcagcaggagacttccgccggagaagagtttttcgtacttaagtctttcttttcagctatatctgagaagaaacaggaatttacattcaacttagccaacgcattgtacttgcaggagggcttcactgtgaaggaacagtacttacacgggaacaaggaattctttcaaagcgccataaaactggtggactttcaagatgcgaaagcttgcgcagagatgatctccacttgggtagaaagaaagacagatgggaaaatcaaagatatgttttcaggcgaagagttcgggcctctgacaaggctggtactggttaacgctatatacttcaaaggtgactggaagcagaagttcaggaaagaagacacccagttgataaactttacaaagaaaaatggatctaccgtgaagattcctatgatgaaggcgttgcttagaaccaagtacggatacttctccgagtctagcttgaattatcaggttctggagctctcttataagggggacgagttctccctgataattatactcccggcagaggggatggacattgaggaggttgagaagctcatcaccgcccagcagatcttaaagtggctctcagaaatgcaggaggaggaggtagagatatcactccccaggttcaaggtggaacagaaagttgacttcaaggatgtgctgtactctctcaacatcaccgagattttttctggtggctgcgacctatccgggataacagactcctccgaggtctacgtctcacaggtcacccaaaaggtcttctttgaaattaatgaggacggcagcgaggccgctacaagcaccgggatccacatacctgtgattatgagtctagcccaatcacagttcatcgctaatcatcccttccttttcatcatgaaacataacccaaccgagtctattctgtttatgggaagagttacgaaccctgatacccaggaaataaagggtcgggacctggattccctgtag

SEQ ID NO: 11504 - DNA, 510 bp, synthetic construct
  misc_feature 1..510: note = source = /note="Description of Artificial Sequence: Synthetic coding sequence"
  source 1..510: mol_type = other DNA
atgttgtatcagacaattaactccctcaagactaaaaatcctaagctgaagatcttgctgtcaatagggggatatctgttcggctcgaaagggtttcaccctatggtcgattccagcacatcccggctagagttcatcaactctatcatcctgttcttgcgaaaccacaacttcgatggactggacgtaagctggatataccccgatcagaaagaaaatactcacttcactgtcctcattcatgagctcgccgaagcttttcagaaggacttcactaaatccaccaaggagcgccttttacttaccgcgggtgtgtcagcaggcagacagatgatcgacaattcctatcaggtcgagaaactggccaaagatctggacttcattaatttgttatccttcgatttccacgggtcatgggagaagccgcttatcacaggacataacagccctctgtcgaagggctggcaggaccgtgggcctagcagctattataatgtggagtatgcttag

SEQ ID NO: 11505 - DNA, 1209 bp, synthetic construct
  misc_feature 1..1209: note = source = /note="Description of Artificial Sequence: Synthetic coding sequence"
  source 1..1209: mol_type = other DNA
atggcatctctcggcctgctcttgttgttacttctcactgccttgcctcccctctggagctccagcttgccgggtctggacacagcagagtcaaaggccaccattgcagatctcatcctcagcgctctggaaagagcaaccgtgtttctggaacagcggctgcccgagatcaacctggacgggatggtgggtgtgcgcgtgctggaggagcagttaaagtctgtgagggagaaatgggctcaggaacccctgctgcaaccattaagtctgagggtggggatgctcggggagaaactggaagctgcaatccagcgtagtctccactatttgaaactgagcgatcctaagtatctgagagaattccagctgactctccagcctggattttggaagctgccccatgcatggatccacaccgacgctagtcttgtgtatcctacctttggaccacaggattcattttcagaggaacgatccgacgtgtgcctggtgcaactgctcggaactggcacagacagctcagagccttgtggtttaagcgatttgtgccggtcacttatgactaagccagggtgctctggttattgtctcagccatcagctgctcttcttcttgtgggctcggatgcgcggttgcactcagggaccgctgcagcaatctcaagactacataaatttgttctgcgctaatatgatggacctaaatcggcgagcagaagccatcgggtatgcttatcccactcgggatatttttatggagaatattatgttttgcgggatgggtggatttagtgatttctataagctcaggtggttagaagctatactcagctggcagaaacaacaggagggctgctttggggagcctgacgccgaagatgaggaactgagcaaggcaatccagtatcagcagcatttttccagacgggttaagaggcgggaaaagcagtttccagacagtcggagtgtcgcacaagccggagtacaatggcggaatctcgggagcctgcagcccttgcccccaggttttaaacagttctcttgcctgatcctgccctccagctgggactaccgctccgtcccgccttacctagccaacttctacattttccttgttgagacgggattccatcacgtggcccacgctggactggagcttcttataagtcgggaccccccaacgtcaggctcccagtccgttggactttag

SEQ ID NO: 11506 - DNA, 1680 bp, synthetic construct
  misc_feature 1..1680: note = source = /note="Description of Artificial Sequence: Synthetic coding sequence"
  source 1..1680: mol_type = other DNA
atgtggacaaactttttcaagctgcggttattttgctgccttctggccgtcctgatggtggtggtgctggtcattaatgtcacacaggtcgaataccttgatcacgagactgtcagcgcaacatttatagacagctccggccagtttgtgtctagccaagttacaggaatctcaagaaacccatattgcggctatgatcaacaaaccctgtcttcacaggaacggatggaggaagattcactcctggccgcattgcatcgacaggtaccagatgtgggcccagtacctttcgtaaagtctacggatccctcatctagttacttcgttattttgaacagcgcagcttttttcaaggttggttctcaactggaggtcctggtgcacgttcaggacttccagcgcaaacccaaaaagtatggcggtgactatctgcaagcacgtatacattcccttaaattgcaggccggagcagtaggacgtgtcgtcgattatcagaatgggttctacaaagtgtttttcacactgttgtggcctggtaaggtcaaggtgagtgtgtctctggtgcatccctcagaggggatccgggtcctacagcggcttcaggaggacaagcccgatcgggtgtacttcaaatcgctctttcggtctggtaggatcagtgaaaccactgagtgcaatgtgtgtttacccggaaatttgcctctgtgtaattttacagacttgtatacgggagagccttggttctgcttcaagcccaaaaaattgccctgtagtagcagaatcacccacttcaagggtggatacctgaagggactgttgaccgcagcagagtctgctttcttccaatcaggcgtgaatattaaaatgcctgtcaactccagcggaccagattgggtgactgtcatccccagaaggatcaaagaaacaaactccctcgagctctctcagggatctggtaccttcccctccggctactactataaagaccagtggagacctcggaaatttaagatgaggcaattcaacgatccagataacattactgagtgtctgcagcgcaaggttgtccacctcttcggggacagcaccatccgacagtggtttgagtacttgactaccttcgtgcccgaccttgtggagtttaacttagggtctcccaagaatgtcggccctttcttggccgtggatcagaaacataacatcctgcttaagtaccgctgccatggccctccaatacgcttcacaacagtgttttccaatgagcttcattatgtggcgaacgagctgaatggaatagtggggggaaagaacaccgtcgtggctatagctgtctggagtcacttctcgaccttccctctagaggtgtatataaggcgattgcggaacatccgtcgagcagtggtcagattgctggatcggtctccaaaaacagtggttgttattcgcaccgcgaatgcacaagaactgggccctgaagtgtcactgttcaactcagattggtataactttcaactggacaccatactccggaggatgtttagtggagttggagtatacctcgtcgacgcctgggaaatgacgctggcacactatctgcctcataagcttcacccggacgaagtgatcgtaaaaaaccaactcgatatgtttctgtcattcgtttgcccattggaaacatag

SEQ ID NO: 11507 - DNA, 402 bp, synthetic construct
  misc_feature 1..402: note = source = /note="Description of Artificial Sequence: Synthetic coding sequence"
  source 1..402: mol_type = other DNA
atggctatggtgtccgcaatgtcctgggtgttgtacctgtggatatcagcatgtgccatgctcctttgccacggatcactccagcacaccttccagcaacatcacctccataggcccgaaggcggtacctgtgaggtgatagctgcccacagatgttgtaacaagaaccgaatcgaggaacgaagtcaaacagtgaagtgtagttgcctccctggaaaggtggcgggaactactagaaataggccctcatgcgttgacgccagcatcgttatcggcaagtggtggtgtgagatggaaccctgcctggaaggcgaggaatgcaaaaccctgcccgacaatagcggttggatgtgtgcaactggcaacaagatcaagactacccgcattcatcccaggacgtag

SEQ ID NO: 11508 - DNA, 606 bp, synthetic construct
  misc_feature 1..606: note = source = /note="Description of Artificial Sequence: Synthetic coding sequence"
  source 1..606: mol_type = other DNA
atgaaagtccacatgctggtgggcgtgctggtgatggtcgggtttaccgtgggaaaagttcccgtgcctgatatccgcacgtgtcacttttgcctggtggaagacccttcagtcggctgtatctctggatctgagaaatgtactataagcagcagctccttatgtatggtgatcactatctattatgacgtaaaagtgcgctttatcgtacgtggttgcggacagtacattagctatcggtgccaggaaaaaaggaacacgtatttcgctgaatactggtaccaggcacaatgctgccagtacgactattgcaactcgtggtcaagtcctcagctgcaaagcagccttccagaaccccatgaccggcctctggcattgcctctgtctgacagtcaaattcaatggttctaccaggctcttaatctgagccttcccctccctaatttccatgccggaacagaaccagatggtctcgacccgatggtgaccctcagccttaatctcggccttagtttcgcagagctccgacggatgtatctctttctgaattcaagcgggttactggttttgccccaggcaggtctgctcactccccacccatcttag

SEQ ID NO: 11509 - DNA, 606 bp, synthetic construct
  misc_feature 1..606: note = source = /note="Description of Artificial Sequence: Synthetic coding sequence"
  source 1..606: mol_type = other DNA
atgaaggtgcacatgctcgtgggcgtgctggtgatggtgggattcacagtcggcaaggtgcctgtccccgatattcgtacttgccacttctgtctggtggaggatccctctgttggttgcatatctgggagtgagaaatgcacaatcagtagcagcagcctctgtatggttatcaccatctactatgatgttaaagtgagattcatcgtgcggggatgtggacagtacattagttatcgctgccaggagaaacggaacacatatttcgcagagtactggtaccaagcccagtgttgccagtacgactactgcaattcttggtcctctccacaactgcagtcttctttgcctgaacctcatgacaggccgttagcccttcccctgagtgatagtcagatccagtggttctatcaggcactgaacttgtcactgcctctgcccaactttcatgccggtacagagcccgacggcctagacccaatggtgaccttgagcttgaatcttggcctatctttcgccgagctgagacggatgtatctctttttgaacagcagtggactgttggtcctgccgcaagccggtctgctaacacctcacccttcatag

SEQ ID NO: 11510 - DNA, 732 bp, synthetic construct
  misc_feature 1..732: note = source = /note="Description of Artificial Sequence: Synthetic coding sequence"
  source 1..732: mol_type = other DNA
atgggcccagaggccctttccagtttgctgctgctgctcctggtagcttctggagatgctgatatgaaaggacatttcgaccctgcaaaatgcaggtacgcccttggtatgcaagatcgcacaatacccgacagcgacatttccgctagtagctcatggtctgactctaccgccgctcgccactctcgcttagaatcatcagacggggatggagcgtggtgtcccgcaggctctgttttccctaaggaagaggagtacctgcaggtggatctgcagaggctgcacttggtggctttggtgggcacccagggcagacacgccggaggcttaggtaaagagttctcacgaagctaccgccttcggtactctcgggacggccgtcgctggatgggatggaaagacaggtggggacaagaagttatttctggaaacgaggatccagaaggagtggtcctaaaagaccttgggcctccaatggttgctcgcttggtgcggttttatccccgtgctgaccgcgtgatgagcgtgtgccttagggtcgaattgtacggctgtctgtggcgggattgtagcatgggtgtgtgggcgtcctggcagatggtttggtggggatggatgaccctgggtcgagtacgcagctgcgggagtgggcaggcaatgacaatgtgggatggcgcaactaccgcctcccctgtggccatgtggcggtggtctttgtccctgactggctag

SEQ ID NO: 11511 - DNA, 258 bp, synthetic construct
  misc_feature 1..258: note = source = /note="Description of Artificial Sequence: Synthetic coding sequence"
  source 1..258: mol_type = other DNA
atgaaaattccagtgctccccgcagttgtcctgctctcattgctcgtccttcacagcgcacaaggggctactctgggagggccagaggaagaatctaccattgaaaactatgcgagtcggccagaggcgtttaaagccgacgaatttctgaactggcacgcattgttcgaatcgattaaacgaaaactgccctttttgaactgggacgcctttcccaagcttaagggcttgcggtcggccacccccgacgctcagtag

SEQ ID NO: 11512 - DNA, 348 bp, synthetic construct
  misc_feature 1..348: note = source = /note="Description of Artificial Sequence: Synthetic coding sequence"
  source 1..348: mol_type = other DNA
atgggccgtgtgtttctgactggagaaaaagctaacagcattctgaagcgttatcccagagccaacggcttttttgaagaaattcgtcagggtaatatcgaacgagagtgtaaagaggaattctgtactttcgaagaagctagggaagccttcgaaaataacgagaagactaaggaattttggagcacgtacaccaaggctcaacagggggaaagcaatcgtggctcagactggttccagttttacttgaccttccctcttatctttggtctgttcataatactgctggtgatttttctgatatggaggtgtttcctgcgtaacaaaactcgcagacagaccgtgtag

SEQ ID NO: 11513 - DNA, 606 bp, synthetic construct
  misc_feature 1..606: note = source = /note="Description of Artificial Sequence: Synthetic coding sequence"
  source 1..606: mol_type = other DNA
atgaaagtgcatatgctggtgggtgtcctggttatggtgggcttcactgtcggcaaggtgcctgttccggacatccgtacatgccacttttgtctggtggaggacccaagcgtgggctgtattagtggcagcgaaaagtgcaccatctctagtagcagcttatgtatggtcatcacaatctattacgacgtaaaggtacgcttcattgtccgagggtgtgggcaatatatttcctataggtgtcaggagaaacgcaacacctacttcgctgagtactggtatcaggcacagtgctgccagtacgactactgtaactcctggagctctccccagctgcaaagcagcctgcctgagcctcatgatcgacctctggcgttgcccctgtccgactcccaaatccaatggttctaccaggctctcaatctgtcgcttcctttgcccaacttccacgccggaactgaaccagacggcttagaccctatggtcaccctgtcgcttaatttaggtctgtcctttgccgagcttcgcaggatgtatctttttctcaactcttcaggtttgctggtccttccgcaggcgggactgctgacaccacatccaagttag

SEQ ID NO: 11514 - DNA, 1311 bp, synthetic construct
  misc_feature 1..1311: note = source = /note="Description of Artificial Sequence: Synthetic coding sequence"
  source 1..1311: mol_type = other DNA
atgcaggggacaccaggaggcggaacccggccagggccatcacccgtagacagacgaacactgctcgtttttagctttattctggcagctgcattaggccagatgaacttcaccggggaccaagtgctccgagtgctggcaaaggatgagaagcagctgagtctgctaggagacttagaggggctgaagcctcagaaagtggacttttggagaggaccagctcgccctagtcttcccgtcgatatgcgagtccccttttccgagttgaaggatatcaaagcgtacctcgagtctcacggtctggcctattcaatcatgattaaggatatccaggttttgctggacgaggaaaggcaggccatggcaaagagtcggcgacttgaaagatccactaattcttttagctatagcagttatcatactctagaggagatttattcttggattgacaatttcgtgatggagcatagtgacatagtctcgaagatccagattggcaatagctttgagaatcaatccattctcgtcctcaaattcagtacaggcggtagccggcatccggcaatttggatcgacacggggatccattctcgggaatggatcactcatgccacgggcatctggacagctaacaagatagtgtcagactacggtaaggaccgagtgcttaccgacatcctgaatgcaatggacatctttatcgagctcgtgaccaaccccgacggctttgcattcacccactctatgaaccggttgtggagaaaaaataagtccattcgcccaggcatattttgtatcggagttgatcttaaccgaaactggaagtctgggttcgggggaaacgggtccaattcaaatccttgcagtgaaacctaccacggcccttctccacagtccgagccagaggtcgctgccatagtaaatttcattacggcccatgggaattttaaggcccttattagcattcactcatacagtcagatgctcatgtacccttatgggagactcctcgagccagtaagcaatcagcgtgaactctatgacctcgctaaggatgctgtggaagcgttgtacaaggtccacggaatcgagtacatcttcggatcaatctccacaactctctacgtcgcttctggtataacggttgattgggcctatgactcaggaatcaagtacgctttctctttcgagctgagagatacaggccagtatggctttttacttcctgccactcagattatccctacagcacaggagacttggatggcactccgcaccataatggagcacacactcaaccatccctactag

SEQ ID NO: 11515 - DNA, 606 bp, synthetic construct
  misc_feature 1..606: note = source = /note="Description of Artificial Sequence: Synthetic coding sequence"
  source 1..606: mol_type = other DNA
atgggggctactaccatggaccaaaagagcctctgggccggtgttgtggtgctccttctcttgcagggcggatcagcatacaagctggtctgctacttcacaaactggagccaagataggcaggaaccaggaaaattcacaccggagaacattgacccgttcttgtgttctcatttgatttattccttcgcctcaatcgaaaataataaagttataatcaaggataaatcggaggtgatgctctatcagaccattaattcgttaaagaccaaaaaccctaaactcaaaattctccttagtatcggtgggtatctgtttggtagcaaagggttccaccccatggtagattcgagcaccagccggctggaattcataaatagcataatcttgtttctgcgcaatcacaattttgacggcctggatgtctcttggatctaccctgaccagaaagagaatactcatttcacagtgctgatccacgagctggccgaagcatttcagaaagacttcactaagtctacaaaagagcggctgctgttgacagccggagtgtcagccggtcgccaaatgatcgataactcatatcaggtggagaaattagcatag

SEQ ID NO: 11516 - DNA, 75 bp, synthetic construct
  misc_feature 1..75: note = source = /note="Description of Artificial Sequence: Synthetic coding sequence"
  source 1..75: mol_type = other DNA
atgctagtggatggcccttccgagcgccctgccctgtgcttcttgctcctcgccgtcgccatgtccttcttctag

SEQ ID NO: 11517 - DNA, 252 bp, synthetic construct
  misc_feature 1..252: note = source = /note="Description of Artificial Sequence: Synthetic coding sequence"
  source 1..252: mol_type = other DNA
atgagacccaggggcctgcctccacttctggtggttctgctcggctgctgggcgtctgtttccgcacagaccgatgccacccccgctgtaacaaccgaaggcctcaatagcacagaagccgcactggcaacttttggcacgtttccctccactagacctccgggaacaccgcgagctcccggtcccagcagcgggcctaggccaacccccgtcaccgacggtagccacagtgtgacccaagctggagtatag

SEQ ID NO: 11518 - DNA, 1254 bp, synthetic construct
  misc_feature 1..1254: note = source = /note="Description of Artificial Sequence: Synthetic coding sequence"
  source 1..1254: mol_type = other DNA
atgttggccctattagtgctcgtaactgtggcattggcctcagctcatcacggtggggagcatttcgagggcgaaaaagtgtttagagtgaacgtggaagacgagaaccatattaatatcattcgggagctcgcttccactacgcaaatcgacttctggaaaccagacagtgtaacccaaatcaagccacacagtactgtggacttcagagtcaaagcggaagataccgtgacagtggagaatgtgttgaagcagaacgagctgcaatacaaggtgctaatttctaacttgcgcaatgtcgtggaggcacagttcgactctcgcgtccgggctactggacattcgtatgaaaaatacaacaagtgggagaccatcgaggcctggacacagcaggtggcgactgaaaatcccgctctcattagccggagcgttatagggactaccttcgaaggaagagccatctatttactcaaagttgggaaagccggtcagaataagcctgccatttttatggactgtggcttccacgctagggaatggatcagcccagctttttgccaatggttcgtgcgagaagccgtgcggacgtacgggagggagatccaggttactgagctgctagataagttagatttctacgtcctccctgtgttgaacatagacgggtacatctatacttggaccaagagtaggttttggcgcaaaacaagaagcacccatacaggatcctcatgtataggcaccgaccccaaccggaatttcgatgctggttggtgcgaaatcggggcttctaggaacccatgtgatgagacctactgcgggccagcagctgagagcgaaaaagagacaaaagcacttgccgattttatccggaataaactgagcagtatcaaagcttacctaactattcacagctattctcagatgatgatctacccatacagttatgcatataagctgggggagaacaacgctgaactgaacgcccttgcaaaagccacagtgaaggaactcgcgagtctgcatgggaccaagtacacatacggacccggagctacaactatctatcccgctgcgggtgggagtgatgactgggcctacgaccagggcatacggtactcctttacttttgagctgagggacacaggcagatatggcttcctgcttcctgagtctcagattcgcgctacctgtgaggaaacgttcttggctatcaagtacgtcgcatcatacgtactcgagcacctgtactag

SEQ ID NO: 11519 - DNA, 1680 bp, synthetic construct
  misc_feature 1..1680: note = source = /note="Description of Artificial Sequence: Synthetic coding sequence"
  source 1..1680: mol_type = other DNA
atgtggacaaatttttttaagttgaggctgttctgctgcttgctagctgtgctcatggttgtggtgttagtaattaacgtcactcaagtcgaatacctggaccacgaaaccgtcagtgctacttttatcgattcatcaggacagttcgtgtcatcccaggtgaccggcattagccgcaacccctattgtggctatgaccagcagaccctttccagccaggagagaatggaagaggatagcctcctcgccgcacttcatcgccaggtcccggacgtgggacccgtgccttttgtcaaatctacagacccctcttcatcttattttgtgatcctcaacagcgccgctttttttaaggtagggtcccaattggaggtgttagtccacgttcaggatttccagagaaagcctaaaaaatatggaggagattatttgcaggctcgcatccactcgctcaaactgcaggcaggagctgtggggagggtggtggattaccaaaatggattttataaagtgttctttacccttctctggccaggcaaggtaaaggtttctgtgagcctggtccacccctccgaaggcatcagagttctccagcgcttgcaggaggataagcccgaccgggtgtactttaagtcactatttaggtcaggtaggatatctgagaccacagagtgcaatgtatgcctccctgggaatctgccactatgcaactttactgacctgtataccggggagccctggttttgctttaaacccaagaaactcccctgcagctcacgcatcacgcatttcaaaggcggatatctgaaaggcctgctcactgccgcagaatccgctttcttccagtcgggagtgaacattaaaatgcctgttaattccagcggccctgattgggtcactgtgatacctcgcaggatcaaagaaaccaattccctggagctctcccagggcagcggtacatttccgtcggggtactactataaggatcaatggaggcctagaaaattcaagatgcgccagttcaacgaccctgacaacatcaccgagtgcttacagaggaaagtagtccatctgttcggcgattcgacaataagacagtggttcgagtacctgaccacgtttgtaccagacctagtggaatttaacctgggctccccaaagaatgtaggaccattcctagccgttgaccagaagcataacatcctgctgaagtatcgttgccatggccctcctatcagattcaccaccgtgtttagtaacgagcttcactacgttgccaatgagttgaacggcatcgtgggcggaaaaaatacggtcgtcgctatcgccgtctggtctcatttttctacgtttccactggaggtgtacatccgcagattaagaaacataaggcgggcagtggtcaggttactcgacaggagccctaaaacagttgtggtcatcagaacagctaacgcgcaggagttgggtcctgaagtttccctgttcaactccgactggtataactttcaattggacacaatcctgcggaggatgttcagcggagtgggagtgtacctggtcgatgcctgggaaatgacactggcccattatttaccccacaagcttcatccagacgaagtgatagtgaaaaatcagcttgacatgttcctgtcctttgtgtgtccattagaaacatag

SEQ ID NO: 11520 - DNA, 99 bp, synthetic construct
  misc_feature 1..99: note = source = /note="Description of Artificial Sequence: Synthetic coding sequence"
  source 1..99: mol_type = other DNA
atgcaaggcacgccaggaggagggaccagacccggtcccagtccggttgaccgcagaacgctactcgtattttccttcattctggccgctgcactttag

SEQ ID NO: 11521 - DNA, 180 bp, synthetic construct
  misc_feature 1..180: note = source = /note="Description of Artificial Sequence: Synthetic coding sequence"
  source 1..180: mol_type = other DNA
atgctcgccctattggtcctggtgacagtggctctcgcttcagcacatcatgggggagaacactttgagggggagaaggtctttagagtgaacgtggaggacgaaaatcacataaacattatcagagagctggctagcacaacccaaatcgatttttggaaacccgactccgttacatag

SEQ ID NO: 11522 - DNA, 303 bp, synthetic construct
  misc_feature 1..303: note = source = /note="Description of Artificial Sequence: Synthetic coding sequence"
  source 1..303: mol_type = other DNA
atgcggcctcgaggtcttcccccactgctagtagtcctgcttggatgttgggcttctgtttccgcacagactgacgccacaccagctgtcacgaccgaggggctcaacagcactgaggcagccctagctacattcgggaccttcccctcaacacgaccaccaggcacccctcgcgcaccagggcctagttctggccctcgccctacaccagtgactgacggtggctaccatgtgcctgcacctggcgtgcactctgatcctactagccggggacagccacggtgttgctctctgtgcctctag

SEQ ID NO: 11523 - DNA, 234 bp, synthetic construct
  misc_feature 1..234: note = source = /note="Description of Artificial Sequence: Synthetic coding sequence"
  source 1..234: mol_type = other DNA
atgaggtctccaagaatgagagtttgcgcgaagtcagtgctcctctcccattggctgtttctagcttacgtgctgatggtgtgctgtaaattgatgagcgcatctagccagcacctgaggggacacgctgggcaccaccagatcaagcagggcacatgtgaggtggtagctgtgcacaggtgctgtaacaaaaatcgcattgaagaacggtctcaaaccgtcaagtgctcgtag

SEQ ID NO: 11524 - DNA, 12 bp, synthetic construct
  misc_feature 1..12: note = source = /note="Description of Artificial Sequence: Synthetic coding sequence"
  source 1..12: mol_type = other DNA
atgtggacatag

SEQ ID NO: 11525 - DNA, 402 bp, synthetic construct
  misc_feature 1..402: note = source = /note="Description of Artificial Sequence: Synthetic coding sequence"
  source 1..402: mol_type = other DNA
atggctatggtgtccgcaatgagttgggtattgtacctctggatcagcgcttgtgctatgctgctgtgccacggctccctgcaacacacattccagcagcaccatctgcaccggccagagggagggacatgcgaggtgatagcggctcatcgttgctgtaacaagaatcggatcgaagagcgctcacagactgttaaatgctcctgcttgcccggtaaggttgcaggtacaaccagaaatcgacctagttgtgttgacgcgagcatcgtgatcggtaagtggtggtgcgagatggagccatgcttggagggtgaagaatgcaaaaccctgccggacaattccggttggatgtgcgccactgggaacaagattaagaccacacggatccatcctcggacatag

SEQ ID NO: 11526 - DNA, 600 bp, synthetic construct
  misc_feature 1..600: note = source = /note="Description of Artificial Sequence: Synthetic coding sequence"
  source 1..600: mol_type = other DNA
atgaccatgcggcataattggactccagaccttagcccactctgggtgttactactctgtgcccatgtcgtcaccctgctagtccgggctacaccagtgtcacagaccacaactgcagcaaccgcttccgtcaggtctaccaaagatccctgtccgtcccagcctcccgtgttccccgcagctaagcagtgccctgcgctggaggtcacttggcctgaagtggaagtacctctgaatgggactctgagcctgagttgcgtcgcctgctcccgcttccctaatttttcaatcctgtactggttgggaaacggctccttcattgaacaccttcccggaagactttgggaggggtcaacctcaagggaacgtgggtctaccggaacccaactgtgcaaagcgctggtgctggaacagttgacaccagccctgcatagcaccaacttctcctgcgttctggtggatcccgagcaggttgtacagcgacatgtcgttctcgctcagctgtgggtgagatcccccagacgcggattgcaggaacaggaggagctttgttttcacatgtggggcggaaaagggggactgtgtcagtcttcgctctag

SEQ ID NO: 11527 - DNA, 1044 bp, synthetic construct
  misc_feature 1..1044: note = source = /note="Description of Artificial Sequence: Synthetic coding sequence"
  source 1..1044: mol_type = other DNA
atgggtgtggtgcagtacggggacaatcccgctacccatttcaatttgaagacacacactaactcacgggacctcaaaaccgctatagagaagattacgcagcgcggagggctctctaatgtgggccgagctatttcctttgtcactaaaaactttttctctaaggctaacggcaacaggagcggcgctccaaacgttgtcgtcgtgatggtggatggttggccaaccgataaggtggaggaggccagccgcttggcccgagaaagcgggatcaatatttttttcatcaccatcgaaggcgcagctgaaaacgagaagcagtatgtggtggagcctaactttgcgaataaagctgtgtgtcgaactaacggcttctactccttacatgtgcagtcttggttcgggttgcacaagacactacagccgctggtgaaacgggtctgcgatactgatagactagcttgcagtaagacctgcctgaatagcgccgacatcggtttcgtgattgacggttcttctagcgtaggcaccgggaattttaggacagtgctgcagttcgtcacaaatctaaccaaagaattcgaaatatcagatacagacacccgcatcggggcagttcaatacacctacgaacagagactggaattcggatttgacaagtattcctctaaacctgatatcctgaatgctatcaaacgcgtcggatattggtccgggggaacctcgacgggagccgctatcaactttgctctggagcaactcttcaaaaagagtaaacccaacaagagaaagcttatgatcctgatcacagacggtagaagctatgacgatgtaaggatccccgcaatggcagcccacctaaagggcgtgatcacttacgccatcggcgtggcttgggccgctcaggaggagctggaagtgattgcaacacatcccgctcgcgatcacagtttctttgtggacgaatttgataacctgcaccagtatgtgcccaggatcatacagaacatctgtactgagtttaactcacagccccgaaattag

SEQ ID NO: 11528 - DNA, 27 bp, synthetic construct
  misc_feature 1..27: note = source = /note="Description of Artificial Sequence: Synthetic coding sequence"
  source 1..27: mol_type = other DNA
atgcagggcaccccaggaggcggttag

SEQ ID NO: 11529 - DNA, 369 bp, synthetic construct
  misc_feature 1..369: note = source = /note="Description of Artificial Sequence: Synthetic coding sequence"
  source 1..369: mol_type = other DNA
atgctgtatcagacaatcaatagcctgaagacaaaaaaccccaaactcaagatcctactcagtatcggcggatacctgttcggcagcaaaggcttccaccccatggtggattcatctactagccgtctggaatttattaatagcatcatcttgtttctacggaaccataacttcgatggtctggacgtcagttggatctaccctgatcagaaggaaaacacccattttaccgtgttgatccatgagctcgctgaggcctttcaaaaagactttacaaaaagcactaaggagcgcttattgcttactgcaggcgtgagcgccggtagacagatgatcgacaattcataccaggttgaaaagttggcctag

SEQ ID NO: 11530 - DNA, 309 bp, synthetic construct
  misc_feature 1..309: note = source = /note="Description of Artificial Sequence: Synthetic coding sequence"
  source 1..309: mol_type = other DNA
atgcgggtgagcggggtactacgtctgctcgctctcatttttgctatcgttacaacctggatgttcatccgatcctatatgtccttttccatgaaaaccattaggctgccccgttggctggctgccagtcccaccaaggagatccaggtgaagaaatacaagtgcggcctgatcaagccatgtccagccaattacttcgcctttaagatctgttcaggcgctgcgaacgtggtcggtcctacaatgtgttttgaggatcgtatgatcatgtcgcccgtgaagaataatgtgggcaggggcctgaactag

SEQ ID NO: 11531 - DNA, 660 bp, synthetic construct
  misc_feature 1..660: note = source = /note="Description of Artificial Sequence: Synthetic coding sequence"
  source 1..660: mol_type = other DNA
atgaaacttctgctgtgggcgtgtatcgtctgcgttgccttcgcaagaaaaagaagatttccattcatcggggaagacgataacgacgatggccatccactgcacccttccctgaatattccatatggaatccggaatctgccccctcccctctactataggcctgtgaataccgtcccatcctaccctgggaacacttatacggatactgggttgccaagctacccttggatcctcacctctcctggtttcccatacgtgtaccacattagagggttccctttagcaacacagcttaatgtgccaccgctcccgccacgaggtttccctttcgttccaccctcccgattcttctctgcagccgctgctcccgctgctcctcctattgccgctgagcccgctgccgctgcaccattgacggctactcccgtcgctgcggaacctgccgctggtgctcctgtggctgccgaaccagccgctgaggctcctgtgggggcagagccagccgctgaagcccctgtggccgcagagcctgccgctgaggccccagtgggagtcgagccagctgctgaggaaccatccccggcagagcctgcaactgccaaacccgcagctccggagccccatccgtctcctagcttagagcaggcaaatcagtag

SEQ ID NO: 11532 - DNA, 1869 bp, synthetic construct
  misc_feature 1..1869: note = source = /note="Description of Artificial Sequence: Synthetic coding sequence"
  source 1..1869: mol_type = other DNA
atgggtaaatctgagggaccagtggggatggtggagagcgccggaagagcgggacagaagaggccaggtttcctcgagggcggtcttctcctgctcctccttctggtaaccgctgctctcgtggctctgggagtcctctatgccgaccgtagagggaagcagttacctagacttgccagtaggctgtgcttcctacaggaggagagaactttcgtgaaacggaaaccgcgaggcataccagaagctcaagaggtgagcgaggtgtgtaccacgcctggctgcgtgatagcggctgccagaattttgcaaaacatggaccccacaacagaaccttgcgacgatttctatcagttcgcctgtggcggatggctgcggaggcacgtgattccagagaccaattccagatattccatatttgacgtattgagagacgagctggaagttattctgaaagcggtgttggaaaacagtaccgccaaagctactgtgccccaggaagagagacacgacgtaatcgccttgtatcatcgtatgggcttggaggagctgcaaagccaattcggccttaagggatttaactggaccctgttcatccagaccgttctgtccagcgtgaaaatcaaactgcttccagacgaagaggttgtagtgtacggaattccataccttcaaaatctcgaaaacatcatcgacacgtatagtgcccgtactatccaaaattacctggtatggagactcgtgctggatagaattggctctttgtcgcagcggttcaaagacacccgtgttaactaccggaaagctctgttcggcacaatggtggaagaggtgagatggagagaatgtgtggggtatgtaaactctaacatggaaaacgctgtgggaagcctttacgtgagagaagcattcccaggggatagcaagtctatggtacgggagctaatcgacaaagttcgtaccgtatttgtagaaacacttgatgagttaggttggatggacgaggagagtaagaagaaagcccaggaaaaagccatgtccatcagggagcagatcgggcatccggattatatccttgaagagatgaatagacgtctggacgaagaatattctaacctgaactttagtgaggatctttacttcgaaaatagcttacaaaatttaaaagtgggcgctcaaaggagtctgaggaagctgagagagaaggtggacccaaatctgtggattatcggcgctgcagtggtgaacgcattttactcacccaacagaaaccaaatagtctttcccgcaggtattctccaacctccgtttttcagtaaggaacagccccaggctctgaactttggcggtattggtatggtcatcggccacgagattacacatgggttcgatgataatggacggaacttcgataaaaatggcaatatgatggactggtggtctaatttttctactcagcattttagggagcaatccgagtgcatgatatatcagtatggcaactattcgtgggacctggccgatgagcagaatgtaaacggatttaatactctgggggagaatatcgccgataatggaggcgtcagacaggcctataaggcatacctgaagtggatggccgaggggggaaaggaccaacaactgccgggactagacctgacgcacgaacaattattctttattaactatgcacaggtgtggtgtggcagctatcgtcctgagtttgcaatccagtctataaagactgacgtgcatagtcccctaaaatatagggtgctgggttcactgcaaaaccttgcagccttcgcggatacgtttcactgcgccagaggaacgccaatgcaccccaaggaacggtgcagggtgtggtag

SEQ ID NO: 11533 - DNA, 168 bp, synthetic construct
  misc_feature 1..168: note = source = /note="Description of Artificial Sequence: Synthetic coding sequence"
  source 1..168: mol_type = other DNA
atgggaccagaggctctgtcgagtctcttgttacttttgttggtggcttcaggtgatgctgacatgaaagggcattttgatccggctaagtgcagatacgcactgggcatgcaggaccgcacaattcctgacagtgatataagcgccagctccagttggagcgactag

SEQ ID NO: 11534 - DNA, 156 bp, synthetic construct
  misc_feature 1..156: note = source = /note="Description of Artificial Sequence: Synthetic coding sequence"
  source 1..156: mol_type = other DNA
atgggtccagaggcactgtcctcactgctcctgttgctactggttgcatccggggatgccgatatgaaaggccactttgacccggctaagtgtcgctacgccctggggatgcaggatagaaccattcctgacagcgacatatcggcaagcagctag

SEQ ID NO: 11535 - DNA, 1620 bp, synthetic construct
  misc_feature 1..1620: note = source = /note="Description of Artificial Sequence: Synthetic coding sequence"
  source 1..1620: mol_type = other DNA
atgtccgagccacaagagaagaaactctccgagaacacagacttcctagcaccgggtgtgtcttctttcacggattccaatcagcaggagagcattactaagcgggaagagaaccaggagcagcccagaaattacagtcaccaccagctgaatcgaagcagcaaacacagccagggccttagggatcaggggaaccaggaacaggaccctaatatcagcaacggagaggaggaggaagaaaaggaacctggagaagtcgggacccataatgataatcaagagaggaaaaccgagctgcccagagaacatgcgaacagcaaacaggaggaggacaatactcagagcgacgacatattagaggagagtgaccaaccaacacaagttagtaagatgcaggaggatgagtttgaccaggggaaccaagaacaggaggacaacagtaacgcagagatggaggaggaaaatgcctccaacgtcaataagcacatccaggaaacagagtggcagtcccaagagggtaagacaggactggaagccattagcaaccataaagaaaccgaggagaagacagtgtctgaagccctcttaatggaacctaccgacgacgggaacacaacccctcggaatcacggggtcgatgatgacggagacgatgacggagatgacggcggtactgatggtcccagacatagtgctagtgacgactactttataccaagtcaagcattcctggaggctgagcgcgcacagtctattgcgtatcacttgaagattgaggagcagcgcgagaaggttcatgaaaatgaaaatatcggcaccaccgagcctggcgaacaccaagaggcaaagaaggcggagaatagttctaatgaggaagagacatcttctgagggcaacatgagagtccacgcagtggacagttgtatgagctttcaatgtaagcgcggtcatatatgtaaagctgatcagcaggggaaaccacattgcgtgtgccaggatcccgtcacctgcccacctaccaagccactggaccaggtctgtggtactgataaccagacctatgcgagctcctgccatctgtttgctaccaaatgtagactggaggggactaaaaagggccatcagctgcaactggattatttcggcgcttgtaagtctatccctacatgcaccgatttcgaggttatacagtttccattgagaatgagagattggctgaaaaacatattgatgcagctctatgaggccaatagtgagcacgccggttacctcaacgagaagcaacggaataaggtgaagaaaatttatttggacgagaagcgcctcctggccggtgatcacccaatcgacttgctgctccgtgacttcaagaaaaactaccacatgtatgtgtacccagtccactggcagttttcagagttagaccagcaccctatggatcgggtgctgactcacagtgagctggcaccactgagagcctccctggtcccgatggagcattgtataacccgtttttttgaagaatgtgacccaaataaagataagcacatcaccctgaaggagtgggggcactgctttggcatcaaggaggaggatatcgatgagaatctgctgttctag

SEQ ID NO: 11536 - DNA, 591 bp, synthetic construct
  misc_feature 1..591: note = source = /note="Description of Artificial Sequence: Synthetic coding sequence"
  source 1..591: mol_type = other DNA
atgccgcatctggcttctctgtttacggcgagtagtaggtgctgccctcatcccctgaggcctgagggcagtggtgctatgggaccagaagctcttagcagtctcctgcttctattgctggtcgctagtggcgacgcagatatgaaaggccatttcgatcctgccaaatgccggtatgcccttggcatgcaagaccggactatcccggactccgatatctcagcctctagctcatggtccgattcaacagccgctcgccactctaggctggagtccagcgatggggatggcgcatggtgtccagccggatctgtgttcccgaaggaagaagaatatctccaggtggaccttcagagactgcacctagtggctcttgtaggcacacaaggaaggcacgccggaggtctgggcaaggagttctcgagatcgtatcgcttacgctactctcgtgatggcagaagatggatggggtggaaagacagatggggtcaggaagtgataagcgggaatgaggacccagagggcgtagtcctgaaggacctgggccctcctatggtcgccaggctggttagattttatcctcgagcctag

SEQ ID NO: 11537 - DNA, 162 bp, synthetic construct
  misc_feature 1..162: note = source = /note="Description of Artificial Sequence: Synthetic coding sequence"
  source 1..162: mol_type = other DNA
atgcttccttgcctagcgctactgctgttgatggaactgtcagtgtgcacagtagcgggtgacggtggggaagagcagacactgtctactgaagcagagacctgggttatcgtcgctctggaggtactgcttggcagaggatcagacgaaggtcgaggctag

SEQ ID NO: 11538 - DNA, 126 bp, synthetic construct
  misc_feature 1..126: note = source = /note="Description of Artificial Sequence: Synthetic coding sequence"
  source 1..126: mol_type = other DNA
atggggccagaggctctgagcagtctcctgctgctcctactcgttgcgtcgggggacgctgacatgaaaggccattttgatcccgctaaatgccgctacgctttgggtatgcaggacagaacatag

SEQ ID NO: 11539 - DNA, 222 bp, synthetic construct
  misc_feature 1..222: note = source = /note="Description of Artificial Sequence: Synthetic coding sequence"
  source 1..222: mol_type = other DNA
atggggccagaggcgctctcctccctgctgttattgctacttgtagcctccggtgacgcggacatgaaaggacatttcgatcctgccaagtgccgctatgcccttggaatgcaggataggaccattcctgacagcgacatctcggcctccagttcatggtccgattctaccgccgctcggcactctcgcctggagtccagcgatggcgatggagcatggtag

SEQ ID NO: 11540 - DNA, 369 bp, synthetic construct
  misc_feature 1..369: note = source = /note="Description of Artificial Sequence: Synthetic coding sequence"
  source 1..369: mol_type = other DNA
atgggtccagaggccctgagtagtctgttgttattactgttggttgcctccggggatgctgatatgaaggggcacttcgaccctgccaagtgccggtacgccctcggcatgcaggatagaactatccctgatagcgacatttcagccagcagctcctggagcgactctacagcagctcgccattcccggcttgaatcttctgacggtgacggcgcttggtgccctgccggatctgttttccccaaagaagaagagtacctccaggtggatctgcagcgactgcacctggtggccctcgtcggaactcaaggacgtcacgccggtggcctgggcaaggagttcagccgctcgtataggctgcgctattag

SEQ ID NO: 11541 - DNA, 483 bp, synthetic construct
  misc_feature 1..483: note = source = /note="Description of Artificial Sequence: Synthetic coding sequence"
  source 1..483: mol_type = other DNA
atgggcccagaggccctgagctcactgctgttgttgttactggtcgcctcgggagacgcagacatgaagggccactttgatccagccaagtgtagatacgctctgggaatgcaggacaggaccattcccgattctgacataagcgcttcaagcagctggtctgactcaacagcagcacgccacagtaggctggaatcttcagatggagacggcgcttggtgcccagccggaagtgtgtttcctaaggaggaagagtacctccaagtcgacctgcagagacttcacctcgttgccctagtggggacgcaggggcgtcacgccggaggattggggaaggaattctcgcggtcatacagactgaggtattcccgggatgggaggaggtggatggggtggaaggatcggtggggacaggaagtaatcagcgggaacgaggaccctgaaggggtggttctgaaggacttaggcccaccaatggtgtag

SEQ ID NO: 11542 - DNA, 540 bp, synthetic construct
  misc_feature 1..540: note = source = /note="Description of Artificial Sequence: Synthetic coding sequence"
  source 1..540: mol_type = other DNA
atgggctcatccggattgctgtcgctgttggtgctgtttgtgcttttagctaacgtccagggacctggcctcacagactggctgtttccccgtcggtgccctaaaattcgcgaggagtgcgaattccaggaacgtgatgtgtgtacgaaagaccgccagtgtcaggacaataagaaatgctgcgtgttcagctgcggcaagaagtgtttggacctcaagcaagacgtctgcgagatgccaaaagaaacaggcccttgcttggcttactttttgcactggtggtatgacaagaaggacaacacgtgttccatgttcgtttacggcggatgtcagggcaacaataacaacttccaatccaaagctaattgcctgaacacttgcaagaacaaacaaccttgccccaaaataaaggttgagtgcgaggtggaagaaatagaccaatgcactaaaccacgtgattgcccagagaatatgaagtgctgtcctttttcccgtggtaagaaatgtctggactttagaaaggcctctctctcgacatag

SEQ ID NO: 11543 - DNA, 438 bp, synthetic construct
  misc_feature 1..438: note = source = /note="Description of Artificial Sequence: Synthetic coding sequence"
  source 1..438: mol_type = other DNA
atgctattccgcaaccggttccttctactgctagcccttgcagcgttgctggccttcgtaagcctctccctacagttctttcacctcatccctgtgtcaacccccaaaaacggcatgagcagtaaaagtagaaaacgtatcatgcctgaccccgtcacagaaccaccagttacagaccctgtgtacgaagccttgttatactgcaatatcccttctgtcgcagagcgatcaatggagggccacgcccctcatcactttaagctcgtgtccgtgcatgtcttcatccggcatggcgatcggtacccgctgtacgtgatcccaaaaaccaagaggcccgaaatcgattgtactctcgtggcaaaccgcaaaccttatcaccccaagcttgaggcattcattagtcatatgtctaagggttcaggtgcctctttcgaatag

SEQ ID NO: 11544 - DNA, 399 bp, synthetic construct
  misc_feature 1..399: note = source = /note="Description of Artificial Sequence: Synthetic coding sequence"
  source 1..399: mol_type = other DNA
atgggcccagaggcactgagctctcttctgctactcctgctggtcgcctcaggagacgccgacatgaagggccattttgacccagccaagtgcagatacgccctgggcatgcaggataggaccatacctgactctgacattagtgcgtcaagcagctggtcggacagcacagccgctcggcatagtaggttggaatccagtgatggggatggcgcttggtgccctgccggatctgtgtttcctaaagaagaagaatatctgcaagtcgacctccaacgccttcaccttgtagccttagtggggactcaaggtcgacatgctggtggactgggaaaagagttcagtagatcttatagattgagatattccagggacggacggaggtggatgggatggtag

SEQ ID NO: 11545 - DNA, 306 bp, synthetic construct
  misc_feature 1..306: note = source = /note="Description of Artificial Sequence: Synthetic coding sequence"
  source 1..306: mol_type = other DNA
atgggccctgaggccctgtctagcctactgttgctgctcttggtcgcctctggcgacgccgacatgaagggccactttgatccggctaaatgtagatatgctctggggatgcaagaccgtaccattcccgattccgatatttccgctagtagctcgtggagcgatagcacagcagcaaggcactcacgcctcgaatcaagcgacggggacggggcttggtgtcctgctgggagcgttttcccaaaagaggaagagtacctccaggtggacctgcagagattacacctggtggccctggtaggctag

SEQ ID NO: 11546 - DNA, 393 bp, synthetic construct
  misc_feature 1..393: note = source = /note="Description of Artificial Sequence: Synthetic coding sequence"
  source 1..393: mol_type = other DNA
atgcttgcccctctgtttctttgctgcctgcgaaatctctttaggaagctgatttccttccaacctccccaactaggacgcaccaacatgcactacagcaagctgcccagaacagccatcgagactgagttcaagcagaatgtggggccaccaccaaaggaccttacagccgaagtgtatttcccgtctattaagagccggagccatctcccagcagtgttttacaatcagtactttaagcatccaaagtgcgtcggtgagtatggcccaaaaaatggcgctgagagacagattgaagagaggaaggtgctgccgacaacaatgatgtttagcatgctggcagattgtgttcttaaaagcacacccatccctatactgggagtcgctatgtag

SEQ ID NO: 11547 - DNA, 420 bp, synthetic construct
  misc_feature 1..420: note = source = /note="Description of Artificial Sequence: Synthetic coding sequence"
  source 1..420: mol_type = other DNA
atgccagctatcgctgtgctagctgcggcagccgctgcctggtgttttctccaagtggagtccagacacttggatgcactggctgggggtgctggaccaaatcacggaaactttctagataatgatcagtggctatcaacagtcagtcagtacgaccgggacaaatactggaatagatttagggatgacgattacttccggaattggaatccaaacaagccattcgaccaggcactggatccctccaaggacccgtgtttgaaggtaaaatgcagccctcacaaagtctgcgtaacccaggactatcagaccgccctgtgcgtgtcccggaaacacttgctccctcgccagaagaaggggaatgtcgctcagaaacactgggtgggaccaagcaatctggtgaagtgtaaaccgtgctag

SEQ ID NO: 11548 - DNA, 510 bp, synthetic construct
  misc_feature 1..510: note = source = /note="Description of Artificial Sequence: Synthetic coding sequence"
  source 1..510: mol_type = other DNA
atgagattgcttattctgacctgtcttgtcgcagtcgccctcgccagaccgaaactgccacttcgataccccgagagactgcagaatccctctgagtcatcggagcccattcctcttgagtcgcgggaggaatacatgaacgggatgaatcggcagcgcaatatcctgagggagaagcagacggatgagatcaaaaactgtgtggtagctgagccagaaaaaatggagagctcgatctcatcaagctcggaggagcagttctgtagattgaacgaatacaaccagctgcagctccaagccgctcacgcacaagagcagatccgtcggatgaacgagaatagtcatgttcaggttccgtttcagcagctaaatcagctcgccgcatatccatatgcagtgtggtattacccccaaatcatgcagtatgtgcctttccctcctttcagcgacatcagtaatcctaccgcccatgaaaactacgagaagaacaacgtaatgttacagtggtag

SEQ ID NO: 11549 - DNA, 921 bp, synthetic construct
  misc_feature 1..921: note = source = /note="Description of Artificial Sequence: Synthetic coding sequence"
  source 1..921: mol_type = other DNA
atgaaaaaggatgagccacctctagacttcccagatacactcgagggtttcgaatacgcatttaacgagaagggtcagctacgccacatcaagactggcgaaccattcgtattcaattacagggaggatctgcacagatggaatcaaaaaaggtatgaagcgttaggagagatcattaccaagtacgtgtatgagctcctggagaaagactgcaacctcaagaaggtgtcaatccccgaaggctatggtgtcatcgtactcaaccccaacgaaaactacatcgaagtggaaaaacccaaaatccacgtgcagtctagttcagacagcagcgacgaaccagctgagaaacgggaacggaaggataaagtgtctaaggaaactaaaaagagaagggacttttatgaaaagtatcgaaatccacagcgggagaaggagatgatgcagctgtacattagagaaaatggatctcctgaggaacatgccatctatgtatgggaccatttcatcgcacaagcagccgctgagaacgtctttttcgttgctcatagctatggaggtctggcatttgtcgaactaatgattcagagagaagcagatgtgaagaataaggtcaccgccgtggccctgactgattccgtgcacaacgtgtggcaccaggaggcagggaaaaccattagggaatggatgcgcgaaaactgctgcaactgggtgagtagctcagaaccccttgacacatctgttgaatctatgttgcctgactgtcctcgggtatccgcgggaactgatagacatgagctgaccagctggaaatccttcccatcaattttcaaattcttcacggaagcatctgaggcgaagacgtcttctctcaagcctgctgtaacgcgtcgttcccacaggatcaaacatgaagagttgtag

SEQ ID NO: 11550 - DNA, 2862 bp, synthetic construct
  misc_feature 1..2862: note = source = /note="Description of Artificial Sequence: Synthetic coding sequence"
  source 1..2862: mol_type = other DNA
tagcaactctgctggctgcctctcttagctcccctgttattactcaggcctcctggagtgcagagcgcgggacccattagagcgttcgtggtgcctcactcacatatggacgtaggctgggtgtacactgtacaggagagcatgcgcgcttacgccgcaaatgtatacacaagtgtggtggaggagcttgcccgtggccagcagagaaggtttattgccgtcgagcaggagttttttcgactctggtgggacggagtagcaagtgaccaacagaagtaccaggtacgacagctgctggaggaaggcaggctcgagtttgtgattggaggtcaggttatgcatgatgaggccgtaactcacctcgacgaccagattctacaattgaccgaagggcatggcttcttgtacgagacattcggaattcggcctcagttttcttggcacgtggatccctttggagctagtgcaacgaccccgactctgtttgcattagccggattcaatgcacatctcggctcacgcatagattacgacctgaaggccgcaatgcaggaggcacgcggtttgcagttcgtctggagggggtcacccagtttaagcgagcggcaagaaatttttactcacatcatggaccaatactcttattgtactccaagccacatcccattcagcaatcggtccggcttttactggaacggagtcgctgtcttcccaaagccaccccaggacggggtgtatcctaatatgtcagagccagtgacccctgcaaacattaatctgtacgcagaagcacttgttgctaacgtcaaacagcgggctgcatggttccgaacacctcacgtgctgtggccctggggttgcgataaacagttcttcaatgcctcggtgcaatttgccaacatggaccccttgctggaccatataaattcacacgcagccgaacttggagtgtcagtacagtacgcgactttaggtgattacttccgggcactccatgccctgaatgtcacatggcgggtcagagatcaccatgattttctcccatacagtactgaacctttccaggcttggacgggcttttacacatccaggtcgagcctgaagggtttagcacgtcgggcttctgctctgctgtacgctggggaatctatgtttaccaggtacctgtggccagcgccaagagggcacctcgatcctacatgggcacttcagcagctacaacagctgcggtgggctgtaagtgaggtgcagcatcacgatgctattactggtaccgagagccctaaagtaagagatatgtatgcaacccacctggctagcggcatgctgggcatgcgaaagctgatggccagtatcgtgctggacgagctgcagccacaagcccctatggcagcaagcagtgacgccggaccagctggtcactttgcatctgtctataatccactggcatggaccgtcaccacgattgtcaccctcactgtagggttccctggcgtacgcgtgaccgacgaagccggacaccccgtgccatctcagatccagaatagcacagagacaccaagcgcatatgatcttctgattctcaccacaatcccaggcctttcgtaccgacactacaatatccgccctactgccggagcgcaggaggggacacaagaacctgctgcgacagttgcaagcacactccagtttggtaggcgcctaaggcggaggaccagtcatgcagggaggtacctggtccccgtggccaacgactgctatatagtgttgctggatcaggacacgaatttaatgcactccatctgggagcgtcagagtaacaggacagtgagagtcactcaggaattcctggagtaccatgtcaacggagacgtgaaacagggccctatttcggataattaccttttcactccaggaaaagcagctgttcccgcttgggaagctgtcgaaatggaaatcgtcgcgggacagcttgtgactgagattagacaatatttctaccgcaacatgaccgcacaaaactacacctacgctatcagatctaggcttacgcacgtcccccagggccacgacggtgaactcctgtgtcatcggatcgagcaagaataccaggccggacctctggagctcaatagagaagctgtgctccggacctctacaaaccttaacagccaacaggtaatttacagcgacaacaacggatatcagatgcagaggcgaccctatgtgtcttacgttaataactccatcgccaggaattactacccaatggttcagagcgctttcatggaggacgggaaaagtcggttggtactcttgagcgaaagggctcatggtattagctcccagggtaatgggcaggtcgaagtcatgctgcacagaaggctgtggaacaacttcgactgggatttaggctacaaccttacccttaatgacacatctgtggtccatcccgtgttgtggctcttactcggcagctggtcactgactacagccttgcgacagaggtctgccctggcactccagcaccgacctgtggttctattcggcgatttggccggaacagcacccaagctgcccggtccccagcagcaggaggctgtcaccctacctccgaatttacatctccagattcttagcattcctggatggagatacagttctaatcacacggaacactcacaaaatctacgtaaggggcatcggggagaagcccaggccgacttgagacgggtgctgctgagactgtatcatctgtacgaggtaggcgaggatccagttctgtcccaacccgtaaccgtcaatctggaggttaactttcctactcccatccaaactattagtcagggatctaaaccatag

SEQ ID NO: 11551 - DNA, 459 bp, synthetic construct
  misc_feature 1..459: note = source = /note="Description of Artificial Sequence: Synthetic coding sequence"
  source 1..459: mol_type = other DNA
atgcggtttaaaacgacggccaaagatggcctcctgctgtggcggggtgatagcccaatgcgcccaaattcggactttatctctctgggtctgagggatggtgccctagtgtttagctacaaccttggtagcggcgtcgcaagtattatggtcaacgggtcttttaacgacgggcgatggcacagggttaaggcggtcagagatggtcagtccgggaagattacagtggatgactacggtgccagaacaggtaagagccctggcatgatgagacaacttaacattaatggtgctctttacgtgggcggaatgaaggagatcgccctacatactaatcgacagtacatgagagggctggtcggatgtatctcacacttcactctttctaccgattatcatatttctctggtggaggacgccgtcgatggcaagaatatcaacacctgcggcgcaaagtag

SEQ ID NO: 11552 - DNA, 1701 bp, synthetic construct
  misc_feature 1..1701: note = source = /note="Description of Artificial Sequence: Synthetic coding sequence"
  source 1..1701: mol_type = other DNA
atggacttcttactggcgctcgtcttggtctcatctctatacttgcaggccgcagctgaattcgatggccgatggcctcggcagattgtatctagcataggtctctgtagatacggcggaagaatagattgttgctggggttgggctaggcagagctgggggcagtgccagcccgtctgtcagccaagatgtaagcatggcgaatgtataggaccaaacaaatgcaaatgtcatccaggctacgcaggtaagacttgtaaccaagacgagcacatcccagcccctctggatcagggaagcgagcagccgctgttccaaccactggaccaccaggccacaagcctgccctccagggacttgaatgaatgcggcttgaaaccacgcccatgtaagcacaggtgcatgaatacatacgggtcctataagtgctattgtttaaacgggtacatgctgatgccagatggctcctgctcctccgcccttacatgcagtatggccaactgccaatacggctgcgatgttgtcaaaggacagataaggtgtcagtgtccttcaccgggactgcagctggcccctgatgggagaacctgcgtggacgtagacgagtgcgcaaccggaagagctagttgcccaagatttcgacaatgcgtcaacaccttcggatcatatatctgcaagtgtcacaaaggttttgacctcatgtacatcggcggtaaatatcagtgccacgacatcgacgaatgcagccttgggcagtatcaatgcagtagcttcgcgagatgctacaatattaggggatcatataagtgtaagtgcaaggaaggataccagggtgacggcctcacttgtgtttacatcccaaaagttatgatcgagcctagcggtcccatccatgtgccaaaagggaatggaaccatcttgaagggagatacgggcaataacaactggatccctgacgtcggatctacttggtggcctccaaagacgccatatatccccccaataataactaaccgccctacttcgaaaccaactacccgccctactccaaagcccactcctattcccactccaccaccacctccccctctgcctacggagttgcgcacacccttaccccctactacgccagagcggcctaccaccggacttaccaccatcgcacctgccgctagcacaccccctggcggtattaccgtagataacagggtccagactgacccacaaaaaccgagaggagacgtgttttctgtgcttgtgcatagctgcaatttcgaccatgggctttgcggctggatacgggagaaagataacgatttgcactgggaacccatccgagatccggcagggggacagtacctgactgtttctgccgcaaaggctcctggaggtaaagccgctcggcttgtcctacccctgggccgattgatgcatagtggcgacctgtgcctgagcttccgccataaagttactggcttacatagcgggacattgcaggtttttgtgcggaaacatggcgcacatggagccgcattgtgggggaggaatggcggacacggatggaggcagactcagattactttgagaggggctgacattaagtcagttgttttcaaaggggaaaagcgcagggggcacacgggcgaaatcgggttagacgatgttagtttgaagaaagggcattgttcggaggagcggtag

SEQ ID NO: 11553 - DNA, 213 bp, synthetic construct
  misc_feature 1..213: note = source = /note="Description of Artificial Sequence: Synthetic coding sequence"
  source 1..213: mol_type = other DNA
atggggcctgaggccttgtcctcgctgctgcttctccttttagtggcaagcggagacgcagacatgaaaggacacttcgacccagctaagtgccgttatgctctgggcatgcaagatcgcacaatccccgatagcgacatcagcgcaagctccagttggagcgacagcactgcagctagacatagcagattggagtcatccgacggtgattag

SEQ ID NO: 11554 - DNA, 237 bp, synthetic construct
  misc_feature 1..237: note = source = /note="Description of Artificial Sequence: Synthetic coding sequence"
  source 1..237: mol_type = other DNA
atgggcccagaggccctgtcaagccttctgctgctgcttctagtcgcatccggcgacgcagatatgaagggccactttgacccagccaaatgtcgttacgctttgggcatgcaagaccggacaatacccgattctgacatatctgccagctcttcctggtctgacagcaccgctgccaggcactctaggctggagtcctccgatggagacggtgcatggtgccccgcaggaagctag

SEQ ID NO: 11555 - DNA, 339 bp, synthetic construct
  misc_feature 1..339: note = source = /note="Description of Artificial Sequence: Synthetic coding sequence"
  source 1..339: mol_type = other DNA
atgcggttcaagacgactgcgaaggatggccttttactgtggcgcggagactcccccatgagacccaatagtgatttcatcagtttggggctccgggacggcgctctcgttttctcatataatctcggctcgggggtggctagcattatggtgaacggttcgtttaacgacggcaggtggcaccgcgttaaggcagtaagagatgggcagtccgggaagataactgtggatgattacggagccaggacaggcaagagtcctggaatgatgagacagctaaacattaacggggctctctatgtggggggaatgaaggagatagcactccacacgaactag

SEQ ID NO: 11556 - DNA, 2685 bp, synthetic construct
  misc_feature 1..2685: note = source = /note="Description of Artificial Sequence: Synthetic coding sequence"
  source 1..2685: mol_type = other DNA
atgtcgctgcccagatgctgtccacacccactccgtccggagggtagcggggcaatgggaccggaggctctgagctctctcttgctgctgctcctggtggcctcaggggatgccgacatgaaagggcactttgaccctgccaagtgccgctacgcactcggaatgcaggacaggaccattccagacagtgacatttctgctagtagctcatggagtgattccactgcagcacgccattctcggctggagtcctctgacggagacggggcttggtgcccagctggatctgtatttccaaaagaggaggagtatctgcaagtggacctgcagagactgcacctggtcgcactggtgggaactcaggggaggcatgccggtgggctgggaaaagaattcagccggtcttatcgactgaggtactcccgggacggcagacgatggatgggatggaaggataggtggggacaagaggtgattagcggcaacgaagatcctgagggcgtggtcctgaaagaccttgggccacctatggtggcccgactggttcggttttaccctagggccgatagggtgatgagtgtgtgcctaagggttgagctgtacgggtgtctgtggagggatggcctgctgagctatacagcccctgtcgggcagactatgtatctgtcagaagccgtgtacctgaatgacagcacatatgatggccacacagtggggggactgcaatacgggggactggggcaactggctgacggagttgtgggactggatgactttcgaaagtcacaagaactcagggtgtggccaggctatgattacgtaggctggtctaatcacagtttcagctccggatacgtggaaatggagtttgaatttgaccgcctgcgcgcttttcaggccatgcaagtacattgcaacaacatgcatacattaggcgcaaggttgccagggggtgttgaatgcaggtttcggagagggccagcaatggcttgggaaggagaacccatgcggcataatcttgggggaaacctgggagatcctcgagccagagccgtgagtgtgccactgggcggacgggttgctaggtttctccaatgtcgctttttattcgcaggaccctggcttctcttctcagagatatcttttatctctgatgtagtcaataattcttcacctgcccttgggggtacattcccacctgcaccctggtggccccctgggcctccgccaaccaactttagctctctcgagcttgaaccgagggggcagcagcccgtggctaaggctgagggatcccccaccgccatcctcatcggatgtcttgtcgctattatccttctcctcctgttgatcatagcactcatgctttggaggctgcattggcgccgattactgtccaaagcagagcggagggtgttggaggaagaactgactgtccacctctcagtccctggggatacaattctgatcaataaccgtccgggtcccagggagccccctccataccaggaacccaggcctcgtggcaatccaccacattccgccccatgcgtgcccaacggttcagcatactctggtgactacatggagcccgagaagcctggggcacccctgcttcccccacccccacaaaactcagttccacattacgcggaggctgatatcgtcaccttacagggcgtgaccggagggaacacttatgcagtcccggcactgcctccaggtgctgtgggtgacggaccccctcgggtggactttcccaggtcccggttacggtttaaggagaaactgggggagggtcaatttggcgaggtgcacctgtgtgaagtcgactcaccccaggacttggtgtccttagatttcccacttaatgttcggaagggccaccctctgctggtggcagtgaaaattctccgtcccgatgcaactaagaacgcgcgaaacgattttctgaaggaggttaagatcatgtcaaggttaaaggaccccaatatcatccgccttctgggagtgtgcgtccaggatgatccattgtgtatgataacagactatatggaaaatggtgacctcaaccagttcttatcagctcatcagctggaggataaggccgcagagggcgcacccggtgatggacaggctgctcaaggaccaacgatttcttaccccatgctgctgcacgtagcagctcagatagcctcagggatgcgctatttggctaccttaaatttcgtgcaccgggatctagcgactaggaactgtctcgtgggggagaactttaccatcaagattgctgatttcggcatgagcaggaacctgtatgctggggattattaccgcgtccaaggtcgggcagttctgccaattcgctggatggcttgggagtgcatcttgatgggaaagttcacaactgcatctgacgtttgggcctttggggtgaccctctgggaggtcctaatgctttgccgcgctcagccatttggccagctcaccgatgaacaggttattgagaacgcaggcgagttcttccgggaccagggacgccaggtgtacttaagcagaccccctgcttgcccacaaggactttacgagctcatgctgaggtgttggagtcgcgaatccgaacagcggcctccctttagccagctacaccgtttcctggccgaggatgccctcaataccgtgtag

SEQ ID NO: 11557 - DNA, 384 bp, synthetic construct
  misc_feature 1..384: note = source = /note="Description of Artificial Sequence: Synthetic coding sequence"
  source 1..384: mol_type = other DNA
atgggcccagaggcactcagttcgttgctcctgctgctgctggttgcatctggagacgccgatatgaagggccatttcgatccggcaaaatgtaggtacgctctgggcatgcaggaccgaactatcccagattctgacatcagcgcatcaagcagctggtctgacagtacggcagcgcgtcacagccggttggaaagtagtgatggagacggagcctggtgtcctgccggtagtgtcttccccaaagaggaggagtacctgcaggtggaccttcagagactgcacctcgttgccttagtgggaacgcaggggaggcatgctggtggtctggggaaggaatttagccgcagttataggctgcgttacagcagggacggcagatag

SEQ ID NO: 11558 - DNA, 1113 bp, synthetic construct
  misc_feature 1..1113: note = source = /note="Description of Artificial Sequence: Synthetic coding sequence"
  source 1..1113: mol_type = other DNA
atgaagaaggacgagcccccactagacttccccgataccctagagggcttcgagtatgcctttaatgaaaagggtcagctgcggcatatcaaaaccggagagcctttcgtcttcaactacagggaggacttgcaccgttggaaccagaaacgctatgaagccctcggcgaaatcatcaccaagtacgtgtacgaactgctggagaaggactgtaacctcaaaaaagtgtccattcctgtggacgccaccgagagcgaaccaaaaagtttcatctttatgtcagaagacgctctgacaaatccacagaaattaatggtactaattcacggcagtggtgtggtccgcgctggccagtgggcaagacgtttgattataaacgaggacttggattccggtacgcaaatccctttcatcaaacgggctgtagctgagggctacggggtcattgtgcttaatcccaacgagaattatatagaggtggagaaacctaaaatccatgtccagagtagcagcgactccagtgacgagcctgccgagaaaagggaacgtaaagacaaagtctccaaggaaaccaaaaagcggcgagatttttatgagaaatataggaacccccagcgtgaaaaagagatgatgcaactgtacatccgcgagaatggctctccagaggaacacgcaatctatgtttgggaccatttcatcgcccaggctgctgcagagaatgtattctttgttgcacattcatatgggggtctggcattcgttgagctcatgatccagcgcgaagctgatgttaaaaacaaggtgacagctgttgctctgaccgacagtgtgcataacgtgtggcaccaggaggctggcaagaccattagagaatggatgagggagaattgttgtaattgggtttcatccagtgagccactagacactagcgtggaaagcatgctccctgactgtccaagggtctctgcaggcacggatcggcacgaactgacgagttggaagagttttccctctatcttcaaattttttacagaagcgtcagaagcaaaaacctcctcactcaagcccgctgtaacacggagatctcatcgtataaaacatgaagagttatag

SEQ ID NO: 11559 - DNA, 435 bp, synthetic construct
  misc_feature 1..435: note = source = /note="Description of Artificial Sequence: Synthetic coding sequence"
  source 1..435: mol_type = other DNA
atgaagacaggattattttttctctgtctgctaggtaccgctgcagcaattcccacgaacgctcgtctgctttcagatcattcaaagcccaccgcagagaccgttgcccctgacaacacagcgattccttccctaagagcagaggcagaggagaatgagaaagagaccgccgtaagcacagaggatgattcccatcataaggccgagaagtccagtgttttgaagtcgaaagaagagtcacatgagcaaagtgcagaacaggggaagtcttcgtcccaggaacttgggctcaaagaccaggaggactctgatgggcacttatcagtgaatcttgaatatgcacctactgaaggtacactcgacatcaaagaggacatgtctgagccacaagaaaagaaattgagcgagaatacggattttctggcacccggttag

SEQ ID NO: 11560 - DNA, 1341 bp, synthetic construct
  misc_feature 1..1341: note = source = /note="Description of Artificial Sequence: Synthetic coding sequence"
  source 1..1341: mol_type = other DNA
ctgaccttacatagcttgacatgctacgaggacctcgtgaccttcctccagcagtcaatacatcaatttgaggtgggaccgtacggatgtattctcctcaccctgtccgccattctgagccgcagtactgaacttattaggcaagactttgacgtgccgacttcccacctgatcggcgctcacggctactgcacacaagagctggtgaatctcttgctgaccggaaaggccgtgtcgaacgtgttcaatgatgttgtggagctcgattctggcgatggtaacatcaccctccttagaggcatcgcagctcgatctgacatcggatttctcagcttatttgagcattacaatatgtgccaggttgggtgcttcttgaaaaccccgaggtttcccatttgggtggtgtgttccgagtctcacttttcaattttattttccctgcagcctggcctactgagggactggcgaacagagcggctgttcgacctgtactactacgacgggctggccaaccagcaggagcagatcagactcacaattgacactacacagaccatcagtgaggatacagataacgacttggtccccccattggagctgtgtattagaaccaacatcggcagtgcactgggctttaagtacccggttggaaacaatcagacagcagtgcaggacaacgttaaagtctctctggctttcggactgtccatcgctacactggctcaatccgtcgggcatatttcgggcgctcacctcaatcccgcagtgaccctcggcctgctcctgtcatgtcagatcagcatattccgagcattaatgtatattattgcccaatgtgttggcgcaatcgtggcaaccgctatacttagcggaatcacttccagcttgacaggcaatagcctgggtagaaatgatttggcggatggcgtcaatagtggccaggggctgggcattgagatcatcggcactcttcagctggtgttgtgcgtccttgccactaccgaccgccgaagacgcgacctgggaggcagtgcgcctctggcaatagggctgtcggtggccctcgggcacctgctggccatcgattacactggctgtgggatcaaccccgctaggtccttcggaagcgcggttatcacgcacaacttctctaaccattggatcttttgggtgggccctttcatcggcggagcactggcagtattaatctacgacttcatcctggctccaagaagctccgacctgacggacagagtgaaggtgtggacaagcggccaagttgaagagtacgatctggatgccgacgatattaattcaagggtggaaatgaaacctaaatag

SEQ ID NO: 11561 - DNA, 81 bp, synthetic construct
  misc_feature 1..81: note = source = /note="Description of Artificial Sequence: Synthetic coding sequence"
  source 1..81: mol_type = other DNA
atgaaactgctgctgtgggcttgtatcgtctgtgtcgccttcgcccgtaagaatgcaggactgggattcctctggctctag

SEQ ID NO: 11562 - DNA, 348 bp, synthetic construct
  misc_feature 1..348: note = source = /note="Description of Artificial Sequence: Synthetic coding sequence"
  source 1..348: mol_type = other DNA
atgggccctgaggctctgtccagcctgttgttactcctcctggttgcctcgggagatgcagacatgaaagggcacttcgaccccgctaagtgccggtatgcccttggcatgcaggacaggacaatccctgattccgatatttctgctagctcatcttggtcagattctacagctgcgagacactctagactagagtcaagcgacggggacggcgcttggtgtccagcaggctccgttttccctaaggaagaagagtacctccaggttgacctccagagactccatctcgtggctctagtcggcacccaaggtcgtcacgccggaggcctcgggaaggagtttagttag

SEQ ID NO: 11563 - DNA, 165 bp, synthetic construct
  misc_feature 1..165: note = source = /note="Description of Artificial Sequence: Synthetic coding sequence"
  source 1..165: mol_type = other DNA
atgtacattccactggaccccgattataatgccgattgccctaacgtaactgcccctgtgtgcgcttccaacggccacactttccagaatgagtgttttttttgcgttgagcaaagagaattccattacaggatcaagtttgagaaatatgggaaatgcgattag

SEQ ID NO: 11564 - DNA, 351 bp, synthetic construct
  misc_feature 1..351: note = source = /note="Description of Artificial Sequence: Synthetic coding sequence"
  source 1..351: mol_type = other DNA
atggtacttctgcattggtgtcttctctggctactgtttccgttgtcgtcccggacccaaaaactccccactagggacgaagagttatttcagatgcagatccgggacaaggccttctttcatgatagctcagtgatccctgacggcgctgagattagcagctatctcttccgagatacaccaaaacgctatttctttgttgtcgaggaagacaataccccacttagcgtgactgttaccccgtgtgatgcacctcttgagtggaaactgagcttgcaggagttaccggaagaccggtccggcgagggcagcggtgacttggagcccctggaacagcagaagcagcaatag

SEQ ID NO: 11565 - DNA, 432 bp, synthetic construct
  misc_feature 1..432: note = source = /note="Description of Artificial Sequence: Synthetic coding sequence"
  source 1..432: mol_type = other DNA
atggggcctgaggctctctcatctctgctcctgctgcttttggtcgccagcggggacgctgacatgaaggggcatttcgatcccgctaagtgcagatacgctctgggaatgcaggatcgcaccatccctgattctgatataagtgcctcatctagttggtccgacagcaccgcagcccgacattctcggctagagtcctcagacggggacggagcttggtgcccagctggatcagtatttcccaaggaagaagagtatctgcaagtggacttgcagcgattgcacctagttgctctggtgggaactcaaggccgtcatgccggaggactgggaaaggagtttagtcgctcctatagattgcgatatagtcgggatggccgtcgatggatgggatggaaggatcgatggggccaggaggtgatcagtggctag

SEQ ID NO: 11566 - DNA, 747 bp, synthetic construct
  misc_feature 1..747: note = source = /note="Description of Artificial Sequence: Synthetic coding sequence"
  source 1..747: mol_type = other DNA
atggagctgctccaagtcaccattttattcctccttcctagcatctgctcatccaattccacaggggtgctggaggcagccaacaacagcctggtcgtaactaccaccaaaccctctattactaccccaaacacagagagccttcagaagaatgtagtcactccaactaccgggaccactcccaaaggaacaataacgaacgagctcctaaagatgagcctcatgtctaccgcaaccttcctgacgagtaaggatgagggcctcaaagcaacgactaccgacgttaggaagaatgactctattatttcaaatgtcaccgtcacttccgtgacattgccaaacgccgtgtctacgttacaaagctccaaacccaagtcgtcggtactgcaacctgacgcttcccccagtaagacgggcacccttaccagtattcccgtcactattccggagaataccagccagtcccaggtgatcggcaccgagggtggtaaaaatgcaagtactagtgcaacatcgcggagctactcaagcatcatcctgccggttgttatcgccctgatagttatcacattgtccgtgtttgtccttgttggactgtaccgaatgtgctggaaggccgaccccggtacacccgaaaacgggaacgatcagccgcagtccgacaaggaaagcgtcaaactactgacggtgaaaactatctctcatgagtcaggggaacattcagcccagggtaagaccaaaaactag

SEQ ID NO: 11567 - DNA, 363 bp, synthetic construct
  misc_feature 1..363: note = source = /note="Description of Artificial Sequence: Synthetic coding sequence"
  source 1..363: mol_type = other DNA
atgaagacagggctgttttttctgtgtctgttgggcacagcggctgctatacccacaaacgctcggctactatccgatcatagtaaacccacagccgagaccgtagcacccgataatacggcaattccctccctgagagctgaagcagaagagaacgagaaggaaactgccgtgagcaccgaggacgatagccatcacaaagctgaaaagagttcggtactgaagagcaaagaagaatcgcacgaacagtccgcagagcaggggaagtctagtagtcaagaactgggcctgaaggaccaggaagacagtgatggccacctgtctgtgaatctggagtacgcccctacagaagggacactgtag

SEQ ID NO: 11568 - DNA, 339 bp, synthetic construct
  misc_feature 1..339: note = source = /note="Description of Artificial Sequence: Synthetic coding sequence"
  source 1..339: mol_type = other DNA
atgggaccagaggcgctctcttccctgctcctgcttctgctcgtggcttctggagacgcagacatgaaaggacatttcgatcctgcgaaatgccgctacgctctggggatgcaggacaggaccattccggacagtgacatctcagcatccagttcctggagcgatagcaccgccgcaagacactccaggctggagtccagtgacggagatggcgcttggtgtcccgctggctcggtctttcctaaagaagaggagtaccttcaggtggacttgcagcggctacatcttgtggctttggtgggcacccagggacgccacgccggtggactgggaaagtag

SEQ ID NO: 11569 - DNA, 513 bp, synthetic construct
  misc_feature 1..513: note = source = /note="Description of Artificial Sequence: Synthetic coding sequence"
  source 1..513: mol_type = other DNA
atgggaccggaggcactatcctctctgctgctgttgctgctagtcgccagcggagacgcagacatgaaaggtcactttgaccccgctaaatgtcggtatgcccttggcatgcaggacaggactattcctgacagtgacatctcagccagttccagctggtccgatagtaccgcagcacgtcacagtcgcttagaatcgtccgacggcgatggagcatggtgccccgcaggtagcgtcttccctaaagaagaggaatacttacaggttgacctgcagcggcttcatcttgtggctcttgtgggcacacaaggtaggcacgccggaggcctgggcaaagagttcagccggtcatacaggctccgctattccagagatggccgtcgttggatgggctggaaggacagatggggtcaggaggttattagcggcaatgaggaccccgagggcgtcgtcctaaaagatctcgggccacccatggtggctaggctggttcgcttctaccctcgagcttag

SEQ ID NO: 11570 - DNA, 417 bp, synthetic construct
  misc_feature 1..417: note = source = /note="Description of Artificial Sequence: Synthetic coding sequence"
  source 1..417: mol_type = other DNA
atggggcctgaagccctaagttctctgctgctcctgctattggtcgccagcggtgatgcagacatgaaaggccacttcgatccagccaagtgcagatacgcactgggaatgcaagatcgaaccatccctgatagcgacatcagtgcctcaagcagttggagtgactctaccgctgctcggcattctagacttgagtcttccgatggagacggggcatggtgccccgctggctcagtttttcctaaagaggaggagtacctccaggtcgatttgcagaggctccacttggtagcactcgtgggtacccaggggaggcatgcaggagggctgggtaaggagttcagccgaagttatagacttcggtactcccgagacgggcgaagatggatgggctggaaagaccggtgggggcagtag

SEQ ID NO: 11571 - DNA, 285 bp, synthetic construct
  misc_feature 1..285: note = source = /note="Description of Artificial Sequence: Synthetic coding sequence"
  source 1..285: mol_type = other DNA
atggcggctttcccccacaagattatcttctttctggtttgttctaccctgacccacgtggccttctctggaatctttaataagcgtgatttcactagatggcctaagccgaggtgtaaaatgtacataccgctggacccagactacaacgctgactgccctaacgtcactgctcctgtgtgtgcgtctaacggccatacctttcagaatgagtgtttcttctgtgtcgaacaacgagagtttcactataggattaagttcgaaaagtatggtaagtgcgattag

SEQ ID NO: 11572 - DNA, 156 bp, synthetic construct
  misc_feature 1..156: note = source = /note="Description of Artificial Sequence: Synthetic coding sequence"
  source 1..156: mol_type = other DNA
atgggcccagaggctctgagttcattactactgcttcttctggtagcgagtggggatgctgacatgaagggtcatttcgaccccgctaaatgccgatatgccctggggatgcaggatcgcaccatcccagactctgacatcagcgcaagttcttag

SEQ ID NO: 11573 - DNA, 2760 bp, synthetic construct
  misc_feature 1..2760: note = source = /note="Description of Artificial Sequence: Synthetic coding sequence"
  source 1..2760: mol_type = other DNA
atgggaccggaggcgttgtccagccttttgttactgcttttagtggcttcaggtgatgctgatatgaaaggtcactttgacccagcaaagtgtcgttatgccttgggtatgcaggacagaacgattccggattctgacataagtgcgtcatcatcttggagcgatagcacggccgcacggcattctcggctggagagttcagacggggatggtgcatggtgccccgcaggtagcgtgtttcctaaagaggaggagtatctgcaggttgatctacagaggttacacctggtcgcccttgtagggactcagggacggcacgccggagggttaggtaaagagttctccagatcttatagattgcgatatagcagagatggtaggcggtggatggggtggaaagacagatggggacaggaagtgatcagcgggaacgaagatcctgaaggcgttgtgctgaaggatctcggacccccaatggtggcccgattagtcagattttaccctagggcagacagggtaatgtccgtgtgcctccgtgttgaactgtatgggtgtctctggagagacggattgctgagctacacagccccagtgggacagaccatgtacttgtctgaggcggtctatctgaacgattcgacctacgacggacatacggttgggggattgcagtacggcggactgggacagttggctgatggcgttgtgggtctggatgatttcaggaaaagccaggaactgagagtatggcccggttacgattatgtcggttggagcaatcactcattctccagcggctatgtcgaaatggagttcgaatttgaccgcctgagggcttttcaagcgatgcaggtgcattgtaacaatatgcacaccctgggcgctcggctccccggaggtgttgaatgtagattcaggagagggcctgccatggcttgggagggggagcccatgaggcacaatctgggcggtaatctcggagaccctcgcgcacgtgccgtttcagtacccttgggcggtagagtggccaggtttctccagtgccggtttttgttcgccggaccatggctactgttctcagaaatctcctttatcagcgatgtagtgaacaatagctctcccgctttgggaggtaccttcccgcctgccccatggtggcctcccggtccgccaccaactaatttttcgtccctggagcttgaaccgagggggcagcaaccggtggctaaagctgagggcagtcctaccgctattcttatcgggtgtctcgtggccatcatccttttgttgctgctgatcattgcgttgatgctgtggagactccactggaggcgattactgtccaaggctgagcggagggtcctggaggaggagctcaccgttcacctgagtgtccctggcgatacaattctgattaacaaccggccagggccacgagaacccccaccctaccaggagccccgaccaagagggaacccacctcatagcgccccttgcgtgccaaacggctccgctctcttactttctaaccccgcttatagactcctcctggccacctatgctcgcccaccacggggtcccggaccaccgactcctgcctgggctaagcccacaaatactcaggcctactctggggattatatggaacccgaaaagcctggcgctcctctcctgccacccccacctcaaaactccgtcccgcactatgctgaggcagacattgtaacactgcagggagtgaccggcggaaacacttacgctgtgcctgctcttcctcccggagcagtgggggatgggccaccacgtgtcgattttcctcggtccaggctgagattcaaggaaaaattgggagagggccaattcggcgaagtgcacctttgtgaagtggacagtcctcaggatctggtgagtctagatttccctctgaacgtgcgcaagggtcatcccttattggtggctgtaaaaattctgaggccagatgcaactaaaaatgccagtttttcccttttctcaagaaacgacttcctgaaggaggtgaagattatgtcaagactcaaagaccctaacattattagattgcttggggtatgcgtgcaggacgaccccctctgtatgattaccgactatatggagaatggagatttaaaccagttcctgtctgcccaccagctggaggataaagcagccgagggcgcacccggtgatggccaggctgcccagggtccaaccatatcttaccctatgttactacacgtggcagctcagatagctagcggtatgcggtatcttgccacgctgaactttgtgcacagagatctggctactagaaattgtttagtcggcgagaacttcacgattaagatcgccgattttggcatgagccggaacttatacgccggagactactatcgggtgcagggacgagcagtcctccccattcggtggatggcgtgggaatgcatactcatggggaaattcacaactgcttctgacgtgtgggcttttggggtgaccctctgggaagtactgatgctctgtcgcgcacagcctttcggccaactgaccgatgagcaggtaatcgaaaatgccggagagtttttccgggaccaaggcaggcaggtgtaccttagccggccacctgcttgtccccaagggctttacgagctgatgctccggtgttggagcagggagtcggagcagagacctccattctctcagttgcaccgttttctggcggaagatgctttaaacactgtctag

SEQ ID NO: 11574 - DNA, 318 bp, synthetic construct
  misc_feature 1..318: note = source = /note="Description of Artificial Sequence: Synthetic coding sequence"
  source 1..318: mol_type = other DNA
atgggagtatctaaactagatatactctacagacgactgctgctgacaaagttgttcatacgaggctggggtcgtcccgaggatctgaaaagactctttgaatttcggaaaatgattgggaatagggaacggtgtcagaatctagtctcaagcgattatccagtgcacatcgacaagatcgaagaacagtctgactgtaaaattctcgacggccacttcgtgagcccaatggcacattacgtgcccgacatcatgcctatcgagagtgtcattgccagatttcagttcattgtccccaaagagtggaattcaaaatag

SEQ ID NO: 11575 - DNA, 126 bp, synthetic construct
  misc_feature 1..126: note = source = /note="Description of Artificial Sequence: Synthetic coding sequence"
  source 1..126: mol_type = other DNA
atgaaactgagcggaatgtttctgctgctctctctcgcactcttctgcttccttactggagtttttagccagggaggtcaggttgactgcggcgaattccaggatcccaaggtgtactgtacatag

SEQ ID NO: 11576 - DNA, 459 bp, synthetic construct
  misc_feature 1..459: note = source = /note="Description of Artificial Sequence: Synthetic coding sequence"
  source 1..459: mol_type = other DNA
atgagatttaaaaccactgctaaggatgggctgctgctgtggaggggggactccccaatgcggcctaattcagattttatctcccttggcctccgggatggggctttggtctttagttataatctcggatccggggtcgccagcattatggttaatgggagctttaacgatggccgttggcaccgggtgaaggcagtgagagacggccagtcaggcaaaattaccgtcgacgattatggggctcgtactggtaagtcccccggaatgatgcgccagcttaacattaatggagctctttacgttggcggaatgaaggagattgccctacacacaaaccgccagtatatgcgagggctggtagggtgtatcagccacttcacactgtctaccgattatcatatcagcctcgtggaggacgccgtcgacggtaagaacattaatacatgtggcgctaaatag

SEQ ID NO: 11577 - DNA, 1611 bp, synthetic construct
  misc_feature 1..1611: note = source = /note="Description of Artificial Sequence: Synthetic coding sequence"
  source 1..1611: mol_type = other DNA
atggatttccttctcgccttagtactcgtcagctctctgtacttgcaggccgctgccgaattcgatggcaggtggcccagacagatcgtttcctccattggactctgtcgatacggcggacgtatcgactgttgttggggctgggcgagacagagctggggccagtgccagcctgtgtgtcagccgcgttgtaagcacggagagtgcatagggccaaataaatgcaagtgtcaccctggctatgctggcaaaacctgcaaccaggacctgaacgagtgcggcttaaaaccaagaccctgcaaacatcggtgcatgaatacttatggctcgtataagtgctattgccttaatggctatatgctgatgcctgacgggagttgttcctctgcactgacctgcagcatggccaactgccagtacggatgcgacgtcgtgaaaggacagataaggtgtcagtgtccttcccctggcctacagctcgcacccgatggcaggacctgtgtggacgtggacgaatgtgccaccggacgggcttcttgtccgaggtttcggcaatgtgtgaatacattcgggagctacatttgtaagtgtcacaagggttttgatctcatgtacattggtggaaagtaccaatgtcacgacatcgatgagtgctcactcggacaataccagtgcagctcattcgccagatgttataatatccggggttcctacaagtgcaaatgtaaggaaggctaccagggagacggcctgacgtgtgtttacatccctaaggtgatgatcgagccaagtggtcccattcatgtgccaaagggtaatgggacaattctgaagggcgacactgggaacaataattggatcccggacgtcggatccacatggtggccccctaaaacaccctacatccctcctatcattaccaaccggcctacctctaaaccaacgacgcgtcccactccgaaaccaacacctattccgactccacctcctccaccccctctgccaaccgaattgcggacaccgctccctccaacaacgcctgagcggcctacgaccgggctcactaccatcgctcctgctgcttcaactccccctggaggtatcaccgttgacaaccgcgtgcagaccgaccctcaaaagccacgaggtgacgtgttctccgtgctcgtgcacagctgcaatttcgatcatggactgtgcgggtggatccgcgagaaagacaacgatctacattgggaaccgatccgggatccagcaggaggacagtacctgactgtgtctgcggctaaagccccaggcggtaaagcagcgcgactcgttctgccactgggacgtctcatgcactcaggagatttatgcttatcgtttcgacacaaagtaaccggactgcatagcgggacattgcaagtgttcgtgaggaagcacggggcacatggcgctgctttgtgggggagaaacggagggcacgggtggcggcaaacccagattactttacgaggggctgacataaaaagtgtcgtatttaagggcgaaaaacggcgtggtcacacgggagagatcggccttgatgacgtgtcactcaagaaaggacattgttctgaggagagatag

SEQ ID NO: 11578 - DNA, 288 bp, synthetic construct
  misc_feature 1..288: note = source = /note="Description of Artificial Sequence: Synthetic coding sequence"
  source 1..288: mol_type = other DNA
atgttgttccgaaatcggtttcttctgttactagcgctggctgccctcctggccttcgtgtccctttcactgcagttctttcatctgattcccgtatctacccccaaaaatgggatgtcctctaagtctagaaagaggataatgcctgatcctgtgaccgagccaccagttacagatccagtttatgaagctcttctgtactgcaatatccctagcgttgctgaacgctccatggagggccatgcgcctcatcattttaaactggtgtctgttcacgtgtttatttag

SEQ ID NO: 11579 - DNA, 213 bp, synthetic construct
  misc_feature 1..213: note = source = /note="Description of Artificial Sequence: Synthetic coding sequence"
  source 1..213: mol_type = other DNA
atggcctccgatttgataagaacaatcctggcagtagccctgatcagtaaattaggcaccgctgtggacgctgagctgatgccttcaggcgcaatccttcagaacaaacgcgagaaccttccaagagtgtgtcatgccctggccttccttggcatggcgagatgccaggatctattcctcgtacggctacagggctggaagctggggacatag

SEQ ID NO: 11580 - DNA, 417 bp, synthetic construct
  misc_feature 1..417: note = source = /note="Description of Artificial Sequence: Synthetic coding sequence"
  source 1..417: mol_type = other DNA
atggggcctgaagccctgtcttcccttctattgttgctgcttgtcgcaagcggggatgcggatatgaagggacatttcgaccccgctaaatgtcgctacgccctgggtatgcaggacaggaccattccggactctgatataagcgctagtagtagttggtccgactcaaccgctgcacgccatagccggctggaatcatcagacggcgacggcgcttggtgcccggcagggagcgttttccccaaggaggaagagtacctccaggtggatcttcagaggctgcacctagtggccttggtcgggactcaggggaggcacgccggaggactcgggaaagagttctctagaagttacagacttcggtattcccgcgatggcagacgctggatgggctggaaggaccggtgggggcagtag

SEQ ID NO: 11581 - DNA, 219 bp, synthetic construct
  misc_feature 1..219: note = source = /note="Description of Artificial Sequence: Synthetic coding sequence"
  source 1..219: mol_type = other DNA
atggcagtgtctgtgctccgcctgacggtcgtgctcggccttctggtccttttccttacctgttacgcagatgacaagcctgataaacccgatgataaacccgatgattcgggcaaggacccgaagcctgacttccctaagttcttatctctcctcggaacagaaattattgagaacgcagtggaattcattctgaggagtatgagccgttctacgtag

SEQ ID NO: 11582 - DNA, 438 bp, synthetic construct
  misc_feature 1..438: note = source = /note="Description of Artificial Sequence: Synthetic coding sequence"
  source 1..438: mol_type = other DNA
atggtgctgctgcactggtgtttgctgtggctgctgtttcccctcagtagtcggacgcagaagctccctactcgggatgaggaactgtttcagatgcagatccgagacaaggctttcttccacgatagcagtgtgattccagatggtgctgaaatctcatcatacttattccgtgacaccccgaaacgatactttttcgttgttgaggaggataatacccctttgtcagttactgtaaccccttgcgatgccccactggagtggaaactctcccttcaagagttgcctgaggacagatctggggagggttctggtgatctcgaaccccttgaacaacagaaacagcagattataaacgaggagggtacagagctgttcagttacaaggggaacgatgttgaatacttcatttccagttcatccccatcaggcttgtag

SEQ ID NO: 11583 - DNA, 258 bp, synthetic construct
  misc_feature 1..258: note = source = /note="Description of Artificial Sequence: Synthetic coding sequence"
  source 1..258: mol_type = other DNA
atgggacccgaagcattgtcttccctgctgttgctcctgttggtggcttcaggggacgctgatatgaagggccactttgaccccgctaaatgtagatatgcattgggcatgcaggaccggacgatccccgacagtgacatttccgcgagtagtagctggagcgatagtacagccgcacggcacagtcgcctggagtcatcagatggtgacggggcttggtgtccggcaggttcagtgtttcctaaggaagaggagtag

SEQ ID NO: 11584 - DNA, 1410 bp, synthetic construct
  misc_feature 1..1410: note = source = /note="Description of Artificial Sequence: Synthetic coding sequence"
  source 1..1410: mol_type = other DNA
atgcttaaggtgcattaccctaagttcggggtgtctgaagactgtctgtatcttaatatctatgccccagcccatgcagacaccggctccaaattaccggtgctcgtgtggtttcccggaggagcgttcaagaccggttcagccagcatcttcgacggttcagctctcgccgcttatgaggatgtgctggtggtcgtggtccagtatcggttagggattttcggtttctttactacttgggatcagcatgccccaggaaactgggcctttaaggaccaagtggccgctctgagctgggttcaaaaaaatatcgagttctttggtggtgacccatcatcagtcaccatatttggtgagtcggccggagctatttctgtgtccagtctgatcttgtcaccaatggcaaaaggccttttccataaggcgataatggaatcaggcgtcgctattataccatacctggaggctcatgactatgagaagtcagaagatctgcaggtcgtggcgcacttttgcggcaataatgctagcgatagtgaagctcttcttcggtgtcttcggacgaagcccagcaaggagctgctcactctgagccagaagaccaaaagctttaccagagtcgtcgatggagcattcttcccaaacgagccgctagacctgctgagccagaaagcattcaaagccatccctagcatcattggcgtcaataaccacgaatgtggcttcctgcttcctatgaaagaggccccagagatcctctcagggagcaataaaagcctggctctgcacctaattcagaacatcttgcacataccaccccaatatctgcatttggttgcaaatgaatatttccacgataagcacagcctcactgaaatccgcgactccctcttggacctcttgggcgacgtattctttgtagtaccagcactcataaccgcaaggtaccaccgggacgctggggctcccgtttatttctacgaattccgccatcggccacagtgttttgaagacacaaagcctgcatttgttaaggcagaccatgcagatgaggtaaggtttgtgtttgggggagcctttctgaagggggacatagttatgtttgaaggagctaccgaggaggagaaactgctgtcacgaaaaatgatgaaatattgggccacttttgccaggacaggaaaccctaatggtaacgatctgtcactctggcctgcgtacaacctgaccgagcagtacctgcagttagacctgaacatgtccctggggcagagactaaaggagcccagggtggatttctggacaagcactatccccctgattctctctgcctctgacatgctgcacagccctttgagttccctgacgttccttagcctgttgcagccattcttctttttctgcgctccttag

SEQ ID NO: 11585 - DNA, 393 bp, synthetic construct
  misc_feature 1..393: note = source = /note="Description of Artificial Sequence: Synthetic coding sequence"
  source 1..393: mol_type = other DNA
atgctgccctttcttttcttctctaccctcttctcgtctatttttaccgaggcccagaagcagtattgggtgtgtaacagcagcgacgcaagcatctcgtatacttactgcgggagggatctgaagcagctatactttaatctgtatatcacagtgaacacgatgaacttacctaaacgcaaagaggtgatttgtcgtgggtctgacgatgattactccttttgccgggcattaaaaggagaaacagtgaacaccacaatctcttttagtttcaagggaatcaagttctccaaaggtaaatacaagtgtgtggtcgaggctataagcggctctcccgaagagatgcttttttgccttgagtttgttatcttgcaccagcctaactctaactag

SEQ ID NO: 11586 - DNA, 318 bp, synthetic construct
  misc_feature 1..318: note = source = /note="Description of Artificial Sequence: Synthetic coding sequence"
  source 1..318: mol_type = other DNA
atgaaatgcaccgccagagagtggctgagggtaaccaccgttttattcatggccagggccattcctgcaatggtcgttcctaacgcaacattgttggaaaagctcctggagaagtacatggacgaagatggggaatggtggattgctaagcaaagaggaaagcgcgctatcaccgataacgacatgcagagtattttagacttgcataacaaactcagaagtcaggtgtatcctaccgcctccaatatggaatatatgacttgggacgttgagctggagagaagcgccgaatcgtgggcagaatcctgtttgtggtag

SEQ ID NO: 11587 - DNA, 567 bp, synthetic construct
  misc_feature 1..567: note = source = /note="Description of Artificial Sequence: Synthetic coding sequence"
  source 1..567: mol_type = other DNA
atgacaatggtttgccaccggccagagggactggaacaacttgaagcccaaactaatttcacaaaaagggaactccaagtcctctatcgtggtttcaaaaacgaatgcccgagcggagtggtgaacgaagatacttttaaacaaatctacgcccagttcttcccccacggagacgctagcacatacgcccactatcttttcaacgcctttgacaccacccaaaccggatcggtgaagttcgaggattttgtaactgctttatccattctcctgcgcggtactgtgcatgagaaactgaggtggacttttaacttatacgatattaataaagatggttacatcaacaaggaagagatgatggatatcgtgaaggccatttacgacatgatgggcaagtacacctacccagtcttgaaagaagataccccgagacagcacgtggacgtcttcttccagaaaatggacaagaacaaggatgggatagtgacactggacgaatttcttgaaagctgtcaggaggatgataacattatgcgaagcctacagctttttcagaatgtgatgtag

SEQ ID NO: 11588 - DNA, 1275 bp, synthetic construct
  misc_feature 1..1275: note = source = /note="Description of Artificial Sequence: Synthetic coding sequence"
  source 1..1275: mol_type = other DNA
atgcctcccttccttataacactttttctcttccattcatgctgcctgagagccaacgggcatcttagagaggggatgacactgctgaagactgagttcgcattgcacctgtatcagtccgtggccgcttgccgaaacgagacaaactttgttataagccctgccggtgttagcttgccactggagatcttgcagttcggcgctgagggctccactgggcagcaactcgccgatgccctgggatacaccgtgcatgacaagagagtgaaggattttctgcacgccgtgtacgctactttacccacctcgtcacaagggaccgaaatggagttggcctgcagtctgttcgtgcaagtgggaactcccctgtccccctgtttcgttgagcacgtttcatggtgggccaactcttctttggagcccgctgatttgagcgagcccaattccactgcaattcagacgtctgaaggggcaagcagagaaaccgctggaggcggtcccagcgaagggcctggtggatggccctgggagcaggtctccgccgcttttgctcagttagtacttgtatccaccatgtcattccagggcacttggaggaagaggttttcttccactgacacacagatcctgcccttcacatgtgcatacgggctagtgctgcaggttccaatgatgcatcagactacggaagtgaactacggacaattccaggataccgcaggccaccaagtcggcgtgctagaactgccatacttgggttcagcagtatcactgttcctggtactgcccagagataaggacacgcccctgagtcacatagagcctcatttgactgcctccacaattcacctgtggactaccagtctgcgcagagccaggatggatgtgtttctgcctaggtttagaatacagaatcagttcaatcttaaatctatcttgaatagttggggcgtcaccgacttatttgacccccttaaggcgaacttgaaggggatcagcgggcaggatgggttttacgtttctgaggccattcataaagctaaaatagaagtcctagaggagggtactaaggccagcggggctaccgccttgctgctgctgaagagatctcggatcccaatctttaaggccgatcgacccttcatctattttctgagggagcctaacaccggaattacagttttcttcgaccggatccagattatttaccagtgtctgtcttccaacaaaggatcctttgtgcattaccccctgaagaacaagcattctttttag

SEQ ID NO: 11589 - DNA, 1815 bp, synthetic construct
  misc_feature 1..1815: note = source = /note="Description of Artificial Sequence: Synthetic coding sequence"
  source 1..1815: mol_type = other DNA
atggccgtccttgtctgtcccgcatcgtgccacggtttgaaggaattccggatccggagaggaatgtggagactgtgtctggtttattatttctaccctgcttcgagcacactctacgtgctgaggattgacgtcctcaactatacttctaaagatgagggccctagcgccgaaggtccacagagaaatacccggctaggctggatccagggcaagcaggtgacagtcctgggcagtcccgtgcctgtgaacgtgtttcttggagttccgttcgccgcaccacccctggggtcactgcgcttcaccaacccacagccagcctccccctgggacaacctccgggaagcgacttcataccctaatttatgtttgcaaaatagcgagtggttgttgctggaccagcacatgttgaaggttcactatccaaaattcggcgttagcgaagactgcctgtatctcaacatatacgcacctgctcacgccgataccggatcgaagcttccagttttggtctggttcccagggggtgcatttaagactggcagcgccagcatattcgacgggtctgctctcgcagcttacgaagatgtgctggtggtcgtggtgcagtacagattgggaatcttcggatttttcacaacatgggaccagcacgccccaggaaactgggcgtttaaagaccaggtggccgcactgtcttgggtgcaaaaaaatattgagttcttcggaggtgatccatctagtgtgacgatcttcggcgagtcagctggtgctatttctgtttccagtctgatcctgagtccgatggcgaaggggctttttcataaagcaataatggaatccggcgtggcaataatcccatatttagaggcccacgactacgagaagtccgaagacctccaagttgtggcccatttttgtggcaataatgccagcgactccgaagccctgctgcggtgcctccgcaccaagccctctaaggagctgctcactctaagccaaaagaccaaatccttcactcgcgtggttgatggggcattttttccaaatgaaccgctggacctgcttagccagaaggccttcaaggccatcccctcaatcatcggagtcaataatcacgagtgcggattcctgctgcctatgaaggaggcaccagaaatcttgagcggctcaaacaagtcactggcacttcatctcatccagaatatcctacacatccctccacagtacctacacctggtcgccaacgaatacttccacgacaaacactccctcactgagataagggacagcctcttggacctgttaggagatgtcttcttcgtggtacccgcactgattaccgctcgataccatcgcgacgctggagcgccagtgtacttttacgaatttaggcatcggcctcagtgtttcgaggatacaaagccggcattcgtgaaagctgaccacgccgatgaggtgagattcgtattcggcggagctttcctaaaaggcgatatcgtaatgttcgaaggcgcaactgaagaagaaaagttgctatccaggaaaatgatgaaatactgggccacattcgcgcgtacggggaatccaaacgggaacgatctttctctgtggcctgcttacaacctgactgaacagtatctgcaacttgacctgaacatgtcgctgggacaaaggctaaaggaaccaagagtggacttctggacctccaccatccccttaatcctaagtgctagcgacatgctccatagcccgctgtcgagcctcacttttctctctctcctgcagccattctttttcttttgtgccccttag

SEQ ID NO: 11590 - DNA, 939 bp, synthetic construct
  misc_feature 1..939: note = source = /note="Description of Artificial Sequence: Synthetic coding sequence"
  source 1..939: mol_type = other DNA
atgaacatttggggacagatttggcccaaagccgtgtatctggtgtgtaactacagtccaaagggcaactggtgggggcacgccccttacaaacacgggcgaccttgctccgcctgtcctccatcattcggagggggatgccgggagaacctctgttacaaggagggctccgaccgttactaccctccccgtgaagaggaaaccaacgagattgaacggcagcagtcgcaggtacatgatactcatgtgcgtactcgctccgacgatagtagcagaaatgaagtcatctcagctcaacagatgtcacagatcgtgtcatgtgaggtgcgcctgagggaccaatgtaaaggtaccacatgcaatagatacgaatgcccagcagggtgtctggattcgaaggccaaggtcattggcagcgtgcattacgagatgcagtcctctatctgccgggcagccatacattacggcatcatcgataatgacggcggatgggtcgacattacgagacagggacgaaagcattactttatcaaatctaaccggaatggaatacagaccattggtaagtaccaaagtgcgaattcatttacggtgtccaaggtgacggtccaagccgttacgtgtgaaaccacagtggaacagttgtgtccatttcacaaaccagccagccactgccccagagtgtactgcccgagaaattgcatgcaggccaacccacactatgctagagtgataggaaccagggtgtactctgacctgagttcaatatgtcgggctgctgtgcacgcaggagtggtgcgaaaccacggaggttacgtcgacgttatgccggtggacaagagaaagacatatatcgctagcttccagaacggcatcttttccgagagcctgcagaaccctcccggtggcaaggcattccgcgtgttcgctgtggtttag

SEQ ID NO: 11591 - DNA, 777 bp, synthetic construct
  misc_feature 1..777: note = source = /note="Description of Artificial Sequence: Synthetic coding sequence"
  source 1..777: mol_type = other DNA
atgatagccatttctgcagttagcagcgccttgttattctctctcttgtgcgaagccagtacggttgtgttattgaattcaacggattccagcccaccaaccaataatttcacagacatcgaggccgcactgaaagctcagctggacagtgctgacattccaaaagccaggcggaagcgctacatcagtcagaacgacatgattgctatacttgactaccacaaccaggtgagaggcaaggtgttccctcctgcggctaatatggaatatatggtgtgggacgagaatttagcgaaaagcgccgaggcctgggccgcaacatgcatctgggatcacggcccatcctaccttctgcgctttctcggccagaatttatccgttcggacaggcaggtatcgctccattctccaactcgtgaaaccatggtatgacgaagtgaaggactatgctttcccctatccccaggactgtaatccacgatgccctatgaggtgtttcggcccaatgtgcactcactacacccagatggtgtgggccacttccaacaggatcggatgtgccatccatacttgccagaacatgaacgtgtggggtagtgtatggcgccgtgctgtgtacctggtctgcaactacgcccctaaggggaattggatcggtgaggctccttacaaggtgggagtgccttgctccagctgcccccctagttacggtggatcttgcacagacaacttgtgtttccctggggtgacctcaaactacctctactggtttaagtag

SEQ ID NO: 11592 - DNA, 1215 bp, synthetic construct
  misc_feature 1..1215: note = source = /note="Description of Artificial Sequence: Synthetic coding sequence"
  source 1..1215: mol_type = other DNA
atgccccctttcctgatcactctgttcctgttccatagctgctgtctacgggctaacgggcacttaagagaggggatgacccttctcaagactgaattcgcattacatctctaccaatccgtagctgcttgtcgcaacgagacaaactttgttatttctcctgccggtgtgtcacttcccttagagattttgcagtttggtgccgaagggtctaccggacaacaactggcagacgccttgggatacacagtccacgataaacgcgtaaaggactttctccatgcagtgtacgctacactgccgaccagtagccagggaaccgaaatggagctcgcctgctctctgttcgtgcaagtgggaactcccctctcaccctgctttgttgaacatgtgtcgtggtgggcgaatagcagcctggagcccgctgatttatccgagcccaatagcactgcaattcaaacatcagagggggctagcagggaaaccgctgggggaggtccgagcgaaggacctggcggttggccctgggagcaagtttctgctgccttcgcacagctggtgttggtgtcaaccatgagctttcaaggaacctggaggaagaggttctcatccaccgacacccaaatattgcctttcacttgcgcctatggactggtcctgcaagtgcccatgatgcatcagacaacagaggtgaactacgggcagtttcaggatactgccggtcatcaggtgggagttctggaattgccatacctgggctccgccgtcagcctattcctggttctgccacgcgataaagacactcccttgtcacacatcgagcctcacctcacagcttcaacaatacatctatggacaactagcctgcggcgagctcgaatggacgtttttttgccacgattccgcatccaaaatcaattcaatctgaagtccatcctgaatagttggggggtgacagatttattcgatccattaaaggccaacctcaaaggaatttccggtcaggatgggttctatgtgagtgaagcaatccataaggctaaaattgaggtgttggaagaaggcaccaaagcttcaggggctaccgctctcctgctgctcaaaagaagtcggatccccattttcaaagccgacagaccttttatatattttcttcgggagccaaacacaggttttgtgttttctatcggtcgagtttccaatcccttggattag

SEQ ID NO: 11593 - DNA, 936 bp, synthetic construct
  misc_feature 1..936: note = source = /note="Description of Artificial Sequence: Synthetic coding sequence"
  source 1..936: mol_type = other DNA
atgctgtaccagacgatcaactctctgaagacgaaaaaccccaaattgaagattcttctttcaatcggcggatacctgtttggcagcaaaggatttcacccaatggtggattcctccactagtcgactggagtttatcaattccattattctgtttctccggaaccataacttcgacggattagacgtgtcctggatttacccagatcagaaggaaaacacacacttcacggtcctgatccatgagctcgctgaagcctttcagaaagatttcacaaagagcaccaaagaacggcttttactaactgctggagtgagcgccggtaggcagatgatcgacaactcataccaagtcgaaaagctagccaaggaccttgattttatcaatttgttgagtttcgactttcacggatcctgggaaaaacccctgatcacaggccataatagtcccctttccaagggctggcaagaccggggaccgtccagttattataacgtcgagtacgccgtgggctactggatccacaagggcatgcccagtgaaaaggttgtgatggggattccaacatatggtcacagcttcactttggcaagcgccgaaacaacggtcggagctcccgcatctggaccaggggctgctgggcctatcaccgagtcttccggattcctcgcctattacgaaatctgtcagtttctaaagggcgcaaagatcacgcgcttgcaggaccagcaagtcccctacgccgttaaagggaatcagtgggtgggctatgatgatgtcaagagcatggaaacaaaggttcagttcctcaagaatctcaacctgggaggagcaatgatttggagtatcgatatggatgatttcaccggcaagagctgtaaccagggcccataccctctcgtgcaggctgtaaaacgttcactcggaagcttatag

SEQ ID NO: 11594 - DNA, 555 bp, synthetic construct
  misc_feature 1..555: note = source = /note="Description of Artificial Sequence: Synthetic coding sequence"
  source 1..555: mol_type = other DNA
atggcaagcgagcgactgccaaatcgacccgcttgcttactggtcgcatctggggcagctgagggtgtgagtgcgcaaagcttccttcactgctttactatggcatctacagcattcaatctccaggtcgctacccccggaggcaaggctatggagttcgtggacgtgactgaatccaacgcccgatgggtccaggacttcagactgaaggcctacgcgtctccagcaaaactagagtcaattgatgaacccatctgtgccgtaggccatggcgtcgcagccctttgctgtgcaacgaacgaggatagatcctgggttttcgattcatattctcttacgggcccttcagtctgcgagttagttcgcgctcccggttttgccagactgcctctggtggtggaggatttcgtgaaggactctggagcatgctttagtgcctcggaaccagatgctgttcatgtggtcctggatcgccacctcgtgacaggccagaatgctagctcgacagtaccagcagtccagaatctcctgtttttatgtgggtcccgaaagtag

SEQ ID NO: 11595 - DNA, 1257 bp, synthetic construct
  misc_feature 1..1257: note = source = /note="Description of Artificial Sequence: Synthetic coding sequence"
  source 1..1257: mol_type = other DNA
atgcggagtttgctgctgctctcagctttttgtttactggaagctgcacttgctgcagaggtaaagaaacccgcagccgctgccgctccagggaccgccgagaagctgagccctaaggccgctactctcgccgaaagaagcgcgggtctagcattttcattgtatcaagcgatggccaaggaccaggcagtggagaacatactggtgtcgccagtcgtggtagcatcctccctaggactcgtcagtctcggaggaaaagcaaccaccgcttcgcaagcgaaagcagtgctgagtgccgagcagttgagggatgaagaggtgcacgctggactgggcgagctcctacgcagcctgtccaactccaccgcccgaaacgtaacctggaaactaggctcccgcctgtatggaccaagttccgtgagctttgctgacgacttcgtaaggtcctccaagcagcactacaactgcgagcactcaaagattaattttcgtgataagcgctccgctctgcagtctattaatgaatgggcggctcaaactacggacggtaaactgccagaggtgactaaggacgttgagaggacggacggggcactgctggtcaatgcgatgttcttcaagccccactgggacgagaaattccatcacaaaatggtggataaccggggtttcatggtgacccggtcatatacagtcggtgtaatgatgatgcatagaacagggctgtacaattactatgatgacgaaaaggaaaagttgcagattgtggagatgcctctcgcgcacaagctgtcttctctgataatactcatgccacatcacgtggaacccctagagcggttggaaaagttattgacgaaggagcagctcaagatctggatggggaagatgcaaaaaaaggctgtggcaatttctctgcccaagggtgtggtagaggtgactcacgacctccagaagcacctggctgggctcggtctgaccgaagccatagacaaaaacaaggccgatctgtcacgaatgtctggcaagaaggacctgtacttagcttctgtcttccatgctactgctttcgaactggacaccgatggaaatccttttgatcaagacatctacgggagagaagagttgcggtcacccaagctcttctacgctgatcacccctttattttcctggtgagagatacgcagtccggatcgcttttatttatcgggagattggtgcgccctaagggagataagatgcgagatgagctgtag

SEQ ID NO: 11596 - DNA, 1425 bp, synthetic construct
  misc_feature 1..1425: note = source = /note="Description of Artificial Sequence: Synthetic coding sequence"
  source 1..1425: mol_type = other DNA
atggatcgtaatcccagtccacctccccctggcagagacaaagaggaagaggaggaagtcgctggcggagattgcattggatccacagtatacagcaaacattggctgttcggcgtacttagtggcttaattcagatcgtgtctcccgaaaacactaaatcaagctctgatgatgaagagcaactgacagagctagatgaggaaatggagaacgagatttgccgcgtgtgggatatgtccatggacgaagacgtagcactgttcctccaggagtttaatgcccctgacatcttcatgggcgtactggcaaaatctaagtgtccgaggctgcgtgaaatttgtgtgggtattctcggaaatatggcctgctttcaggagatctgcgtgtccattagcagcgataagaaccttgggcaggtgctgctacactgtctgtatgactcggacccaccaacactcctggagacaagccggttattgttgacctgtctttctcaggcggaggttgcttcggtgtgggtggagcgcatccaggaacatccagccatctatgacagcatttgttttatcatgtctagttccacgaatgtggacctcctggtcaaagttggggaagtcgttgataaattattcgacttagatgaaaaactcatgctggagtgggtgagaaatggcgctgcccaaccacttgatcagccgcaggaagagtcagaggaacagcctgtttttagactcgtgccatgcattctggaggcagccaagcaggtgcgctcagagaatcccgagtggctagatgtgtacatgcatattttacaactgctcacaacggtggacgatggaatccaagccatcgtgcattgccctgacaccggcaaggacatttggaatctcctctttgatttggtttgccacgagttttgtcagagtgacgaccctcccattattctgcaggagcagaagacggttttggcaagcgtgtttagcgttttatctgccatctacgcctcccagactgaacaagagtacctgaaaatagagaaggtcgatctcccattgatcgatagcttgatccgggtgctgcagaatatggaacaatgccagaaaaagccagaaaacagcgcagagtctaatacagaggagactaaaagaaccgacttgacacaagacgattttcacctgaaaatcttaaaggacattctttgcgagttcctctcaaacatatttcaggctctgaccaaggagaccgtcgcccaaggcgtaaaagaaggacagctcagcaaacaaaagtgttcatctgctttccaaaatttacttccattctatagccccgtggtggaggatttcattaaaatactgcgggaagtggataaagcactggccgacgatctggagaagaactttccaagcctcaaagtccagacatag

SEQ ID NO: 11597 - DNA, 438 bp, synthetic construct
  misc_feature 1..438: note = source = /note="Description of Artificial Sequence: Synthetic coding sequence"
  source 1..438: mol_type = other DNA
atgctgacacgattggttctatctgcccacctgtcttcaactacctcaccaccttggacacacgcggcaatctcatgggagctggacaatgtgcttatgcctagccccaggatatggccccaggtaacccccactggtaggtcagcctccgtccgctctgaaggcaatacatcctctctgtggaacttctccgcaggccaggatgtccacgccatcgtgactagaacttgtgaaagcgtcctgagctcagctgtgtatacccatgggtgcggctgtgtgcggtctgctaccaacatcacctgccagagctctggccagcagaggcaggcagccagacaggaggaggaaaactctatatgtaaagcccatgattctagggaaggtcgactcggttatccgctttctgcccatcaaccgggaagcggcggtcccaattag

SEQ ID NO: 11598 - DNA, 1728 bp, synthetic construct
  misc_feature 1..1728: note = source = /note="Description of Artificial Sequence: Synthetic coding sequence"
  source 1..1728: mol_type = other DNA
tagatctttggagggtcaatccactattttcgggtcccacgcgagtattggagagatcggctcttgaagatgaaggcatgcgggctgaacacattaacaacatatgtgccgtggaatctccacgagcctgagagagggaagtttgacttttctggaaacctggatctggaagcttttgtgttaatggccgcagagataggtctttgggtgattcttaggccaggcccttacatctgtagcgagatggatttaggaggcctccctagctggctgttgcaggatccaggcatgaggctgaggaccacatataagggttttactgaagccgttgacttgtactttgatcacctcatgtccagagtagtacccctgcagtacaaaagaggcggtcccattattgcggtccaggtcgaaaatgagtacggatcttataataaagatccagcctatatgccctatgtgaaaaaggccctcgaagacagggggatcgtcgaactccttctgaccagtgataacaaggacgggctttcaaaaggaatcgtgcagggggtcctggccaccataaaccttcagagcacccatgagcttcaactgctgacaacttttctgttcaacgtacagggaacccagccgaagatggtaatggagtactggactggatggtttgattcctggggcggaccacacaacatcctggacagtagcgaagttctgaaaactgtgtccgcaatcgtggacgcaggatcctcaatcaacctctatatgtttcacgggggaaccaacttcggttttatgaatggagcgatgcattttcacgattacaaaagcgatgtgacgtcctatgactacgacgcagttctcacagaggcaggggattataccgctaaatacatgaaattacgcgatttttttggcagtatctcagggattccactgccccctcctccagacctgttgcccaagatgccctatgaacctctgacaccagttctctacctatctctgtgggacgcacttaagtacctgggagaacctatcaagtcagaaaagcctataaacatggagaacctgcccgtgaacggaggcaacggacaaagtttcggctacatactgtacgagacctccatcaccagcagtggcatcttatctggtcatgtccatgaccggggacaggtgttcgtgaacaccgtgtcaattggctttctggattacaagacaactaaaatcgcggtaccactgatccaaggatacaccgtgctgcggatccttgtcgagaaccgcggtcgggtcaattatggggagaatattgatgatcaacgcaaagggctaataggaaacctgtacttgaatgatagtcccctcaagaactttaggatatacagcctagatatgaagaagtcattttttcagcgcttcggcctggataagtggtcttccctgcctgaaacgccaacgttacctgctttcttcttaggatctctgagtatctcttcaacgccctgtgacaccttccttaagctcgagggctgggaaaagggcgttgtgttcattaatggtcagaacctagggaggtactggaatataggacctcagaaaaccttatacctgcctggaccatggctgtcttctggaattaaccaggtaatcgtctttgaagaaactatggcaggtcctgcgctgcagtttacggaaactccacatcttggtcggaatcagtacatcaagtag

SEQ ID NO: 11599 - DNA, 255 bp, synthetic construct
  misc_feature 1..255: note = source = /note="Description of Artificial Sequence: Synthetic coding sequence"
  source 1..255: mol_type = other DNA
atgaggacactgtttaatctgctgtggctggctctcgcctgttcccctgtccacaccactttgtcaaaaagtgatgccaagaaagccgcttctaagactctgctggaaaaatcgcaattttccgataagcccgtgcaggacaggggactcgtcgttacagacctcaaggcagagtcagtcgtgctggagcacaggtcatactgctctgccaaagcccgtgatcgacatttcgcaggagatgttctgggctactag

SEQ ID NO: 11600 - DNA, 744 bp, synthetic construct
  misc_feature 1..744: note = source = /note="Description of Artificial Sequence: Synthetic coding sequence"
  source 1..744: mol_type = other DNA
atgagatccctgctcctcctctctgctttctgtctgctggaggccgcacttgccgctgaggtgaaaaaacctgcggcagcagcagcacccggaactgccgaaaaactttctcccaaggctgcaactcttgccgaaagatcggcaggcctcgccttttctctgtatcaggctatggctaaggatcaagccgtggagaacattctcgtttcaccagttgttgtcgcgtcctccctcggcttagttagcctgggaggtaaagcaacaacggcgagccaggccaaagctgttctcagcgccgagcagttacgcgatgaggaggtgcacgcaggcctcggcgagcttttaaggagtttatctaactctacagctcgcaacgtgacatggaaactgggatctaggctctacgggccatctagcgtgtctttcgctgatgatttcgtacgtagctctaaacagcactataactgtgagcactccaaaattaactttagagataagagatctgcccttcaatcgataaacgaatgggccgctcagacgaccgacggcaagctgcctgaggtaacgaaggacgtggagcggacggacggggctctgctggtgaacgccatgtttttcaagccacattgggatgaaaaatttcaccacaagatggttgacaatcgcggtttcatggttactcgatcgtataccgtcggagtgatgatgatgcacaggaccgggttgtataactattatgactag

SEQ ID NO: 11601 - DNA, 117 bp, synthetic construct
  misc_feature 1..117: note = source = /note="Description of Artificial Sequence: Synthetic coding sequence"
  source 1..117: mol_type = other DNA
atgaggacccttttcaacctcttatggctggcactcgcgtgttctcctgtccacaccaccctgtccaagtcggatgctaaaaaggcagcaagtaaaactctgttggagaaagtatag

SEQ ID NO: 11602 - DNA, 750 bp, synthetic construct
  misc_feature 1..750: note = source = /note="Description of Artificial Sequence: Synthetic coding sequence"
  source 1..750: mol_type = other DNA
atgagaagtctgctgctgctgtccgctttctgcctgctcgaggccgcacttgccgcagaagttaaaaagcccgctgccgcagccgctcctgggactgccgagaaactgtccccaaaggccgctacattagcagaaagaagcgccggtctagccttctctctctatcaggcgatggcaaaggaccaggcagtggagaacatactcgtgtccccagttgtggtggcatcttcccttggccttgtcagtttgggaggaaaagcgactactgccagccaggccaaggcagtgctctcagcagaacagctgagagatgaggaggtccacgctggcctcggagagttgctgcggagtctaagcaactcaaccgcacgcaatgttacctggaaactcggatcgcggctttatgggccttcctcagtgtcttttgccgacgacttcgtgagaagcagtaaacagcattataactgtgaacactcaaaaattaatttccgagataaacgctcagccctgcagagcattaatgaatgggccgctcagacaaccgatggcaaacttccagaggtgacaaaggacgtcgagaggactgatggggctctgctcgtgaacgccatgttcttcaagccacactgggacgagaaattccaccacaaaatggtggacaacagaggcttcatggtcacccgtagctatacagtcggtgtgatgatgatgcaccgcacaggattgtataactactacgacgatgaatag

SEQ ID NO: 11603 - DNA, 201 bp, synthetic construct
  misc_feature 1..201: note = source = /note="Description of Artificial Sequence: Synthetic coding sequence"
  source 1..201: mol_type = other DNA
atgaagcccctgttagtagtgttcgtctttctgttcctgtgggacccggtgcttgccggtatcaacagcctgtcaagtgagatgcacaaaaagtgctacaaaaacggaatttgccgcctcgaatgctatgaatccgagatgctggtggcctattgtatgttccagcttgaatgctgtgtgaaaggaaaccccgcaccatag

SEQ ID NO: 11604 - DNA, 1002 bp, synthetic construct
  misc_feature 1..1002: note = source = /note="Description of Artificial Sequence: Synthetic coding sequence"
  source 1..1002: mol_type = other DNA
atggtgagtaagtctaggtggaagttattggccatgttagcgctcgtattggtcgtcatggtatggtattcaatctccagggaggacagatacatcgaacttttctatttcccaataccagaaaagaaggagccttgcttacaaggtgaggccgaatccaaggccagcaaactttttggtaattattctcgggatcagccgatctttctgcgtctggaggactatttctgggtgaaaacaccttctgcctatgagctgccatacggtactaagggctctgaagacctcctgttgagggtgctcgccattacaagctcaagcatcccgaagaacatccagtccttaagatgcaggcgatgcgtggtagttgggaatggccaccggctccgaaacagctccctgggagatgcaattaacaagtacgacgtggtgatccggctaaacaacgcgcctgttgccggttacgagggggacgtgggtagcaaaacaacaatgaggctattctaccctgagagcgcacatttcgatcctaaagtagagaacaatcccgacactctcttggtgttggtggcttttaaagccatggatttccattggattgagaccattctctcagataaaaaacgtgtgcggaagggtttctggaagcagccacccctcatctgggacgtcaatcccaagcagatccggattttgaatccattcttcatggagatcgctgcagacaaactcctgtctctcccaatgcagcagccacgtaaaatcaagcagaaacccaccactggacttctcgccatcacgctggctcttcatctgtgtgacctggtgcatattgccggtttcggatacccagacgcatacaataagaagcagacaatccactactatgaacaaatcaccctgaagagtatggcaggctctggccataatgtgagccaggaagcactcgctatcaagcgtatgctggaaatgggcgctatcaagaatttgacatctttctag

SEQ ID NO: 11605 - DNA, 645 bp, synthetic construct
  misc_feature 1..645: note = source = /note="Description of Artificial Sequence: Synthetic coding sequence"
  source 1..645: mol_type = other DNA
atgcggcctaagaccggccaagtgggctgtgagacacccgaggaactgggcccaggacccaggcagcgctggcccctgttattgctgggcttggccatggtggcacatggccttctccgccctatggtggcccctcagagcggggatcccgacccgggagcatccgtcgggagctcacggtcttcccttagatccttatgggggagactgctgctgcagccaagccctcagcgggctgaccctaggtgttggccaaggggcttctggagtgaaccacagtccctctgttatgtgtttggaactggaaccaaggtgaccgtattgggccagcccaaagctaaccccacggtaaccctgttccccccaagttcagaagagctgcaagcaaataaggcaacactcgtatgcctcatctcagatttctatcccggagcagtcacagtcgcctggaaggccgatggtagcccggtgaaggccggtgtcgagacaacaaagcccagcaaacagagcaataacaagtatgccgcatcctcttatcttagcctgactcctgagcaatggaagtcacacaggtcatacagctgtcaagtcacccatgaagggagtaccgtggaaaagacggttgctcccacagagtgtagctag

SEQ ID NO: 11606 - DNA, 1050 bp, synthetic construct
  misc_feature 1..1050: note = source = /note="Description of Artificial Sequence: Synthetic coding sequence"
  source 1..1050: mol_type = other DNA
taattgtataaaaaccggctggggtccggcggtagaggacgctgtatcaagcaaggagaaaactggtactcccccaccgaatttgaagctatggcagggcgagccagttccaaggattggaagcggtcgatacgctacgctggcaggccacttcaatgcctaatacaagacgggatcttgaacccccatgcagctagctgcacatgtgctgcttgttgtgacgatatgactctcagtgggccagtgcgtcttttcgtgccctacaaacggcgaaagaaagaaaatgaacttccaaccaccccagtcaagaaggactcgccaaagaatatcactctgcttccggcaacagcagctactacgtttaccgtcactcctagcggccaaatcactacaagtggggctttaacttttgatagagcgagcacagtcgaggccaccgccgttatctctgagtccccagctcagggagacgtgttcgctggcgcaacagttcaggaagcctccgtgcagccgccttgcagggcctcccatcctgaaccccattatccaggttaccaggactcctgccagattgcgccattccccgaggctgctctcccgacttcccatcccaagattgtccttacctctcttccggcactggctgtgccaccgcctacgcctacaaaggcagcccctccggctctcgtgaatgggctggagcttagcgagccaagaagttggctgtatctggaggagatggttaactccctcctgaatacagcacaacagctaaaaacactgtttgagcaagcaaaacacgcgtctacttaccgcgaagccgcaaccaatcaagctaaaatacacgccgatgctgagcgaaaggaacaaagttgtgttaactgcggcagggaggctatgtccgagtgcacaggctgccacaaggtgaactactgctctactttctgccaacgaaaacgctggtctttgactatgctcaccagcttggtgtccattagttggctacgcgcaatactcccatgtcagccccctaaagtgttagggctctag

SEQ ID NO: 11607 - DNA, 600 bp, synthetic construct
  misc_feature 1..600: note = source = /note="Description of Artificial Sequence: Synthetic coding sequence"
  source 1..600: mol_type = other DNA
atgagtttggacatccagagtctcgacatccagtgtgaagaattgtctgacgcccgttgggctgaactcctgcccctcttacagcagtgtcaagtggttaggctggatgattgtgggctaaccgaggccagatgcaaggacataagtagtgctcttagggttaacccagcccttgcagagctcaatctgcgcagcaatgagctcggggacgtgggagtccactgtgttttgcaggggctgcagactccatcatgtaaaatccagaagttgtcattacagaattgttgtttgaccggcgctggctgcggagtgctttcttctaccttgagaacgctccccacccttcaggagctccacttgtctgataatctcctgggcgatgccggactgcaactgctatgtgagggtctcctcgacccacagtgtcggctagaaaaactgcagctggaatactgttcacttagcgcagctagttgcgagcccttggctagcgtccttagggcaaagccggactttaaggagcttactgtgtccaacaatgacataaacgaagccggagtgcgcgtgctgtgccagggcttgaaagatagcccttgctag

SEQ ID NO: 11608 - DNA, 465 bp, synthetic construct
  misc_feature 1..465: note = source = /note="Description of Artificial Sequence: Synthetic coding sequence"
  source 1..465: mol_type = other DNA
atggctggtatccccggacttctgtttttactgttcttcctgctgtgcgccgtgggtcaggtctctccctattccgccccttggaagccgacatggcctgcttataggcttccggtcgtgttgccacagtccacccttaatctcgcaaaacctgattttggcgctgaggccaagctggaggtgtcatcaagctgcggcccacagtgccacaaggggacacctctgcctacgtatgaagaggcgaaacagtatctctcgtatgagacactgtacgctaacggctctaggacagaaacccaggtgggaatctatatcctttcatccagcggggacggtgcacagcaccgagactctggcagctccggcaaatcccgtagaaaacgccagatctacgggtacgattctcggttctctatcttcggtaaggattttctcctgaattaccccttctcaacctcggtctag

SEQ ID NO: 11609 - DNA, 936 bp, synthetic construct
  misc_feature 1..936: note = source = /note="Description of Artificial Sequence: Synthetic coding sequence"
  source 1..936: mol_type = other DNA
atgggcattattcagagcatcctggccacctcgcgagactgttactcattcaagaagaaaccaatcccgaagaagcccacgatgcttgctctggcgaaaattctgctgatcagtactctgttctactcccttctgagtggctcgcatggcaaagaaaaccaagacataaacactacgcagaacatcgccgaggtgttcaaaacaatggagaataagcccatctcactggagagcgaagctaatctaaactccgataaggaaaacattactacgtctaatctcaaagcctcccacagtcctccccttaacctacccaacaactcccacggcatcacagatttttctagtaacagtagcgccgagcacagtctcgggtcactcaaaccgacatccacaatctccactagtccacccttgattcactcattcgtgagcaaggtgccctggaacgcccctatcgccgatgaagatctgctgcctatctctgcccaccctaacgcaacacctgcactgagcagcgagaattttacttggagtctcgttaatgatacagtcaagactcccgataactcctctattaccgtgtcaatcctaagtagtgaacccacgagcccatccgtgacgccacttatcgtggaacccagtggttggctcactaccaacagcgactcctttacagggttcaccccgtaccaggaaaagacaactctgcaacccacactgaaatttaccaacaacagtaaactcttcccaaacactagtgacccacagaaggttcttagactggataacgccccagagccatatgatgtgtccttcgggaactcttcatactacaatccaacactcaatgatagtgccatgccagagtcggaggagaacgctcgcgatgggatccctatggatgacattcccccattgagaacctccgtgtag

SEQ ID NO: 11610 - DNA, 1404 bp, synthetic construct
  misc_feature 1..1404: note = source = /note="Description of Artificial Sequence: Synthetic coding sequence"
  source 1..1404: mol_type = other DNA
atgctgatcttttggaccattaccctctttctcctcggggcagctaagggaaaagaggtgtgttacgaagatctgggatgcttttcagatactgaaccttggggcggtaccgctattagaccccttaagattctcccatggtccccagagaagattgggacccggttccttctgtatactaacgagaatcctaacaacttccagatactccttctatctgatccatcaactatcgaggctagcaactttcagatggaccgcaagacccggtttattatccacggatttatcgacaagggggacgaatcgtgggtgacggacatgtgtaagaagctgtttgaagtggaggaagtaaattgtatttgtgttgactggaaaaaaggaagccaagccacatacactcaggccgctaacaacgtgagggtagtgggggcacaggtggctcagatgctggacatcctgctgaccgagtatagttaccccccttctaaggtccacctgattgggcattctctaggggctcatgtggcgggagaggctggctcaaagacacccggactgagcaggatcactgggctggacccggtcgaagcgtctttcgagtccacccctgaggaggtgcgcctcgatcccagtgatgccgattttgtagacgttattcacaccgatgccgctccccttattcccttccttggtttcggaacaaaccagcagatgggacatctggatttttttcctaacggcggagagtccatgccaggttgcaaaaaaaatgcgctctctcagatcgtggacctggatggcatctgggctggcaccagggatttcgtggcatgtaatcatctgcggtcatacaagtactacctggagtccatcttgaacccggacggttttgcagcatacccctgcacatcttacaagtcttttgagtccgacaaatgctttccctgtcccgaccaagggtgtccacagatggggcactatgcagataagtttgccggtcgaacaagcgaggagcagcagaagttctttctcaacacaggagaggctagtaactttgcacggtggcggtatggcgtcagcatcaccctgtcaggtcgcacagccacaggccaaataaaggtcgctttattcggtaataaggggaatacgcatcaatactccatctttagaggcattctcaaacccggtagcacccacagctacgaattcgatgccaaactcgatgtgggcaccattgaaaaggtaaagttcttgtggaataataacgttatcaacccaaccctgcctaaggtcggggctaccaaaatcacagtgcagaaaggtgaggaaaagaccgtatacaatttttgttctgaggataccgtgcgggaagacactttacttaccctgaccccctgttag

SEQ ID NO: 11611 - DNA, 81 bp, synthetic construct
  misc_feature 1..81: note = source = /note="Description of Artificial Sequence: Synthetic coding sequence"
  source 1..81: mol_type = other DNA
atgcgtactctctttaacctactttggcttgctctggcatgttctcccgtgcatactaccttaagtaagtctgatgcttag

SEQ ID NO: 11612 - DNA, 549 bp, synthetic construct
  misc_feature 1..549: note = source = /note="Description of Artificial Sequence: Synthetic coding sequence"
  source 1..549: mol_type = other DNA
atgcggaggatgtgggcgactcagggccttgccgttgccctggcactcagcgtccttccgggatctagggctctaagaccgggtgattgcgaggtttgcatcagttacctgggcagattttatcaggacctgaaagatcgcgacgttaccttctcaccggcaaccatcgaaaacgaattgatcaagttctgcagggaggcgaggggaaaggaaaaccgcctgtgctactatatcggtgcaactgatgacgcagcaaccaagattatcaacgaagtgtctaagccgctggctcaccacattcccgtcgaaaaaatttgtgaaaaattgaaaaagaaggatagccagatttgcgagctgaaatacgacaaacagatagacctcagtactgttgatctaaaaaagttgcgcgttaaagaattgaaaaaaattcttgacgactggggtgaaacctgtaaaggatgcgctgagaaaagcgactatatccggaagattaatgaattgatgccaaagtacgctccaaaagctgccagtgcccgaaccgacctatag

SEQ ID NO: 11613 - DNA, 153 bp, synthetic construct
  misc_feature 1..153: note = source = /note="Description of Artificial Sequence: Synthetic coding sequence"
  source 1..153: mol_type = other DNA
atgaaagtattctttctcttcgcggtgttattttgtctggtccagactaactcggtgcacattagccatcgcgaggccaggggcccatccttcaggatctgcgtggattttctcggacccagatgggccagaggatgtagcacaggtaattag

SEQ ID NO: 11614 - DNA, 666 bp, synthetic construct
  misc_feature 1..666: note = source = /note="Description of Artificial Sequence: Synthetic coding sequence"
  source 1..666: mol_type = other DNA
atgggggcaaccaccatggaccaaaagtcattgtgggccggagttgtggtgctgttattgcttcaggggggttcagcttataagctagtatgctacttcactaattggtctcaggatcgccaggagccaggaaagttcacccccgagaatatcgatcccttcctgtgctcacatctgatctattcttttgccagcatcgagaacaataaggtgattattaaagataagtctgaagtcatgctctatcagaccatcaattctttgaagaccaaaaatcctaagctgaagatcctactgtcgatcggcggatacttgttcgggtctaagggctttcacccaatggtggatagcagtacgtctaggctggagtttatcaacagcattatcttgtttctgcgcaaccataactttgatggcctggacgtttcttggatttacccagatcaaaaagagaacactcactttactgtcttgattcacgagctcgccgaggcattccaaaaagattttaccaaatccaccaaggagcgactcctgttaaccgctggggtttccgcgggacgtcagatgatcgataacagttatcaggtggaaaaactggccaaggatctggacttcatcaatctgctctcttttgactttcatggcagttgggagaaaccctag

SEQ ID NO: 11615 - DNA, 1257 bp, synthetic construct
  misc_feature 1..1257: note = source = /note="Description of Artificial Sequence: Synthetic coding sequence"
  source 1..1257: mol_type = other DNA
atgcgaactctgtttaacttgctgtggcttgcattggcctgctcccctgtgcacactactttgagcaagtcagacgcaaagaaggcagcatctaaaactctcctggaaaaggtgaagttttgcagttgctgtcctggatggtccgcgatggctcggagctggctgaccgcaactagcgccacgcagtcccaattttcggataaaccagtacaggacagggggctggttgtcacggacctgaaggccgagagcgtggtcctggaacatcgaagttactgctccgccaaggctcgggacaggcattttgccggtgacgttctggggtatgttactccgtggaacagccatgggtacgatgtgaccaaagtgttcgggtctaagttcacccagatttctcctgtctggttacagctgaagcgccgtggtagggagatgtttgaagtaacgggcctgcatgatgtggatcagggatggatgagagccgtgcgcaaacatgcgaaaggcctccatatcgtgccgagattgctgtttgaggactggacctatgacgatttcaggaacgtcctggacagcgaggatgagatagaggaactctctaagacagttgttcaagtcgctaagaatcagcattttgacgggtttgttgtggaggtttggaaccagctattgagccagaagcgtgtgggcctcatacatatgctgacgcatttggccgaagcattacaccaggccaggctcctcgctctccttgtgattcccccagcgattacaccgggaaccgaccagttgggcatgtttacacacaaagagtttgagcagctggcccctgtactcgacggcttctcacttatgacctacgactattcaacagcacaccagcctggccctaatgcccctctgtcgtgggtacgggcatgtgtacaggttctggacccaaagtctaagtggcgatctaaaatcctcctcgggctgaacttttatggaatggattatgccacctcaaaagacgccagggaacccgtcgtgggagctaggtacattcagacgctgaaagatcacagacctcgcatggtttgggactctcaggcctcggagcactttttcgagtacaaaaaatcccggagcggaaggcatgtggtgttctatccaacccttaaaagcttgcaggtgagactggagctggccagagagctcggcgtgggcgtttccatctgggaacttggccaaggcctcgactatttctacgatctgctgtag

SEQ ID NO: 11616 - DNA, 612 bp, synthetic construct
  misc_feature 1..612: note = source = /note="Description of Artificial Sequence: Synthetic coding sequence"
  source 1..612: mol_type = other DNA
atgcgcagcctgctcttgctgtctgccttttgtttgctggaggccgctctcgcggctgaagtcaagaaacctgcggctgcagctgcgcctggcacagcagagaaactgtcaccgaaggcagctaccttggccgagcgtagcgcgggactggcctttagcttgtatcaagctatggccaaagatcaggccgtggagaacattttagtaagtccagtcgtggtggcttcctctctggggctggtctcccttggcggaaaagcaactaccgccagtcaggcaaaggctgtcttatccgccgagcaactccgagatgaagaagtccacgcaggactgggggagctcctgcgcagcctatctaatagcacagccaggaacgtaacttggaaactggggagtaggctgtatgggccttccagcgtcagcttcgcagacgatttcgtccggtcttctaaacagcactacaactgtgaacatagcaagattaattttcgggacaagagatctgcgttgcagtcaattaacgaatgggcagcccagactacagacggaaagctgcctgaggtaaccaaggacgttgagagaaccgatggggctctcctggtgaatgcctag

SEQ ID NO: 11617 - DNA, 492 bp, synthetic construct
  misc_feature 1..492: note = source = /note="Description of Artificial Sequence: Synthetic coding sequence"
  source 1..492: mol_type = other DNA
atgcgctcactgcttctgctcagcgctttttgcctcctagaagccgcacttgctgccgaagtaaagaagccagctgcagcagcagcacccggaactgccgagaagctgtctccaaaggccgcaacactggccgagaggtccgccggactagctttttccctttaccaagctatggccaaagatcaagctgttgagaacatactggtgagtcccgtcgtggtcgcttcttcactcgggctcgtaagtttgggcggaaaggccactaccgcatcccaggctaaggcagtactgagtgcagagcagctcagagatgaagaggtgcatgcagggcttggagaacttctgcgtagtctgagcaactccactgcacgcaacgtgacttggaaactcggatcccgcttgtacgggccttcgagcgtttcattcgctgacgatttcgttcgcagctctaaacagcactataactgtgaacatagcaagatcaatttttag

SEQ ID NO: 11618 - DNA, 570 bp, synthetic construct
  misc_feature 1..570: note = source = /note="Description of Artificial Sequence: Synthetic coding sequence"
  source 1..570: mol_type = other DNA
atgtctttagacatccagtctctggatatccagtgtgaagagctcagtgacgcacgatgggcagagctgttacctttgcttcagcagtgccaagtggtcaggctggacgactgcgggttaacagaggccagatgcaaagatatttcaagtgcgttgagagtgaatcccgctctggcagagctgaacctacggagcaatgaactcggagatgttggggtgcattgcgtgttgcaggggctgcagacgccgtcatgtaaaatccaaaaactgtccttacagaactgttgcctgacaggggcaggatgcggagtgctttcttccacactccgaactttacctacactacaagagctgcacttaagcgacaacttactgggcgacgccggacttcagctgctgtgcgaaggtctgttggacccccagtgtcgcctcgagaagctccagcttgagtattgtagcctgtctgcagcctcctgtgaacctcttgccagcgtattacgggcaaaacccgattttaaagagctcactgtatctaataacgacattaatgaggccggtgttcgggtctag

SEQ ID NO: 11619 - DNA, 585 bp, synthetic construct
  misc_feature 1..585: note = source = /note="Description of Artificial Sequence: Synthetic coding sequence"
  source 1..585: mol_type = other DNA
atgtctttagatatccagtcgcttgatatccagtgtgaggagctcagcgatgctagatgggctgagctgcttcctttgctgcagcaatgccaggtggttcggctcgatgactgcgggttaacagaggctcgctgcaaagatataagctccgccctaagggttaatccagctctggctgaactcaacctgaggagcaatgagctaggtgacgtcggagtgcactgtgtcctgcaaggtctgcagacgccgtcttgtaaaatccaaaagctgtcacttcaaaactgctgtctaacgggtgcaggctgcggcgttctgtccagtacactacgaaccttacctacgctccaggagctgcacctgtccgacaatctgttgggggacgccggattgcaactgctatgcgaaggcctgctcgacccccagtgccggctggagaaactgcagctggagtactgttccttgtctgctgccagctgcgagccactggcctctgtgctgagagcgaaaccggacttcaaagagcttacagtttcaaacaatgatatcaacgaagccggagtccgtgtcctctgtcagggactctag

SEQ ID NO: 11620 - DNA, 1086 bp, synthetic construct
  misc_feature 1..1086: note = source = /note="Description of Artificial Sequence: Synthetic coding sequence"
  source 1..1086: mol_type = other DNA
atgggaatcatacagtccatcctggctacatcacgggattgctactcgttcaagaagaagcccatccctaagaaacccaccatgttggctctggcaaaaattcttcttatcagcaccctgttctactccctgctttcaggaagccacggcaaagaaaatcaggacataaacaccacccagaatattgctgaagttttcaagactatggagaataaacccatctctcttgagagcgaggccaatcttaattccgacaaggaaaatatcacgacctccaacctgaaagcttctcactcacctcctcttaacctgcccaataacagtcatggcattaccgacttcagttcaaacagcagtgccgagcactccctaggtagtctcaagcctacatcgactatatcaacaagccccccactgattcattcatttgtgtcaaaggtcccttggaatgcacccattgctgacgaagacttgctacccatctccgctcacccaaacgccacccccgctctgagttccgagaatttcacatggagcttggttaacgacactgtgaagacgccagacaattcctccattactgtctccatcttgtcctccgagcctacttctccaagcgtgacacctctgatcgtcgagccctccggttggttaaccaccaatagtgacagctttactgggttcaccccgtaccaggaaaagacaaccctgcagcctaccctgaagtttaccaacaactcaaagcttttccccaatacctctgatcctcaaaaggagaatcggaatacagggatcgtgtttggcgcaatacttggtgccattctcggtgtcagtctcctgaccctcgtcggctaccttctgtgtggcaagcggaagactgatagcttcagccaccgccgactgtatgatgaccgcaacgagcccgtgctgcggctggacaacgctccagagccctacgatgtgtcatttgggaactcttcttattacaacccaacactaaatgatagtgccatgcccgaatccgaagaaaacgccagagatggaatcccgatggacgatattccccctctgagaactagtgtatag

SEQ ID NO: 11621 - DNA, 327 bp, synthetic construct
  misc_feature 1..327: note = source = /note="Description of Artificial Sequence: Synthetic coding sequence"
  source 1..327: mol_type = other DNA
tgaccaaaaagtaagtggcgatctaaaattctattgggcttgaatttttacgggatggattatgcaactagcaaggatgccagggagcctgtagtgggtgctcggtacattcagactttgaaggaccaccggccaagaatggtatgggattcacaagcttccgaacacttcttcgaatacaaaaaatctaggagcggaagacatgtggtgttttatccaactctgaagtctctccaggtgcgcctggagctggctagagaactgggcgtcggcgtgagcatctgggaactgggccagggtctggattacttttacgacctcctctag

SEQ ID NO: 11622 - DNA, 504 bp, synthetic construct
  misc_feature 1..504: note = source = /note="Description of Artificial Sequence: Synthetic coding sequence"
  source 1..504: mol_type = other DNA
atgcgaagcctgcttctcttgtccgcattctgcctgcttgaagccgcattggccgctgaagtcaaaaagcctgccgctgcagctgcacctggaaccgccgagaagctttccccgaaggcagcgacccttgctgagagatccgccggtctggcttttagtctgtaccaggcaatggcaaaggaccaagccgttgagaatattctggtgtccccagttgtggtggcctccagtctggggctggtgagccttggtgggaaggctacaacagcctcacaggccaaagctgttctgagtgctgagcagttgagagacgaagaagttcatgctggcctgggcgagctcctgcgcagcctgtccaattctactgcccgtaacgtgacttggaaattaggcagtcggctctatggcccatccagcgtgagcttcgccgacgacttcgtgcgttcctcgaagcagcactacaattgtgaacactccaagattaatttccgggacaaaagatag

SEQ ID NO: 11623 - DNA, 1209 bp, synthetic construct
  misc_feature 1..1209: note = source = /note="Description of Artificial Sequence: Synthetic coding sequence"
  source 1..1209: mol_type = other DNA
atgatggtcgccttgagaggcgctagtgctctgctcgtcctcttcctggcagccttccttcccccacctcagtgtacacaggatcctgctatggtgcactatatctatcaacggtttcgggtgctggagcaggggctggagaaatgcacacaagccacccgcgcatacatccaggagtttcaggagtttagcaagaatatcagcgtgatgctgggtagatgccagacttacacttctgaatataagagtgccgtgggtaacttagccctaagagtagaacgggcacagcgcgaaattgactacatccagtatcttcgggaagctgacgagtgtatcgaaagtgaggacaagaccctcgctgagatgctgctgcaggaagccgaagaggagaagaagatacgcaccctgcttaacgcttcttgtgataacatgcttatggggattaaatcccttaaaatcgtcaaaaaaatgatggacacccatgggagctggatgaaggacgctgtttataatagccctaaagtgtatctattgatcggctctcgtaataacacagtctgggaatttgctaacattcgagccttcatggaagacaatacgaaaccggctcctcggaagcagatcctgaccctgtcatggcagggcacggggcaagtcatttataaaggcttcctattttttcataatcaagccacatcgaatgagataatcaaatataacttgcagaagcgaactgttgaagaccgaatgttactgcctggtggcgtgggcagagcgctcgtgtaccagcactctccttctacgtatattgacctggctgtggacgagcatggactttgggctatccactcaggtcctggtacccattcccacctggtgctcaccaaaatcgaaccgggaaccttgggagtggaacactcctgggataccccgtgtcgcagccaggatgctgaagcgtcttttctcctctgcggcgtgctgtacgtcgtgtacagtaccgggggacagggccctcatcgaattacctgtatttatgatcctctcggtacaatttctgaagaggacctgcccaatttatttttccctaagcgcccaaggtcccactccatgattcactacaatccgagggataagcagctctacgcctggaatgaagggaatcagatcatttataagttgcagaccaagagaaaactccccctaaagtag

SEQ ID NO: 11624 - DNA, 975 bp, synthetic construct
  misc_feature 1..975: note = source = /note="Description of Artificial Sequence: Synthetic coding sequence"
  source 1..975: mol_type = other DNA
atgaggtctctgctgctgctctctgcattttgcctgctagaggcggctcttgccgctgaagtcaaaaaaccggcagcagctgctgccccagggactgcggaaaagttgagcccgaaggccgctaccttggcggaacgaagcgcaggcctggccttttccctctaccaagccatggctaaggaccaggccgtagagaatatcctggtgtccccggtggttgtggcatcttcactggggctggtgtcgcttggaggcaaggccacaactgccagtcaggctaaggctgtgcttagcgcagagcagctccgggacgaggaggtgcacgctgggcttggcgagctcttgcgatccttgagcaactcaaccgctcgaaacgtgacatggaaactggggtcacggctctatggcccaagttcagtgagcttcgctgatgatttcgtgagatccagcaagcagcactacaattgcgaacatagcaagataaatttccgggacaagaggtcggctctgcagtcaatcaacgaatgggctgcccagacaacagatggcaaactgcccgaagtaaccaaggacgtcgagaggacagatggtgccttgttagtgaatgcaatgttttttaaaccccactgggacgagaaatttcatcacaagatggtcgacaaccggggatttatggtaaccaggtcttacacagtcggagtaatgatgatgcaccggacaggcctctacaactactacgatgacgagaaggagaagctccaaattgtcgaaatgcccctggcgcataagctcagtagcctgattatcttgatgccacaccacgtggagcctctggagagactggagaagctgctcactaaggagcaactgaaaatctggatgggcaaaatgcagaagaaagctgttgccatttcactcccaaagggggtggtagaagtgacacacgatctccaggtgcggggagggcctgcttag

SEQ ID NO: 11625 - DNA, 990 bp, synthetic construct
  misc_feature 1..990: note = source = /note="Description of Artificial Sequence: Synthetic coding sequence"
  source 1..990: mol_type = other DNA
atggtttcaaaatcaaggtggaaactgttagccatgctggcccttgtcctagtagtgatggtgtggtactccatctctagggaggattcattttactttccaatcccagaaaagaaggaaccctgtctgcagggtgaagctgagagtaaggctagcaaactgttcggcaactattcaagagatcagccaatttttctacggctggaggactacttctgggtgaaaactccgtctgcttacgaactgccctacggcaccaaaggatccgaggacctgctgctccgggtgctagccattacgtcgtcaagtattcccaaaaatatacagtccctgcggtgccgccgatgtgtggtggtcggaaatgggcatcggttgcggaattcaagccttggcgatgcaattaataaatatgatgtggttatcagactcaacaacgcgcctgtcgcagggtacgagggagacgtggggagcaaaaccactatgcgcctcttttatcctgagagtgctcattttgatcccaaagtcgaaaacaaccccgatacacttctggtgcttgtcgcattcaaggctatggactttcattggattgaaacaatcctgtcagacaagaaacgtgtgaggaaaggcttctggaagcagcccccactcatctgggatgttaatcccaaacaaatacgaattctgaatcctttcttcatggagatcgcggctgataagcttttgtccttgccaatgcaacagccgagaaagattaagcagaagcccacaaccggcctgttagcgatcacccttgcactgcacctctgtgacttggtccacatcgcaggcttcggatatccagatgcttacaacaagaaacagaccattcattactacgagcagattactcttaagtcaatggccggaagcggtcataacgtgtcccaagaggctctcgctatcaaaagaatgttggagatgggcgctatcaagaacctgacgtcattttag

SEQ ID NO: 11626 - DNA, 351 bp, synthetic construct
  misc_feature 1..351: note = source = /note="Description of Artificial Sequence: Synthetic coding sequence"
  source 1..351: mol_type = other DNA
atgcgcacactgtttaatttgctgtggctggccctcgcctgcagcccagttcacaccacactatccaagtccgacgccaagaaagcagcctctaaaactctgctcgagaagtcacagttctccgacaaaccagtgcaggacagaggactggtcgtaacagatcttaaggctgaatcagttgtgttggagcaccgaagttattgttcagccaaggcaagagaccgccacttcgccggagacgtgttaggatatgtgacgccatggaattcacatggatacgatgtgacgaaggtattcgggagtaagttcacccagatttcgcctgtgtggctgcaattaaaacgccgatag

SEQ ID NO: 11627 - DNA, 282 bp, synthetic construct
  misc_feature 1..282: note = source = /note="Description of Artificial Sequence: Synthetic coding sequence"
  source 1..282: mol_type = other DNA
atggattccctgcggaagatgcttatcagcgtagccatgctcggagctggggcaggagttgggtacgctctgttggtcattgtaacgcctggcgagaggcggaaacaggaaatgctcaaagagatgccactgcaggatccaagatcgcgtgaggaggccgctcgtacacaacagctgctgctggctaccctgcaggaagctgcgacaacacaagaaaatgtcgcctggcggaaaaactggatggtgggaggggagggcggtgctgggggtcgtagtccttag

SEQ ID NO: 11628 - DNA, 255 bp, synthetic construct
  misc_feature 1..255: note = source = /note="Description of Artificial Sequence: Synthetic coding sequence"
  source 1..255: mol_type = other DNA
atgcgccctaaaaccggtcaggtgggctgcgagactcctgaggaactgggtcctggcccacggcaaagatggcccctcctgttgctcggcctcgcaatggtagcccacgggcttttgagaccaatggtggcaccccagtcaggcgaccctgatcccggagcttccgtaggaagcagccggagttccctgcgcagtctgtggggtaggtccgctcagggccaaccccactgccattctgtccctgctctgctctag

SEQ ID NO: 11629 - DNA, 27 bp, synthetic construct
  misc_feature 1..27: note = source = /note="Description of Artificial Sequence: Synthetic coding sequence"
  source 1..27: mol_type = other DNA
atgtctctggacattcagtcgttgtag

SEQ ID NO: 11630 - DNA, 576 bp, synthetic construct
  misc_feature 1..576: note = source = /note="Description of Artificial Sequence: Synthetic coding sequence"
  source 1..576: mol_type = other DNA
atgctgatattctggaccatcacactgtttctactgggggctgccaaaggcaaagaggtgtgttacgaggatttagggtgtttttctgacaccgaaccttggggcggaacagcaatacgtcccctcaaaatactcccttggtcccctgagaaaataggtactcggttcctactgtataccaatgaaaatccaaacaactttcagattctgctcctgtctgacccttctaccattgaagccagcaatttccagatggataggaagacacgatttatcatccatgggtttattgataagggggatgaaagctgggtgacagacatgtgtaaaaaactgttcgaggtggaggaggtgaactgcatatgcgtcgactggaagaaaggatctcaagctacctacacacaggctgcaaacaatgtgcgggtcgtgggagcacaggtagctcagatgctggatatcctcctaaccgaatacagctaccccccaagtaaggttcacctgatcggccactccctgggcgcacacgttgccggagaagcaggttcaaagacaccaggcctcagtcgtataacctag

SEQ ID NO: 11631 - DNA, 123 bp, synthetic construct
  misc_feature 1..123: note = source = /note="Description of Artificial Sequence: Synthetic coding sequence"
  source 1..123: mol_type = other DNA
atgtctctcgacatacagtctctggatattcaatgcgaggagctctccgacgcgagatgggcggagctgctacctttgctgcaacagtgccaggtggtcagactcgacgactgcgggttatag

SEQ ID NO: 11632 - DNA, 648 bp, synthetic construct
  misc_feature 1..648: note = source = /note="Description of Artificial Sequence: Synthetic coding sequence"
  source 1..648: mol_type = other DNA
atgaggccaaagaccgggcaggttggttgcgaaacccctgaggaacttggcccaggcccaagacagcgctggcctctgcttctgctgggactcgcaatggtcgcacacgggctcctgagaccaatggtggccccacagagcggagatcctgaccccggtgcctcggtgggctcaagccgtagttccctgcgcagcctttggggctcacgtctgctgttgcagccttccccacagcgggcagacccacgatgctggccccgtggtttctggtccgagccacagtccctgtgctatgtgtttggaactggaacaaaggtgacagtgctcggtcagcctaaagctaatccaaccgtaaccctgttccccccttccagtgaagagctccaagctaacaaagccaccctcgtgtgccttatatctgacttctatcctggtgcagtcacagtcgcgtggaaagccgacggaagtcccgtgaaggccggagtggagactactaaacctagcaaacaatccaacaataagtacgcagctagctcatacctgtctcttacacctgaacaatggaagtcccacagatcttacagctgtcaggtgacccacgagggctccactgtggagaagaccgtagcacccaccgagtgtagctag

SEQ ID NO: 11633 - DNA, 999 bp, synthetic construct
  misc_feature 1..999: note = source = /note="Description of Artificial Sequence: Synthetic coding sequence"
  source 1..999: mol_type = other DNA
atgtgtcctgcagggtggaaactcctcgcgatgctcgctctggttctagtggtgatggtatggtatagcatcagccgagaggaccgctacatcgagctgttctactttccgatcccagagaaaaaagagccctgcctccagggtgaagcagaaagcaaggccagcaagttgttcgggaactatagtagagatcagcctatttttctcagactagaggactatttttgggtcaagacaccaagcgcttatgagcttccctacgggaccaaaggtagtgaggatctgctacttagagtactggctatcacctcatcatctataccgaagaacattcaatcattacggtgtcggcgatgcgtagtcgtgggcaatggacaccggttgcgcaatagctccctgggggatgctattaataaatacgatgtagtaatacgtctcaataatgcacccgtcgctggatatgagggtgatgtcggcagtaagaccaccatgaggttgttttacccagaaagcgctcattttgaccccaaagtcgaaaataaccccgatactctgctggtgctggtcgcctttaaagctatggacttccactggattgaaaccattttgtccgataagaagagagtgcgaaaggggttttggaaacagccaccactgatatgggacgtaaatcccaaacagataaggatcctcaacccgttttttatggaaatcgctgccgataaattactttccctgcctatgcaacaacccaggaagattaaacagaagcccaccactggtctgctggctatcacattggcgctgcacctctgcgatttagttcacatcgccggattcggttaccccgacgcctacaataagaagcaaactatacactactatgagcagattaccctgaagtcaatggccggttctgggcacaacgtaagtcaggaggctcttgctatcaagcggatgctggaaatgggtgcgataaagaatctgacatcattctag

SEQ ID NO: 11634 - DNA, 888 bp, synthetic construct
  misc_feature 1..888: note = source = /note="Description of Artificial Sequence: Synthetic coding sequence"
  source 1..888: mol_type = other DNA
atgcggagtctcctgttgctatcagccttttgccttctcgaggccgctctggccgcagaggtgaagaaaccagctgcagctgcagcaccgggtacggccgaaaagctgtctcccaaagctgccactctggccgagaggagtgcgggactggcattctccttatatcaagccatggcaaaggaccaggccgttgaaaacatcctggtgagtccagtggtggtggccagctctctgggactggtctctctgggcggtaaggctacgaccgcaagccaggctaaggcagtgctctcagctgaacaactgcgggacgaggaggtgcacgcaggcctgggcgagcttcttagatcactgtctaactctacagctcgtaatgttacatggaagctgggctcccgcttatacggaccttcaagtgtgtccttcgccgatgattttgtgagatcaagcaagcagcactacaactgcgagcactcaaagataaatttccgagacaaacggagtgcactgcagtcgattaacgaatgggccgctcagacaacagatgggaagcttcctgaagttaccaaggatgtcgaacggaccgacggtgccctcctcgtgaacgcaatgttttttaagccccactgggacgaaaaatttcaccataaaatggtggacaatcgtggcttcatggtaacccgaagttataccgtcggggtcatgatgatgcatagaaccgggttgtataactactacgacgacgaaaaggaaaagttacagatcgtagagatgcctctggcccataagctgtcatcccttattatccttatgcctcatcatgtggagccactggaaaggctggagaaacttctgaccaaggagcaattgaagatttggatgggttag

SEQ ID NO: 11635 - DNA, 399 bp, synthetic construct
  misc_feature 1..399: note = source = /note="Description of Artificial Sequence: Synthetic coding sequence"
  source 1..399: mol_type = other DNA
atgagaacactgtttaatctgctgtggctcgcccttgcatgctcccccgttcatacaacgctctctaagtctgacgccaaaaaggccgcatctaaaacactactagaaaaaagccagttcagcgacaaacccgtgcaggaccgaggtctggtggtgactgacctgaaagcggagagtgttgtgctggaacaccgttcctactgttctgccaaagcaagggatcggcattttgccggtgatgtgctgggatacgtgaccccttggaatagccatggatacgacgtcacaaaagtattcggcagcaaatttacccagatctcaccggtatggcttcagctcaaacggagaggaagagagatgttcgaagtgaccgggttacatgatgtggaccaagggtag

SEQ ID NO: 11636 - DNA, 360 bp, synthetic construct
  misc_feature 1..360: note = source = /note="Description of Artificial Sequence: Synthetic coding sequence"
  source 1..360: mol_type = other DNA
atgagaacgctgtttaacctgctttggcttgccctggcctgtagccccgtgcacaccactttgagcaaaagtgacgcgaagaaggccgcttctaagaccctgctggagaaaagtcaattctccgataagccagtccaggaccggggtctggtcgtgacagacctcaaagcggagtctgtggttctggaacatcgaagctattgtagcgccaaggcgagagaccgacatttcgccggtgacgtactggggtacgttaccccctggaattcacacgggtatgatgtaactaaggtgttcgggtcgaaatttactcaaatttcccctgtgtggctgcagcttaagcgcagagggcgtgaatag

SEQ ID NO: 11637 - DNA, 390 bp, synthetic construct
  misc_feature 1..390: note = source = /note="Description of Artificial Sequence: Synthetic coding sequence"
  source 1..390: mol_type = other DNA
atgcccatggcctcacctcagacactcgtgctctatttgctggtcctggctgtgaccgaggcctggggccaggaggctgtcatccccggatgccacctccatccttttaatgtcaccgtgagatcggatagacaggggacttgccagggctcccacgttgctcaggcttgtgttggacattgcgaatcgagtgcttttccatctcgctattcggtgctggtggctagcggctaccgacataatatcacttcagtgagccagtgctgcactatttccggcttaaagaaagtgaaggtgcagttgcaatgcgtcgggagtcggcgagaagagctggagatattcaccgcacgggcttgtcaatgcgacatgtgcaggctttctcgctactag

SEQ ID NO: 11638 - DNA, 1386 bp, synthetic construct
  misc_feature 1..1386: note = source = /note="Description of Artificial Sequence: Synthetic coding sequence"
  source 1..1386: mol_type = other DNA
atgagcctcgatatccaatctctcgatattcagtgcgaggaactatcagacgcgaggtgggcagagctcttgccgctattgcagcagtgccaagtcgtgcggttggacgactgtggcttgaccgaggctcgctgcaaggatatttcctctgcgctgagagtgaatccagccctggctgaacttaatttgaggtctaatgagttgggcgacgttggcgtacactgcgtcctacagggactgcagaccccgagctgtaaaatccaaaagctgtctctccagaattgttgtctgacaggcgcagggtgtggagtactgtccagcacccttcgcaccctccccactctgcaggagctgcacctgtcagataacctcttaggagatgctggcctccagctgctgtgtgaaggactgctggacccacaatgccgcttggagaagttgcagcttgaatattgcagcctcagtgcggcttcttgcgaaccactagcatctgtgttgcgcgcaaaaccagactttaaagaacttaccgtttcgaataacgatatcaacgaggcaggcgtcagggtgttgtgtcaggggttgaaggacagtccatgtcagctggaggcgctcaagctcgaaagttgcggcgtcacaagcgataactgtcgtgatctctgtggcattgtggcgtctaaggccagtctgagggagctggccctggggtcaaacaaactgggagatgtagggatggcggagctctgtcctggccttctgcaccctagtagtcgactgagaaccctgtggatctgggagtgcggcataacagccaaagggtgcggagatctatgtagagtgctgagagccaaggaatccttgaaagagctgagtttagcagggaatgaactgggcgacgagggcgcacggctcctctgcgagacattgctggaaccgggatgccagctcgaaagcctgtgggtgaagtcctgctctttcacagcggcttgttgttcccatttttcctctgtactggcccagaacagattcctgctggagctccaaatatccaataataggttagaggacgctggggtgagagaactgtgtcagggcctgggacaacccggatctgtgcttcgggtgctctggctggcggactgtgatgtctctgactcaagttgcagcagcctcgccgcaaccttgttagccaatcatagcttgagagaactggacctcagtaataattgcctgggtgatgccggtatcctgcagctcgtcgagtccgtgaggcaacccggatgtctcctcgagcagttggtcctctacgatatctactggtccgaggagatggaggatcgactgcaggctctggaaaaggacaaacctagccttcgtgtcatttcttag

SEQ ID NO: 11639 - DNA, 453 bp, synthetic construct
  misc_feature 1..453: note = source = /note="Description of Artificial Sequence: Synthetic coding sequence"
  source 1..453: mol_type = other DNA
atgcgatccctgcttctcctttcagcattctgtctgctggaggccgctctggcagctgaggtgaaaaaacccgctgcagcagcggctcccggtaccgccgagaagttgtcaccaaaggcagctacgctcgcagaaaggagcgccggtctagccttttctctctaccaggcgatggctaaagaccaagccgtggaaaatatcctcgtgagtcctgtggtggtggctagctcactgggactggtttcgctagggggaaaggctactactgctagccaggcaaaggccgttctatcagccgagcagctgagagatgaagaggtccatgccggactgggcgagctgctgagatctctgagcaacagtacagccagaaatgttacctggaagcttggctcgcggctctatggtccttcatctgtgtcgtttgctgacgacttcgtccgatctagctag

SEQ ID NO: 11640 - DNA, 1257 bp, synthetic construct
  misc_feature 1..1257: note = source = /note="Description of Artificial Sequence: Synthetic coding sequence"
  source 1..1257: mol_type = other DNA
atgagatccctgctcctcctgagcgccttctgcttacttgaggccgcactggccgctgaggtcaaaaagcctgctgccgctgccgcacccggtacagcggagaagctttccccgaaagcggcaacactggctgagaggtccgcaggtttagcattctcactgtatcaggctatggcaaaggaccaggctgtggagaatatactggtaagcccagtggtggtcgcctcttccttgggtttagtgtcattgggtggcaaggccacaactgcctctcaggcaaaggcagtgttaagcgccgagcagcttagggacgaggaagtccacgccggattaggcgaactgctccgcagtttgagcaattcaactgcgagaaacgtcacgtggaagctcgggagccgattgtacggaccctctagtgtgagtttcgccgatgatttcgtcagatcctcaaagcagcactacaactgtgagcactccaaaataaattttagagacaagcggtcggcgctccagtctattaacgagtgggcggcacagaccaccgacgggaagctccccgaggtcaccaaggatgtggagagaacggatggtgcactattggtgaatgcgatgttctttaaaccacattgggacgaaaagttccaccacaagatggtcgataatcgcggatttatggttacacgctcttacacagtgggggtgatgatgatgcatcgcacaggcctttacaattactatgatgatgagaaggagaaactacaaatcgttgaaatgcccctggctcacaaactgtcatcattgatcattctaatgccccatcacgtggaacccctggagcgcttagagaagctgctcacaaaagaacagctgaaaatttggatgggaaagatgcaaaaaaaagctgtggcgattagtctcccaaaaggtgtcgtcgaagttacgcatgatttgcagaagcacctcgctgggttgggcctgaccgaagcgattgataagaacaaggcagaccttagcaggatgagcggcaagaaagatctctacctcgcctcggtgtttcacgcaaccgcttttgagttggatacagatggtaatccgttcgaccaggacatatacgggagggaggagttgcggtcgcccaagcttttctacgccgaccacccatttatctttctcgtgagagacacgcagagtgggagtctcctgttcatcgggcgactcgtccgccctaaaggagataagatgcgagatgagctgtag

SEQ ID NO: 11641 - DNA, 1002 bp, synthetic construct
  misc_feature 1..1002: note = source = /note="Description of Artificial Sequence: Synthetic coding sequence"
  source 1..1002: mol_type = other DNA
atggtctctaagagtaggtggaagctccttgctatgttggctctggtgctggtagtcatggtttggtatagtatatcacgcgaggaccggtacatcgagctcttctactttccaatccccgagaagaaagaaccgtgcctccagggggaagctgaaagcaaggcgagcaagctgtttgggaattactctagggaccaacctatttttctccggctcgaagactacttctgggtaaagactccttccgcttacgagcttccatacgggaccaagggaagcgaagatctgctattaagggtcctggcgatcacatccagctccatccctaagaacattcagtccctgagatgccggaggtgtgtcgttgtggggaacggtcacagactacgcaactcatcattaggtgacgccatcaacaagtacgatgtggtaataaggctaaataacgcgcctgtggcgggatacgagggtgatgtgggatccaaaacaactatgaggctgttctaccctgagtctgcccactttgatcccaaagttgagaataaccccgacacgctactggtgctcgtcgctttcaaggcgatggacttccactggattgagactattctctccgataaaaagcgagtgagaaaggggttctggaaacaacccccactgatctgggacgttaacccaaagcagattcggattttgaatccctttttcatggagatcgctgcggacaagctcctgagcctgccaatgcaacaacccaggaaaatcaaacaaaagcctactactggtctactcgccattacattggccctgcatctttgcgacctggtgcacatcgccggattcggctatcctgacgcttacaacaaaaaacagaccattcactactatgaacaaatcacgttaaagagtatggcaggatccgggcataacgtgagtcaggaagcattggccatcaagcgcatgttagagatgggggctattaaaaacctcacgtcattttag

SEQ ID NO: 11642 - DNA, 987 bp, synthetic construct
  misc_feature 1..987: note = source = /note="Description of Artificial Sequence: Synthetic coding sequence"
  source 1..987: mol_type = other DNA
atgtgccccgctgggtggaaactcttggcgatgttggctctggtactggtggtaatggtgtggtatagtatatctcgggaggactcattctattttccaatccccgaaaagaaagagccttgtctgcagggggaagcagaatcaaaggcatccaaactctttggcaactattcccgtgatcagcccatcttcctcaggctcgaagattacttctgggtcaagaccccgagcgcgtacgaactgccctatggcaccaagggttcggaggatctgctattgagagtgttagccattacctcttcatccatccctaagaacattcagtcgttaagatgccgccgttgtgtcgttgtgggcaatggccatagattacgtaactcttcactgggggatgccatcaacaaatatgatgtggtcatccggctgaataacgcacccgtggccggttatgaaggggatgtggggtcaaagactacgatgcgcttattctacccagaatccgcacattttgacccaaaagttgaaaataacccagacaccttactggtactggttgcgtttaaagccatggacttccactggatcgagactatcctttccgataagaaacgcgttagaaagggtttctggaagcagcccccactgatttgggacgtgaaccctaaacagatccgcattctcaatcctttcttcatggagattgccgctgataagctgttatcactgccaatgcagcagcccaggaagatcaagcaaaaacctactaccggcctgttagctattaccttggcactgcacctgtgcgatttagtgcacatcgcgggtttcggttaccccgacgcctacaataaaaagcagactatccattattatgagcagataaccttgaagagcatggccggatcggggcataacgtcagccaggaggcactggccatcaagcgcatgttggaaatgggtgccatcaagaacctcaccagcttctag

SEQ ID NO: 11643 - DNA, 585 bp, synthetic construct
  misc_feature 1..585: note = source = /note="Description of Artificial Sequence: Synthetic coding sequence"
  source 1..585: mol_type = other DNA
atgaccatgagacacaactggaccccagatttgtcacccctttgggtgctgctcctgtgtgcacacgtggtgacactgctggtgagggcaactcctgtttcgcagacgacgacggctgctacagcctccgtcaggtccacaaaggatccgtgtcccagccagccgcctgtattccccgcagccaagcagtgtcccgcactcgaggtgacttggccagaagtggaggtaccgttgaatgggaccctctcgctcagttgcgtagcttgtagtaggttcccgaatttcagcatcttgtactggttagggaacggtagttttatcgaacatctgcccggtagactgtgggaaggcagtaccagccgggagcgagggagcactggtacccaactctgtaaagctcttgtcctggagcagcttacaccggctctgcattcgaccaacttcagctgcgttctggtagaccccgaacaggtggtgcagcgccatgttgtcctcgctcagctgtgggctggtctgcgagccacactcccacccactcaggaggccctgccatccagccactcttctcctcagcaacagggctag

SEQ ID NO: 11644 - DNA, 1386 bp, synthetic construct
  misc_feature 1..1386: note = source = /note="Description of Artificial Sequence: Synthetic coding sequence"
  source 1..1386: mol_type = other DNA
atgagtttagacatacagtccctggacattcaatgcgaagaactgtctgacgcaagatgggccgagcttctcccattgctgcagcagtgtcaggtggtccggctggacgactgtggcctcacagaggcacgttgcaaggacatctcctcagcactgcgggtgaatcctgcactggccgagcttaatctgcggtccaatgaactgggggacgtgggagtgcattgtgtccttcagggattgcagacgccatcttgtaagattcagaaattgtcactgcagaactgttgcttaacaggcgcagggtgtggggtgttatcatccacgctgaggacattgcccaccctgcaagaactccacctcagcgacaacctgctcggggacgcaggcctgcagttgctgtgcgaaggcctgctggatcctcagtgtcgattggagaagttgcagctggaatattgctcactcagtgcagcctcctgcgaaccgctcgcttctgtcctccgcgcaaagcccgactttaaggaactgaccgtctctaacaatgacatcaatgaggcgggagtacgtgttctttgtcaaggactgaaagattccccctgccagttggaagctctgaagttggaaagttgtggcgttacctctgataattgccgcgatctgtgcggaatagtggcctcaaaagcttccctgcgcgagctggcactcggtagtaataagctaggagatgtgggcatggccgagctgtgtccaggcctgcttcacccctcatcacgcctccgcaccttatggatctgggaatgcgggattacggctaagggatgcggtgatctttgtcgtgtactgcgcgctaaagagagcttgaaggagctgagccttgccggaaatgagttaggtgatgagggtgccagattactttgtgagaccctactggaacccggttgccaactggaatccttatgggtgaagagctgttctttcacggcggcatgttgttcgcatttcagcagtgtgcttgctcaaaacagattcctgttagaattacaaatttccaacaacagattggaggacgctggtgtgcgcgaactgtgtcagggactcggccagcctggcagtgtgctgcgggtgttgtggttagcggactgcgatgtttccgactcatcgtgtagctcgttagccgctactcttctggccaatcattctctccgcgagctggacctgtcgaacaattgtctgggcgatgccggtattctccaattggtagagtcggtgaggcaacccggatgtctgctggagcagttggttctttacgatatatactggtcggaggagatggaggatagactgcaagctctagagaaggataaacccagcctgcgtgttatcagttag

SEQ ID NO: 11645 - DNA, 1995 bp, synthetic construct
  misc_feature 1..1995: note = source = /note="Description of Artificial Sequence: Synthetic coding sequence"
  source 1..1995: mol_type = other DNA
atgccccaggccccaagcacaggctctagccttatacgtgatccgagtatcgcacaccgtaacacccagattttgtggaccgaggctggcagggatttggcacaagacactcgctatactggggaagagtctctgactatcttcgtcgataagcgcaaactatctaagagggcggaaggctcggacagcacaacaaatagctccagcgtgacattggaaactctacaccagctggcagcctcctatttcatcgaccgagactctacactgagaagattgcaccacattcagattgcaagtaccgccattaaagttaccgaaaccaggacaggccctctcgggtgctccaattatgataacctggatagcgtctcctctgttcttgtgcagtcacccgagaacaagatacagctgcagggtctgcaggtgctgctgcccgactacctgcaggaacgattcgtacaggccgcactgtcctacatcgcgtgcaattcggagggggagtttatctgtaaggagaatgactgctggtgccattgtggcccaaagtttccagagtgcaactgtccttccatggacattcaagccatggaggaaaacttgctaagaataacagagacttggaaggcctataactcagactttgaggaatctgacgagttcaagctttttatgaagaggttgccaatgaactatttcctgaacacctccactatcatgcacttatggaccatggacagcaactttcagcggagatacgagcagttggaaaactcaatgaagcagctgtttctcaaggcccaaaagatagtgcacaagctgttttcattaagcaagcgctgtcataagcagcccctgattagcctgcccaggcagcgaactagtacttactggctgaccagaatccagagttttctgtattgcaatgagaatggcctgctggggagtttcagtgaggagacccattcctgtacgtgtcccaatgaccaggttgtatgcaccgcattccttccatgtactgtgggcgacgcctcagcttgtttgacgtgcgccccagacaataggacgagatgtggaacctgtaatacaggctatatgctgtcccagggcctgtgcaagcctgaggttgccgaatccactgaccactacatcggtttcgagaccgaccttcaggacctagaaatgaagtacctgctgcagaaaaccgaccggagaatagaggtccacgccatttttatctccaacgatatgcgcctcaattcttggttcgaccctagctggcggaaacggatgttgctgacacttaaatccaataagtacaaatcatcattggtgcacatgattttgggtctgtctctccagatctgtctgactaagaattctacgctcgagccagtactagccgtttatgtgaaccccttcggtggaagccactccgagtcctggttcatgcccgtgaatgagaattccttccccgactgggagagaacgaagttggatctccccctccagtgctataactggacattgaccctgggaaataagtggaaaaccttctttgagacagtacacatctacctgcgatccaggataaaatcaaacggcccaaacggaaatgagagcatctactacgagccactcgaattcatcgacccttcaagaaacctcggatacatgaaaattaacaatatacaggtatttggctattctatgcattttgaccccgaggccatcagggacctcattctgcagttggattacccttacacgcaaggcagccaggactccgctctactacagcttctagagatccgtgatcgggtgaacaagttatcaccgcctgggcagagaagactggaccttttttcttgtctcctccgacaccgcctgaaactcagcacctccgaggtggtgcgcatacagtcggctctccaggccttcaatgctaagctcccaaacacaatggattacgacacaactaagctctgttcatag

SEQ ID NO: 11646 - DNA, 459 bp, synthetic construct
  misc_feature 1..459: note = source = /note="Description of Artificial Sequence: Synthetic coding sequence"
  source 1..459: mol_type = other DNA
atggcacgcgactacgaccacctgtttaaactactcattattggagactccggggtggggaagagctctcttctactgcggttcgcagacaacaccttcagcgggtcttacatcacgacaattggcgtagatttcaagattaggacggttgaaatcaatggggagaaggtgaagctgcagatttgggatactgccggtcaggagcgctttcgcacaattaccagcacttactatagaggcacccatggcgtgatcgtcgtgtacgatgtgacctcagccgagtctttcgtaaacgtgaaacgctggcttcatgaaattaatcaaaattgtgacgacgtgtgcagaatccttgatgtacagctgcaccacggcgctggccctccatcaaaagagagacagcccggaaagaccgccgctgcaacaactgagagatgtggggaggcacacgaggaacagtag

SEQ ID NO: 11647 - DNA, 696 bp, synthetic construct
  misc_feature 1..696: note = source = /note="Description of Artificial Sequence: Synthetic coding sequence"
  source 1..696: mol_type = other DNA
atgctctacattggtattgcagagtatttcttcaaaagcgcctctttcgcccattttaccgcgggagtgtttaatgtgacactcagtacagaggagatcagtaaccactttgtgcagaattcacagggtttagggaacgtgctgtctcggatcgctgagatttacatactgtctcagccgttcatggtgcggataatggccacagagccacccattataaacttgcagccaggtaacttcactctggatattcctgccagcatcatgatgctgacccagcctaaaaactctacggttgaaaccatcgtatcgatggactttgtggcgtccacgtccgtggggctggtgattcttggacagaggcttgtttgttccctttcccttaataggttccgcctggcactgccagaatctaaccgttctaatattgaggtgttgcgctttgagaacatcttgtcctctattcttcatttcggggtactgcctttggccaacgcgaagctgcaacagggttttcctttgtctaacccacataagtttctgttcgtgaacagcgacatcgaggtccttgagggatttctcctcatctctaccgatttgaaatacgaaacatcaagcaagcagcagccaagcttccatgtttgggagggcctgaacctgatttcacgtcagtggcgcggaaagtctgcaccttag

SEQ ID NO: 11648 - DNA, 1911 bp, synthetic construct
  misc_feature 1..1911: note = source = /note="Description of Artificial Sequence: Synthetic coding sequence"
  source 1..1911: mol_type = other DNA
atgaccacgtggagcctgcggagaagacccgcaaggactcttggtctgctgctccttgtcgtgctgggttttctggttctccgaaggctagactggtcaaccctcgttcctttaaggctgcgacatcgccagctcggacttcaagcaaaaggctggaatttcatgttggaagacagcaccttctggatcttcgggggatctattcattacttccgggtaccacgcgagtactggagggataggctgcttaagatgaaagcctgtggccttaacactctgaccacttatgtgccatggaacctccacgaacctgaacgcggaaagttcgatttttctggcaatctggaccttgaggctttcgttcttatggccgcagaaattggtctctgggtcatactgagaccgggaccatacatctgctccgaaatggatttgggtggacttcctagttggctgttgcaagatcccggaatgagactgcggactacgtataagggcttcaccgaggccgtcgacttgtacttcgaccatctgatgtccagggtggttcccctgcaatacaaacggggtgggcctattatcgccgtccaagtggagaatgagtacggcagctacaataaagaccctgcctacatgccctacgtgaaaaaggccctggaggatcggggaattgttgagttgttactgacctctgacaataaggacggactgtccaaaggcatcgtgcagggggtcctggccaccattaacctgcaaagcacgcacgaattacagttgctcaccacctttttgttcaacgtacagggtacccagccgaagatggtgatggaatactggactggatggtttgacagctgggggggtccacataatattctggattcttctgaagtgctaaaaactgtgtccgcaatcgtcgacgctgggtcctctattaatttgtatatgttccacggaggaactaatttcggattcatgaacggcgctatgcacttccacgattacaagagcgacgtgacgagctacgactatgatgcagtgctgaccgaggcaggcgattatacagccaaatacatgaagctccgcgatttcttcggttcaataagtggcatcccactgcccccaccgcctgacctattaccaaaaatgccttacgaacccctcacacctgtgttgtacttgtcactttgggacgctttgaagtatctgggtgagcccattaagagcgagaagccgatcaacatggagaacctgcctgtcaacggaggaaatggacagtcctttgggtacatactctacgaaaccagcatcaccagctccggcatcctgagcggccacgtgcatgacagaggccaggtgttcgtcaatacggtatccatcggctttctggattataagacgactaaaatagcagtgccattaatacagggctacactgtcctgcgaattttagttgagaatcgagggagagtgaattacggggagaatatcgatgaccagaggaagggcctaatcggaaacttatacctgaacgattcacctctcaagaattttaggatatactcattggatatgaaaaagtcattctttcagaggtttggactggataagtggtcctctctgccagagactcctaccttacccgctttcttccttggatctctgagtatatcaagcaccccctgcgatacctttttgaaacttgagggctgggaaaagggcgtggtctttattaatggacagaatctcgggaggtactggaacatagggccacagaaaactttgtatcttcccggaccgtggctatctagtggtataaatcaagtaatcgtgttcgaggagacaatggctggtcccgctctgcaattcactgagaccccacacctgggcaggaaccaatatattaagtag

SEQ ID NO: 11649 - DNA, 1374 bp, synthetic construct
  misc_feature 1..1374: note = source = /note="Description of Artificial Sequence: Synthetic coding sequence"
  source 1..1374: mol_type = other DNA
atgggatgctcactccctctcagctgcattatggttcgctcagtcgcctgggccggattcatggtactgttgatgataccgtgggggtccgctgctaagctggtgtgttacttcaccaattgggcccagtaccgccaaggcgaggccaggttccttccaaaagaccttgatccctcactttgtacccacctcatttacgcgttcgcgggtatgacaaaccatcaactgtccacaacagagtggaacgatgagacgctgtaccaggagttcaatgggctgaaaaagatgtttaccgatatggtggccacagccaataacagacagactttcgtgaactctgcaatacggtttctcagaaagtattcatttgatggcctggatctggactgggaatatcctgggtctcagggctccccagctgtagacaaagagcgcttcaccaccctcgtccaagatcttgccaatgcgttccagcaggaagcacagacaagtggcaaagagcgcctgctgctgtcggccgctgtccctgcaggacaaacgtacgtcgatgcgggatacgaggtggataaaattgctcaaaacctggacttcgtcaatctgatggcctatgattttcacggttcctgggaaaaagtcaccgggcacaacagccccctttataagcgacaagaggagagtggcgcagccgctagtctgaacgtggacgcagctgtccagcagtggttacagaaaggaactccagccagcaagctgatcctgggcatgccaacatacggcagaagcttcactctcgcgtccagttcggatacacgggttggagctcctgcaaccggctccggcacgccaggccctttcaccaaggaggggggaatgctggcctattacgaagtgtgttcgtggaaaggcgctaccaaacaacgaatccaggatcagaaggtcccttatatttttagggacaatcagtgggttggcttcgatgatgtggagtcctttaaaaccaaggtgagttacctgaagcagaaaggcctgggaggagcgatggtgtgggctctcgaccttgatgacttcgctggattctcttgtaaccagggccgttatcccctcatccagacactgcggcaggagctctcactgccctacctacctagcgggaccccggaattggaggttcccaaaccaggtcagccttctgaaccagagcacggcccttctcctgggcaggataccttctgccaaggaaaggcagatgggctgtatccaaatccccgagagagaagtagcttctactcttgtgcagcaggcagactattccagcagagctgtccaactggtttagtattctctaacagctgcaagtgctgcacttggaattag

SEQ ID NO: 11650 - DNA, 1125 bp, synthetic construct
  misc_feature 1..1125: note = source = /note="Description of Artificial Sequence: Synthetic coding sequence"
  source 1..1125: mol_type = other DNA
atgtacgtctctacccgagagagatataaatggctgcgattctccgaagattgcctatacctgaacgtttatgctccagccagagccccaggggacccgcagctccccgttatggtgtggtttccgggaggcgcatttattgtgggcgctgcgagctcctacgaaggttctgatctggcagcccgtgagaaggtggtgctcgtcttccttcagcaccgactgggcatcttcggcttcctgagatggcgaggtagaacggacgactctcacgcaagggggaattgggggcttcttgaccagatggcagcactgcgatgggtgcaggagaacatcgcagctttcgggggagaccctgggaatgtcactctgtttgggcagtcggccggagccatgtcgatcagtgggcttatgatgagcccgttggcaagtggtctgtttcatcgcgcaatcagccagagcggaacggctttgttccgcctgttcattaccagcaacccgctcaaggttgctaagaaagtggcccacctggcaggctgcaatcataacagtactcagattttggtcaactgcctaagggctctaagtggcacgaaagttatgcgagtttcaaacaaaatgcgctttctgcaactgaacttccagcgcgatcctgaggagattatatggagtatgtcccctgttgtcgacggggttgtaatccccgacgaccccctggtgttactcacccagggcaaagtcagctcggttccctaccttctgggagtcaacaatctggagttcaactggctactgccctacatcatgaaattcccactgaatagacaagcaatgcgcaaggagaccataaccaagatgctctggagtacacggacgcttcttaatatcactaaggagcaagtgcccctcgtggttgaagaatacctggataacgttaacgagcatgattggaagatgctccgcaatagaatgatggacattgtgcaggatgccacctttgtttacgcaaccctgcaaactgcccattaccaccgggaaacccctatgatggggatttgccctgctggccacgcgactacacggatgaagagtacgtgctcttggatcctgcctcaggaatgggcatag

SEQ ID NO: 11651 - DNA, 384 bp, synthetic construct
  misc_feature 1..384: note = source = /note="Description of Artificial Sequence: Synthetic coding sequence"
  source 1..384: mol_type = other DNA
atgaagacaggccttttctttctgtgcctcttaggcactgctgctgcaataccaacgaatgcgcgactgctgtctgaccattcgaaaccaacagccgagaccgttgccccagacaataccgctatcccctcactaagagctgaagctgaagagaacgagaaagaaacagccgtgtcgacagaggacgacagccatcacaaagctgaaaagtcctcagttctcaagagcaaggaggagtcccacgaacaatccgctgaacagggtaagtcatcgagtcaggaactggggttaaaagaccaggaggatagcgatggacatctgtcagtgaatcttgaatacgcacctactgagggtactctggacattaaagaggatatgtcatag

SEQ ID NO: 11652 - DNA, 285 bp, synthetic construct
  misc_feature 1..285: note = source = /note="Description of Artificial Sequence: Synthetic coding sequence"
  source 1..285: mol_type = other DNA
atgcggacgttggctatactagccgcaattctgctggttgctttgcaagcacaagccgaaccgctccaggccagggccgatgaggttgccgctgccccagagcagattgccgcagacatcccagaggtcgttgtgtctctggcctgggatgaatcactcgccccaaaacatcccggaagccggaaaaacatggcctgctattgccggattcctgcttgcattgcaggcgagagacgatatggcacttgtatttatcaaggtcgcttgtgggcattttgttgctag

SEQ ID NO: 11653 - DNA, 414 bp, synthetic construct
  misc_feature 1..414: note = source = /note="Description of Artificial Sequence: Synthetic coding sequence"
  source 1..414: mol_type = other DNA
atggcagccctctcgcgagctctgggcccactgcgcaccccagcaccccctctgtggattggcctatttctcgtcgctacgggatcccagcagagtttggcgcaacccttgccgggaaacacgacagaggccactcctcggtcactcagagcctcgggctctctgtgcgggccacacgccaaggccccttacctttgcgaggcaacccacgagcctgcagcggcacgcatacgggctcaggtacccgatacccgctggtcccgtgtgggcggacagaggttctatagtcgagtcctctcaccacttcaccgcggacctagtgggcatacagaagcatccgcccagcgcagccatatgggcaaattgaaagagcctcagccacaggatcacaaacccggactcggtgcctcttag

SEQ ID NO: 11654 - DNA, 228 bp, synthetic construct
  misc_feature 1..228: note = source = /note="Description of Artificial Sequence: Synthetic coding sequence"
  source 1..228: mol_type = other DNA
atgctcaaagtacactatccaaaattcggcgtgtccgaggattgcctgtatctcaacatctatgcccctgcccacgccgacactggcagtaaactacccgtgctggtgtggtttcccggaggagccttcaagactgggtccgcaagtatttttgacggaagtgctcttgctgcctacgaggacgttctcgtggtggttgtgcagtatcgactgggaatctttggatag

SEQ ID NO: 11655 - DNA, 1491 bp, synthetic construct
  misc_feature 1..1491: note = source = /note="Description of Artificial Sequence: Synthetic coding sequence"
  source 1..1491: mol_type = other DNA
atggccccagcaagaactatggcacgggctcgcctggcgccagcagattgcttaaattcttttaccgccggagttccaggattcgtgcttgacacaaatgcttcggtgtccaacggcgcaactttcttggagagtcccaccgtaaggaggggctgggactgcgtcagagcgtgctgtaccactcagaactgcaacctggccctggtggaactgcagccggaccgcggagaggatgccatagctgcctgcttcctgattaattgtctctatgagcagaatttcgtgtgcaagtttgctcctagggaggggttcatcaattatctgacacgtgaggtgtatcgaagctaccgccaactccggactcaaggattcggaggttctggaataccaaaagcgtgggccggaatagaccttaaagtccagccgcaagagcctctcgttctgaaggacgtcgaaaataccgattggcgtctgctgaggggcgacaccgacgtgcgtgtcgagcggaaggacccgaaccaggtggagttgtggggacttaaagagggcacctatctatttcagctgaccgtcacatcttcggaccatcctgaggacaccgcaaatgtgaccgtcactgttctgagcacaaagcagactgaggattactgcctcgcgtcgaataaggtgggcagatgcagaggttcatttcctcgctggtactatgatccgaccgagcaaatctgcaaatctttcgtttatgggggatgccttggtaacaagaataactacctgagggaagaggagtgtattttagcatgtagaggagtccagggcggacccctgcgaggtagtagcggcgctcaggctaccttcccccaaggcccaagtatggaaaggagacaccctgtgtgctccggcacttgtcagccgactcagtttaggtgctctaatggatgctgcatcgatagctttttagagtgcgacgacactccaaactgtcccgatgccagcgacgaggccgcttgtgaaaagtatacgtccggcttcgatgagctgcagcgaatacacttccccagtgacaagggccattgcgtcgacttgcccgacacagggctctgcaaagaatccatccctcgttggtactataaccccttcagcgaacactgtgcgaggttcacgtatggaggatgctatggcaacaagaataatttcgaagaggagcaacagtgtctggagagctgccgtggcattagtaaaaaggacgttttcggcttgcgcagagagatcccgatcccgagcaccggatccgtggaaatggcagtagcggtgtttttggtcatctgcatcgttgtggtagtggccatcctcggttattgcttttttaaaaatcagaggaaagactttcatgggcatcatcaccatccacccccaacccccgctagcagtaccgtgtctaccaccgaagacacagaacacctggtctacaatcacacaacacgacccctgtag

SEQ ID NO: 11656 - DNA, 528 bp, synthetic construct
  misc_feature 1..528: note = source = /note="Description of Artificial Sequence: Synthetic coding sequence"
  source 1..528: mol_type = other DNA
atgccaccaggcacccgagcctgtagagtgcctagaccgggtcgtagggccccacggcctcgacgcgatggggagcccggtggacatggtgtggctcctgctagcgcagaagaagtgggagccaggccaggactgcgcgctgtggctagacttctcccccagcagcatcttcaggcgggttatgtgtgcgaacgcaaagatctgctagtgaacggatgctgcaatgtcaatgtgccgagcactaaacagtactgttgtgatgggtgttggccgaacggatgttgttcagcttatgaatactgcgtctcatgctgcctccagccaaataaacagctgttgctggagcggttccttaaccgagctgcagttgcctttcaaaatctgttcatggccgtcgaggaccatttcgaactgtgcctggcgaagtgccggacatcctcacaatcagtgcagcacgagaacacttatcgagatcccatcgctaaatactgttatggggagtccccacccgagctgttccctgcttag

SEQ ID NO: 11657 - DNA, 1881 bp, synthetic construct
  misc_feature 1..1881: note = source = /note="Description of Artificial Sequence: Synthetic coding sequence"
  source 1..1881: mol_type = other DNA
atggatttggtcttaaagcggtgcctactgcaccttgccgtgataggagctttgttagccgtgggtgctacaaaggtccctcggaaccaagactggttgggagtgtctcggcaattgcggaccaaagcatggaatcggcaactctatccagagtggacagaagcccagcgtctggattgttggcgcggtggacaggttagtctgaaagtgtctaatgacggtcccaccctgatcggcgctaacgccagcttttctatcgctctgaatttccccggttctcaaaaagtgctacctgatggacaggtaatctgggtgaacaataccattatcaatggtgatcaggtgtggggcggacagcccgtctaccctcaggagaccgacgacgcttgtattttcccggacggaggcccttgtccaagtgggagctggtcgcaaaaacgatctttcgtctacgtttggaagacatgggggcagtactggcaagttttgggtggcccagtttctggcttgtcaatcgggaccggcagagccatgctgggcactcatacaatggaggtcacggtgtaccaccggagagggtcccgctcatacgtccctctggcgcactcaagtagtgctttcacaatcactgatcaagtgcccttttccgtcagcgtgagccagctgcgagccctggacggtggaaataaacattttctgagaaaccagccattgacctttgccttacagctgcacgatccctctggatatttagcggaggctgatctgtcttacacatgggattttggagatagcagtggcactctcatctcaagggcgctggtcgtcacccacacttatctggaacccggaccagttacagctcaggttgttcttcaggcagctatcccgctgaccagctgtggcagctcccccgtgcctgggacaaccgacggccatcgacctactgcagaggcgccaaacaccactgcaggacaggttcctaccaccgaagtggtgggaacaacccctggacaagccccaaccgccgaaccttccgggactacatccgtgcaggtcccaaccactgaggtgatttccacagccccagtgcaaatgccaacggccgagtccaccgccgctcaagtgaccactaccgagtgggtggaaacaaccgcccgagagttgcccatccctgaacccgagggccctgatgctagttccattatgagcacagagagtattactggaagcctcggcccattgctggatggaacagccactctgagattggtgaagcgacaggtcccattagactgtgtgctgtatcgctacggaagtttttcagtgaccctagacatcgtgcaaggaattgagagcgccgagatcctccaggccgtcccaagtggtgagggcgacgccttcgaattgacggtgtcgtgtcaggggggtctccccaaggaggcttgcatggagatcagttcccccggttgtcaacctccagcccaaagactctgccagcccgtgctgcccagcccagcctgtcaactggtactgcaccagatactcaaagggggtagtggcacctactgccttaacgtgtccctggctgacacaaacagcctcgctgtagtctcaactcagctgataatgccggtgcctggaatcctgctcactgggcaggaggccggacttgggcaagttcctctaatagtaggcattttgctagttctcatggctgttgttctcgcctccctgatttaccggcgtcgccttatgaagcaggacttcagcgtcccgcaactaccccacagctccagccattggctgaggctccctcgtatattctgttcctgtcccattggtgagaatagtcctctcctgtctggacaacaggtgtag

SEQ ID NO: 11658 - DNA, 1611 bp, synthetic construct
  misc_feature 1..1611: note = source = /note="Description of Artificial Sequence: Synthetic coding sequence"
  source 1..1611: mol_type = other DNA
atgcccactctgtgttctagcttcggtctacaggtgctcctgcctgaatacctgagggagcggtttgtcgcagccgcactcagttacatcacctgttctagcgaaggcgaactggtgtgcaaagaaaacgattgttggtgcaaatgtagtcccaccttccctgaatgcaattgccccgatgcagacatacaggccatggaagatagcttgttgcagattcaggactcttgggcaacgcataatcggcagtttgaagaaagcgaagagttccaggcattgctgaagcgtttgcctgacgatcggtttctgaactctactgcaatatcccagttctgggcaatggatacctcattgcagcaccgctaccagcagcttggcgcaggcttgaaggtcttattcaaaaaaacccatagaatcttgaggcgcttgttcaatctgtgtaagcggtgtcacagacagccacggtttaggcttcctaaagagagcagcccaagaagcctctcatactggtggaacaggatccaaagtctgctttactgtggagaatctactttcccgggaacattccttgagcaaagccactcctgcacctgtccatacgatcagagttcttgccagggacctatcccatgcgcactgggtgagggaccagcatgtgcgcattgcgctccagacaacagcacgcggtgtggttcatgtaacccagggtacgtcctcgcacagggtctgtgccggccagaagtcgccgagagtcttgagaacttcttaggcctggagacggacctgcaggatctggaactgaagtacctgctgcagaaacaggactcaaggattgaagtccattcaatctttatctccaacgatatgagacttggaagttggttcgatccctcctggcggaaaaggatgctgctcaccctaaagtccaacaagtacaaaccgggacttgtgcacgtgatgctggccctttcattgcagatatgcctcacgaagaacagcacactggaacccgtcatggcaatttatgtgaacccctttggtggctcgcactcggaatcctggttcatgccggtcaacgagggctcttttcccgactgggaaaggacaaatgtcgacgcagccgctcaatgccagaattggacaatcaccttgggtaaccggtggaaaacgttcttcgagacagtccacgtatacctgcgctctcgtattaagtcccttgacgattcaagtaatgaaactatctattacgagccacttgagatgacggacccctcgaagaatttggggtatatgaagattaacaccttgcaagtgttcgggtattccctgccttttgaccctgacgcaattagggatttgattctccagctggattatccttatacccaagggtcacaagactcagccctcttgcagctgattgagctaagagatcgagttaaccagctcagtcctccaggcaaggtcaggttggacctattctcttgcttactgcggcacaggctgaaactcgccaataatgaagtggggaggattcaaagttccttgagagcttttaactcgaagttgccgaatccggtggaatatgagacagggaaactctgcagctag

SEQ ID NO: 11659 - DNA, 423 bp, synthetic construct
  misc_feature 1..423: note = source = /note="Description of Artificial Sequence: Synthetic coding sequence"
  source 1..423: mol_type = other DNA
atgtcccagtccatcgaagttctgaacctacgcacccaacgagacttccagtatgttttgaaaatggaaacccaaatgaaaggcctcaaagcaaagttcagacagatcgaggatgaccgtaaaaccctcatgaccaagcactttcaggagttaaaagagaaaatggacgaactcttaccactgattcccgttctcgaacagtacaaaacagatgcgaagctcattacacaatttaaagaagagattcggaatctttcagcagtgcttaccggcatacaggaggagattggcgcttatgactatgaagagcttcatcagcgtgtactgtccctggaaacccgtctccgggactgcatgaaaaaactcatcgatctgaaaaagcggaaggaggaggaaaagcgccaacagaagggtgaagcctag

SEQ ID NO: 11660 - DNA, 1119 bp, synthetic construct
  misc_feature 1..1119: note = source = /note="Description of Artificial Sequence: Synthetic coding sequence"
  source 1..1119: mol_type = other DNA
atggcctatatcgaacagcggagaatctcacacgagggaagcccagtgaaacccgtagccatccgcgaattccagaagactgaagatatgaggcgctatctacatcagaatagggtgcctgccgagcccagcagtttgctgtcactgtcagcaagccacaatcaactcagccacactgacttggagttacaccaacggagggaacagctcgtcgagaggacccggcgagaggcccaactggcagccctacaatacgaggaggaaaaaattcgaaccaaacagattcagcgggacgctgtgctggactttgttaaacagaaggcgtcacagagccctcagaagcagcacccactgctcgatggcgttgacggggaatgtccttttccctcacggagatcgcagcatacggacgacagtgctctgtgcatgtccctgtctggcttaaatcaggttggctgtgcggctaccctgccccattcctcagcctttacacctctcaaatctgatgatcggccaaatgccctccttagcagtccagctactgagactgtacaccatagtccggcttactcttttccagcggcaattcagcgcaaccaaccccagcggccagaatcattcctctttcgggctggagttagagcagaaacaaacaagggtcacgcttcccccctaccgcctagtgcagccccaactaccgactccactgactctatcacaggccagaattcgcgacaaagggaagaggaactggagctaattgatcagctacggaagcatatcgaataccgtctgaaggtctcccttccatgcgacctgggagcagcactgacagacggggtcgtgctctgccatctggccaaccacgttcggcctagaagcgtgccgtccatacacgtgccgtctcccgctgtgccgaaactgaccatggccaagtgcagacgcaacgttgagaatttcctagaggcctgcaggaaaatcggcgtcccacaagagcagctctgccttcccctgcatatcttagaggaaaaagggctgtcccaggttgctgtaacagtccaagccctcctggaactcgcgccacccaagcaacagcagcatcagctctctgcagtgtag

SEQ ID NO: 11661 - DNA, 1242 bp, synthetic construct
  misc_feature 1..1242: note = source = /note="Description of Artificial Sequence: Synthetic coding sequence"
  source 1..1242: mol_type = other DNA
atggaaaacatgctcctttggctgatcttcttcactccaggatggactttaattgacggcagcgaaatggagtgggatttcatgtggcatctgcggaaagtacccagaattgtaagtgaacgcactttccatttgacaagtccagccttcgaagccgacgctaagatgatggtcaataccgtgtgcgggattgaatgccagaaggaactgccgaccccgagtctaagtgaactggaagattatttgtcctatgagacagtgttcgagaacggcacccgaacattaaccagggtgaaggtccaggatcttgtacttgaacctacgcagaacatcacaactaagggtgtttccgtacgcagaaagcggcaagtctatggaacagactcccgttttagtatcctcgataagcggttcctgacgaattttcccttcagtaccgctgtgaaactctccaccggttgctccggaatcctgatatctccacaacacgtattgacagcagctcattgcgtgcacgatgggaaggattacgttaaggggagcaagaaactcagggttggactcctcaagatgcgaaacaaatctggcggaaagaaacgcagagggtctaaacggtcccggagggaagcctctggaggggaccagagagaaggaactcgggaacacttgcgggagagggccaagggcggtcggcgtcggaaaaaatcgggcaggggccagcgtatagccgaagggagaccctcctttcagtggactagagttaaaaacacacatattccaaagggctgggcacgcggaggaatgggagatgctactctggactacgattacgcactgctggaacttaagcgcgctcacaagaaaaagtacatggaacttgggattagccccacgatcaagaagatgccgggagggatgatacacttttccgggttcgacaacgatagggccgatcagctcgtgtaccgattttgtagcgtttctgacgagtctaacgacctgctgtatcaatactgtgacgccgagagtggaagtaccggtagtggagtgtatctcagactcaaagatcccgacaaaaaaaattggaagagaaagataatcgccgtctatagcgggcaccagtgggtagatgttcacggggttcagaaagactacaatgtcgctgttcggatcaccccgcttaaatacgcccagatctgcctatggatccacggtaatgacgccaactgtgcctacgggtag

SEQ ID NO: 11662 - DNA, 2541 bp, synthetic construct
  misc_feature 1..2541: note = source = /note="Description of Artificial Sequence: Synthetic coding sequence"
  source 1..2541: mol_type = other DNA
atgttcaagtgctggtcggttgttcttgtgttggggtttatctttctagaatccgaagggcgacctaccaaagagggcggatacgggctgaaatcatatcagccactcatgaggctccggcacaaggagaagaaccaggaaagcagtagggtaaagggatttatgattcaggacggacctttcgggtcttgtgagaacaaatattgcggtctgggacgacactgcgtcacttccagggaaacaggccaggcagagtgcgcctgcatggatttgtgtaaaagacactataagcctgtatgcggctccgatggcgagttttatgaaaaccattgtgaagttcatagggctgcctgtctaaagaaacaaaaaattaccattgtacataacgaggattgtttcttcaagggcgacaagtgcaagactaccgaatattcgaagatgaagaacatgctgctcgacttgcaaaatcaaaagtacatcatgcaggaaaacgaaaacccaaacggtgacgacatttccaggaagaagctcctcgtcgaccagatgtttaaatattttgacgcagacagtaatgggctcgtcgatataaacgaattgacccaggttataaaacaagaggagctggggaaagatttgtttgactgcacactctatgttctcctgaagtacgacgacttcaatgcagataagcacctggccctcgaagaattctatagggcttttcaagttatccagctatccttacccgaggatcagaaacttagcattaccgccgcaacggtgggccagtcagccgttttaagctgtgctatccagggcaccctccgaccacccatcatctggaaacgaaataacataatcctaaataacctggatctggaagatattaacgatttcggtgacgatggcagcctttatattactaaggttaccaccactcacgtcggtaattatacatgctacgctgatggttacgagcaggtgtaccagacacacattttccaggtaaatgttccccctgtaatccgcgtctatcctgaaagccaggcgagggagcctggcgtaacagccagtctgcggtgccatgcagaggggattcctaagcctcaactgggttggctcaagaacggcatagacattacacctaaactttccaaacagctgactctgcaggccaatgggagcgaggttcatatcagtaacgtcagatatgaggacaccggggcttatacctgcatcgctaaaaatgaagctggcgtggatgaagatatctcttcactctttgtggaggacagtgctaggaaaacactcgccaatatcctgtggcgggaggagggcttgggaattggaaacatgttctacgtgttctatgaggatggcatcaaagtcatccaaccaatcgaatgcgaattccagaggcatatcaagccctccgaaaaattactcggctttcaagatgaggtatgtccaaaagccgagggagacgaggttcagaggtgcgtttgggctagcgctgtgaatgtgaaagacaaatttatctacgttgcccagccgaccttggacagagtgttaattgtggacgtacagtcccagaaagtggttcaggcagtctctaccgaccctgtacctgtgaagttgcactacgataaatctcacgatcaggtgtgggtgctgtcctggggcaccttagaaaagaccagccctacccttcaagttatcacattagcctcgggaaacgttcctcaccacacaatccacacacaaccagttggaaaacaattcgatagagttgacgatttttttatcccaactaccacgctaatcatcactcacatgcgatttggtttcatactgcataaagatgaggcggctctccaaaagatagatctggagacaatgtcctacataaagaccataaacctcaaagactacaagtgcgtgccccaaagcttggcttacacacacctaggaggatactacttcatcgggtgcaagccagactccactggggctgtgtctccgcaagtgatggtcgatggcgttacagatagcgtcataggattcaattcggacgtcaccggaactccctacgtcagtccagacgggcactacctggtgagcatcaacgacgtcaaggggctggtcagggttcagtacatcactatccggggagagattcaggaggcctttgacatttacacaaaccttcatatctctgacttagcctttcagccctccttcaccgaggcacatcagtacaacatttacggaagtagctccacgcagactgatgtgttgtttgtggagctgtcgtcggggaaggtcaaaatgataaagtccctcaaagaaccactaaaagcagaggaatggccttggaacagaaaaaaccggcaaatccaggatagcggactgtttgggcagtacctgatgaccccctccaaggatagtctgttcattctggacggaagactgaataaacttaactgcgaaataacagaagtagagaaaggaaacacagtaatctgggtgggcgacgcatag

SEQ ID NO: 11663 - DNA, 582 bp, synthetic construct
  misc_feature 1..582: note = source = /note="Description of Artificial Sequence: Synthetic coding sequence"
  source 1..582: mol_type = other DNA
atgctgggcgtgctcgaactgctactgctgggggctgcctggttggccggacccgcacgtggccagaacgagacggaaccaattgtgctggaagggaagtgcctggtcgtgtgtgactcgaaccctacctcagacccgaccggcacagccttgggaatttcagtgcgatcggggagcgctaaagtggccttctcagccatccgctccacaaaccacgagccatccgagatgtccaacagaactatgatcatatactttgaccaggttctagtgaatatcggtaataatttcgactccgagagatcaaccttcattgccccacgaaagggaatttatagctttaacttccacgtggtgaaggtctacaatcgacagacaatccaggtgagtctcatgcttaacggctggcccgtaatttctgctttcgcaggagaccaggacgtcacacgcgaagccgctagcaacggcgtcctcatccagatggagaaaggagatcgtgcttacctgaagctcgagaggggaaaccttatgggaggttggaagtatagtacattttctggcttcctggtgtttcccctgtag

SEQ ID NO: 11664 - DNA, 813 bp, synthetic construct
  misc_feature 1..813: note = source = /note="Description of Artificial Sequence: Synthetic coding sequence"
  source 1..813: mol_type = other DNA
atgcacgggagttgctcatttctgatgctgcttctgcctttgcttctcctgcttgttgcaacaaccgggccagtcggggcactcacagatgaggaaaaacgcttgatggttgagctacacaacctctacagagctcaggtgagccctaccgccagtgacatgcttcatatgcggtgggacgaagaactcgcagcctttgctaaggcctatgccagacaatgcgtgtgggggcacaataaggagcgtggtagacgcggtgagaatttgtttgcaataactgacgaagggatggatgtccctctagctatggaggagtggcaccacgagcgcgagcactataacctgagcgcggcaacctgctcaccaggacagatgtgcggtcactatacccaagtcgtgtgggccaagaccgagaggatcggctgtgggtcccacttctgtgagaagttacagggcgtcgaggaaacgaatattgaattgctggtatgcaactacgagcctcctggtaatgtgaagggcaagagaccgtaccaagagggtactccgtgttctcagtgtccgtcagggtatcattgtaaaaacagcctgtgcgagcccatagggtcccccgaggatgcacaggatctcccgtacctggtgacagaggccccatcattccgagcaaccgaagccagcgacagccgcaaaatgggagcagaggggcctgataagcccagcgtagtatctggtttgaactccggcccaggccacgtatgggggccactgcttggcctcctcttgctaccccctctcgtgctggctggcatcttctag

SEQ ID NO: 11665 - DNA, 702 bp, synthetic construct
  misc_feature 1..702: note = source = /note="Description of Artificial Sequence: Synthetic coding sequence"
  source 1..702: mol_type = other DNA
atggaccaggtgttcatgattgactcaaaatgtgagtcagggaaaggtaggtgctccttcaaccctaacgtgaatactgtgagtgtgatgataaatgaagagttgttctccggaatgtacattgattttatgggtacagatgccgctatcttccggagcttgactaaacgcaatgccgtccgtaccgaccaacataactcgaaatggcttagcgagccgatgtttgtagacgcccatgtcatcccagacggcactgatcccaatgacgctaaggtgtacttttttttcaaggagaaactgacagacaataataggtccactaagcaaatccacagtatgattgccaggatctgtccaaacgatactggcggactgagatcacttgttaacaagtggacgactttccttaaagcgagacttgtctgttctgtcaccgacgaggatggcccagagacacacttcgatgaactggaagacgtgtttctgttagagacggacaacccaaggactaccctcgtttatggcatcttcactaccagttccagcgtctttaaaggatctgccgtgtgcgtgtatcatctgagtgatattcagaccgtgtttaacgggccatttgcccacaaagaaggaccaaaccaccaactgatatcctaccaggggaggattccctatccccgaccgggaacgaatacttgtgtgtag

SEQ ID NO: 11666 - DNA, 1368 bp, synthetic construct
  misc_feature 1..1368: note = source = /note="Description of Artificial Sequence: Synthetic coding sequence"
  source 1..1368: mol_type = other DNA
atgctgcatcccgaaaccagccctggacgtggacatctgctggctgtgctactagccttgttgggaactgcatgggccgaggtctggccaccccagctgcaggagcaagctcctatggctggggcactgaataggaaggagagttttcttctgctgtcactgcacaaccgattgcgcagctgggtgcagccccctgcagccgacatgaggcggctggactggagcgattctttggctcagctggcccaggcacgggcagcgctatgcggaatccccaccccctcacttgcttccgggttatggcgcaccttgcaggtgggatggaacatgcagctgttgcccgcaggtctggcctctttcgtggaagtggtgtctttgtggtttgccgagggtcaacggtatagccacgccgcaggcgaatgcgcaaggaatgctacctgcactcactacacacagctggtctgggctaccagctcccagctgggatgcggccgacacctttgtagcgctggacaggccgcaattgaggcctttgtctgtgcttatagtcctagaggaaattgggaagttaatggaaaaaccatcgttccatacaagaagggcgcatggtgtagtctgtgtactgcctcggtgtcagggtgctttaaagcatgggatcacgcagggggactctgcgaggtgccgcgaaacccatgcagaatgagctgtcagaaccacggtcggctaaacatctcgacgtgtcactgtcattgcccaccaggatacacaggcaggtactgccaagttcgatgtagcctccagtgcgtgcacgggcgattccgggaggaagaatgtagttgcgtgtgcgacattggctacggaggcgctcagtgtgccacaaaggtgcacttcccttttcacacgtgcgacctgaggattgacggtgactgtttcatggtatccagcgaggctgacacttactatcgtgctcgcatgaaatgccagaggaaaggcggagtgctggcccaaataaagtcacagaaggttcaggacatcttggcattctatctcggacgccttgaaaccactaatgaggtcattgacagtgactttgagactcgaaacttttggataggtctcacgtacaaaactgccaaggactcatttagatgggcgacgggtgaacatcaggcctttacaagctttgcatttgggcagccagataatcacggcctggtatggctcagtgcagctatgggtttcggtaattgcgttgaactccaggccagcgcagcttttaactggaacaaccagagatgcaaaacccgtaacagatacatctgccagtttgcccaggagcatatcagccggtggggacccggatcatag

SEQ ID NO: 11667 - DNA, 462 bp, synthetic construct
  misc_feature 1..462: note = source = /note="Description of Artificial Sequence: Synthetic coding sequence"
  source 1..462: mol_type = other DNA
atggctcgtttttgggtttgcgtggcgggtgccggattctttcttgcctttctggtgctgcacagtcggttttgtggctcacccgtgcttaggaactttactttcgccgtaagctggagaacagaaaaaatactgtaccgcttggatgtgggatggcctaagcaccccgagtacttcaccggcacaaccttttgtgtggccgtggactctctgaatggcctcgtctacatcggacaaagaggagacaacatccctaaaatcctcgtgttcaccgaagatggatacttcttgcgcgcttggaattacactgtggacaccccacatggcatctttgccgcttctaccctctacgagcagagcgtttggatcactgatgtggggagtgatttcatgatcctctggctgcatggcgagaacggtactgggcctgctaaattcaatattccacactccgtcacatag

SEQ ID NO: 11668 - DNA, 375 bp, synthetic construct
  misc_feature 1..375: note = source = /note="Description of Artificial Sequence: Synthetic coding sequence"
  source 1..375: mol_type = other DNA
atgtggcgctgcccactggggctactgctgcttttgcccctggccggacatttagccttgggtgcccaacagggaagggggcgaagagagcttgcccctggcctgcatctgcgtggtatccgggacgccggaggacggtattgccaggagcaggatttatgttgtaggggacgagccgacgactgcgcactgccgtatcttggggcaatatgttattgcgatctcttttgcaacaggactgtctccgattgctgtcctgatttctgggacttttgcctgggcgtgcctcccccttttccgcctatccaagctcctgctcggaggaccggcagcggctccgttacgaaaaaccatgcctggtggatccaaacgtag

SEQ ID NO: 11669 - DNA, 777 bp, synthetic construct
  misc_feature 1..777: note = source = /note="Description of Artificial Sequence: Synthetic coding sequence"
  source 1..777: mol_type = other DNA
atgaagactctctacttggctgacacctttcccaccaacttcagggatagcgccggtgcaatgaaacaaatcaatgactacgtcgccaagcaaaccaagggcaagatcgtggatctactgaaaaatctcgactcaaacgcagttgtcataatggttaattacatcttctttaaggctaagtgggaaacctccttcaaccacaagggcacgcaggagcaggacttttacgtcacctctgaaaccgttgtgagagtgcctatgatgtctagggaggaccaataccactacctgctcgatcggaacctgtcatgccgagtcgttggggtgccgtatcaggggaacgcaacggccctgttcatcctcccgtcggaaggcaaaatgcaacaagtcgagaacgggctgtccgagaaaaccctgcggaaatggctgaaaatgttcaagaaacgacaactggagctgtaccttccaaagtttagcattgaagggagctaccagctggagaaggtgttaccttcactgggaatttccaatgtgttcactagccacgcagacttatctggcatctcgaaccactccaatatacaagtttccgagatggtgcataaggcggtggtcgaagtggatgagtccggtaccagggccgcagccgctacgggaacaattttcaccttcagaagcgcgagactaaattcacagcgcctggtatttaaccggccatttttgatgttcatcgtggacaacaatatcctctttctggggaaggtgaatcggccatag

SEQ ID NO: 11670 - DNA, 1731 bp, synthetic construct
  misc_feature 1..1731: note = source = /note="Description of Artificial Sequence: Synthetic coding sequence"
  source 1..1731: mol_type = other DNA
atgattgtattcggatgggccgtctttctggcgtcgcgctcccttggtcagggtttgcttcttaccttggaggagcacattgcgcacttcttaggaacagggggagccgcaaccacaatgggaaatagttgcatctgtagggacgactcggggacagacgatagtgtggatacccaacagcagcaggcagagaactcagccgtccctactgctgacactagaagtcagcctagagaccccgttcgccctcccaggcgtggcagaggaccccacgagcccagaagaaagaagcaaaacgtcgatgggctggtgctcgacaccctggccgtgatcagaacactagtcgacaacgatcaggaacctccttattcaatgattaccctccacgagatggccgaaaccgatgagggctggctggatgtggtccagtccttaattcgcgtgattccattggaggaccccttgggtccggcagtgattacgctgttgctcgacgagtgccctttgcccacaaaggacgctctgcagaaactcaccgaaattcttaacctgaacggagaagtggcctgtcaggatagctcccatcccgcaaaacaccgaaacaccagcgctgttctcggatgtctggcagagaagctcgccggtcccgctagcattgggctgctttcccctggcattttggaatacctgttacagtgcctgaaactgcagtcccaccccaccgtcatgctttttgccctgattgcacttgagaagttcgcgcagaccagcgagaataaactgacgatctctgagagcagcatttcagaccgcctggtaaccctcgaatcctgggcaaatgacccggactacctgaaaagacaggtcggcttctgcgcacaatggagcctagataatctgtttctgaaagagggcagacagctgacttacgaaaaagtgaatttaagttccattagggccatgctgaactcgaacgacgtctccgagtacctgaagattagtccacatggactcgaggcaagatgtgatgcctcctcttttgaatcagttagatgtactttctgcgtggacgctggagtgtggtactacgaggtgactgtggtgacttccggcgtgatgcaaattggctgggccactcgcgactccaagttccttaaccatgaggggtatggtattggagatgatgagtattcctgcgcctacgacggctgccgacagcttatctggtataacgcccgtagtaaaccccacatacacccatgctggaaggaaggcgataccgtgggttttctattggatctcaacgagaagcagatgatattctttctgaatggcaaccagctgccccctgaaaagcaagtcttctcttccaccgtttcaggattttttgccgctgccagcttcatgtcctaccaacaatgcgagtttaatttcggagccaagccctttaaatatccaccaagcatgaaattcagcacgttcaacgattacgcatttctgacagccgaagagaagatcatcctcccacgccaccgtagactggctctgctcaagcaggtctccattagagagaattgctgcagcctgtgctgcgatgaagttgctgacacccaactaaaaccctgcggtcacagcgatttgtgcatggattgtgcattacaactggagacctgtccactctgtcgaaaagagattgtgtcacgcattaggcaaatctcgcacatttcctag

SEQ ID NO: 11671 - DNA, 1359 bp, synthetic construct
  misc_feature 1..1359: note = source = /note="Description of Artificial Sequence: Synthetic coding sequence"
  source 1..1359: mol_type = other DNA
atggccgacatgcatcgcggttacgccgattccccctccaaagctggggcagcaccatacgtgcaggcattcgacagtttgttagccggtcccgttgcagaatatctcaaaattagcaaggagattggtggggatgtccaaaagcacgccgagatggtccacacgggcctgaaactggagcgggctctactcgtcactgcgagccagtgccagcagccagctgaaaataaactgtccgacctcctggcccctattagcgaacagatcaaagaggttattactttcagagaaaaaaatcgaggaagcaaactctttaaccacctttctgctgtgtctgaaagcatccaagcactcggatgggtggccatggcccctaagcctggcccatacgtgaaagagatgaacgacgccgctatgttttacaccaacagggtcctgaaggagtacaaagatgttgataagaaacacgtggactgggtcaaagcttacctgagcatctggacggagttacaggcctatataaaggagtttcatactactggcctcgcatggtctaagacaggtccagtggcaaaggaactgtcgggccttcctagcggcccatctgcgggaagctgcccaccgccaccaccaccttgtccgccaccgccaccggtgagcactatatcttgttcatatgaaagcgctagtcgaagctctctgtttgcacagattaatcagggtgagagcatcactcatgctttaaaacatgtgtcggacgacatgaagacgcacaagaaccccgctcttaaagctcagagcgggccagtgcggagtggtccaaaacccttcagcgccccaaaaccgcagacaagtccctcgcctaagcgcgctacaaagaaagagcccgcagttttggagctggagggtaagaagtggcgggtggagaaccaggagaacgtttccaatttggtcatcgaggatacggaactaaagcaggtggcttacatctacaaatgcgtgaataccacattacaaatcaagggtaagatcaacagcattacagtcgacaactgtaaaaagctgggactggttttcgatgatgtggtgggaattgttgagatcattaattctaaggacgttaaggtccaggtgatggggaaggtgcctacaatttcaattaataagactgatgggtgtcacgcctacctgagcaagaactcgctggattgcgaaatcgtgagtgcaaagtcctctgaaatgaatgtgctgatcccaaccgaggggggtgattttaacgaattccctgttccagagcagtttaagaccttatggaatgggcaaaaactagtaaccactgtgaccgagatcgcaggatag

SEQ ID NO: 11672 - DNA, 1533 bp, synthetic construct
  misc_feature 1..1533: note = source = /note="Description of Artificial Sequence: Synthetic coding sequence"
  source 1..1533: mol_type = other DNA
atgggcaggcccacgcagtggccgagcttgctattactcctgctgctcccagggcctccaccagtagcgggactcgaggatgctgcctttcctcatctgggcgagtccttgcagccattgcctagagcctgccctctgcgctgtagctgccctcgagtggataccgtcgactgcgatggcctggatcttagagtgttccccgacaatatcacacgggctgcccaacatttgtccctgcagaacaatcaactgcaggagctaccttacaatgagttaagccgcttgtcaggcctgcggactctgaatctgcacaataacctgatcagctccgaaggacttcccgatgaggccttcgagtcattaactcaactccaacatctgtgtgttgcacacaataagttatccgttgcaccccagtttctgccaagatccctgcgagttgccgatctggccgcaaatcaagtgatggaaatcttccctctgaccttcggggagaaacctgccctccgatcggtttatctacacaacaatcagctgagtaacgccggtctgccgccagatgctttccggggatcagaggccatcgcaactttgagtttgagcaacaatcagttatcctatctccccccatcgttgccccctagtcttgagcggctgcacttacagaataatctgatcagcaaagttccaaggggcgcactgagccgccagacccagcttcgcgagctgtacctgcagcacaatcagctcactgactcaggcctggacgcaacaacattcagtaagttgcacagcctcgagtacctggatctatcccacaatcagctaaccacggtccccgcaggactgcctcggacgctcgcaattcttcatttagggcgtaaccgcattcgccaagtggaggcagctcgcctacatggagctcgaggcttgagatacttattgctgcagcacaatcagttgggcagctccggccttcccgcaggggcattgcgtccactccgcggattgcatactctacatctgtatggaaacggcctggaccgcgtcccacccgcactcccaaggcgtctaagggctttggtgttgccccacaatcacgttgctgcactgggagccagagacctcgtggccactcccggattgaccgaactcaatcttgcttacaaccgcctcgcatctgccagagtgcaccatagagcttttcggagactccgggcacttaggtcactagatctagccggaaaccagcttactcgtctgccaatggggttaccaaccggcctacgcaccctacagctgcagaggaatcaactgcgcatgctggagccagaaccgctcgctgggctggatcagcttagggaactctcattggctcacaacagactaagagtgggcgacatcggacccggaacctggcatgagcttcaggcgttgcaggtccgccaccgattggtgtcccataccgtgcccagggccccaccctctccctgtctgccctgccacgtacctaatattttggtgtcgtggtag

SEQ ID NO: 11673 - DNA, 114 bp, synthetic construct
  misc_feature 1..114: note = source = /note="Description of Artificial Sequence: Synthetic coding sequence"
  source 1..114: mol_type = other DNA
atgaactctaccctgaacttttttatccagtcgtataataacgctagcaatgatacctacctctaccgcgtccagagactgattcgctcccagatgcagcaagtccactgctag

SEQ ID NO: 11674 - DNA, 1266 bp, synthetic construct
  misc_feature 1..1266: note = source = /note="Description of Artificial Sequence: Synthetic coding sequence"
  source 1..1266: mol_type = other DNA
atggggagacccacccagtggccatcacttctgctactcctcctgttacccggaccgccaccggttgctggcctggaagatgctgcgttcccccatctgggagaatctctgcaacccttacccagagcttgtccactccgctgttcctgtccacgcgtggataccgtggactgtgacggcctggacttacgggtgtttcctgataacattaccagagctgcacagcacctctccctgcagaacaaccagctacaggagctcccctataacgagctcagtaggctgagcggactccgaactttgaacctgcacaacaacctaattagctcagaaggcctccctgatgaagcctttgagtcccttacacagctccagcacttatgtgtagctcataataagaataacttgatttcgaaagtgccacggggagcgttatctcgccaaacccagctgcgggagttatatttgcaacataatcagctgacagatagtggcttagacgctaccacattttctaagcttcacagtctcgagtacctggatctgtcgcacaatcaactaactaccgtccccgcaggcctcccaaggacgttagccatcctccacctcggccgaaatcgtattcgccaagtcgaggcggctcgactccatggggcacgtgggctgcgctatctacttctgcaacataaccagcttggcagctccgggctgcctgcaggtgccttgcgtccactccgaggtcttcacacattgcacctctacgggaatggattggacagggtgccccctgccttgcccagacgcctccgggctctggttcttccccataatcatgtggcagccctgggggcaagagatcttgtggccacgcccggtctcacggagctaaatcttgcatataacagattggcatcagcaagggttcatcacagagcattccggcgacttcgggcactgcgcagtctggacctggcaggtaatcaactaacacgactcccaatgggactacccaccggtctccggaccctccagctccaacgaaatcagctccgtatgttagagccagagcccctcgcaggcctcgaccagctgcgcgagttaagccttgcccataaccgactcagggtgggcgatattgggcctgggacctggcatgagttgcaagccctgcaggtccgccaccgtctcgtgagtcacacagtccccagggctccaccttccccctgtcttccctgccatgtgccaaacatactggtctcctggtag

SEQ ID NO: 11675 - DNA, 993 bp, synthetic construct
  misc_feature 1..993: note = source = /note="Description of Artificial Sequence: Synthetic coding sequence"
  source 1..993: mol_type = other DNA
atgagttcttggagtaggcagcgccctaagagtccaggcggtattcagccccatgtctcccggaccctctttctgctcctcctcctggccgctagtgcctggggcgtgacgctgtcacctaaagactgtcaagtattccgtagtgatcacggatccagcatctcttgccagccaccagccgagatccctggatacttacccgctgatactgtgcatttggctgtggagttttttaacctaacgcacctaccagcgaatctgctccagggggctagtaagcttcaagaactacatctttccagcaatgggctggagtccctgtccccagaatttcttagacctgtgccccagctgagggtgttggatctcacaagaaacgccctcgttctgaaggaaaaccaactagaagtgctggaggtgtcatggcttcacgggttgaaagcattggggcacttggatttgtccgggaaccggttacgtaagctccctccagggctcttagcgaatttcacattactgcggactctagacctgggagagaaccagctggaaacactgcctccggacctgctgcggggtcccctgcagcttgagaggctgcatctggagggaaataagctgcaggtgctgggcaaagatctgttgcttccacagccggacctgaggtacctgttcctcaacggcaacaaacttgccagagtcgcggctggagcatttcagggtctcaggcaattggacatgctagatttaagcaacaacagtctggccagcgtgccagagggactatgggctagcctgggccagccgaactgggatatgcgggatggattcgatatttccggaaatccgtggatatgcgatcaaaacctttcggatctctaccggtggctgcaggcccagaaagataagatgttctcccaaaacgatacccgctgcgcaggccctgaagccgtcaaggggcagacactgctcgcagtcgctaaatcccagtag

SEQ ID NO: 11676 - DNA, 1815 bp, synthetic construct
  misc_feature 1..1815: note = source = /note="Description of Artificial Sequence: Synthetic coding sequence"
  source 1..1815: mol_type = other DNA
atgatgagggccgtctgggaagccctggcggcattggccgcagtcgcatgtcttgtgggcgctgtgagggggggacctgggctgtctatgtttgctggtcaggccgcacagcccgacccttgtagtgacgaaaatggccaccccaggaggtgcattccagattttgttaacgctgctttcggcaaagacgtgagggtgtcctcaacttgtggaagacctccagccaggtattgcgtggtatcggaacgaggtgaagagcgcctgaggagctgccacctctgtaacgcctctgaccctaaaaaggcccacccaccagcgtttttgacagatctcaacaacccgcacaacctcacatgttggcaatcagagaactaccttcagtttccgcacaacgtgaccctgactttatctctaggtaaaaaatttgaggtgacttatgtatcactgcagttctgctcacccagaccagagtctatggcaatatacaagtcaatggattacggacgcacatgggtgccgttccagttctattccacccagtgccgaaagatgtataatcgaccgcacagggcacccattaccaagcagaatgaacaggaggcagtctgtactgattctcacaccgatatgcggcctctctccggagggctgatcgctttcagcactctggacgggcgacccagtgcacatgatttcgacaattcaccagtgctccaggattgggtgacagccaccgacatccgtgtggccttttctcggcttcatacatttggtgatgaaaatgaggacgattctgaactcgctcgagattcgtatttctacgccgtcagcgacctacaggtaggcggtaggtgcaaatgtaacggccacgctgccaggtgtgtgagagatagagatgacagcctggtttgcgactgcaggcacaacaccgccggaccggaatgcgatagatgtaaacccttccactacgatcggccttggcaacgggctaccgccagagaggcaaatgagtgtgtggcatgtaattgtaacctgcacgcgcgtagatgtcggttcaatatggaattgtataagctgagtggcaggaagtcaggcggagtgtgtctcaactgtaggcacaatacagccggaaggcattgccattactgcaaggagggttactatcgggatatgggcaagccaatcacccacaggaaggcctgtaaagcatgcgactgccatcctgtcggcgcagctggcaaaacttgcaaccagacaaccggccagtgcccctgtaaagacggagtcaccggcattacttgcaatcgctgtgccaaaggctatcagcagtccagaagtcccatagcaccctgtattaagatacctgtcgctccacccaccactgccgcttccagcgtcgaggaacccgaagactgtgatagctactgcaaggcctcaaagggaaaactcaagatcaacatgaaaaagtactgtaaaaaagactatgccgtccagatccatatcctcaaggccgataaagcaggcgattggtggaagttcacagtaaatattatctcagtctataaacagggaacctcgcggatcagaaggggcgaccagtcactgtggatcaggtcacgcgatattgcctgtaagtgcccaaaaatcaagcccctcaagaaatacctccttcttggcaatgccgaggatagcccagatcagtcaggaattgttgcagacaagtcttcacttgttatccaatggcgcgacacttgggccaggcgccttagaaaatttcagcagcgggagaaaaaagggaagtgtaagaaggcctag

SEQ ID NO: 11677 - DNA, 948 bp, synthetic construct
  misc_feature 1..948: note = source = /note="Description of Artificial Sequence: Synthetic coding sequence"
  source 1..948: mol_type = other DNA
atggggcaagacagagaagaaactaatatcgagctgctcgtgtgcaactacgaacctcccggaaatgtgaaaggtaaacgcccataccaagagggcacaccctgctctcagtgtccctcagggtatcattgtaaaaactcactttgcgagcccatagggagtccagaagacgcacaggacctaccttatctggtgactgaggcgccttcctttcgggcaacagaagcttcggacagcagaaagatggggacaccatcgagtctggccacgggaattccggctttccttgtgacagaggtatccggaagcttagccaccaaggccctgccggcagttgaaactcaagcacctactagtctcgccacaaaagatcctccttctatggccaccgaggcaccaccctgtgttacaactgaagttcctagcattctcgcagcacactctctaccgagcttagacgaagagccagttacgttcccaaaaagcacgcatgtccctataccaaagtctgcagataaggtcacagacaagactaaagttccgagtcgaagcccagagaactctctggacccgaagatgtctcttacaggggcaagagaattactgccccatgcgcaagaggaagctgaggccgaagctgagttgccaccatcgtccgaggtactagcttctgtgttccctgctcaggacaagcccggagaacttcaagccaccttggaccacactggacatacctccagtaagtctctgcccaacttcccaaatacaagcgcaaccgcaaacgccactggaggccgtgccctggccctgcagtcgtctctaccgggagccgaaggaccagataagcccagcgtcgtgtccggtctcaattctggccctggccacgtgtggggcccactgctgggactcctgcttcttccacctctcgttctagccggtatattttag

SEQ ID NO: 11678 - DNA, 207 bp, synthetic construct
  misc_feature 1..207: note = source = /note="Description of Artificial Sequence: Synthetic coding sequence"
  source 1..207: mol_type = other DNA
atgcaggtttcaactgcagctctcgccgtgctgctctgcacaatggccctgtgcaatcaggtgctgtctgctcctctggcggcagatacccccaccgcttgttgtttcagttacactagtcgccagataccccagaactttattgctgactatttcgaaacatcttctcagtgcagcaaacctagcgtgatggctgccccagggtag

SEQ ID NO: 11679 - DNA, 3369 bp, synthetic construct
  misc_feature 1..3369: note = source = /note="Description of Artificial Sequence: Synthetic coding sequence"
  source 1..3369: mol_type = other DNA
atgagtctacaggaaatgttcagattccctatgggtctgctgctcgggtccgtgctgctagtggccagtgcgccagccaccctggaacccccaggatgctccaataaagaacagcaggtgacagtgtcccacacctataagatagatgtgcctaagtctgcattagtgcaagtagatgccgacccccagccactcagtgacgacggtgctagtctgctcgctttgggagaagcgagggaagagcaaaatatcattttccgccacaacattagactccagactcctcaaaaggactgtgaactcgccggtagtgtccaggatctgctcgccagggtgaagaaactagaagaagaaatggtagagatgaaagagcagtgcagcgcccaaagatgttgtcaaggcgttactgacctcagcaggcactgttcaggtcacggaacattcagcctagagacatgtagttgccactgtgaagagggcagggaaggtcctgcctgtgagagattagcctgtcccggagcctgttctggacatgggagatgtgtcgacgggagatgtttgtgtcatgagccttatgtgggtgcggactgcgggtaccctgcctgtccagagaactgctctggacacggggaatgcgtgcgcggagtctgtcaatgtcatgaggatttcatgagcgaagactgtagcgagaaacgctgtcccggagattgttccggacacggattctgcgatactggtgaatgctattgcgaggaggggttcactggactcgactgcgcccaggttgtaactcctcaggggctgcagcttctgaagaataccgaagatagcttgctagtatcttgggaaccttcatcacaggttgaccattatctgctgtcctattaccccctgggtaaggaactgtcagggaagcaaattcaggtccccaaagagcagcatagctacgagatcctcgggttgctgcccggtaccaagtacattgttacccttaggaacgtaaagaatgaagtgtcatcctcacctcagcatctgctcgctacaactgatctggctgtcttagggaccgcctgggtaaccgacgagactgaaaacagcctcgacgtagaatgggagaacccctccactgaagtggactactacaaattgaggtacggacctatgaccgggcaggaagtggcggaggtgactgtcccaaagagcagcgatccaaagtctagatacgacatcaccggcctgcacccagggactgagtacaagataactgtagtgccgatgcggggtgaactcgagggcaagcccattctgcttaacgggagaacagaaattgacagccctacaaacgtggtgaccgatcgcgtgactgaagacacagcaacagttagctgggacccagtgcaggcagttattgacaaatacgtcgtgcgctatacatccgctgatggcgacactaaggagatggccgtgcataaagatgaatcttctactgtgcttactggccttaaacccggtgaggcctataaagtgtacgtgtgggcagaacggggaaatcaggggagcaaaaaagctgacacgaacgcactcaccgagattgacagccctgctaatctggtcacagatagagtcaccgagaacacagctacgattagttgggatcctgtacaggccacaattgataggtatgtggtcagatatacctcagcaaaggatggagaaacacgagaggtaccagtgggcaaggagcaatcttctaccgtgttaactggtctcagaccgggtgtcgaatacaccgtccatgtatgggcgcagaagggcgcacaagaatccaagaaagccgatacaaaagctcagaccgacatcgattctccacagaacttggtcaccgattgggtgacagaaaatactgcaacagtgagttgggaccctgtgcaggcgacaatcgaccgctacgtggtgcactacacatctgccaatggggagaccagggaggtgcctgtcggtaaggagcagagcagcactgtgcttaccgggctgcgccctggcatggaatataccgttcatgtgtgggcccagaaaggcaatcaggagagtaaaaaagcagacacaaaggcacagacggagatagacggccctaaaaatttggtaaccgattgggttactgagaatatggctacagtgagctgggatcctgtacaggcaactatcgacaagtacatggtgaggtatacaagcgctgacggggaaactcgcgaagtacccgtaggcaaggaacattctagcactgttctgaccggactgagaccgggtatggagtatatggttcacgtctgggcccagaagggggctcaggaatctaagaaggcagataccaaggcccagaccgaactggatccaccgagaaacttacgcccatcagccgtgacccagtctgggggaattctgacttggactcctccaagcgctcaaattcacggctacatcctcacctatcagttccctgacggaaccgtcaaagaaatgcaactggggcgagaggaccaacgcttcgctctgcaaggtctcgaacagggggctacctaccccgtgagccttgtggctttcaaggggggtcgccgatcccggaatgtcagcactactctttccacagtcggggctcggtttcctcatccttctgattgcagccaagttcagcagaattccaacgccgcaagcggactctacacgatctacctgcatggcgacgcgtctcgaccactgcaagtctattgcgacatggagacagatggagggggatggattgtcttccaaagacgcaataccggacaactggacttttttaaacgttggaggtcttatgttgaagggttcggtgacccgatgaaagaattctggttgggcctggataagctgcataatttaactactggtacccctgcaagatatgaggttcgcgtggacttgcagaccgccaatgagtccgcctacgctatctatgactttttccaggttgccagcagtaaggagcgatacaagctgactgtaggcaaatatcgcggaactgccggagatgccctgacttatcacaatggctggaaattcaccacatttgatcgggataacgacatcgctctttccaattgtgcactaacacaccacggaggctggtggtataagaactgccacctcgctaatcccaacgggcgatacggcgaaacaaagcattccgagggggtaaattgggagccctggaagggccatgagttttcaattccatatgtggagctgaagatccggcctcacggctactcccgggaacctgtccttggtagaaagaaacgaacactccggggacggctgagaaccttttag

SEQ ID NO: 11680 - DNA, 897 bp, synthetic construct
  misc_feature 1..897: note = source = /note="Description of Artificial Sequence: Synthetic coding sequence"
  source 1..897: mol_type = other DNA
atgctgcaccctgagacttcccctgggcgtgggcacctgctcgccgtcctcttggctttactgggcaccgcctgggcagaagtgtggccccctcagctccaggagcaggctccgatggcgggagcactgaatagaaaagagagctttctactgctctccttgcacaacagactcagatcatgggttcagcctccagccgcagacatgaggcggctggattggtcagactcactcaactggctgaagccaggccctttgtggaatcctaaccctgaaccgggtgtgcggcctgtcgctcatccagccagcggactcgaacacgccgcttgtccacgtgcatggagaccactgcttaaatggtcactttggttcgccgaaggtcagcgctactcccacgctgcaggtgaatgcgcccgtaatgccacctgtacacattatacacagctcgtgtgggctacaagttctcagctcggctgcggcaggcacctctgcagcgccggacaggccgctatcgaggcctttgtgtgcgcgtactctcccaggggcaactgggaagtgaacggtaagactatcgtgccttacaagaagggcgcttggtgcagtctgtgcacggcaagcgtcagcggctgcttcaaggcttgggaccacgcgggaggcctttgcgaagtgcctaggaacccgtgcaggatgtcttgccaaaatcatggccgtctgaacatctcaacatgccattgtcattgccctccagggtataccggcaggtactgccaggtgcggtgtagcctgcagtgcgttcatggtcggtttcgcgaggaagagtgctcctgcgtgtgcgatatcggttatgagcccagcgtgccgccaaggtgcatatttccctccacgcctgtcacatag

SEQ ID NO: 11681 - DNA, 1728 bp, synthetic construct
  misc_feature 1..1728: note = source = /note="Description of Artificial Sequence: Synthetic coding sequence"
  source 1..1728: mol_type = other DNA
atggacttggtgctcaagcggtgtttacttcaccttgctgtgatcggcgctctgctggccgtcggggcaactaaagggagccaggtgtggggcggacagccggtgtatcctcaggaaaccgatgacgcgtgcattttccctgacgggggtccgtgcccatcagggtcgtggtctcagaagcgctcatttgtgtacgtgtggaagacctggggccagtattggcaagtactgggcggacctgttagtggcctgagcattggaactgggagagcaatgctcggaactcacaccatggaagtaactgtttaccacagacgcggttctcggtcctacgtgcctcttgcacacagtagctctgccttcaccatcaccgatcaggtccctttcagcgtctctgttagccagctgagagcacttgacggtggaaataagcactttctgcggaatcagcctttgactttcgccttgcagctacacgacccatccggatacttagctgaggctgatttgtcctatacctgggacttcggagattccagtggtaccctgattagcagggcactggttgtaactcacacatatttggaaccaggacctgtgacagcccaggtggtgctccaagccgcaatccccctgacatcttgcgggtcctcccctgtgcccggtaccacagatgggcatcggccaaccgcggaagccccaaacaccactgccggacaggtcccgactaccgaggtggtgggtacgacgcctgggcaggcaccgacggccgagccatccgggaccacatccgtgcaggtgccaacgacagaggtaattagtacagctcccgtccaaatgccaacagctgaatcgacagggatgacaccagaaaaagtgcccgtgtcagaggtaatgggaacaactctggccgaaatgtccacgccggaggccacaggaatgacaccagcagaggtctccattgtagtccttagcgggacaaccgccgcacaggtgactactaccgagtgggtggagacaaccgctcgcgaattgcctatacctgagcctgagggcccagacgcctcttctatcatgagcaccgagagcatcactggttccctgggcccattgctcgatggcacggctacactgagactagtaaaaagacaggttcctttagactgcgtgctgtatcgctatggctccttttccgtcacactcgacattgtgcaaggaatcgagtcagccgagatcctccaagctgtcccatcaggagagggggacgcctttgagcttacggtcagttgtcaagggggactccccaaggaggcatgtatggagatttcatcacccggatgtcagcccccagcccagcggctgtgtcagccggtcctgcctagccctgcatgccagctcgtcttacaccagatcttgaaaggaggtagcggaacctattgcctcaacgtgtccctcgccgacacgaacagccttgccgtggtctctacacaactaattatgcccggacaagaggccggtttgggccaagtccccctaattgtgggaatcttgctggtattaatggccgttgtcttagcttcattaatttaccggcgtagattgatgaagcaggattttagcgtcccccagctcccacattccagttcacattggttgcggctacccaggatattctgttcgtgcccaattggagaaaattctcctttgctttctggacagcaggtttag

SEQ ID NO: 11682 - DNA, 330 bp, synthetic construct
  misc_feature 1..330: note = source = /note="Description of Artificial Sequence: Synthetic coding sequence"
  source 1..330: mol_type = other DNA
tgatcggggcagagtctcaagagcctgaacgcaagcagcggacatctcgcattgatcctatcttcgatcttcggattactgttgcttgtgttgttcatccttttcttgacatggtgcagagtccagaagcagaagcatctcccgctgcgggtgagcactcggcgacggggatcccttgaggagaatttatttcacgagatggaaacgtgtttaaagcgcgaagacccacatggcacccggacctctgacgacactcccaatcatgggtgtgaggatgcttcagacactagcctgctgggcgtacttcccgcttcagaggccaccaagtag

SEQ ID NO: 11683 - DNA, 312 bp, synthetic construct
  misc_feature 1..312: note = source = /note="Description of Artificial Sequence: Synthetic coding sequence"
  source 1..312: mol_type = other DNA
atgtcagggagaggaaaagggggtaagggattgggcaaaggtggggcaaagcggcaccggaaggtccttcgcgataacatacagggtataactaagcctgccattcgacggctggcacgacgagggggagttaagaggatcagtggactaatttacgaggaaactaggggggtcctgaaagtcttcctggaaaatgtgattagagacgcggtgacttataccgaacacgctaaaagaaagacagtgacagccatggacgtggtctatgctttaaagagacagggacgcaccttatacggttttggagggtag

SEQ ID NO: 11684 - DNA, 2889 bp, synthetic construct
  misc_feature 1..2889: note = source = /note="Description of Artificial Sequence: Synthetic coding sequence"
  source 1..2889: mol_type = other DNA
atgctgagaaggcccgctcccgctctggcacctgcggctagactgttgttggcagggctcctgtgtgggggaggggtctgggccgctagggtcaacaaacacaagccatggttggagcctacataccatggaattgtgaccgagaacgataataccgtcctgttagacccgcctcttatcgccctggacaaggacgccccactgcgcttcgccgagagttttgaagtgactgtaactaaagaaggcgagatatgtggatttaaaatccacggacagaacgtgcctttcgacgccgtggtggtggataagagcacaggcgaaggcgtaatcagatccaaggagaaactcgattgtgagctacaaaaggactattctttcactattcaggcgtacgattgcggaaagggtcccgatggcacgaatgtcaagaagagccataaggccacggttcatattcaggtgaatgatgttaacgagtacgctcctgtgttcaaagaaaaatcttacaaagctacggtgatcgaaggaaaacagtatgattcaatcctgagagtggaggcagtagacgcagactgtagcccacaatttagccagatttgtagttacgagattattacacccgatgtgccattcaccgtagacaaggacggatacataaaaaatactgagaaattgaattacggtaaggagcaccagtacaaactcaccgtcactgcttacgactgtgggaaaaagagggcaacagaagatgtcttggtcaaaatttcaataaaacccacttgtacccctggatggcagggctggaataacagaatcgagtacgagccaggaaccggggcacttgcagtgttcccaaacattcatcttgagacatgtgacgaacccgtggcatcagtgcaagccactgttgagctggaaactagccacatcggcaagggttgtgacagagacacctacagcgagaagtctctgcaccgattatgtggcgctgcagcaggcacagccgagcttctgccaagtccatcaggctctcttaattggacaatgggcttgcccactgacaatggccacgattctgatcaggtgttcgaatttaacggcacgcaggccgtccggatccccgatggggtcgtgtcagtaagtccaaaagaacctttcaccattagcgtgtggatgcggcatggccctttcggacggaaaaaggaaaccatactgtgcagttcggataagaccgatatgaacaggcaccattacagtctctacgtccatggctgcagattgatctttttgtttcggcaggatccgtccgaggagaagaaatacagaccagctgagtttcattggaagcttaatcaggtctgcgatgaggagtggcaccactacgttctcaatgtggagtttccctctgtgaccctctacgtagacgggaccagccacgagccgttctccgtgacagaggattacccgctgcacccttctaagatcgagacgcagctcgtggtcggtgcttgctggcagggaggcgacttgcatatgacccagttcttcagaggcaatcttgccggactaacactgcgcagtggtaaattggctgataaaaaagtcatcgattgcctgtatacatgtaaagaaggactcgatctgcaagtcctggaggattcaggcaggggcgtgcagatccaagctcacccgtctcagctcgttctgactctggagggcgaggaccttggcgagctggataaggctatgcaacatatatcttaccttaacagccggcagtttcctacacctggcatccgacggttgaagataactagcaccatcaaatgtttcaatgaagctacatgtatatcagtccccccagtcgatggatatgtcatggttctccaaccggaggaacctaagatctcattgagcggtgtacatcactttgccagggccgcatctgagttcgaaagctccgagggagtgtttctcttcccagaattgcgcattattagcaccatcactagggaagttgaacccgaaggagacggggctgaggatcccaccgttcaggagtcgctcgtctctgaggagattgtacacgatctagacacgtgtgaagtcaccgtggagggggaggaactaaatcatgagcaggagagcctggaagtcgacatggccagactgcagcagaaaggaattgaggtcagcagctctgaactggggatgactttcacaggggtggacacaatggcatcttatgaggaagttcttcatctactgcggtatcgtaattggcacgcacgatcattgttggataggaagtttaagctaatctgttccgagttaaatggtcggtatatttccaacgagtttaaagtggaggttaatgttattcataccgctaaccccatggaacatgcaaatcatatggcggcacagcctcagttcgtccatcctgaacaccgcagttttgtggacctgtccgggcataatcttgctaatccgcacccttttgcagtggtcccctccacagcgacagtggtgatcgtagtttgcgtgagcttccttgtttttatgattatcctcggagttttccgcattagagctgcacacaggaggacgatgagggaccaagacaccggaaaagaaaatgagatggattgggatgattctgcccttaccatcacagtaaatcctatggagacctatgaagaccagcatagctccgaggaggaagaagaggaggaggaggaggaggagtctgaggatggtgaagaggaagatgacatcaccagcgctgaaagcgaatctagtgaggaggaagaaggcgaacaaggagaccctcagaatgctacacggcagcagcagctggaatgggatgattcgactttgtcctactag

SEQ ID NO: 11685 - DNA, 912 bp, synthetic construct
  misc_feature 1..912: note = source = /note="Description of Artificial Sequence: Synthetic coding sequence"
  source 1..912: mol_type = other DNA
atgttgcaccccgagacatcacctggacggggtcacttactcgctgtcttactagcattgctggggacagcctgggccgaagtatggccacctcagctgcaggaacaggcaccaatggccggagcccttaatcgcaaagagagcttcctgctcctgtctctgcataacaggctcaggtcttgggttcagcctcctgctgccgacatgaggcggctggactggtctgattctctggcacagctggcccaagcgagagccgctttgtgtggaactcctaccccgagtcttgcttcaggtttgtggcgcacgctgcaggttggttggaacatgcagctgttgccagccggtcttgtgagtttcgtggaagtcgtctctctgtggtttgccgaaggccagcggtatagccatgccgcaggcgagtgtgctaggaatgccacttgtacacattacacgcagttggtttgggccaccagtagccagctgggctgtggacggcacttatgcagcgctggtcaagccgcaattgaggctttcgtgtgtgcttatagcccacggggaaactgggaggttaatggaaagacgatcgtgccttataagaaaggtgcctggtgctccctgtgcacagctagcgtatcgggatgttttaaggcctgggaccacgccggaggtctgtgtgaggtgcctcgcaatccatgtcggatgtcctgccagaaccacggacggttgaacatatccacctgtcattgccactgtccgccaggatacaccgggagatactgccaggtacgctgctccttgcaatgcgtacatggcagatttcgagaagaggagtgctcctgtgtgtgtgacattggatacggcgaaccatctgtgcctcctcgctgtatttttccgagtaccccagttacctag

SEQ ID NO: 11686 - DNA, 1356 bp, synthetic construct
  misc_feature 1..1356: note = source = /note="Description of Artificial Sequence: Synthetic coding sequence"
  source 1..1356: mol_type = other DNA
atggaggcaaccggtactgatgaggtcgataaactgaaaactaagtttatctccgcctggaataatatgaagtacagctgggtgctgaagaccaagacctacttttcacgcaatagtcccgtcctgctcttaggaaagtgttaccacttcaagtatgaggatgaggataagacacttcccgctgagtctgggtgtaccattgaagatcacgttattgcaggcaacgttgaggaatttagaaaagacttcatctctcggatctggctcacctatcgggaggagtttcctcagatcgaggggtcagccctcactactgattgcgggtggggctgcacattacggaccggccagatgctgctggcacaggggcttatcctgcactttttgggcagagcttggacctggcctgatgctctgaatattgagaacagtgacagcgaatcttggacaagccataccgtaaagaagtttactgcaagttttgaggcgtcgttgtcaggcgagcgcgagttcaaaacccccacaatttccttgaaggagacaataggaaagtatagcgacgatcatgagatgcggaatgaagtttaccatagaaaaatcatctcctggtttggggatagtccgctagccttgtttggcctgcatcaattgatcgagtatgggaagaagagcggcaagaaggccggtgactggtatggtcctgcagtagtcgcccatatcctccggaaggccgtagaggaagccaggcatcctgacctccagggaataaccatctatgttgcccaagattgtaccgtctataacagcgacgtaattgacaagcagagtgccagtatgacatccgataacgccgacgataaggccgttatcatcctggttcccgtcagactcggcggtgaaaggacaaatacagactatctggaatttgtaaaaggcatattatccctggaatactgcgtggggattattgggggaaaaccaaagcagtcatactactttgccggatttcaggatgattctctaatctacatggaccctcattactgccagtcctttgtggatgtatctattaaagacttcccattggaaacatttcactgcccctctccaaagaaaatgagcttcaggaaaatggacccatcctgcactattggcttctactgtcgtaacgtgcaagactttaagcgggcatctgaagaaataactaagatgctgaagttttcttcaaaggagaagtatcctctgtttactttcgttaatgggcattcccgggactacgacttcaccagcactacaacaaatgaagaggacctgttctcggaagatgaaaaaaagcaaaagaaaaagaagaaatag

SEQ ID NO: 11687 - DNA, 1557 bp, synthetic construct
  misc_feature 1..1557: note = source = /note="Description of Artificial Sequence: Synthetic coding sequence"
  source 1..1557: mol_type = other DNA
atgcgtacatgggattaccggtggtccctggctcttgtcgctcagaccggcgtacactgctgcaacctcagctcacttcagcccttacccccacgctttaaaagattttcctgtcttagcctttcgtcaggatgggactatagcaactctgggaatatgaaaccgccactccttgtgtttatcgtgtgcctcctatggctgaaggactcccattgtgcgccaacttggaaagataaaaccgccatttcagagaatctgaagagcttcagtgaagtcggcgaaattgacgctgacgaagaggtaaagaaagctctaactggaatcaagcagatgaagattatgatggaaaggaaggaaaaggagcatacaaatttgatgtccacactaaagaagtgtcgtgaggaaaaacaggaggccctgaaactgcttaatgaagtgcaggagcatctggaggaggaggagcggctctgtagggagtctctggccgactcctggggcgaatgcaggagttgtttggaaaacaactgtatgcgtatttatactacgtgccagccctcttggtcttcagttaagaacaagatcgaaaggttcttccgcaagatctatcagttcctgttcccttttcacgaagataatgagaaggatttgcccatcagcgagaaactgatcgaggaagatgcccagctaacccagatggaggacgtgttctctcagcttaccgtggatgttaattcactgttcaatcgctcctttaacgtgtttagacaaatgcagcaggagttcgaccagacttttcagagccatttcattagcgacactgacctgaccgagccttatttttttcccgctttctctaaagagccaatgacaaaggcggacctcgagcagtgctgggacatccccaacttttttcaactattctgcaatttttccgtgtccatatacgaatctgtctcggagacaattaccaagatgctcaaagccatagaggacttaccaaaacaggacaaagccccagaccacggcggattgatctcaaagatgctgcccggtcaggatcgaggcctgtgtggggaacttgaccaaaacttgagtagatgttttaagttccatgagaagtgtcagaaatgtcaggcccatctttctgaagattgtcccgacgtgcctgctcttcacacagagttggacgaggccatcaggctggttaacgtgtctaatcaacagtacggtcagatattacagatgaccagaaagcacctagaagacacggcttatctggtggaaaagatgcggggtcaattcgggtgggtcagcgaattggccaatcaggctcctgagactgagattatatttaactctattcaggtggttcctcgtatccatgaaggcaacatttcaaaacaggacgagacaatgatgacggatctttcgatcctgccctcatccaactttacactgaagatacccctggaggagagtgcagagtccagcaactttatcggatatgtggttgccaaggctctccagcacttcaaagagcatttcaagacctggtag

SEQ ID NO: 11688 - DNA, 1716 bp, synthetic construct
  misc_feature 1..1716: note = source = /note="Description of Artificial Sequence: Synthetic coding sequence"
  source 1..1716: mol_type = other DNA
gtcgagatgcggaagtggtcaagcgagccaggtccagaacccgatactgtcgaagcagtgattgaatacatgtacacaggaagaatacgggtaagcacgggatcagtgcacgaggttctggagctggccgaccgttttttactgatacggctcaaagagttctgtggcgagttcctgaagaaaaaactgcacttgagcaactgcgttgccatacatagcctggcccacatgtacaccctctctcaactagccttgaaagctgcggatatgattagaaggaacttccataaagtgatccaggacgaggagttttatacccttccttttcatttgattcgcgactggcttagcgatctcgaaatcaccgtcgattcagaggaggtgctctttgagaccgtccttaagtgggtgcagagaaatgcagaagaacgggagcgatactttgaagagctgttcaaactgctgagactgtcccagatgaaaccgacatacctaaccaggcatgtgaagcctgagagacttgtggccaacaacgaggtgtgtgtgaagcttgtcgccgatgcagtcgagcggcacgcgctgcgtgctgaaaacattcagtctgggacttgccaacatcctacctcccacgtgagcttgctgccaaggtacggacagaatatggatgtgatcatggtgatcggcggtgtctccgaaggcggtgattacctttctgagtgcgttgggtactttgtggacgaggataggtgggtgaacctaccgcatattcacaaccacctggatggtcatgcagtggcggtgactgagtcatacgtgtatgtggccggatcaatggagccgggtttcgcgaagacagtcgagcgctacaatcccaatctcaacacctgggagcacgtctgtagccttatgacacgcaaacattcattcggcctcactgaagtgaagggcaaactatattcaatcggaggtcacggcaacttcagtccaggttttaaggacgtgacagtgtacaatcctgagttagataaatggcacaacctggaatcagccccaaaaattctccgggacgtaaaagcactagcaattgaggacaggttcgtgtacatcgccgctcgaactcccgtcgatagggataccgaggatggactgaaagctgtcataacctgctacgatactgaaacaagacaatggcaagacgtggaaagtctacctctgattgataactattgtttctttcagatgtcagtagtgaacagcaacttctatcagactgccagctgctgtcccaaatcatattgcctggagaatgaggaagccgtgcgtaagattgcttcgcaagtgtctgatgagatcttggaaagtctgccacccgaggttctttctatcgaaggcgcagcgatttgttattacaaagacgatgtgttcattatcggcggatggaagaactccgatgacatcgataaacagtatcggaaggaggcgtacagatactgcgcagaacgcaaacgctggatgttactgccgccaatgccccagccgcgttgcagagcaactgcctgccatgtccggattccataccggtatctacacggaacacagcgttatcccatgccccagaatctgatgtggcagaaagatcgcatccgccaaatgcaggagatccatagacatgctctgaacatgcgaagggttccgtctagccagatcgagtgctag

SEQ ID NO: 11689 - DNA, 729 bp, synthetic construct
  misc_feature 1..729: note = source = /note="Description of Artificial Sequence: Synthetic coding sequence"
  source 1..729: mol_type = other DNA
atgctcaagaaaatatctgttggagtagcaggggatctcaacaccgtgactatgaagctcggatgtgtcctgatggcctgggccctgtacctttctttgggggtgttgtgggtggcacaaatgctcctagcggctgggtgccacgcagaactgttcccggcaccaatactgcgagccgtgcccagcgcagaaccgcaagctgggagcccaatgacgctcagttgccaaaccaagctgcctctgcaaagatcggccgcaaggctgctcttttctttctataaagacggcaggatagttcaatctagaggactgagttctgagttccagattccgactgcctccgaagatcactccggcagctactggtgcgaggccgcaactgaggacaaccaggtttggaaacagtctccacaacttgagatccgcgtgcaaggagcatcaagtagtgcagcacctccgacattaaatcctgcccctcaaaagagtgcagcacctggaactgctcctgaagaggcacccggacccttaccacccccacctacaccctcaagtgaggacccaggcttcagtagtcctctggggatgcccgatccccatctctatcatcaaatgggcctcctccttaaacatatgcaagacgtgagggtcctgctgggccatttgctaatggaattgagggaattgtctgggcatagaaagcctggtaccactaaagcaaccgctgaatag

SEQ ID NO: 11690 - DNA, 1392 bp, synthetic construct
  misc_feature 1..1392: note = source = /note="Description of Artificial Sequence: Synthetic coding sequence"
  source 1..1392: mol_type = other DNA
atgtacgttagcaccagagagaggtacaaatggctgagattttccgaagactgcctgtatttaaacgtgtacgcacctgcaagggccccaggggatcctcagctccccgtgatggtgtggtttcccggtggagccttcatcgtaggtgccgcatccagctacgagggcagcgacctggcggctcgagagaaggtggtgctggtgtttctgcagcaccgactggggatctttggctttctcagcacagacgactcacatgctcggggtaattggggactgcttgatcagatggcggcacttagatgggtccaggaaaacattgccgcattcggcggagatcctgggaacgtgaccctgttcggacagtcggcgggtgcaatgagtatctcggggttgatgatgtcccccctggcctcagggcttttccacagggctatctcgcagagcggcaccgcgctgttcagactttttatcactagcaaccccctgaaggtcgctaaaaaagtggctcatctggctggctgcaaccataattctactcagattctagtcaattgcctgcgggcactgagtggtacaaaagtgatgcgggtgtccaacaaaatgagatttctccaattgaacttccagcgagatcctgaggagataatttggtcgatgtcgcctgtggtcgatggcgttgtcatccccgacgacccactcgtgcttctgactcagggtaaagtgtcctccgtaccatacctattaggggtgaacaacctcgagttcaactggctgttgccctatataatgaaatttcccttgaaccgccaggccatgagaaaggaaactatcaccaaaatgctgtggtctacacgcacactgctcaacatcactaaagagcaggtgcccctggtagtcgaagagtatctggataatgtgaacgagcacgattggaaaatgctccgcaaccgcatgatggacatcgtgcaggatgctaccttcgtctacgctaccttacaaacagctcactaccatcgggacgccggactgccagtctatctgtatgaatttgagcaccatgcccgaggcattattgtcaagcccagaactgacggtgccgaccatggtgatgaaatgtactttctttttggagggccttttgcgacaggtttgagtatggggaaagagaaagctctgagcctgcaaatgatgaaatactgggcaaattttgccaggacagggaacccgaatgacggaaatctaccatgttggccaagatataataaagatgagaagtatctgcaacttgacttcaccacacgggtgggcatgaagctcaaggaaaaaaagatggccttctggatgtcactatatcagtcccagcggccagagaaacagcgtcagttttag

SEQ ID NO: 11691 - DNA, 1215 bp, synthetic construct
  misc_feature 1..1215: note = source = /note="Description of Artificial Sequence: Synthetic coding sequence"
  source 1..1215: mol_type = other DNA
atgttctaccacgcttacgatagctaccttgagaatgccttcccttttgatgaactgcgcccactgacgtgcgatgggcatgacacatggggaagcttctcactcaccctaattgatgccttagacactctcctgattcttggtaatgtgagcgaattccaacgggtcgtagaggtgctccaagacagtgtggactttgacatagatgtcaatgcctccgtatttgaaactaacatccgtgttgtggggggactgttgagcgcacacctcctgtcgaaaaaggcaggagttgaggtggaagctggatggccttgcagcggtcctctgcttagaatggctgaggaagccgctcggaaactactgcctgccttccagactcctaccgggatgccttacggaacagttaatctcctacacggagtgaatccaggcgaaactcccgtgacatgcacagctggtatcggcacctttattgtcgaatttgctacactctcgagtctgacaggcgacccagtgtttgaagatgtagcccgagtggcactaatgagactctgggaaagcagaagcgatatcggacttgttggaaaccacatagacgttctcaccgggaaatgggttgcccaggacgctggaatcggggctggggtggatagctacttcgaatacctggtaaaaggcgctatactattgcaggacaagaaattaatggccatgtttctcgaatataataaagctatcaggaactataccaggttcgatgactggtacctttgggtccaaatgtataaggggaccgtctcaatgcctgtctttcagagtttggaggcttattggcctgggctacaatccctgatcggcgatatcgacaacgccatgcggaccttcctgaactactatacagtctggaagcaatttggtggccttcctgagttttataatattccccagggatacactgttgagaaacgcgagggttatccactgagaccagagcttatcgaatctgcaatgtacctctacagggccacgggggatcctacccttctggagctgggcagggatgcagtggagagtattgagaaaatctctaaggtggaatgcgggtttgccaccgtttcagtctgcatggcccctagaacaggaaagtctttgccactcttgttgaagagtttgttcaagggccgagctcttggggtgctcacctaccagcactag

SEQ ID NO: 11692 - DNA, 1281 bp, synthetic construct
  misc_feature 1..1281: note = source = /note="Description of Artificial Sequence: Synthetic coding sequence"
  source 1..1281: mol_type = other DNA
atgggttggacagatacactggagagcgccgaggatatcttttggaaacaggcagacttcgggtacgccagggaacgacttgaagaaatgcacgtgctgtgccagccaaaggaaacaagtgacagctcccttgtgtgctcgagatatctgcagtactgtagagccaccaacctgtacttggatctaagaaatatcaaaagaaatcatgacaggttcaaggaagacttttttcagtccggagaaattggcggacactgtaaactggacattaggaccctgacctctgagggccaacgtaagagccctctccaatcatggtttgctgagctgcagagctacacccagttaaatttccggcctattgaagacgccaaatgcgatatcgtcatcgagaagccgacttactttatgaaactggatgctggcgtgaatatgtatcatcacttctgcgatttcattaacctctacataacacagcacgtaaataattccttctcaacggacgtgtacattgtgatgtgggacaccagttcctacggatatggcgacctattctccgacacttggaatgccttcacggactacgacgttatacacctcaaaacatacgattcaaagagggtctgttttaaggaagccgtcttctcattgctgcctcgaatgcgctacggcctgttctacaatactcctctgatctctgggtgccagaacacaggactgtttcgggcattcgcacagcacgtcttgcataggctaaatattacacaggagggacccaaggatggcaagatacgcgtgaccattctggcgagatcgactgagtacagaaaaattcttaatcaaaacgagctggtgaatgccttaaagacagtgtctacgtttgaggtgcagatagtcgactacaaataccgggagctgggctttctcgatcagctcaggatcacacataataccgacatcttcatcggcatgcacggtgccggactgactcacctgctatttctccctgattgggcagctgtcttcgaattgtataactgcgaggacgagagatgctacttggatcttgctcggctgcgtggcgtccattacataacatggagaagacagaacaaggtgtttccccaagataaagggcaccatcctactttgggcgaacaccctaagttcaccaactatagtttcgacgtggaagagtttatgtacttggtgctgcaagctgcggaccacgtgctgcagcatcccaagtggccgtttaaaaaaaagcatgatgagctctag

SEQ ID NO: 11693 - DNA, 1098 bp, synthetic construct
  misc_feature 1..1098: note = source = /note="Description of Artificial Sequence: Synthetic coding sequence"
  source 1..1098: mol_type = other DNA
atgaagttgggctgcgtcctgatggcgtgggctctgtatctctcactgggcgtgttatgggtggctcagatgcttctggtggcctccagcttctctgcagcctctttcgagaccctgcagtgtgagggacccgtctgcacagaggagtcaagctgccacaccgaggatgatctcaccgatgcgagggaggctggattccaggtgaaggcttacactttctccgagccattccatctgatagtctcgtacgactggcttatacttcagggcccagcaaaacctgtatttgaaggggatcttctggtgctgcgctgtcaggcctggcaggactggcccctcacacaagtgactttctatcgcgatggctcagccctcggaccacctggtccaaatagagagttctcaattacagttgttcagaaagctgactcaggtcactaccactgttcgggcatctttcagagtcccggtcctggcattccagagacagctagtgtcgtagctataaccgtgcaggagctcttcccagcacccatccttagggcagtacccagtgctgagccgcaggccggttccccaatgacactctcctgccagactaaattaccactccagagaagcgcggcaagactgctgttttccttttataaagatggtcgcatcgttcagagtcgagggctgagcagcgagtttcaaatacctacagcgagtgaggaccactcagggtcctattggtgcgaggccgcaactgaagataatcaggtctggaaacagtcacctcagctggagattcgcgttcagggggcttcatctagcgcggcaccacccactctgaatcctgccccacagaaaagcgccgctcctgggactgcccctgaggaggccccagggccactcccaccaccacccacgcctagtagcgaggaccccggattctccagtccactgggtatgcctgatccccacctgtatcatcagatggggctgctgcttaagcacatgcaagacgtgagagtgttgctcgggcaccttctcatggagctgagagagttgagcggccatcggaaacccggtaccacaaaggcaacagctgagtag

SEQ ID NO: 11694 - DNA, 1407 bp, synthetic construct
  misc_feature 1..1407: note = source = /note="Description of Artificial Sequence: Synthetic coding sequence"
  source 1..1407: mol_type = other DNA
atgcggtggattctgtgttggtctctgacgttgtgccttatggcacagactgcgctcggagccttgcataccaagaggcctcaagtagtgaccaaatatggaaccctgcagggcaaacagatgcacgtcgggaagacccctatccaagtatttctgggcgtacctttctcacggccacccttaggaatactgagattcgcccctcccgaaccgcctgagccctggaagggtattagggatgcaaccacttacccgcctggatgtctccaggaaagctggggccagctggcctctatgtacgtcagtaccagagaacgttacaagtggttgaggttttctgaagactgtctttatctaaatgtgtatgcacccgctagagcacctggagaccctcagctcccagtgatggtatggttccctggaggcgctttcatcgttggggcagccagttcatatgaaggtagtgatttggccgcaagagaaaaggtcgtgctcgtgtttctgcaacaccggctaggaatctttggctttctctccacagacgatagccacgccagagggaactggggactgttggatcagatggcggctttacggtgggtccaggaaaacattgctgcattcggtggagaccccggaaacgtgactctattcggccaatccgctggcgctatgtcaatttcaggcctcatgatgtccccccttgcctcaggcctgttccatcgcgcaattagtcaaagtggcacggctctgttcaggctcttcatcacatctaaccccctgaaggtggccaaaaaagtcgcccacttagccggttgtaaccataactccacccagatactagtcaactgcttacgggctctctcaggcacaaaggttatgcgagtgagtaacaagatgcggtttctgcagctgaattttcagcgtgaccccgaagaaatcatttggagcatgtctcctgtcgtagacggagtggttattcccgacgacccccttgtattgctcacccaggggaaggtttcttcagtgccctatctgttaggcgtcaataacctggagtttaattggttgctgccatatattatgaagttccccttaaatcgacaggccatgaggaaggagacaataacaaagatgttgtggtccacgaggactctgctgaacattacgaaggagcaggttcccctggttgttgaggaatacttggacaacgtcaacgaacatgactggaagatgctgaggaatagaatgatggacattgtccaggatgctacttttgtatacgcgacccttcagacggctcattaccaccgggaaacaccgatgatgggaatctgccccgctggccacgctacaacacggatgaagagtacctgctcctggatcttaccccaggagtgggcttag

SEQ ID NO: 11695 - DNA, 756 bp, synthetic construct
  misc_feature 1..756: note = source = /note="Description of Artificial Sequence: Synthetic coding sequence"
  source 1..756: mol_type = other DNA
atgtcgagttacggttacggagatctcttcagcgacacctggaacgcgtttactgactacgacgttattcacctgaagacgtatgacagtaaaagagtttgttttaaagaggccgttttctccttactcccaagaatgcgctacgggctgttctacaacacgccattgatctcaggctgccagaacaccggtctgtttcgcgctttcgcacaacatgtgctccatcggctcaacatcacccaggagggcccaaaagacggcaagattagggttacgattctggccaggtcaaccgagtaccggaaaatcctgaaccagaatgagcttgtaaatgcattaaagaccgtcagcaccttcgaggtccaaatcgtcgactacaaatacagggagctgggatttctggatcagctccgcatcactcataataccgacatattcattggtatgcatggcgcaggtctcacccatctgctcttcctgcccgattgggctgccgtgtttgaactgtataactgtgaagatgagcggtgctatctggacctggctcgattacggggagtccactatattacatggcggaggcagaataaggtattcccgcaggataaaggacaccatcctaccctgggagagcaccccaagttcactaactattccttcgatgtggaggagtttatgtatctcgtactccaggccgctgatcatgtgttgcagcacccaaaatggcccttcaaaaagaagcacgacgaactatag

SEQ ID NO: 11696 - DNA, 927 bp, synthetic construct
  misc_feature 1..927: note = source = /note="Description of Artificial Sequence: Synthetic coding sequence"
  source 1..927: mol_type = other DNA
atgattccagtggaattactgctgtgttatttgctgctccaccccgtagacgcaacctcgtacgggaaacaaactaacgttctcatgcactttcctctctccctggaaagccagaccccgtcctcggacccactgagctgtcaatttttacatccaaaaagcctgcccggttttagtcacatggcccctctccccaagtttctcgtctctttggctctccgcaacgcgctagaagaggcgggatgccaggctgatgtgtgggcgttgcaactacaactctatagacagggcggagtgaatgctactcaggtactgattcagcatctcagaggcctgcagaaggggagatctacggagcgcaatgtctcggttgaggcactggcttctgccttgcagttgttggctagagaacaacaaagtactggaagagtgggcagaagtttaccgaccgaggactgcgaaaacgagaaggaacaggccgtgcacaacgtagtacaactcctgcccggagttggcactttctacaaccttgggaccgcactctactacgccacacagaattgcttgggaaaagccagggagaggggccgagacggagctattgacctcggatatgatctgcttatgaccatggccggaatgtccgggggtccgatgggactcgctatttcagcagcactcaagcccgcactaagatctggcgtgcaacagcttatccagtattatcaggaccagaaggatgcgaatataagccaacccgagaccacaaaagagggcctcagggctataagtgatgtaagcgacctggaagaaactaccaccctcgcaagctttatcagcgaggtggtgtcatctgcaccatactggggttgggctatcatcaaatcttatgacctggaccccggtgctggcagtctcgagatatag

SEQ ID NO: 11697 - DNA, 2862 bp, synthetic construct
  misc_feature 1..2862: note = source = /note="Description of Artificial Sequence: Synthetic coding sequence"
  source 1..2862: mol_type = other DNA
atgcgagtactcgcctgcctgctagctgccctggtgggcatccaggcggtggagaggttgcgactggctgatggtccacacggctgcgctggtaggttggaggtatggcacggaggacggtggggaaccgtgtgtgatgacgggtgggacctgagagatgctgccgtggcctgccgccagcttggctgcggaggggctttggcagctcctggcggtgcgttcttcggcgagggtgccggtcccgtatggttgtctgagctagcttgccggggaaatgagggacagctcggcttatgccatcataggggatggaaggcacacatctgcagtcacgaggaggatgcgggagtcgtttgtgccggtcagcgcgtggccaactctcgagatgacagtacttctccacttgacggagccccatggcctggactcttgctcgagctgagccctagcacagaggaaccattagtcacccacgcacccagacccgctggcaatccgcaaaatgcctcacgaaaaaagagccccagaccaaagcaggcaaaaagtacaagggctcctctgttgaccacaggcgctcccagacaagagcgcctcaggcttgtatctggccctcaccggtgtgctggcaggctcgaagtctggcacgggggacggtgggggacagtatgcgacgatggatgggatctgagggatgctgccgtggcttgtcgggagttagggtgtggaggagcgctggctgctcccggtggcgcacgtttcggcccaggggctggtcctgtgtggatggatgatgtgggctgcgggggtggagagcaggccctgcgggattgtccaaggagcccctgggggcgatccaactgcgaccactccgaagatgccggtcttgtttgcacaggacccgcacctcgtctgaggctcgccgacggacctcatggatgtgcaggtcggctggaggtgtggcacgggggacggtggggtagcgtttgtgatgacgcttgggacctccgggatgccgctgttgcttgccgagaattgggctgtggcggtgctctggctgcaccgggaggtgcattttttggcgaaggctcagggcctatcattttggacgacctgcggtgccgtgggaatgagaccgcactgagattctgtcccgctaggccctggggacaacatgattgtcaccaccgcgaggacgctggcgcagtttgcgatgggatgccgctgggatatgtacctcctactgcaccgaccgactcgaacaactccacccccagagaagctgcgtctagacctccttcaactatgacttcccaagcccctggaaccgctggcgtctctcctcctccggcatctcctacagtgttgtgggagccgggacccgaagccggttcacctcagctccgcctagttgctgggcctagtaagtgtagcggccgtctcgaagtgtggcatgaccagcggtgggggacggtgtgcgacgattcctgggacatgcgggattcagcagtcgtgtgcagagaattgggatgcggtggccctcagcagcctgaccctgctgctggtaggtttggatggggcgcagggccaatctggttggatgatgttggatgtgtgggaactgaagctagtctgtccgattgcccagcagctccatggggcaagcacaattgcgcacacaatgaagacgtcggggtcacttgtactggtccccctggacttgactcaattagtgatcctttcagctggtcatggattccgggtctggggcgagacagggacgcctggcttccaggagagctggccaccaaaccaagcgcctccgtgactgcttccgtactggagaaaacgaccactaaggcccctggaaagatgcccaaaagcactaagaagtgggttaccaagaatgctaagcggcctaccactcagccccctgttatgcccaccaccaaacatagtcgtgctcagtctccgccagatctgacttcacaaacaacggctgccctaacgacagaagccagtcgacgaccaacgtccgagtttacgcgacgacccactacagaggctcctcagaggtggactagccacaccactgcgactttgacacctcaagctccaagagagaggacaactaaaacaatggccatgctgactactcagggccctcaggaaatgacaagtgagagtacgattaaatcaataccacaagcgtctctggagccaagcgctgaaattcctgaggggtcacccgaatcccctaaggaccctgccccatccccaagtgtgtccacgacaggggaatccggcctgttcagggttcggctggcagacggcccaaacaggtgcgccggacgactggaagtttggcatgccggacgctggggtactgtgtgcgacgacaactgggatctgagggacgccacagtcgcgtgctgggaactcgggtgtggcaaagttcggcctagggtaggtaaaacccactacgggccaggtacaggaccgatatggctggacgatatgggctgtaagggtagtgaggccagtctgagcgattgtccatctggcgcttgggggaagcacaactgcgatcacgaagaagacgtggggttaacctgtaccggctataccgattacgacgattatcccccatggacatgggaccccacctcccgagaagatttggccaagggaacaacgaccgctggtgtgcctggtcacacacttccttggcgaacgacccgcaggcctggatcttcgagcccggctatccgcaggctacccgacacagaaccagaggccggacttcgggaggtaatgttgctggtgcagggactgccagggctgcagcggctcccatctccatag

SEQ ID NO: 11698 - DNA, 474 bp, synthetic construct
  misc_feature 1..474: note = source = /note="Description of Artificial Sequence: Synthetic coding sequence"
  source 1..474: mol_type = other DNA
atgcttaggacagagagctgtagaccaaggagcccggcaggtcaggtcgccgcagccagccccctcttgctgctgctattactcctcgcttggtgcgccggagcctgcaggggcgctcccatcttgcctcaaggccttcagcccgaacagcagcttcagctctggaacgagatcgatgatacctgcagttcattcctctcaattgattctcagccccaggcctcgaacgcactcgaggagctctgtttcatgatcatgggcatgctgccaaagccgcaggaacaggacgaaaaagacaataccaagaggagtagcgtcgtccatcccctcctccagctagtaccccacttgcacgagagacggatgaagcgcttcagggtagacgaggagtttcagtctccctttgctagccaaagccgaggctactttctctttcgccctcgcaacggacggaggtcagccggtttcatttag

SEQ ID NO: 11699 - DNA, 1545 bp, synthetic construct
  misc_feature 1..1545: note = source = /note="Description of Artificial Sequence: Synthetic coding sequence"
  source 1..1545: mol_type = other DNA
atgccatctacagtactcccttccacagttctgccgagtctgcttcccactgcaggagcgggatggtcaatgcgctggattctgtgttggtctctgaccctttgtcttatggcccagactgccctcggcgcattgcataccaagaggccccaggtggtcactaagtacggaaccttgcagggcaagcagatgcacgtgggaaagacacctatccaggtattcttgggtgtcccattcagtagaccacctctgggcatcctgagattcgccccacctgagccgccagagccctggaaaggtatccgagatgcaacaacctacccaccaggctgcctccaggagtcctggggacaactggcttccatgtacgttagcacaagagagaggtataagtggcttcgcttttctgaagattgcctgtatttgaatgtgtatgcacctgctagagccccaggagatccgcagctccccgtaatggtgtggtttcccggtggggctttcattgtgggcgctgctagcagttatgaaggaagcgatctcgctgcccgtgaaaaagtggtgttagtgtttttgcagcatcgtctgggaatttttggttttctgagtactgacgactcccatgcacggggtaactggggtttacttgatcagatggccgctctaagatgggtccaggagaacattgcggcatttggaggggatccaggaaacgtgacactcttcggacaatcagctggtgccatgtccattagtggcctgatgatgtcacctttggcatctggactatttcaccgagcaatttcccagagcgggaccgctctcttccgcttgtttataacttcgaacccgctcaaagtagccaaaaaagtcgcacatcttgctgggtgtaaccacaattctacgcagattctggtgaactgcctgcgtgctctgagcgggactaaggtgatgagagtctctaacaaaatgagattcttacagttaaacttccagcgagaccctgaggagattatatggtccatgagtccagtggtcgacggggtggttattcctgatgatccacttgtattactgacgcagggcaaagtatcctccgtgccttatttgctgggcgtgaataacctggagtttaattggttactcccttacaacataacaaaagagcaagtgcctttggtggtggaggaatacctggacaacgtcaatgaacacgattggaagatgctgcgtaaccggatgatggacatcgtgcaggatgctacattcgtttatgcgacactgcagaccgcacactaccaccggggtctgtcaatgggtaaagagaaggctttaagcctgcagatgatgaagtactgggccaattttgccaggaccggcaatcctaatgacgggaacctcccgtgctggcccagatacaacaaagacgagaaatatctccaacttgatttcacaacccgcgtcgggatgaagctcaaagagaagaagatggcgttctggatgagcctgtatcagtctcagaggccagagaagcaacgacagttctag

SEQ ID NO: 11700 - DNA, 1062 bp, synthetic construct
  misc_feature 1..1062: note = source = /note="Description of Artificial Sequence: Synthetic coding sequence"
  source 1..1062: mol_type = other DNA
atgagcaaccctacgcagacagatgccgattccgacctggttggagatgtgtgtgacacaaatgaggattctgacggcgatggccatcaggataccaaggataattgcccccaacttcccaatagcagccagcttgattcagacaatgatggcctgggcgatgaatgcgatggcgatgacgataacgacggaatccccgactacgtaccaccgggtcctgacaattgccgcctggttcccaacccaaatcagaaagactctgacggaaacggggtcggcgacgtgtgtgaggacgatttcgacaatgatgccgtggtcgatccactcgatgtgtgtcccgagagtgctgaggtgactcttactgacttccgcgcttaccaaacagtggtgttggaccccgagggtgatgcgcagattgatcccaactgggtagtacttaatcaaggtatggagatcgtgcagaccatgaacagcgatcccggattggccgtgggttatactgcttttaatggggtggatttcgaaggaaccttccacgtaaatacagtcacagacgacgattacgccggtttcctttttagctatcaagacagtgggaggttctacgtagtgatgtggaaacaaacggaacagacttactggcaagccacccctttcagggccgtcgcacaacccggtttgcaactgaaggctgtgacctccgtgtcgggaccaggggagcacctgcgcaatgctctttggcataccggccacactcccgaccaagtgaggctgctttggacagatccaaggaacgtcggctggagggataaaactagttataggtggcaactcctccaccgacctcaagttgggtatatccgggtgaaactctatgaaggtcctcaactggtcgcggactctggagtgatcatcgacacgtcgatgagaggcggtcgcctcggtgttttttgcttctcccaggagaacataatatggagcaatctgcagtatcggtgcaacgacacagtaccagaggactttgagccatttcgcagacagctcttgcagggcagagtgtag

SEQ ID NO: 11701 - DNA, 1074 bp, synthetic construct
  misc_feature 1..1074: note = source = /note="Description of Artificial Sequence: Synthetic coding sequence"
  source 1..1074: mol_type = other DNA
atggaaatcgagcataccctggaccaaatgattagcaaggtgggaaaccatatcgacgtgctgaccgggaagtgggtggcccaggacgccggaattggggctggcgtggacagttattttgagtacttggttaagggggcaatcttgcttcaggataagaagttgatggcgatgtttctggagtataacaaggctattcgcaactacacaagattcgacgattggtacctgtgggtgcagatgtacaaaggcaccgtttctatgcccgtgttccagtccttagaagcttactggcctgggcttcagagtctcatcggagatatcgataacgcaatgaggacctttctgaattactacaccgtttggaaacagttcggaggtctgccagaattttataacatcccgcagggttacaccgtggaaaagcgggagggctaccccctgcggccagagttgattgaatcagctatgtacttgtacagggcaacaggagacccaaccctgctggagctggggcgtgacgcggtagagtcgatcgagaaaatttccaaggttgaatgtggcttcgcgacgattaaagacctccgtgaccacaagttagacaatcgcatggagtctttcttcctagcggagactgtgaagtatctgtacctgctgttcgaccctacaaatttcatccataataatggcagcacgttcgacgcggttatcacaccatatggcgagtgcattctgggcgctggcggatatatctttaacacagaggctcaccccattgatccggcagcacttcactgctgccagcggttgaaggaggagcaatgggaagtggaagatctgatgcgagagttctattcccttaagaggagtcgatccaaatttcaaaagaatactgtttcttccggtccctgggagcctccagcccgacccggaaccctcttctcccctgaaaatcatgaccaggcccgagaaaggaagcccgctaagcagaaagttcccctgctctcctgtccttctcagccattcacaagcaagctggcgctcctggggcaggtattcctggacagtagctag

SEQ ID NO: 11702 - DNA, 1341 bp, synthetic construct
  misc_feature 1..1341: note = source = /note="Description of Artificial Sequence: Synthetic coding sequence"
  source 1..1341: mol_type = other DNA
atgctccatcctgagacatcacctggcaggggtcatctcctggcggtgctcctggccctgctcggaacagcctgggccgaggtgtggcctcctcagctccaggaacaggcacccatggctggcgctctgaataggaaggagtccttcttgctgctgtctctgcataacaggttgcgctcttgggtccagcctcccgctgctgacatgcggcgattggattggtcggactcattagcccagcttgcccaagccagggccgcactgtgtggcattccaaccccctccctggcgagcggattatggcgcactttacaggtcgggtggaatatgcaactcttacccgctggactggcctcgtttgtggaggtggtgtcactttggttcgcggaagggcagaggtatagccacgcagcaggggagtgcgcaagaaatgcgacgtgtactcactacactcagttggtctgggctacttcaagccagctgggatgcggtcgccacctctgctcagcagggcaagctgcaattgaggccttcgtgtgtgcatacagccctcgaggaaattgggaagtaaatggcaagaccatcgtaccctataagaagggcgcttggtgcagcctgtgtaccgcttcagtgtctgggtgctttaaggcatgggatcatgcagggggactgtgcgaggtaccaagaaatccgtgcaggatgtcatgccagaaccacgggaggttgaacatctccacctgtcactgccattgccctcccggttatacagggagatattgtcaggtgagatgctctttacagtgcgttcatggtagattcagagaggaagagtgcagttgtgtgtgtgatatcggctacgggggtgcccagtgcgccaccaaagttcactttcctttccatacgtgcgacctgaggattgacggagattgtttcatggtcagttccgaggccgacacttactatagagctagaatgaagtgtcagaggaaaggaggcgtgctagcacagattaagagccaaaaagtacaagacatactggcattttatctggggagactggagacgactaacgaggtgatagactcggatttcgaaactagaaacttttggattgggctgacctacaaaacagccaaggacagcttccgctgggcgactggtgagcaccaggcctttaccagcttcgcattcggacagcctgacaatcatggctttggaaactgcgtggaactccaggcttcggccgctttcaattggaataaccagagatgcaaaaccagaaatagatatatatgtcagtttgcgcaagaacatataagccggtggggccctggaagctag

SEQ ID NO: 11703 - DNA, 900 bp, synthetic construct
  misc_feature 1..900: note = source = /note="Description of Artificial Sequence: Synthetic coding sequence"
  source 1..900: mol_type = other DNA
atgggcggtccccgagcccttttagcagccttgtgggccctggaggctgccggaaccgccgctcttcggatcggggcattcaacatccagtccttcggagactccaaagtttcagaccccgcatgcgggtcaataatagccaagattctggcaggctacgatctggctctggtccaggaggttagggatcccgacctgtctgccgtcagtgccttgatggaacagatcaactcggtgagcgaacatgagtacagcttcgtctctagccagcccctgggacgagatcagtataaggagatgtacctgtttgtttatcgcaaggacgcggtgagcgtggttgatacttacctctaccccgaccccgaggacgtgttcagtcgcgaacccttcgtggtaaagttcagcgcccctggaacaggcgaacgggcacctccgctccccagccgacgcgctcttaccccccctcctcttcccgcagccgcacagaatctcgtgctgatccctctgcacgccgctcctcatcaggcagtggccgagattgatgcgctctacgatgtgtacctcgatgtgattgataaatggggcacagatgatatgctcttcctgggcgattttaatgcggattgttcctacgttagagcccaggactgggccgctatcaggctgaggtcttctgaggtcttcaagtggctgattcctgattctgcagacacaaccgttggaaacagtgattgcgcatatgacagaatcgtcgcctgcggcgctcggctcaggcgttctctgaaaccacagtccgccaccgtgcacgactttcaggaggaattcggcttagaccagactcaggcattggccatctcagatcactttcctgtggaagtcaccctgaagtttcatagatag

SEQ ID NO: 11704 - DNA, 1458 bp, synthetic construct
  misc_feature 1..1458: note = source = /note="Description of Artificial Sequence: Synthetic coding sequence"
  source 1..1458: mol_type = other DNA
atggataacaataagcactgtaagcaggacaactgcctgttgactccaaattcagggcaggaggacgccgataatgacggcgttggtgatcagtgcgacgatgacgcggatggcgatggcatcaagaacgtggaggataattgcagactctttccaaataaggaccagcagaatagcgatacagacagttttggggacgcctgtgataattgccctaacgtcccaaataatgatcagaaggataccgacggcaatggggagggagacgcctgtgataacgacgtggatggcgatggcatccccaatggacttgacaactgccccaaggtgcccaatccattacagacagacagggacgaagatggcgtgggagatgcatgtgatagttgtcccgagatgtcaaacccaacccaaaccgacgccgattcggacttggttggtgatgtctgcgataccaacgaggacagtgatggagatggtcaccaggatacaaaggacaattgtcctcaactgcctaactctagccagctcgactccgataacgacggacttggggatgaatgtgacggtgacgatgataatgacgggatcccagactacgtcccccctggaccggacaattgccgtttagttcctaaccccaatcagaaggattccgatgggaatggggtgggcgatgtttgcgaggatgacttcgataacgatgctgtggtggaccccctcgacgtctgtccagaaagcgccgaggtgacactgaccgatttcagggcttaccagacagtcgtgctagacccagaaggtgacgcgcagattgacccaaattgggtggtcctgaaccagggtatggagatcgtacaaacgatgaatagcgatccaggactcgctgtcggctacaccgcatttaacggcgttgatttcgagggcacctttcacgtcaacactgtcactgacgatgactacgctggttttctgttctcatatcaagactccggcagattctacgtggtgatgtggaagcaaaccgagcaaacttactggcaggctactccattccgtgccgtggcccagccagggcttcagctgaaggccgtcaccagcgtctctggcccaggtgagcatcttcgcaatgcgctgtggcacacgggccacacccccgatcaggtgagactcctgtggactgatccgaggaatgtgggatggcgcgacaaaacctcgtacagatggcaactcctgcaccgaccccaggttgggtatatccgggtaaagttgtacgaaggccctcaattggtggcagactccggtgtgatcatcgataccagcatgcgcggtggaaggctgggggtattttgtttctcccaggagaacatcatttggagcaacttacagtatcgttgtaacgacaccgtgccagaggacttcgagccctttcgccgacaactgctccagggccgagtgtag

SEQ ID NO: 11705 - DNA, 2358 bp, synthetic construct
  misc_feature 1..2358: note = source = /note="Description of Artificial Sequence: Synthetic coding sequence"
  source 1..2358: mol_type = other DNA
atgaaacacaccctggctcttctggcacctctgttgggcctggggctaggacttgccctctctcagttggctgctggcgctacggactgcaaatttctagggcctgctgaacacttaacttttacacctgccgcaagagccagatggcttgcacctagagttcgggcacccggtctgctcgactccctgtatggtactgtccggaggtttctaagcgtcgtgcagctgaatcctttcccgtcagaactggtgaaagctctgctaaatgagctggccagtgtgaaggtgaatgaagtcgtccgctatgaggccggttacgtggtgtgcgccgtgatcgctggactgtacctattattagtgccgacagcaggtttatgcttctgttgttgccgttgtcaccggcgttgtgggggtcgagttaagacagagcataaagctctggcgtgtgagcgcgcagcgcttatggttttccttctgctaactaccctgctgttgcttataggcgtagtgtgcgcttttgtcactaatcagagaacccacgagcaaatgggccctagtatcgaagcaatgcctgaaactctgttatccctgtggggcctcgtatcagatgttccccaggaacttcaggctgtagctcagcaattttccttgccccaagaacaggttagcgaagagctagatggggtgggcgtctccataggctccgctattcacacccagcttcggtcctccgtctacccactgctggccgcagtaggtagccttggacaagttctccaggtgagcgttcatcacttacagacactcaatgctaccgtggtagagctgcaggcagggcaacaggaccttgaaccagcgattagagagcaccgggaccgtcttttggaacttctgcaggaggctagatgtcagggcgattgtgcaggagctctatcttgggccagaaccctggaattgggagccgacttttctcaagtaccttccgttgaccacgtgttacaccagttaaagggggtgcccgaggctaacttctccagcatggtgcaggaggagaactccacttttaatgcgctacctgctcttgcggcaatgcagacaagcagtgtggtgcaggaactgaagaaggccgtggctcagcagcctgagggcgtcagaaccctcgccgagggctttcctggacttgaagctgcaagtcgctgggcccaggccttgcaagaggtggaagaaagtagccgcccatatcttcaagaagttcagaggtatgagacttaccgatggatcgtcgggtgcgtcctgtgcagcgttgtcctttttgtggtactctgcaacctcctggggctgaacttgggtatctggggattgagtgccagagacgatcccagccaccctgaggccaagggcgaggctggggctcgatttctcatggccggagttgggctgtcatttctgttcgctgcgccacttattcttcttgtatttgccacgtttctcgttggtgggaatgtgcagaccctcgtatgtcagagctgggagaacggcgagctgtttgaatttgctgatacacctggcaatttacctccctccatgaatttaagccagctgctggggttacgcaagaatatatcgattcaccaggcctatcagcagtgcaaggaaggcgctgccttatggacagttttgcagctgaatgactcatacgatttagaagagcatctggatattaatcagatacaacggccagttgtaaagacttcaatggaacagctggcacaggaactccagggtcttgctcaggctcaggacaactcggtactgggacagaggctccaggaagaagctcagggcctgagaaacttgcatcaagagaaggtagtcccacagcagagcctcgttgcaaagctcaacttgtccgtaagagcactcgagagtagcgctcctaatctgcagctagaaacgagcgacgtgctggcaaatgtgacatatctgaagggcgagttacctgcctgggcggcaaggatcctcagaaacgtttcagagtgctttctggctcgcgaaatggggtactttagtcagtacgtggcctgggtgagggaagaggtaacacagcggatcgcaacctgtcagcctctgagcggcgctctggataattccagagttatcttatgcgatatgatggcagatccttggaacgcattttggttttgtctggcttggtgcactttttttctgatcccatccataattttcgcggtcaagaccagcaaatattttcgccctatccgcaaacggttaagctccactagctccgaagaaacacaactttttcacatccctagggtgacttctctcaaactctag

SEQ ID NO: 11706 - DNA, 792 bp, synthetic construct
  misc_feature 1..792: note = source = /note="Description of Artificial Sequence: Synthetic coding sequence"
  source 1..792: mol_type = other DNA
atggggcgagtcctggaagaagccagattcgctgtggccttcacagagtcaatgaaagaaatggcacaggcacagtggaaggccaggcagattagcctcgctgttacctctgctgtgcccgtgcagcctcatgccaaaggcaaggtgtatgtgcagagtcaaggaattgcaactaccccgaacgccgcttttaactggaacaccttcctgcagagatctgagatcaaccaatccgccgacaatctgcatatcttcctcttgatctgtggtctcagacaggtgaaagatcctctgtatctggtggacgctttctccgcatggcatcaagaggaaccaaatgtgcacctcgttatagtgggtcccgaagtggatcctgtcttcaccagggaggttaaggccaaggtaaagcgagccgctggggtgcgcttgatcggcgaaatgccacaggaagatcttcatgctgtagttaaaaactgcttcgcagtagtgaacagctcggtcagtgagggtatgagcgcagccattctggaggcaatggatttagaggtgccagtgctcgccaggaacattcctggcaacgccgcagtggtgaagcacgaagtgacgggtctactgttcagcaaccctcaggagtttgtccacctggccaaacggctggtgtcagacccggctcttgagaaggaaattgttgtcaatggacgtgagtatgtcagaatgtaccatagctggcaagtcgaacgagatacgtaccaacagctcattaggaaattggagggatcaaccgaggattag

SEQ ID NO: 11707 - DNA, 456 bp, synthetic construct
  misc_feature 1..456: note = source = /note="Description of Artificial Sequence: Synthetic coding sequence"
  source 1..456: mol_type = other DNA
atgaagactgccgtgatgaaggagctgtattccttcctgcaccaccagaataggtatggatccgaacaggaatttgtggacgacctgaagaacatgtggtttggtttgtactcccgtgggaacgaggagggagacagctcagggtttgaacacgtattcagtggcgaagtcaaaaagggcaaggtgacaggctttcacaactggatcagattctatctggaggaaaaggaggggttagtggattactacagtcatatttatgatggacccgtaccagtgaaacctgggagaatctcactaagctgccctgatatttatctaggtcaggtgcacctttgggagtggcaagaagtccaccgacacagtctgcacagcgtctttcacctgatcgagctgcgcgcacggaaaggacacgaggggagctgcgaaaccgaagtgctgtcatccctcgactag

SEQ ID NO: 11708 - DNA, 363 bp, synthetic construct
  misc_feature 1..363: note = source = /note="Description of Artificial Sequence: Synthetic coding sequence"
  source 1..363: mol_type = other DNA
atgttgccacagtggctgttgctcctgttccttctgttttttttcttatttctgctgacccgtggttccctgagccctactaagtacaatttactggagctcaaagaatcctgcattagaaatcaggactgtgagaccggatgttgccagagggcccctgacaactgtgagtcacattgcgcagagaaggggtccgaggggagtctatgccaaactcaggttttcttcggacagtaccgggcatgtccgtgtctgagaaatctgacttgtatttactcaaagaatgagaagtggctcagtattgcatacggcagatgtcagaagattggaaggcagaaactggctaagaagatgtttttttag

SEQ ID NO: 11709 - DNA, 951 bp, synthetic construct
  misc_feature 1..951: note = source = /note="Description of Artificial Sequence: Synthetic coding sequence"
  source 1..951: mol_type = other DNA
atggctgaggctgctctggaggccgtgcgctccgaactacgcgaatttccggcagccgctcgcgaactgtgcgtccctctcgctgtcccttatctggacaaaccaccaacaccgttgcatttctatcgggattgggtttgccctaacaggccttgtattattcgaaacgccctacaacactggccggcactgcagaagtggtccctgccttacttcagagcgaccgtgggctctacagaggtctcagtagccgtcaccccagacggctacgcggacgcagttcgtggggataggttcatgatgccagcagaacgacgtctgcccctgagtttcgttctagacgtccttgaaggacgggctcagcacccaggagtcctgtacgtgcagaaacagtgttcaaacctgcctagcgaacttccgcagctgcttcctgacctggagtcccatgtgccatgggcctcagaggctctgggaaaaatgcctgatgcggttaacttctggcttggagaagctgccgctgtgacgtctctgcacaaagaccattatgagaacctgtactgcgtcgtctccggcgagaaacatttcctgttccatccaccctctgatcgacccttcattccctatgaactctatacaccagcgacttaccagctcacagaagaggggactttcaaagtcgtggacgaagaagccatggagaaggttccatggattcctctggatcctttagccccagatctggcccgttatcccagctatagtcaggcccaggcgttgcgttgcacggttcgggcaggcgagatgttgtacctgcccgctctgtggttccaccatgtccagcagtcacaggggtgcatcgccgtgaatttctggtacgatatggagtatgatctgaaatatagctactttcaactattggactcgctcaccaaagcaagtggactcgactag

SEQ ID NO: 11710 - DNA, 657 bp, synthetic construct
  misc_feature 1..657: note = source = /note="Description of Artificial Sequence: Synthetic coding sequence"
  source 1..657: mol_type = other DNA
atggggagggtctttctaacgggagagaaggccaattcgatactgaagcgatacccacgagctaacggcttctttgaagaaatccgccagggtaatattgaacgcgagtgcaaagaagaattctgtacatttgaagaggccagagaagcatttgagaataacgagaaaactaaggaattttggtctacatacaccaaagcacaacagggtgagagtaatagaggttctgattggttccagttctacttaaccttccctttaatatttggcttatttattattctcctggttatctttttgatatggcggtgtttccttcggaataaaaccaggcggcaaacggtcactgaaggccatatacctttccctcaacatctgaatatcataacccctccaccacctccagacgaggtctttgatagttccggactctctcccggattcctgggctacgtcgtggggcgaagcgacagcgtcagtacacgcctctccaactgtgatcccccaccaacttatgaggaagccacaggacaggtcaacctgcagcgatctgagactgagcctcacttggatcctccacctgagtacgaggatatcgtgaattctaatagcgcgagtgccattcctatggtgccagttgtaaccaccatcaagtag

SEQ ID NO: 11711 - DNA, 909 bp, synthetic construct
  misc_feature 1..909: note = source = /note="Description of Artificial Sequence: Synthetic coding sequence"
  source 1..909: mol_type = other DNA
atggctatgttcctggagtacaataaggctataagaaattatacccggttcgacgactggtacctctgggtacagatgtataaaggaactgtaagcatgcctgtgttccaatcgctcgaagcctactggcctggcttgcaatcccttataggggacatagacaatgccatgcggacttttctgaattattatactgtttggaagcagttcggaggtctgcctgagttttacaacattccacaggggtatacagtggaaaaacgcgagggctaccctctccgacccgaactgatcgaatctgccatgtatctctaccgggcaacaggggacccaactctgcttgagctgggacgggacgccgttgagagcatcgaaaaaatatctaaagtggagtgtggttttgctacgattaaggacctgagagatcataaactagacaacaggatggagagcttttttctcgcggaaacagtaaaatatctgtatctcctattcgaccctaccaacttcatccacaataatggaagcacgttcgatgcagtgatcaccccatacggggaatgcatcttgggagcaggcggatacatttttaacacagaggcccaccccattgatcccgctgcccttcattgctgccagaggctgaaggaggaacagtgggaagtggaagacctgatgcgggagttttacagcttaaaaagaagccggtctaaatttcagaagaatactgtcagtagtggcccatgggagcccccagcacggccaggaacactcttctctccagagaaccacgatcaggcaagggagaggaagcctgcgaagcaaaaggtgcccctcctgtcttgccctagccagcctttcaccagcaagctcgctttgctgggtcaggtttttctggactcgagctag

SEQ ID NO: 11712 - DNA, 459 bp, synthetic construct
  misc_feature 1..459: note = source = /note="Description of Artificial Sequence: Synthetic coding sequence"
  source 1..459: mol_type = other DNA
atgctcgtggatgggccttccgagcggcctgctttatgctttcttcttttagcagtcgcaatgtccttctttggctctgccctttccattgacgagacccgggcacatctcctcctgaaagagaagatgatgcgcttgggcggtcggttggtgctgaacacaaaggaggagctggcgaacgaacgtctgatgaccctcaaaatcgctgaaatgaaagaagcgatgcgtacccttatcttccccccatctatgcatttcttccaggcgaaacatctgatcgaacggagtcaagtcttcaacattctgcggatgatgccaaagggggcagccttgcacttacatgatatcggcatcgtgacgatggactggttggttcgcaacgttacttatcgtccccattgtcatatctgctttactccgaggggcattatgcagtttcgcttcgcccatcccacctag

SEQ ID NO: 11713 - DNA, 3951 bp, synthetic construct
  misc_feature 1..3951: note = source = /note="Description of Artificial Sequence: Synthetic coding sequence"
  source 1..3951: mol_type = other DNA
atggaacccaggttattctgttggacgacgctgttcctgcttgcaggatggtgcctgcctggcctgccctgcccttccaggtgcttatgctttaaatctactgttcgatgcatgcacttgatgcttgaccacattccccaggtgccacagcaaacaacagtgttggatctgcgtttcaatagaatccgggaaatcccaggctccgctttcaaaaagcttaagaatcttaataccctcctgttgaacaacaatcatatacgaaagattagtcgaaatgcgttcgaagggttggagaatttactgtacctgtacctgtataaaaacgaaatacacgccctggataagcagacctttaaggggctgatatccttggagcacctgtacatccattttaaccagctcgagatgctgcagcctgagaccttcggggacctgttgcgtttagagaggctgtttctgcacaataataagttatctaagatccctgcagggagtttctcaaatcttgactcactcaagcggctgagacttgatagcaatgccctcgtctgcgactgtgatttgatgtggctcggtgaactgctgcaagggtttgcccaacatggacatacccaagccgcagccacctgtgaatacccacggcgattgcatggcagagcagttgcgtccgtcactgtggaggaatttaactgccaatcccccagaattaccttcgagcctcaagacgtggaggtgccgtctggaaacactgtctattttacctgccgcgctgagggtaatcccaagccagagatcatatggatacataataaccattcattggatctggaggacgatacccgcttgaatgttttcgatgatggcacactcatgatccgcaatacacgcgaaagcgatcagggtgtgtatcagtgcatggcacgcaattccgcaggcgaggccaaaacgcaaagcgctatgctgcgctattcatctcttcccgcaaaacctagctttgtgatccagcctcaagacaccgaagttctgattggcactagcacaacactggagtgcatggctaccgggcacccacatccgttaataacctggacccgggataacgggttggagctcgatggctcacggcacgtggctacctcctccggactttatctacaaaatatcacccagcgggaccatgggaggtttacttgtcatgccaacaacagccatgggacagtccaggcagctgccaacattatagtgcaggcaccaccccagtttaccgtcactccaaaggaccaggttgtgttggaagaacatgctgttgagtggctgtgtgaggcagacggcaatcccccacctgtaatcgtctggactaagactggtggtcaattgccagtagagggacagcacacagtgttgtcctccggcaccctccgtatcgatcgcgcagctcaacacgatcaggggcaatatgagtgccaagctgtctcaagtctgggggtgaagaaagtgtctgtgcaattaacagtgaagcccaaggcccttgccgtgttcacccagttaccccaagacactagtgtggaagttggcaagaatataaatatatcctgccacgcacagggcgagccccagccaattattacctggaataaggaaggtgtgcagattaccgagagtggcaagtttcatgtggatgacgaaggcaccttgacgatatatgatgctgggttcccagaccaggggagatacgaatgtgtagctcggaatagctttgggctggcagtgacaaacatgtttttgacagttaccgccattcagggaagacaggctggggatgattttgtggagtcgagcatcctggacgccgtgcagcgggttgatagtgcaattaactcaactcgcagacatttgttctcgcagaaacctcacaccagctcagatctgctggctcaattccactaccctagagaccctctcatcgtagaaatggcccgtgcaggcgagatctttgaacacacattacaactgatcagggagcgcgttaaacagggactcacagttgatcttgaggggaaggaatttcggtacaacgacctggtgtctcccaggagtctgagtctgatcgcaaacctttccggctgtacagcacgacgccctctgcccaattgtagcaatcgatgcttccatgcaaaatatcgggcacacgatggaacatgtaacaacctgcagcagccgacttggggagcggcactgacagccttcgccaggcttctgcagcccgcataccgtgatggtatcagggctcccagggggctcggtctgcccgtgggttcccggcaacccttaccgcctcccaggttggtggccactgtatgggctagggctgcagccgtaacgcccgatcactcttacactaggatgttaatgcactgggggtggttcctagagcatgatctcgatcatacagtgcctgcattgtcaaccgccaggtttagcgatgggagaccttgtagcagtgtgtgtactaatgacccaccatgttttcctatgaacacaagacatgctgacccaagaggcacacatgctccttgtatgctgttcgcccgatcatcacctgcctgtgcaagtggaagacctagcgctaccgtggattcggtctacgctcgggagcaaattaatcagcagactgcatacatagacgggtccaatgtttacggaagcagcgaacgagagagccaggcactcagagaccccagcgtgcccagaggactgcttaagaccggattcccctggcccccatccggaaagccactgctcccttttagcaccggccctccgactgagtgtgcacgtcaggagcaggagtccccttgtttccttgccggagaccacagggccaatgagcacctagccctggccgctatgcacacgctgtggttccgagagcacaacagaatggctaccgaactgagcgccctgaaccctcactgggagggtaacacagtatatcaggaagcacgaaagatcgttggggcagaattgcagcacatcacctattcccactggctcccaaaagtcctcggagatccaggtactcgaatgctaagaggctaccgcggatataatccgaatgtgaatgcaggcattatcaactcttttgctaccgcggcattccgattcggacacaccctcattaaccctatcctatacaggttgaatgccacgttgggagagatcagcgagggtcatcttcccttccataaagccctgttttctccctcccggatcataaaggagggtggaattgatccagtgctacgtggactcttcggtgtggcagccaagtggagagctccctcatacctcctgagtcctgagctaacacaacgcttgtttagcgccgcttattctgccgctgttgatagcgctgcgaccataatacaacgtgggagggaccacggcatcccgccttacgtagactttcgggtcttctgtaacctcacctcggtgaagaactttgaagacctgcagaatgagatcaaggattccgagataaggcagaaacttaggaagttatacggctcaccaggagatatagacctttggccagcgctgatggtagaagacctgatccccggaacacgcgtcggtcctactttaatgtgcctgttcgtgacccaatttcagaggctacgcgacggagatcgcttctggtatgaaaatccaggggtgttcacaccagctcaactgacacagctgaaacaggctagcttgtctagggtgctttgcgataatggagattccattcagcaggtgcaggctgatgtctttgtcaaagctgagtacccccaggattatctgaattgcagcgagatccccaaggtagaccttcgagtgtggcaagactgctgcgccgacaagcaagcgggaggcactccagaagctggcagggtgtatcggtgctag

SEQ ID NO: 11714 - DNA, 891 bp, synthetic construct
  misc_feature 1..891: note = source = /note="Description of Artificial Sequence: Synthetic coding sequence"
  source 1..891: mol_type = other DNA
atggacccatcaaaaattgcccacaccgagtaccccgtgaatacaatcatcatccatgaggatttcgataataacagtatgtccaataacattgcactgcttaagaccgatacggcaatgcattttggcaacctagtccagtcgatctgcttcctgggacgcatgctgcataccccaccggtgctgcagaattgctgggtgtctggatggaatcccactagtgccactgggaaccatatgacaatgtcagtgcttcggaagatattcgtgaaggacctggacatgtgtcccctatataagctgcagaaaacagagtgcgggtctcacaccaaagaagagaccaaaaccgcatgcttgggcgaccccggtagcccaatgatgtgtcagctacagcagttcgacctctgggtactgcgaggcgtcctcaatttcggaggagagacctgtcctggtctgtttttatacactaaagtggaggactacagtaagtggattactagcaaggccgaaagagccggtccgccactatcatccctccatcattgggagaagttaatttcattctcacatcacggaccaaatgccacgatgacccagaagacctattcagattctgagctgggtcatgtgggctcgtacctacagggccaacgtcggactatcacgcacagccggctagggaattcaagccgtgacagtctggatgtaagagagaaggatgtcaaggaaagcggccgttcccctgaggcatctgtccagcctctctattatgactactatggaggcgaggtgggggaaggcaggatcttcgccggacagaacaggctgtaccagccagaagaaattattctagtcagcttcgtgctggtgttcttttgttcgagtatttag

SEQ ID NO: 11715 - DNA, 2808 bp, synthetic construct
  misc_feature 1..2808: note = source = /note="Description of Artificial Sequence: Synthetic coding sequence"
  source 1..2808: mol_type = other DNA
atgcggaagcccagacggaagtcgaggcaaaatgctgaaggtcgcagatcccccagcccgtacagcctgaagtgtagcccaacacgggagacattgacatacgcccaggcccagcggatagtggaagtggacatcgatggtcgcctccatcggattagcatctacgatcctctgaaaatcataactgaagatgagctaactgctcaagacattactgagtgcaactcaaacaaggaaaactccgaacagcctcagtttcccggaaaatcaaagaagccatccagtaagggcaaaaaaaaggagtcttgcagcaagcatgcatccgggacctcctttcaccttccacagccatcatttcgcatggttgactccggcatccagccagaagccccacccttacctgctgcatattataggtacattgagaagccgccagaggacttagacgcagaggtagagtatgatatggacgaagaggacctcgcatggctagatatggtgaatgagaagaggagagttgacgggcactcattagtatccgccgacaccttcgagctgctggttgatcgtctcgagaaagagagctatctcgaatccaggagctctggggcacagcagtcactcatcgacgaggacgccttttgctgcgtgtgtctcgatgatgagtgtcacaactcgaacgtgatacttttctgcgacatctgcaaccttgctgtacatcaggaatgttacggcgtgccatatattccagaaggtcagtggctctgccgatgttgtctgcaatcccccagccggccagttgattgcatcctctgccctaacaagggcggtgctttcaaacagaccagcgatgggcactgggcccacgtggtctgtgccatatggatccccgaagtctgctttgcgaacaccgtattcctggaacccattgagggaatcgacaacattcctcctgctaggtggaagcttacctgctacatctgcaaacaaaaagggctcggggcagctatccagtgtcacaaggtgaattgttatacggcttttcacgtcacatgtgcgcagagggcaggcctgtttatgaagattgagcctatgcgtgaaacaagcctgaacgggactatcttcactgttcgtaagacggcctactgtgaggcccattcaccgccaggggctgccacagcaaggcgcaagggagactcccctaggagtataagcgaaacaggggacgaagaggggctgaaggagggcgatggagaagaggaagaggaagaagaggtcgaggaggaggaacaggaggctcagggaggcgtgagcggtagcttgaagggcgtccctaaaaagagcaaaatgtccctcaagcaaaagatcaagaaggagccggaagaggccggacaggacactccatcgacactccccatgcttgctgtgcctcagattcctagctatcgacttaataagatttgctccggactgagttttcaaaggaaaaatcagtttatgcaacgcttgcataactactggttgctgaaaagacaggccagaaacggggtgcctctgattcggcgactccactcgcatttgcagtcccagagaaacgccgaacaaagggaacaggacgagaaaacttccgcagtcaaggaagaactgaagtattggcagaagctgaggcacgatctggagcgggcaaggcttctcattgagctcatcaggaaacgggaaaaattgaagagagaacaggtgaaggtccagcaggcagctatggaattagagctgatgcccttcaatgtactccttcgcaccaccctggatctgcttcaagagaaggatcctgcccatatatttgccgaacccgtgaacctgtcagaggtgccagactaccttgagtttatctctaaacctatggatttctcaacaatgcgtcgcaaacttgagagccacctctaccggacactggaagagttcgaggaagacttcaatttgattgttacaaactgcatgaagtacaatgccaaggatactatctttcaccgcgcagccgtacggctgagggacctgggcggagctattttgcgccacgccaggcgccaggcggaaaatatcggctatgaccccgagagaggaacccacctgcccgaatcccccaaattagaggacttctaccggttttcatgggaggacggcatgaccaacgggtttggaaagcacacagaatctgggtcggattctgagtgttctcttgggctgtcaggcggtttggcctttgaagcctgtagcggactgactcccccaaagcgatcgcggggaaaaccagccttgtctagggttccgtttctcgagggggtcaatggagatagcgattacaatggctcaggccgttctttgcttctcccctttgaggatcgcggtgatctagagccactggagctcgtctgggcaaagtgcaggggctacccatcatacccagctctaataattgacccaaagatgccaagagaaggcttgctgcacaatggcgtgcccattccagtgccacccctggacgttctgaagctgggggagcagaagcaggccgaggctggcgaaaagttatttctcgtgctgtttttcgacaataagaggacctggcaatggctcccccgagacaaggtgctcccgttaggggtagaagacaccgttgataaacttaagatgttggaaggcaggaaaacttctatccggaaatctgtgcaggttgcatatgacagagctatgatccacctctcacgagttcgtggtccacattcctttgtgacaagcagctatttgtag

SEQ ID NO: 11716 - DNA, 270 bp, synthetic construct
  misc_feature 1..270: note = source = /note="Description of Artificial Sequence: Synthetic coding sequence"
  source 1..270: mol_type = other DNA
atgaaaaccgggctcttctttctttgcctgctgggcaccgccgcagcaatcccaactaacgctcggctcctctcggatcattccaaacctacagccgaaacggtcgcaccagacaacaccgcaatcccatccctccgcgcagaggcggaggagaatgagaaagaaacagcagtgtccacagaggacgactcacaccacaaggccgaaaaatctagcgtgctgaagagtaaggaagaaagccacgaacagtctgctgaacaggggaagtag

SEQ ID NO: 11717 - DNA, 657 bp, synthetic construct
  misc_feature 1..657: note = source = /note="Description of Artificial Sequence: Synthetic coding sequence"
  source 1..657: mol_type = other DNA
atgggtcgggtatttctgaccggtgaaaaagcaaattctatactgaagcgatatcctcgggcaaacggcttcttcgaagagatcaggcaggggaatattgagagagaatgtaaggaagagttttgcacctttgaagaagccagggaagctttcgaaaataatgaaaagacaaaggagttctggagcacctacacgaaggcgcagcagggcgagtctaatcgaggctcagactggtttcaattttatcttaccttccccctgattttcggtctctttatcatacttctggtgatctttctgatctggcgatgcttcttaaggaataaaacaagacgtcagacagtaactgaagggcacattcccttccctcaacacctcaatatcattactcccccacccccaccagacgaggttttcgatagctctggcctgtctcccggattccttgggtacgttgtcgggagaagtgattcagtgagcacaagactgtcaaattgtgaccctccacctacgtacgaggaagccacagggcaggttaatctccagcgcagcgaaacggaaccgcacctggatccgcctccagagtacgaagatatagtcaactctaattccgcgagcgcaattcctatggtccctgtggtaaccacaattaagtag

SEQ ID NO: 11718 - DNA, 540 bp, synthetic construct
  misc_feature 1..540: note = source = /note="Description of Artificial Sequence: Synthetic coding sequence"
  source 1..540: mol_type = other DNA
atgagcctcggcccagaagtgtttctagggccacccgaagcccagagcttcctctcctctcacacgcgcattcctagagccaaccactgggacctggagctcctaacccccggaaatcttgagagagagtgtcttgaggaaaggtgctcctgggaagaagccagagagtattttgaggataacacgttgacggagaggttttgggagagctacatatacaacggcaaggggggtcggggaagagtcgacgttgcaagtctggctgtcggcctgacgggaggaatcttattgattgttctggctggactcggggcattttggtatttgcggtggagacaacatcggggtcaacagccctgccctcaggaagccggtctgatctcccccctgagcccactgaaccccctcgggcctcccacccccctaccaccacccccaccgccaccacctgggctgccgacctacgagcaagccctggccgcaagcggcgttcatgacgcaccacctcctccctacacttctctacgtcggccacattag

SEQ ID NO: 11719 - DNA, 765 bp, synthetic construct
  misc_feature 1..765: note = source = /note="Description of Artificial Sequence: Synthetic coding sequence"
  source 1..765: mol_type = other DNA
atgacattagaggatatcgtacaacgcgaggtctgggggaccgtagtcgccaggggcgctcccgctccgccaggtcccgtgccaacacgtggggctgcctctcgcagattaagcgtaagtccagcctcgaccagtgagacttctctgtaccaggttctgctcggagccagacagctggttcagccgggtccccatgccatgtatgcccgagtgcgccaggtcgagtccaatcccctctatcagggcacagcaagctcagctgacgtagcactagtcgaactcgaggcacccgtgcctttcactaattacatcctgccggtatgcctccccgacccgagcgtgatttttgaaacaggcatgaactgctgggttacaggatggggcagcccgtcagaagaggaccttctccctgagccccgaattctacagaaactcgcagtgccaatcattgacactccaaaatgcaatctactgtacagtaaagatacggagttcgggtatcaaccgaaaactatcaagaatgatatgctttgtgcagggtttgaggagggaaaaaaggatgcttgcaagggtgactccggcggtcctttggtttgtctggttgggcagagctggctccaagcgggagtgatcagttggggtgaaggttgcgccaggcagaatcgtcctggcgtttacattcgtgtcacggcccaccacaattggattcatagaatcattcccaagttgcaatttcagccggctaggctgggaggccagaaatag

SEQ ID NO: 11720 - DNA, 1899 bp, synthetic construct
  misc_feature 1..1899: note = source = /note="Description of Artificial Sequence: Synthetic coding sequence"
  source 1..1899: mol_type = other DNA
atgaccccacctgtcctgactactgctgaaacctccgtcaagccctctgtttctgcctttacccatagcccccctgagaacaccactggcatatcatcaactatttccttccattctagaaccctcaatctgactgatgtgattgaagagttggctcaagctagcactcagaccctgaagtccactatagctagcgagaccacactatcatctaagtctcatcaaagcactacaacgcgtaaggcaattatccgtcactctacaatccctcctttcctgtcctcatctgctactttaatgccagtccctatatctccaccatttacccagcgggctgttacagataacgtggccacacctatcagcggcctgatgacgaatactgtggtgaaattacatgagtcaagcagacataatgccaaaccccagcagcttgtggccgaagtggctacttctcccaaggtgcacccgaatgctaagtttaccattggcaccactcactttatttattcaaatttgctgcatagtaccccaatgcctgccctgacaactgtgaagagtcagaatagcaaactgacgcctagcccatgggccgagaaccaattttggcacaagccctactctgaaatcgcagagaaagggaaaaagcctgaggtgagtatgctagccacgaccggactctccgaggccaccactttagtttccgattgggacggacagaaaaatacaaagaaatcggatttcgataagaagccagtgcaggaggcaaccacaagtaaattgctcccatttgattctctctctcgttacatctttgaaaaaccgagaatagtcggcggtaaggcagcgagttttaccatccctgccaactctgacgcgttcctaccctgtgaagccgttggcaaccctctgcccacaatccactggacgcgggtgccctccggtctggatctcagtaaaagaaagcagaactcccgggtgcaagtcctgcctaatggcacactctccatccagcgagtggaaattcaggacaggggacagtacctctgtagcgccagcaacctgttcggcaccgaccacctccatgtgaccctctctgtagtgtcttacccaccaaggattcttgagcgcagaacaaaagagattactgtgcacagtggttctaccgtcgagctgaaatgtagggccgaagggagaccttcccccaccgtcacatggattctggccaatcagaccgtggtttcagagagctcgcagggctctagacaggctgtggtaactgttgatggcacactcgtcctgcacaacttgtccatctatgatagagggttctacaagtgcgttgctagcaatccaggaggccaagactctctgctggtgaaaatacaagttatcgcggctcctccagtcatcctggagcagcgaagacaagttatcgttggtacgtggggagagtcactgaagctcccttgcacagcgaaaggtactcctcaaccttcagtgtactgggtgctgtccgatggcaccgaggtgaagcctctgcagtttaccaattcgaagctgtttctgttttccaacgggacactgtacatacggaatctggcatcatcggatagaggtacatatgaatgcattgcaactagctccactggctccgaacgcagagtggtaatgctcaccatggaggagcgggttacgtctccccgtattgaagctgcaagccaaaaaagaaccgaagtcaattttggggacaagttgcttctgaattgcagcgccactggggagcctaagccacagatcatgtggagactgccatcaaaggccgtggtagatcagcagcacagggtggccgctggctctacctctactctgatggatccatgtctcctagatcagtag

SEQ ID NO: 11721 - DNA, 681 bp, synthetic construct
  misc_feature 1..681: note = source = /note="Description of Artificial Sequence: Synthetic coding sequence"
  source 1..681: mol_type = other DNA
atggacattatagttctccttccgaagggccactgtacgaaaatccaggaactgcagatgaccactgtgcttaagcagaatgtccacgtgttcggggtggagggcaattccgacgagcttgacgagccaattaagaccgtgttcgcggatgtcgctttcgtgaagaagcataatctaatgtctctcaattccattaattggagcagagtcctcgtgcagatggctcaccacttcttcgcgtactttcaatgcaccccaagcctggacactcatccgctcccactcgtggaggtggtagtgccaactggcgctgcagggaatctggcggcaggttatatagcacagaagattggattgcctattcgactggttgttgccgtgaacagaaatgacattatccatcgtaccgtgcaacagggggatttttccttgtccgaagctgtgaagtccactctggccagcgccatggatatacaagtcccatacaacatggaacgagtcttttggctgctgtcaggctcagacagccaggtgaccagggccctgatggaacagtttgaacgtacccagtctgtgaacctgcccaaggaactgcactccaaacactctcccgttttgcccagaccctgcctgtgctctcaggtgccagggtcttgtccgggatgttggccagatccatag

SEQ ID NO: 11722 - DNA, 729 bp, synthetic construct
  misc_feature 1..729: note = source = /note="Description of Artificial Sequence: Synthetic coding sequence"
  source 1..729: mol_type = other DNA
atgtttcagaccgggggtctaatcgtgttttacgggctccttgcccagaccctgcccctgaacgtcaatcccgctctcccattgagcccgacaggtctggctggctctcttacaaatgcactgagtaatggattactaagcggtggtctcttaggcatcctcgagaacttgccactgctggacatactgaagcccggtggcggaaccagcgggggtctgttaggcggattattgggcaaggtgacctcagtgattccgggtctaaataatattatagacattaaagtgacagacccccagctgctggaactcgggctcgttcaaagtccagatggacataggttatacgtcaccataccactgggaataaaactgcaggtgaatactcccctagtgggcgcatccttgctcaggctggccgtgaaattggacataaccgccgagatcttagcagtgagagacaagcaggaacggattcacctggtgttaggggactgcacccactcacccggatcactccagatctccctgctcgatggactggggccactgccaattcagggattacttgatagtctcacgggcatcttaaacaaagtgcttcctgagcttgtgcagggaaatgtttgtcccctcgtgaacgaagtgctgcggggactggatattaccctagtccacgacattgtgaacatgttgatccatggattgcaatttgtgatcaaagtatag

SEQ ID NO: 11723 - DNA, 1422 bp, synthetic construct
  misc_feature 1..1422: note = source = /note="Description of Artificial Sequence: Synthetic coding sequence"
  source 1..1422: mol_type = other DNA
atgagcctggaggcctctttatgctcgttagaagaatgcgcagcattccagcctagctctccttcacccctccagccacagggcccagtaaagtccaataatatcgtcactgtaacaggcattagcctctgcctttttattataatcgcgactgtgctgatcacactgtggcgcaggttcggccgtcctgcaaaatgttccacaccggcacgacataattctatccacagcccaagcttccggaagaactcagacgaggagaacatttgtgagctaagcgaacagagaggatctttttcagacggaggggacggcccaacaggaagtcctggagacactggcatccctctgacatatcggaggagcgggccagttccacctgaggacgatgcctcgggaagtgagtcattccagtcaaacgcccagaaaatcattcccccacttttttcctatcgtctggcgcagcaacagttgaaggagatgaagaagaagggcctgaccgaaacgaccaaggtataccacgtgtcacaatcgccactgacagatacagcaattgatgctgccccttccgccccactggacctagagtccccagaagaggccgcagcaaataagttcagaataaaatcccccttccctgaacagcccgctgtatctgccggagagagaccaccctccagactcgatctgaatgtgacccaggccagttgtgctatatcaccatcccagactttaattcgaaaaagtcaggctaggcacgttggttcaaggggtggacctagtgagaggagtcatgccaggaacgcacacttcaggcgcactgcctcattccacgaagctcgacaggcccgaccctttagagagaggagtatgtcgactttaactcccaggcaggcgccagcttacagctctcgtactcgcacatgtgaacaagccgaggatcgatttagacctcaatctcgcggagctcatctcttccccgaaaaattggaacatttccaggaggcctccggaaccagaggccctctcaaccctctgcccaagtcctatactctcggccaaccactccgtaagcccgacctcggcgatcaccaggctgggcttgtagccggaatcgagcgcacagaacctcaccgggcaaggcggggtccgtctccaagccacaaatctgtaagtagaaagcaatcctcccctatcagccccaaagacaactatcagcgggtttcaagtctgagtcctagccagtgcagaaaagataagtgccagtcgtttccgacacatccagaattcgctttttacgataacacgagcttcgggctgaccgaagcagagcagcggatgcttgaccttccgggttacttcggctctaacgaagaggacgagacgacctctacgttgagcgtggaaaagttagtaatctag

SEQ ID NO: 11724 - DNA, 2310 bp, synthetic construct
  misc_feature 1..2310: note = source = /note="Description of Artificial Sequence: Synthetic coding sequence"
  source 1..2310: mol_type = other DNA
atgctgtctaagaaaggaatattcccctggatcctgacctgcattagcgaagagatggcattccggaccatttgcgtgctggtaggcgtttttatttgctcgatttgcgttaagggaagcagccagccccaggcacgagtatacctcacttttgatgaactgcgggaaaccaagacctcagagtacttctctctgagccaccatccactggactatcgaatattgctgatggatgaggaccaggacagaatctatgtgggaagcaaagatcatattctaagtctaaacattaacaacatttcccaggaagccctgtctgtgttttggcctgcaagcactatcaaggtggaagagtgtaagatggccggtaaagacccaacccacgggtgtgggaatttcgtgcgggtgatccagaccttcaaccggacccatctctacgtttgcggatccggagccttcagcccagtgtgtacatatctgaatcggggacgcaggagcgaagaccaggtcttcatgatcgacagcaagtgcgagagtggtaagggtcgatgttccttcaacccgaacgtgaacacagtttccgtcatgattaacgaggaactgttcagtgggatgtacatagatttcatggggacggacgcggcaatttttagatcgctcaccaaaaggaatgccgtgcgaactgatcagcacaactcaaaatggttaagcgagcctatgttcgtggacgctcacgtgataccggacggtacggaccccaacgacgccaaggtgtattttttcttcaaagagaagcttactgacaataaccgctcgactaagcaaatacactccatgattgcccgaatctgcccgaacgatacaggcggtctccgcagcctagtgaacaaatggacaacttttctgaaggcacgtcttgtgtgctccgtgacagacgaagacggcccagagactcatttcgatgaattagaagacgtcttcctccttgaaaccgacaaccctcgcacaaccctcgtgtacggcatattcacgacatctagctccgtgtttaagggatcagccgtgtgtgtctaccacctctcagacatccagactgtgtttaacggacctttcgctcacaaagaaggccctaaccatcaacttattagctaccagggacgcattccttaccccagacctggcacttgcccgggtggggcttttactcctaatatgcgtaccacgaaagagttcccagatgatgttgtgacctttattcgcaatcaccccttgatgtataattctatttacccaatccataaaaggccactcattgtgcggataggcacagattacaaatatactaagatcgccgtggatagggtgaatgctgcagacggtcgttatcacgtgctattcctggggacagatcggggtacagtccagaaggtagtagtgttgcctaccaataactccgtctcaggggagctcatcctggaagaattggaagtcttcaaaaaccatgctcctatcacaacaatgaagatatcatctaagaagcagcaactttacgtcagtagcaatgaaggggtctcacaagtgtcattacatcgttgtcatatctacggcacggcgtgcgctgactgttgtctggccagggatccttactgtgcttgggacggacacagctgttcacgcttctacccaaccgggaagcggagaagcaggagacaggatgttcggcacggaaacccactgacacagtgtcgcggattcaacctgaaagcgtataggaacgccgctgaaatagtccagtacggcgtgaagaataataccactttcttagagtgtgccccaaagtcaccacaggcctctattaaatggctgctgcagaaggacaaggaccgacgcaaagaggtcaagctgaatgagcgaattatagcgacatcccaaggcctgctgatccgatccgtccaggggtctgaccagggactgtaccattgcattgccaccgagaacagcttcaaacagaccattgcaaaaataaacttcaaggtgctagactccgagatggtggcagtggtgaccgacaagtggtctccgtggacgtgggcttcaagcgttagagcccttcccttccaccccaaggacatcatgggggctttctctcacagtgaaatgcaaatgattaaccaatactgcaaggatactagacagcaacaccagcagggcgatgagtcccagaagatgcgcggtgactatggcaagctaaaggccctcattaattcaaggaagtctcgcaatcgaagaaaccagctgcccgagtcctag

SEQ ID NO: 11725 - DNA, 942 bp, synthetic construct
  misc_feature 1..942: note = source = /note="Description of Artificial Sequence: Synthetic coding sequence"
  source 1..942: mol_type = other DNA
atgcccggttggttgacactgcctacgctttgtcgatttctgttgtgggcattcaccatatttcacaaggcacagggcgacccggcaagccaccctggcactaccccgccatcttataaggtccgttggtctaaggttgaacccggtgaactgcgggagacactaatacttatcacaaacggactccacgccagaggctacggccctctgggaggaagggcccgtatgcgacgaggacaccggttggatgctagcctcgtgattgcaggtgtaaggctcgaggatgaggggcgatacagatgcgagctcataaacgggattgaagatgagtctgtagctctaaccttgtctctggagggggtggtcttcccctaccagccatctagaggcagataccagttcaactattacgaagctaagcaggcgtgtgaggagcaagatgggcgtttggctacctattcacaattataccaagcatggacagaggggctcgactggtgtaatgctggctggcttctggaggggtcagtcaggtacccagtgctgaccgcgagagccccttgcgggggacggggacggcctggaatccgctcttacggcccaagagaccgcatgcgggatcgctacgacgccttttgtttcaccagcgcactcgctggacaggtattctttgtaccgggtcggctgaccttgtccgaggctcacgcggcttgtcggcgacgaggggctgtggtggcaaaggtcggtcatctgtacgccgcttggaagttcagcggccttgaccagtgcgacggtgggtggcttgcagatggaagtgtccggtttcccatcacaacaccacggcctaggtgtggcggactgcccgatccaggcgttcgctcattcgggttcccgcgtccacagcaagccgcatatggtacgtactgctacgcagaaaattag

SEQ ID NO: 11726 - DNA, 1089 bp, synthetic construct
  misc_feature 1..1089: note = source = /note="Description of Artificial Sequence: Synthetic coding sequence"
  source 1..1089: mol_type = other DNA
atggcttggactttcgaatgcagccggacaacatctcccgagcccctatctacctctccctgccgcaccaccagtagccgcaacagtcctacaatgtcctgtcctgcatcggtggcctgcgagcccagcacttccaccactacttccagcccccctaaggcatgtctgacgcgaccaagcagtccatcgccttcgtgctccacttccgcctggcacaataagaacaacctcatcagcaaggtgccccgaggtgctttgtctaggcagacgcaattacgggaattgtacctgcaacacaaccagcttactgactctggtctcgacgccacaacattctctaagctgcactcactggagtatttagatttgtcccataatcaactgactacggtgccggcagggcttccccgaaccctggcaatcctgcacctgggaaggaatcgcatcaggcaggtcgaggctgctaggctccatggtgccaggggattacgctacctcctcctgcaacataatcaactgggctcttctgggctgcccgctggcgcattgcgacccttacggggactgcacacacttcatctttacggcaacgggctggatagagtgcccccagcacttcccagacgtttgagagcgctcgtccttcctcacaaccatgtggcagccctcggcgcaagggacctggttgctaccccagggctgacagagctgaatcttgcatacaataggctagctagcgcgcgtgtacaccaccgggctttcaggagactgcgcgcactccgatccctggatctggcgggtaatcagctgacacggctccccatgggactccccacaggcctgaggacgttgcagctgcaacgtaaccaactgcggatgctggagccagaaccgctggctggcctagatcagctgcgagagctctccctcgcgcataataggttgcgagtaggagatattggacctggaacttggcacgaactgcaggccctccaagtccgccatagacttgtatcccacacagtgcccagagccccaccgagcccttgcttgccctgtcacgtacctaacatcttggtcagctggtag

SEQ ID NO: 11727 - DNA, 900 bp, synthetic construct
  misc_feature 1..900: note = source = /note="Description of Artificial Sequence: Synthetic coding sequence"
  source 1..900: mol_type = other DNA
atgctccatcctgagacatctccaggcagaggccacctcctcgccgtactgcttgctcttctgggtactgcttgggctgaggtttggccaccccagctgcaagaacaggcgcctatggccggagcattgaatcgcaaggagagcttcctgctactatctctgcacaataggctgaggtcctgggtccagcctcccgctgccgacatgaggagactggactggagcgacagtttagcccagcttgctcagggtagccctctatggaatcctaatcctgagccgggagttcgaccggttgcccaccccgcaagtggtctcgagcatgcagcagctcccagagcatggtgccccctatctaagtggtcattatggtttgcagaagggcaacgctattctcacgctgctggagagtgtgcgagaaacgctacatgtactcactatacccaactggtgtgggcaactagctcccagttaggatgcggtagacacctctgttctgccggacaggccgctatcgaagcatttgtctgcgcctactctccgaggggtaattgggaagtcaatggtaagaccatcgtcccttacaaaaagggggcttggtgcagcctgtgcactgcctcagtctctggctgcttcaaagcctgggatcacgctggtggcctttgcgaagtgccaaggaacccctgcaggatgagctgtcagaaccatggaaggctgaacatcagcacctgtcattgccactgtcctcctggatacaccggccgttactgccaggtgagatgctccttgcagtgtgttcatggacgcttcagggaggaggagtgcagttgcgtttgtgatatcgggtatgaaccttccgttccaccacgctgtatttttccatctacacccgtgacctag

SEQ ID NO: 11728 - DNA, 1047 bp, synthetic construct
  misc_feature 1..1047: note = source = /note="Description of Artificial Sequence: Synthetic coding sequence"
  source 1..1047: mol_type = other DNA
atgctggataccaacctgatcttactgcccctatttcagttcatcgtcccaaaagaatggaattcgaaatacagacccgtgtgcattcacctggctggtaccggcgatcatcactattggcgacgcaggacacttatggccagaccaatgatcaaagaggcacgtatggcgtcccttctgctggaaaacccttactacggctgtagaaaaccaaaggaccaggtcaggagtagtctcaaaaatgtcagtgatctgttcgttatgggcggagctttggtgctggaaagcgccgctctactgcactggctggagcgcgaaggatacggaccactgggcatgacaggtatatccatgggagggcatatggcctccttagctgtttcgaattggcccaagccaatgccccttatcccctgtctgagctggtccaccgcaagtggggtgtttactaccacagattccttcaaaatgggtcaggagtttgtgaaacacttcaccagcagcgcagataaattgacaaatcttaacttggtttcccgcaccctcaacctggatatttccaaccaagttgtgtcacagaaaccagcagactgtcacaacagcagcaagacctccgtatcagccacctccgaaggactgctgctgcaggatacttcaaagatgaaaaggtttaaccagacactgagtacaaataagagtggatatacttccagaaatccccagtcttaccacttgctgtccaaggaacaatcaagaaactccctccgtaaggaatccctgatcttcatgaaaggtgtaatggacgagtgtacacatgtcgcgaacttctcagtgccggtcgacccctccctgataattgtggtccaggccaaagaggacgcctatattcctaggactggcgtgaggtcgttgcaagaaatctggccaggctgcgagatcagatatctggagggtggacacattagcgcctacctatttaagcagggcttgtttcggcaggctatctacgacgcctttgacagattcctccacaagtatgcaaattag

SEQ ID NO: 11729 - DNA, 1044 bp, synthetic construct
  misc_feature 1..1044: note = source = /note="Description of Artificial Sequence: Synthetic coding sequence"
  source 1..1044: mol_type = other DNA
atgcgggcttgcatttccctcgtcctcgcagttctctgtggcttggcctgggcagatctgtatagcgccccaacatcatgccaggggaggtgttatgaggccttcgataagcaccatcaatgccattgcaacgctcgctgccaggagtttgggaattgctgcaaagactttgagtccttgtgcagtgaccacgaagtctcccacagcagcgatgctatcacaaaagaagaaatacagtctatttccgaaaaaatttatcgcgcagacacaaacaaagcccagaaagaagatatagtactgaactcccagaactgcattagcccatctgaaactagaaatcaagtggacagatgccccaagccactgttcacttacgtgaatgagaaactgttctctaagcctacttatgctgcttttattaacctgctaaataattaccagcgtgccactggacacggagagcacttttctgctcaagaactcgccgaacaagacgcttttctacgggaaataatgaagactgcagtgatgaaagagctttactcttttcttcatcatcaaaatcggtacggaagcgaacaggaattcgtagacgacttaaagaacatgtggtttggcctgtactccagagggaacgaggaaggggacagtagcggttttgagcacgtgttcagcggggaagtgaagaaaggaaaggttaccggtttccataactggattagattctatctcgaggaaaaggagggcttagtggactattactcccatatttacgatgggccttgggactcctatccggacgtgttggcgatgcaattcaattgggatgggtattacaaggaagtgggttcagctttcattggatcatcacctgaatttgagttcgcattgtatagcctatgctttatcgctcgccctgggaaggtgtgccagctaagcttgggagggtatcctcttgccgttcgtacttacacctgggacaagagtacttatggaaacggcaagaaatatatcgcgacagcatatattgtctcttctacctag

SEQ ID NO: 11730 - DNA, 864 bp, synthetic construct
  misc_feature 1..864: note = source = /note="Description of Artificial Sequence: Synthetic coding sequence"
  source 1..864: mol_type = other DNA
atgctgaagaaaatcagcgtgggcgtagcgggtgatcttaatactgtcactatgaagttggggtgtgtactgatggcttgggctttgtacctctcactcggcgtgttatgggtcgcccagatgctgttggctgcgagttttgaaactttacagtgcgagggaccagtctgcaccgaagagtcaagttgtcacacagaggatgatttgaccgacgctcgagaggctgggttccaggtaaaggcctacacattcagtgaacccttccaccttatcgttagttacgagctgttccccgcaccgattttgcgagccgtccctagcgcagagccccaagctggatcaccaatgacactgagctgtcaaaccaaactgccactccagagatctgccgcacgcctactatttagtttctacaaagatggccgtatcgtccagagccgtgggctgtcctccgaattccagatccctacagcaagcgaggatcatagtggaagctactggtgtgaggctgctacagaggataaccaggtgtggaagcagagtcctcagttggaaatccgggtgcagggcgcatcctcaagcgccgctcctcccacactgaaccccgctcctcagaagtccgccgctcccggaactgcaccagaagaagcgcctggacctttgcctccgcctcccacacccagttcagaagatccgggtttctcaagcccattaggcatgccagacccccatctgtaccaccaaatggggcttttactcaagcatatgcaggatgtccgagtgcttctcggacatttacttatggagcttagagaactgtcaggccatagaaaacctgggaccactaaggctaccgctgagtag

SEQ ID NO: 11731 - DNA, 1815 bp, synthetic construct
  misc_feature 1..1815: note = source = /note="Description of Artificial Sequence: Synthetic coding sequence"
  source 1..1815: mol_type = other DNA
atgatgcgcgctgtgtgggaggccctggcagccctggccgctgtcgcatgccttgtgggggctgtgcgcggtggtccaggactgagcatgttcgccggtcaggcggctcaaccagacccatgcagcgacgaaaatggtcatccccgacggtgcattcctgatttcgtcaatgctgcattcggaaaggacgtacgggtctcctcaacctgtggacgaccccctgcgagatactgtgtcgtatctgagcgaggtgaggagcgtctgcggtcttgccacttgtgcaatgccagcgacccaaagaaggcccacccccctgccttcctcacagacttgaataacccgcacaacctgacgtgctggcagtctgagaactacctccaattcccacacaacgtgacccttaccctcagtctcggcaagaagttcgaagtgacttacgtctctcttcagttttgctctcctcgaccagagtctatggctatatacaagagcatggattatggtcgcacgtgggtgccctttcagttctactccacccagtgtagaaaaatgtacaatcggccacaccgcgcacccatcaccaagcagaatgaacaggaggcagtatgtactgactcccacacagacatgagaccgctgagtgggggacttatcgcgtttagcactttagatgggaggccgtccgcacatgattttgataatagtcctgtcctgcaggactgggttaccgctacagacattcgagtggcctttagtcggctacatactttcggcgacgagaatgaagacgactcggagcttgcccgtgatagctatttctacgcagtgtccgacctgcaggtcggaggcaggtgcaagtgtaatgggcacgccgcacggtgcgtccgcgatcgggacgatagtttggtgtgtgattgtcgacacaatacagctggacctgagtgtgatagatgcaaacccttccattacgatagaccctggcagcgcgcaactgccagggaggccaatgagtgcgtagcctgcaactgcaacttacacgcacgcaggtgtaggtttaacatggaactgtataaactgtccgggcgtaaaagtggtggtgtgtgcctgaattgtagacacaacactgccggacgccactgtcactattgtaaggaggggtattatagagacatgggcaaacccatcacccaccggaaagcttgtaaagcatgcgattgtcacccagtaggcgcagccggtaagacctgtaaccagacgacaggacagtgtccctgcaaggatggggtcacaggcattacatgtaatagatgcgccaaaggctatcagcaatccaggtctccaatagctccttgcataaagattcctgtagcacctcctacgacggctgcctccagcgttgaggaacctgaagattgcgatagctattgtaaggccagcaagggaaaattgaaaattaatatgaagaagtactgtaagaaggactatgctgtgcagattcacattctcaaggccgacaaggcgggtgactggtggaaattcaccgtgaacattatctccgtgtataaacaggggactagtcgtatccgtagaggcgaccagtcactgtggatccggtctcgggatatcgcttgcaaatgcccaaagattaagcctttgaagaagtatctactcctgggaaacgctgaagacagcccggaccaatccggtatcgtcgcggacaaaagttccttggtgatccagtggagggacacatgggcacgacggctgcgaaaattccagcaacgcgaaaagaaaggaaaatgcaaaaaggcgtag

SEQ ID NO: 11732 - DNA, 1005 bp, synthetic construct
  misc_feature 1..1005: note = source = /note="Description of Artificial Sequence: Synthetic coding sequence"
  source 1..1005: mol_type = other DNA
atgagatctgccggtggccgtggagaaataaaggtgaggagggaactgcagcccagcaaacaggtgtctggattgactaatcatgcaagaacagggcaggagaaacggaaccttcaaagattggtgttggagactccaagccagaatatcttcttttctcctgtgtcagtaagtacgtccctggccatgctatctttgggagcacacagcgttacaaagacacagattctgcagggactggggttcaacctgactcacaccccagagtcagccatccaccagggctttcagcacttggtccattccctcaccgttcctagtaaagacctgaccctgaagatgggctcagccttgttcgtgaaaaaggaactgcagctgcaggccaatttcctgggtaatgtgaagcgcctctatgaggccgaggtcttctccactgatttcagcaatccctcgatcgcccaagctcgcatcaattctcacgtgaaaaagaagacgcagggcaaagtggtggatattatacagggtcttgacctgctcacagcaatggtcctcgtgaaccacatcttctttaaggcaaaatgggaaaagccatttcatcctgagtacacgcgtaagaatttcccgtttctggtgggggagcaggtgacagtgcatgttccaatgatgcaccagaaagagcagtttgcctttggggtggacacagagcttaattgttttgtgctgcagatggactataagggggacgcagttgcttttttcgtgcttccatcgaaaggcaagatgcggcagctggagcaggcactaagcgcccgaacgctacgcaagtggtcgcactcactgcaaaagcggtggatcgaggtgttcattccaaggtttagcatttccgcaagctataatttggaaaccatcttacccaaaatgggtatccaaaatgttttcgataagaacgcagatttcagcggcattgcgaaaagagacagtctgcaggtatccaaagtatcatag

SEQ ID NO: 11733 - DNA, 1065 bp, synthetic construct
  misc_feature 1..1065: note = source = /note="Description of Artificial Sequence: Synthetic coding sequence"
  source 1..1065: mol_type = other DNA
atggccccagcaagaaggcccgcaggagccaggctgctgctggtgtacgccggtttactagcagccgctgccgctgggcttggatcccccgaaccgggtgcaccgagtcgcagtagagccagacgcgagccaccccctggcaacgagctgcctcgcggaccaggtgagagcagagctggcccagcagcaagaccccctgagcccaccgccgagagggctcattcagttgaccccagggacgcttggatgctcttcgtccgacaaagtgacaagggtgtcaacggaaagaagcggtcaagggggaaggcaaaaaagctcaaatttggactacccggacctccaggtccaccagggcctcaggggcctcctggccctattatccccccagaggctttgttaaaggaatttcagctgctgctgaagggagcggtgagacaacgtgagcgggctgagcctgaaccctgcacctgtggccctgccggacccgtggcggctagtttggctcccgtgtccgccaccgcaggtgaggatgacgacgatgtcgtcggggatgtcctcgcactgctcgccgcaccccttgcccctggacccagagcccctcgcgtagaagccgcattcctgtgtaggcttcgccgagacgctcttgtggagaggcgggctctgcacgagctcggcgtatactacctgccagatgccgaaggggcattcagacggggacctggcctcaacttaacatccgggcagtaccgagctccagtggctggattctatgcccttgctgccacgcttcacgtggcacttggagagccaccacggcgaggaccaccacggccaagagatcatctcaggttgctcatctgtatccagagccggtgtcaacgaaacgcctcactagaagccattatgggtttggaatcatcatcggagttattcaccatctccgtaaatggcgtgctgtacctgcagatgggacagtggaccagtgtctttctcgataatgcaagcggttgctccctcactgtcagaagtgggtcccatttttccgctgtgctgctgggtgtatag

SEQ ID NO: 11734 - DNA, 2685 bp, synthetic construct
  misc_feature 1..2685: note = source = /note="Description of Artificial Sequence: Synthetic coding sequence"
  source 1..2685: mol_type = other DNA
atgtctctacccaggtgctgtccccaccctctgaggccggagggatccggcgcaatggggccagaagccttatcctctctgctgctgttactgctggtggcgtcaggggacgctgatatgaaaggacactttgatccagccaagtgtcgatatgcccttggcatgcaagacagaacgatcccggatagcgatatctccgccagtagctcctggtccgattctaccgcagccagacacagtcgtttagaatccagcgacggggacggcgcttggtgcccagctggcagcgttttcccaaaagaagaggaatacctccaagtggacctgcagcgcctgcacttggtggccttagtgggtacacagggtcgtcacgccggaggcctgggaaaggagttctcgagaagttaccgccttagatactcccgggatggtagacggtggatgggatggaaggatcgatgggggcaagaggtgatcagtgggaatgaggatcctgaaggggtcgtgctgaaagacctgggtcctccaatggtcgcacggctggtgcgcttttatccaagagctgaccgtgtaatgtcagtatgtttacgggtcgaactctatggctgtctctggcgcgatggcctgcttagctatacggctccagttgggcaaacaatgtacctgtccgaagccgtgtatctaaacgatagcacctacgacggacatacagtgggaggtctgcagtacggcggactcgggcagctggcagacggcgtggttggcctggatgatttccgtaaatcacaggaactgagggtttggcccggatacgattacgtcggctggagtaaccacagcttttccagcggatatgtggagatggaattcgagtttgatagactgcgtgcttttcaagctatgcaggtgcattgtaataacatgcatactctgggagccagactgccaggcggagtcgaatgtagattcaggcgaggacctgctatggcatgggagggggaacccatgagacataaccttgggggaaacctcggagacccccgagcgagggccgtgtccgttcctttaggtggcagggtcgctaggtttttgcagtgccgattcttgtttgctggaccttggcttctgttctccgaaatttctttcatttccgacgtggtgaacaattcaagccccgcactagggggaaccttcccaccagccccttggtggccgcctggtccccctcccacaaactttagctcacttgagctggagcctcggggacagcagcctgtggctaaggctgaagggtccccgactgctatcctgatcggatgcttggttgctattatcctgctgctgctcctgatcattgctctaatgctttggcgcctccactggcgccgactgctgagtaaagctgagagacgagtgctcgaggaagaactgacagtgcacctctcggttccaggggatacaatcttaataaataatcggccaggcccacgggagcccccaccctaccaagaacctaggcctcgcggaaatcccccacattcagctccatgcgtccccaatggatcagcctacagcggcgactacatggagccagagaagccaggtgcacctctgcttccgcctcctcctcagaactcggttccccactatgcagaagccgatatcgtcacgttgcagggcgtgacaggcggtaacacttacgctgtgccagctttacccccaggtgccgttggggacggccctccacgagtggatttcccccgaagtagactgaggtttaaagaaaagctgggtgagggacaattcggtgaagttcacttgtgtgaggttgacagcccccaggacttggtctccctcgatttccctctcaacgtgagaaagggccatcccctgctggttgctgtcaaaatactgcggccagacgccactaagaacgctcggaacgactttctaaaggaggtaaagatcatgtcgagactgaaggacccaaatatcatccggctcttgggggtttgcgtgcaggacgaccctctgtgcatgattacagattatatggaaaacggagatttgaatcaatttctctccgcgcaccagctggaagacaaagccgcagagggagctccaggtgatggacaggccgctcagggacccacaatctcctatcccatgttgctccacgttgcggctcaaattgcctctgggatgcgctacctagccaccctgaactttgtgcacagagatttggctacccgcaattgcttggtcggcgagaacttcaccataaaaattgctgactttggcatgtctcggaatctctacgctggggattactatagggtgcaggggagggccgtacttccaattagatggatggcttgggagtgtatcctgatgggcaagttcaccaccgcatctgacgtttgggcatttggcgtcaccctgtgggaggtgctgatgctatgtcgggctcagccctttggtcagctgacagacgagcaggtgatcgagaacgccggagagttctttcgagaccagggaagacaggtctatttatcacgtcccccagcatgcccgcaaggactctacgaactgatgctccgctgttggtcacgcgagtccgagcagcgcccaccgttcagccagctccaccgcttcctggcagaggacgccttgaacacagtctag

SEQ ID NO: 11735 - DNA, 2685 bp, synthetic construct
  misc_feature 1..2685: note = source = /note="Description of Artificial Sequence: Synthetic coding sequence"
  source 1..2685: mol_type = other DNA
atgtctctcccgaggtgttgccctcacccgttacggccagagggcagtggcgctatgggtcccgaagctctgtcgtccctactccttttgctgttggtggccagcggtgatgctgacatgaagggacattttgatcccgctaaatgccggtatgccctgggaatgcaggacaggaccatccctgactccgacattagtgcctcttcgtcttggtcagattccacggccgcaagacactctaggcttgagtcatctgacggcgatggtgcgtggtgtcctgcaggatccgttttccctaaagaagaagagtatctgcaggtcgatcttcagcgcttgcacctcgttgcactagtgggaacacagggtaggcacgcaggtgggctgggcaaagaattctcacgatcttacagattacgatattcaagagatggcaggaggtggatgggatggaaggacagatgggggcaggaggtgatttctggcaatgaagaccccgagggagtcgtactaaaagacctcggaccacccatggtggcgaggttggttcgattctacccccgtgccgacagagtgatgagcgtatgcctccgtgtggagttgtacggttgcctgtggagagatggccttctgagttataccgcaccagtaggacagacgatgtacctgagtgaagccgtgtatctaaatgacagcacctacgatggacatacagtgggcggtctccagtacggagggctgggccagctcgcagatggtgtagttggtcttgatgattttagaaagagccaggaacttagagtctggcctggatatgactatgtggggtggtctaatcactcattctcaagcggttatgtcgagatggaattcgagtttgacaggctgagggctttccaggccatgcaggtccattgtaacaacatgcacactctcggggctcgattgcccggaggcgtggaatgcaggtttcggagggggcctgctatggcgtgggagggagagcccatgagacacaacctgggcggaaacctgggtgaccctcgcgcacgtgctgtcagtgtgccactgggtggtagagtcgctcggtttctgcaatgtagatttctgtttgctggaccatggttgttgttttccgaaatttcctttatttcagacgtggtgaataacagcagcccggcacttggaggaaccttccccccagcaccctggtggccacctggaccaccccctactaattttagttccctggaactggagccacgcggacagcaacctgtggccaaggcggaggggtcgcctaccgccatcttgatcggatgcctggtggccatcatcctcctgctactgctcattatcgccttaatgctctggcgactccattggagaaggctcctctcaaaggctgagcgccgagtcctagaggaggagctcaccgttcacctgagcgtgcccggtgatactattctgataaacaaccgccctgggcctagagaacccccaccctatcaggagcctcgccctcggggtaacccgccacacagcgcaccatgtgtgcccaatggcagcgcctattccggcgattatatggagcccgagaaacctggtgccccactcctccctcctccccctcagaatagcgttccacactacgccgaggccgatatcgtgactctgcaaggcgtgactggtggaaatacctacgctgtgcctgcacttccgcctggagccgtgggtgacggaccccctagggtcgattttccacgaagccggctgcgcttcaaagagaagctgggtgagggccagtttggagaagttcacctgtgtgaggtggacagccctcaagatttggtttccctggacttccccctgaacgtaaggaagggccaccctctgctggtggccgttaaaatcctgagaccagatgccactaaaaatgccagaaacgacttcctgaaggaggtaaagatcatgagcaggctgaaggaccccaatataattcgcctgttgggggtgtgcgtacaggacgatccactctgtatgatcacggattacatggagaacggcgatctcaatcagttcctgagcgctcatcaactagaggacaaagccgcagagggagcccctggagacggccaggctgcccagggccctaccatctcttaccccatgttgttgcatgttgctgcacagatcgcctccgggatgcgatatctggcaaccctcaatttcgtgcaccgggacctcgccacgaggaattgtctggtgggagagaacttcaccattaaaatcgccgatttcggcatgagcagaaacttatatgctggagattactatcgggtccagggaagggccgtactccccataagatggatggcttgggaatgcatcctgatgggaaagtttactaccgctagcgatgtgtgggcctttggcgtgacattgtgggaggtcctgatgctgtgccgggctcagccattcggacagttgactgacgagcaggtgattgagaacgctggggagttcttccgggatcagggtagacaggtgtatctgtccagaccacctgcttgcccccaaggtctttatgagctgatgctgaggtgctggtcccgcgagtccgagcagagaccacccttttcccagctgcaccgatttctcgctgaggatgctttgaacaccgtctag

SEQ ID NO: 11736 - DNA, 2886 bp, synthetic construct
  misc_feature 1..2886: note = source = /note="Description of Artificial Sequence: Synthetic coding sequence"
  source 1..2886: mol_type = other DNA
atgctcctgcttcttctgttggctcctctgtttctgcggccacctggtgcaggtggtgcccagacaccgaacgccacgagcgagggttgtcagattattcaccccccttgggagggtgggattaggtaccgaggcttgaccagggatcaggtgaaagcgattaattttttgcccgtcgattatgagatcgagtatgtgtgcagaggcgaacgcgaggtcgttggacctaaagtccgaaagtgcctggccaacggcagctggacggacatggatacacccagccggtgcgtgagaatttgcagtaaatcgtacctcacactggagaacggcaaagtattcctcacagggggtgatctacccgctttggacggtgctcgggttgatttccggtgcgatccagacttccatcttgttggctcttctcgctccatttgttcacaaggacagtggagcactcctaagccgcattgccaagtcaacagaacgccgcactcagaacgcagggccgtctacatcggggctctgttcccaatgtcagggggatggcccggaggccaagcttgtcagccggctgtggaaatggctctcgaagatgtcaattcgaggagggatattctccccgattatgagctgaagcttatacatcatgattctaaatgtgatccgggacaagctaccaaatatctttacgaactgttgtataatgatccgatcaagatcatcctgatgccaggctgtagtagcgtgtccacactggtcgcagaagccgctaggatgtggaacctgattgttctgtcttacggctcatcaagccctgccctatctaatagacagaggttcccaacatttttcaggacacacccaagcgctaccctgcataatcctacgcgggtgaagctgtttgagaaatggggatggaagaaaatcgctacgattcagcagacaaccgaagtgtttacttcaacgctggacgaccttgaggaaagagtcaaagaagccggaatcgaaatcacgttccgtcagtcattcttttccgacccagctgtgcctgtaaaaaacctgaagaggcaggacgcgcgtattatcgtcgggctgttttacgagaccgaagcacggaaggtgttctgcgaggtttacaaggagcggctgttcggcaagaagtacgtctggtttttgattggatggtacgctgataactggtttaagatttatgatccctctatcaattgcacagtggatgagatgaccgaagctgtggagggccacatcacaacagagatcgtgatgctcaatcccgctaatacacgtagtatttcaaacatgacatcccaggaattcgtggagaagctaacgaagaggttaaaaagacaccccgaggagaccggcggattccaggaggcacctctggcatatgacgccatctgggccctggctcttgcactaaataagactagcggcggagggggaaggagtggagtccgcctggaggactttaactataacaaccaaactataaccgaccaaatatatcgcgcaatgaacagcagctccttcgagggagtgtcgggacacgtggtgttcgatgcatccgggagtcggatggcatggacgctcatagagcaactgcagggcggaagctataagaaaattggctattatgactccaccaaagatgacttgtcatggagcaagactgataaatggattggaggttctccgcctgctgatcaaacacttgttattaagacattccgattccttagccagaaactttttatttccgtgagcgtcctcagctctctcggcatagtactggcagtggtctgtctttcatttaatatttacaatagccatgtgcgttacatacagaacagccaaccaaacttgaacaacttaaccgcagtgggctgtagcctagctcttgccgctgtatttcctctgggactggatggctatcatattgggagaaaccaattcccctttgtatgccaagcaagactctggctattaggtttgggattctcccttgggtacggctctatgtttacaaaaatttggtgggtccacacagtgttcaccaagaaagaagagaagaaagaatggagaaagactcttgaaccatggaagctttatgccaccgttggcctcctcgtcggaatggatgtgctgaccctggctatatggcagatcgtggacccgcttcatcgaacaatcgagaccttcgccaaggaagagcccaaagaggatattgatgtgtctattctcccacagctggagcattgtagctctagaaagatgaatacgtggttggggattttttacggatataaaggtttgctgttgctcctgggcattttcttagcctacgagactaaatcagtgagtactgagaaaattaacgatcaccgcgctgttggcatggcaatctacaatgtcgcggtgctttgcctgataaccgcgcctgtgaccatgattctttcaagccagcaggacgcagcttttgctttcgcctccctcgcaatcgtattttcatcctacatcaccttggttgtgctgtttgtccctaagatgcgcaggcttataaccaggggagagtggcagagtgaagcacaggatactatgaagactggatcaagtaccaacaacaacgaggaggagaaatcccgcctcttagagaaggagaatagggaactggagaagattatagccgagaaagaggagcgggtgagcgagctgcgacatcaacttcaatcgaggcagcaacttcgcagtcggaggcacccgcctaccccccctgagccatccggcggtctgcctcgtgggcctccagaacccccagatcgtctgagttgcgacggttcccgcgtgcacctgctatacaaatag

SEQ ID NO: 11737 - DNA, 2559 bp, synthetic construct
  misc_feature 1..2559: note = source = /note="Description of Artificial Sequence: Synthetic coding sequence"
  source 1..2559: mol_type = other DNA
atgttgcccacggaggttccacagagccacccaggcccaagcgcccttctgttgttgcagttgctgctccccccaacaagcgccttcttccccaatatctggtctctgttggccgcaccaggttcaataacccatcaggatctgaccgaagaggcagccttaaacgtgaccctgcagctctttctggaacagccaccaccaggacgccctcccctcagactcgaagacttcttagggcgtacactgcttgcggacgatctcttcgcagcttatttcggtccaggatcttctaggagattccgtgcagcacttggagaagtgagcagagccaacgcagcacaggactttctgcccaccagtaggaacgatcccgaccttcacttcgacgcagaacgcctgggacagggcagggccaggttagtgggcgctctgagagagaccgtggtggctgctcgagctctcgaccacaccttagcaaggcaacgcctgggagcagccctccatgctctccaagatttttattcacactccaactgggttgagctgggcgagcagcaaccccatccccatctgttatggcccagacaggagcttcaaaaccttgcccaggttgcagaccctacttgtagcgattgtgaagagttgtcgtgcccgcgaaactggctggggttcacactcctcacctctggatactttgggacacatcctccaaaaccccctgggaaatgcagtcatgggggacacttcgatcgctccagttcacagccccctagagggggtatcaacaaagattcaacatctcccggttttagcccccaccacatgctccacctccaagcagcgaagctcgcactcctggcatctatccaagccttttctctgctcaggagccgtctcggggacagggacttctcacgactgctagacatcacacccgcttcttccttaagctttgttctggacaccaccgggagcatgggcgaggagatcaacgcagccaaaattcaggcccgtcatcttgtcgagcaacgtaggggaagtcccatggagcccgtccattatgtgttggtcccattccatgacccgggattcgggcctgtgttcaccacatctgatcctgactccttttggcagcagcttaatgagatccatgctcttggcggtggagacgaaccagagatgtgtctcagcgcactacagttagctctgctgcacaccccacccctgagcgatatattcgtgttcacagacgcttcgccaaaggatgcgtttctgaccaaccaggtggagagcctgacccaggagcgtcggtgtcgggttactttcctggtgacggaagatacctcccgggtgcagggcagagcaagaagagagatcctttcacccctccgcttcgagccatataaggccgtggctctggctagcggcggtgaggtaatttttaccaaagaccagcacataagggatgtcgccgctatagtaggagagtcaatggccgcactggtaacactgcctctcgacccacccgtggttgtccccggacagccactggtattcagtgtggatggattgttacaaaagataacagtgcgcattcatggtgatatatccagcttctggatcaaaaatccggcaggagtctcacagggccaagaggaaggtggcggaccactggggcatacacggagattcggccaattctggatggttactatggatgatccaccccaaaccgggacatgggaaatacaggtgacagccgaagataccccaggtgtcagagtgcaagcccagactagtctggatttcttgtttcacttcgggatacccatggaagacggaccgcatcccggtctgtaccctcttactcagccagttgccggactgcagacccagctcttagttgaggtcacggggttgggctcgagggccaacccaggagacccacagccccatttctctcatgtgatcctgagaggggtccccgagggagctgagctcggccaggttcctctggagcctgtggggcctcctgaacgtggcctcttagcggcatctcttagccctactctgcttagtacgccacgcccattttctttggagctgattggccaagacgccgctggacgtcggctccacagggccgcacctcagccctccacagtagtccctgtactcctggagctttctggtccttccggcttcctcgccccaggatccaaagttcccctttccctgaggattgcaagcttttctgggccacaggacctcgatctgaggaccttcgtcaatccaagcttcagtctgaccagcaacctgagccgcgctcaccttgaactcaacgagtctgcttggggtaggctgtggttggaggttcctgattccgccgctcccgatagcgtagtcatggtcacagtgacagccggaggtcgggaggctaacccagtccctccaacacacgcctttctccgcttgctcgtgtctgcccctgcacctcaggtgcgaaaccattattttccaagtcaggggccagcacatcatccgtacagactcatctag

SEQ ID NO: 11738 - DNA, 756 bp, synthetic construct
  misc_feature 1..756: note = source = /note="Description of Artificial Sequence: Synthetic coding sequence"
  source 1..756: mol_type = other DNA
atgcctcatttagcctctctttttacagctagctcccggtgctgccctcatcctctccgacctgaaggctctggggctatggggccagaggctctgagtagtctgctgctcctcttacttgtcgcaagtggggatgcagatatgaaaggccattttgatcccgctaaatgccgatacgcgcttgggatgcaagatcggaccattccagactcagatatttctgccagcagtagttggagcgattctactgccgctcgtcacagccgccttgaatccagcgacggcgatggggcatggtgcccagcgggtagtgtgtttcccaaggaagaggaatacctgcaagttgacctccagcgattgcacctggtcgcactagtcggcacacagggaaggcacgctggaggactcggcaaagaattctcaaggtcttatcgtcttagatatagcagggatggacggaggtggatgggctggaaggatcgatgggggcaggaagttatctcaggaaatgaggatccagagggcgtcgtactcaaggatcttgggccacccatggtggcgaggctggtacgcttttatcctcgggcagatcgggtgatgtcagtctgcctgcgcgtagaactctacggatgcctttggcgcggtgagtggttatcattcctcggcatctgcttcctttcaagaggtctggaagggggtgaatgcggcgaatgggcctcgcgcatcccatcacctgcaggaaaactgtcgctgtag

SEQ ID NO: 11739 - DNA, 726 bp, synthetic construct
  misc_feature 1..726: note = source = /note="Description of Artificial Sequence: Synthetic coding sequence"
  source 1..726: mol_type = other DNA
atgaaatttatactcctgtgggcactcctgaacctcactgtcgcgcttgctttcaatcccgactataccgtgtcatccacgcccccttacctcgtgtacttgaaaagtgactacttgccctgtgcaggtgttctgattcaccccctatgggtgattactgcagcccactgcaaccttccaaagctgcgcgtaattctgggggtcacaataccagcagatagcaatgagaagcacctccaagtcatcgggtacgaaaagatgatccaccacccccacttttccgtgacttctattgaccatgatataatgcttatcaaacttaaaaccgaagcggagcttaatgactatgtgaaattggcaaatctcccttatcagaccatatccgaaaacactatgtgctcagtgtcaacttggtcctataacgtgtgtgacatatataaagaaccagactcattgcagacggttaacatcagtgttataagcaagccgcagtgtcgcgatgcgtacaagacatataacataacagaaaatatgctgtgtgtcggaattgtgcccggaagaagacagccatgtaaggaggtgtcagcagcaccagctatctgcaacggaatgcttcagggaatactcagctttgccgacggttgtgtcctccgcgcagacgtgggaatctacgcaaaaatattctattacataccttggattgaaaacgtcatacagaacaattag

SEQ ID NO: 11740 - DNA, 1536 bp, synthetic construct
  misc_feature 1..1536: note = source = /note="Description of Artificial Sequence: Synthetic coding sequence"
  source 1..1536: mol_type = other DNA
atggccaaaggcctcagcgtacagaatgataagcaccccggatatcaacctgctctcctcctgagtcccggagctcctctgttcgcagatgggccagcgtacgctctgctccatctgcttctccatgaagggaaagcggaaatggcggatcaggccgctgcctggctgaccagacagggctcattccagggagggttccgctccactcaggacacagtgatcgcattggatgctctcagcgcctactggatagcttcacacacaaccgaggagcggggtctaaatgtgactctctcttcaaccggtcgcaacgggtttaagagccacgcactgcagctgaataaccgtcaaatccggggacttgaagaggaacttcagttctcactgggtagcaagatcaacgtgaaagtcggcggtaactctaaaggcaccctgaaggttctgagaacctacaatgtgctcgatatgaagaacacaacctgccaagacttgcagatcgaggttacagttaagggacacgttgagtatactatggaagctaacgaagattatgaagattacgagtatgacgaactacctgctaaggacgaccctgatgctccattgcagcccgttacgcccctccagcttttcgaggggaggagaaaccggagacgtagagaagcacctaaggtcgtggaggagcaagagtcgcgtgtgcactataccgtgtgcatctggaggaatgggaaggtgggtctgtcgggtatggctattgctgacgttaccttgctgtctggattccacgccctccgggctgatcttgaaaagctcacttctctgagcgaccgatatgtcagccactttgagactgagggccctcatgtgctgctatacttcgactctgtacctacgtcgcgagagtgcgtgggtttcgaagcagtgcaagaggtacctgtaggactggtacagccagccagcgctacactctacgactattacaatcctgaaaggcggtgctcagtcttctatggggcaccttcgaaatctcggctcctggcaaccctgtgcagtgccgaagtttgtcagtgtgcggagggtaagtgtcctcggcagcgcagggctctcgagcggggactccaggatgaggacgggtacaggatgaaattcgcttgctattacccacgtgttgaatacggatttcaagtcaaagtcctgcgagaggattccagagcagctttcagactcttcgaaacgaagatcacacaggtccttcactttactaaggatgtaaaggcagccgctaatcagatgcgcaacttcctggtgagggcaagctgccgcctccgtctcgagcctgggaaagagtatctgatcatggggctggacggcgcaacctacgacctggaaggccacccccagtaccttctggattctaattcgtggattgaagaaatgccgagcgagaggctgtgtagatctacccgacagagagccgcttgtgcacaactgaatgacttcttacaggagtacgggacacaaggttgtcaggtttag

SEQ ID NO: 11741 - DNA, 2067 bp, synthetic construct
  misc_feature 1..2067: note = source = /note="Description of Artificial Sequence: Synthetic coding sequence"
  source 1..2067: mol_type = other DNA
atgttaccgaccgaggtgccgcagtcacacccaggacccagcgctcttctcctacttcagctcctcctcccgcctacaagcgccttctttccaaatatttggtctcttcttgcagccccaggttccatcacacatcaagacctgaccgaggaggctgccttgaacgtaacattgcagcttttcctggagcaaccccctcctggtcggccacctctccgcctggaggattttctggggagaaccttactcgctgacgacctattcgccgcttattttggcccagggtcctccaggcgatttcgcgcagccctcggtgaggtctctagagccaatgccgcacaggactttcttccaacatcaaggaacgatcccgacctgcattttgacgcagagcggctgggccaggggagggcaagacttgtgggcgctttgcgagaaacagtcgtagccgcaagagccctggaccataccctcgctcgccagcggttgggcgctgcccttcatgccttacaggacttctactcacactctaattgggttgagctgggcgagcagcagccacatcctcacctgctgtggcctagacaggaactccaaaacttagcacaggtagcagacccaacatgctccgactgcgaggagctctcttgcccacggaactggctgggcttcactctcttgacatcaggctatttcgggacccaccctcccaaaccaccgggaaaatgttcccacgggggacactttgatagatccagttcccaaccgcctcggggtggcatcaacaaggactccacttcaccagggttctccccacatcacatgttgcatctgcaggccgctaaacttgcactcctcgcttccattcaggcttttagcctcctgcggtcacgccttggtgatagagacttctctaggctcttagacatcaccccagccagctcactgagcttcgtgctggacacaaccggttcgatgggggaggagatcaatgccgcaaagatccaagctagacatctagtcgaacagagacggggatccccaatggagcctgtgcactatgtcctggtcccttttcacgaccccggattcggccctgtgtttaccacgagtgaccctgattctttctggcagcagctaaatgaaatacatgcattaggcggaggtgacgaacccgaaatgtgtctctctgccctgcagctggcgctgcttcatacaccccctctgtcagatatttttgtcttcaccgatgcgtcccctaaagacgcgtttctgacaaatcaggttgaaagcctgacacaggagcgtcgatgccgagtgacctttcttgtgacagaagacacctctcgggttcaaggcagggccaggagagaaattctgtctcctctgcgtttcgaaccatacaaggccgtggccctcgcctctggcggtgaggtgatctttactaaggatcaacacattagagacgtcgccgcaatagtcggtgagagtatggctgccctggtgacattaccactcgacccacccgtggtagtgcctggacagcctctcgtattttcagtggatggtctgctgcagaaaatcacagtgaggatccacggggatatctcttcattctggattaagaatcctgctggggtgtctcaggggcaggaggagggaggaggtcctcttggccacacaaggaggtttggacagttctggatggtgacaatggacgacccacctcagaccggtacctgggaaatccaggtgaccgccgaagatactcctggagtgagggttcaggctcaaacttcactggactttttgtttcattttggcatccctatggaagacggaccccaccccggtctctatcccctgacgcagcctgttgccggattgcagacccagcttcttgtggagtctcagagctgggggtcatctgctgccttcctgccgcgtcaccctagccggggacccagggggtgtcgcactaggccaggcgctttaggtgcacgcggtacctcaggtgcaaggtctccccgtagccttgcagtggcccacgctgctgtccacccctag

SEQ ID NO: 11742 - DNA, 2559 bp, synthetic construct
  misc_feature 1..2559: note = source = /note="Description of Artificial Sequence: Synthetic coding sequence"
  source 1..2559: mol_type = other DNA
atgctacccacggaagtgccgcaaagccatcctggacccagtgccttactcctgctgcagttattactcccacctacatcagccttttttcccaatatctggtccctgcttgccgctccaggttcaattacgcaccaggatctgaccgaagaagctgccttaaatgtgaccttgcagctctttcttgaacagccaccaccaggcaggcctccgctgcgactcgaagacttcttagggagaacccttttggccgatgacctgttcgccgcttacttcggaccaggcagctctagaaggttccgagctgccctcggggaggtcagcagagccaacgccgctcaggattttttgcctacttctagaaacgatcctgatctccacttcgacgcagagcggctgggccagggccgagccagactggtgggagcccttcgtgagacagtggtcgccgcaagagccctggaccacacactagcacgccagaggctgggtgcagctctgcacgcactccaggatttctattctcactcaaattgggtcgaactgggcgaacagcagccccatcctcacctcttatggccaagacaagaactccaaaatcttgcacaggtagctgaccctacttgctcagactgtgaagagctgtcatgtccaaggaactggctggggttcactctattgacaagcggttacttcgggacccaccccccaaaaccacccggaaaatgtagccacggcggtcatttcgataggagctccagccagccaccccgtggcggaatcaacaaggatagtacctcccccggattcagccctcatcacatgctccatttacaggcagctaagcttgctttgctcgcctctatccaggcattttccctattacgcagcagactcggggatcgggacttcagtcggcttctggatataactccagcttccagcttgtctttcgtgctggatacaacaggaagcatgggagaagaaattaacgctgccaaaatccaggccaggcaccttgtggagcagcgccgaggttcccccatggagcccgtgcattacgtgctcgtgcctttccatgatcccggatttggccctgtattcactacttctgaccccgattctttctggcagcagttaaacgagatccatgctttaggcggtggggacgaacccgagatgtgtttgagcgcacttcagctggcactgctccacaccccccctctgtctgacatctttgtgtttacagatgcctctcccaaggacgccttccttaccaaccaggtggagtccctgacgcaagaacgaaggtgccgggtgacattcctggttaccgaggacacctctcgggttcaagggagagccaggcgggagattcttagtccattacgtttcgagccgtacaaagctgtggccctggcctccgggggtgaagtgatcttcactaaagatcaacacatcagagacgttgccgcaatcgttggagaatctatggcagctcttgttactctgcccttggatcctcctgtcgtggtgccaggacaaccattggtgttcagcgtagacggtcttctgcaaaagattacagtgcgcatccacggcgatatatcttccttctggataaagaacccagccggagtctcacagggtcaggaagagggcggaggtcccctgggccatacccgtaggttcggacagttctggatggttacaatggacgacccaccccaaacaggcacctgggaaattcaggtgacagcagaagatacgccaggtgttcgggttcaagcccagactagtttggacttcctttttcactttggaataccaatggaagacggcccacatcccggattatatcctctgacgcagcctgtggccggactgcagacccaactcctggtggaggttactgggctgggtagccgagcgaatccaggggacccccaaccacattttagccatgtgatactcaggggtgtgccggagggtgccgagctcggccaagtgccgttggagcccgtcggccctcccgaacgtggactgcttgcggcaagcctctcacctacccttttatctacaccccgacccttttctctggagctgatcggacaagacgccgcagggagacgcttacacagggccgctcctcagccctctacagttgtgcctgtgctgctcgagctgtcagggccaagcggctttttggcccctggttctaaggtgccactcagcctacgaatcgcatccttcagtggtccacaggatctcgaccttcgcactttcgtgaacccctctttcagcctgacaagcaacctgagtagagcccatctcgagctgaacgaaagtgcatggggcaggctgtggctggaagtgccagacagcgccgctccggactcagtagtgatggtcacagtgacagccggaggacgcgaagctaaccccgtacctcctacacacgcctttctgcgcctgctagtttctgccccagctcctcaggtgcggaaccactacttcccatcccagggacctgctcaccatccctacagacttatttag

SEQ ID NO: 11743 - DNA, 1737 bp, synthetic construct
  misc_feature 1..1737: note = source = /note="Description of Artificial Sequence: Synthetic coding sequence"
  source 1..1737: mol_type = other DNA
atgcttcttctgcttcttttagccccactctttttgagaccacccggagcgggaggcgcacagacgcctaacgctacttcagaaggatgccaaatcatacatcccccatgggaaggcggtatcaggtataggggtttgacaagggaccaggtgaaagccataaattttctcccagtcgactacgaaatcgaatacgtgtgtagaggggagcgcgaggttgttggccctaaagtcagaaagtgcctcgccaacggaagctggaccgacatggatactcctagccggtgcgtgaggatctgctccaaatcttacttaaccctggagaacgggaaagtctttctgaccggaggggatctgcctgcccttgatggggcacgggtggacttcagatgcgatccagacttccacctggtcggctcgtcccggtccatttgttctcaggggcagtggagcacccccaagccgcattgtcaggtgaatcgcacccctcactcagagaggagggccgtgtacatcggtgcgctcttcccaatgagtggcggttggccaggaggtcaggcctgccagccggctgtggagatggctttggaggacgtcaacagcagaagggacatcctccccgattatgaattgaagctgattcaccacgattccaaatgcgaccccggtcaggctaccaagtacctgtacgagctcctctacaacgatccaattaaaattatcttaatgccagggtgtagctctgtgagcactttggtggcagaggctgcacggatgtggaacctaatcgtgcttagttacggttccagctcaccagcgttgtctaacagacagagatttcctaccttcttccgcacacatccatctgcaacactgcataaccctacccgagtaaagttattcgagaaatggggatggaaaaaaatcgcgacaatacagcagacgaccgaggtatttactagtacactcgacgacctggaggagcgggtgaaggaggctggcattgagatcactttccggcagagttttttttcggacccagccgtacccgtgaaaaacctgaaacgccaggatgccagaatcattgtggggcttttttacgagactgaagcgaggaaggtattttgcgaagtgtacaaggagagattattcggcaagaagtacgtctggtttctgatcgggtggtacgcggacaactggtttaaaatctacgacccctcaatcaattgcactgtggacgagatgacagaggccgttgaggggcacatcactactgaaatcgtgatgctgaatcctgccaacacccgttccatttccaatatgacgtcccaggagttcgttgagaagctgaccaaaaggctgaagcgccacccggaggagactggaggctttcaagaggcgccactggcctacgacgccatttgggccctggcccttgcgctcaacaagacaagtggcggaggcggtcgaagcggtgtgcgtctggaagacttcaattacaataatcagacaatcaccgaccagatatacagggcaatgaactcctcatcttttgaaggcgtctctggacatgttgtgttcgatgcatcggggtctcgaatggcctggacactgatcgagcaactccaaggaggttcctacaaaaagatagggtactacgattcaactaaggacgacctcagttggagtaagaccgataagtggatcgtgatcagcaggacacattctcctacctag

SEQ ID NO: 11744 - DNA, 1326 bp, synthetic construct
  misc_feature 1..1326: note = source = /note="Description of Artificial Sequence: Synthetic coding sequence"
  source 1..1326: mol_type = other DNA
atggagttcgagtttgataggctgcgcgcttttcaggccatgcaggtccattgtaacaatatgcacaccctgggcgctcggctccctgggggtgtggagtgccgattcagacgcggaccagctatggcgtgggaaggagagccaatgcggcataacctgggcggaaaccttggggaccccagggccagagctgtctctgtccctttggggggtagagtggcacggttccttcagtgtaggttcctgttcgccggtccatggctgctgttcagcgagatctcatttatttctgacgtggttaataattcgtctcccgcactggggggaacttttcctcccgcaccatggtggcctcccggacccccacctactaatttcagtagcctggaactggaacccagaggtcaacagcccgtggcaaaggctgagggctctcctacagccatcctcataggctgtctggtggcaattatattgctcttgctgctaatcatcgcacttatgctgtggcggctgcactggagacgcctcctgtctaaagtgttggaatcccaccccagaacccggtcccccggactggtcgggatcaggcccacacccctgcccgtttctccaatggccttgaggtgttgctctcccattcagcccactgcttcattttggccactcacaccagttccattagaggccagggcccctccccatcctcccggaccaaacccccctacacctcgcggagtgactgggggaaacacctacgccgtgccggcactcccccctggagccgtgggcgatgggcctcccagggtggacttcccgagatcccggctgcggtttaaagagaaactgggggagggccagttcggcgaggtccatctgtgcgaagtggactcccctcaggacttggtcagcctggatttcccgctcaatgtgcgcaaaggacacccactcctggtcgccgtgaaaatcctgaggcctgatgccacgaagaacgccagaaacgactttttgaaggaggtaaagataatgtcacgcctgaaagacccgaatattattcgcctactgggcgtctgcgttcaggatgaccctctctgcatgatcacggattacatggaaaacggggatctgaatcagtttctctccgctcaccagctggaagataaagccgctgaaggcgctcccggtgacgggcaggccgcacagggaccaactatcagttacccgatgctgctccatgtggctgctcaaattgcttcaggcatgcgctatctagccacactcaatttcgttcacttttggggcgagagacaccggttccttcattag

SEQ ID NO: 11745 - DNA, 2685 bp, synthetic construct
  misc_feature 1..2685: note = source = /note="Description of Artificial Sequence: Synthetic coding sequence"
  source 1..2685: mol_type = other DNA
atgtccttgccgaggtgttgcccacaccccctaagaccagaaggctccggagccatgggtccagaggcactgagtagcctcttgcttcttctgctggtggcgagcggcgacgctgatatgaaaggacactttgacccagccaagtgtagatacgccctgggcatgcaagacaggacaattcctgattccgacatctcagcatcatcttcctggagcgatagcacagctgccaggcattcccgactggagtctagtgacggcgacggagcttggtgtcccgcagggtctgttttcccgaaagaggaggagtatttgcaggtcgatctgcagaggttgcatctggtggcactagtgggtacacaggggaggcatgccggtggactgggcaaggaattctcccgctcatacagactccgctattcccgggacggccgtcgatggatggggtggaaggatcgatggggacaggaagtgatctctggcaatgaggatcctgaaggcgtcgtgcttaaagacttgggacccccaatggtggcccgtctggtgcgcttctaccccagagctgaccgggtaatgagtgtgtgtttaagagtagagctctatgggtgcctctggcgcgatggactgcttagctatacggcacccgtcggacaaacaatgtatctttccgaagctgtttacttgaatgatagtacatacgacgggcataccgtaggcggactgcagtatggcggtctgggacagctagccgacggcgtcgtgggccttgacgatttcaggaagtcgcaagaactgcgcgtgtggccaggttatgattatgttgggtggtcaaaccacagtttttcttccggttatgtcgagatggagttcgaattcgacaggctccgggcattccaggctatgcaagtccattgcaacaatatgcatactctcggcgcacggctacctgggggtgtggaatgcaggttccggagaggccctgccatggcctgggaaggggaaccgatgagacacaacctggggggaaacttgggcgatcccagggctagagctgtttccgttccgctggggggtagggtcgcgaggtttttgcaatgccgttttctgtttgctggtccttggttactgttctcagagataagttttatcagcgacgttgtgaataattcctccccagctctcggtggtactttccctccagctccatggtggccaccaggacccccaccaaccaacttttcctccctcgagctggagccgaggggacagcagcctgtggccaaagctgaagggtcacctacagctatacttattggatgtttggtggctatcatcctgttgttactgttgataatcgccttaatgctctggcgccttcactggaggcgattgcttagcaaagccgagcgaagagttctcgaagaagaactgaccgtacatttgtctgtcccaggggatacaatcttgattaataatcgtcccggacccagagaaccacccccttaccaggagcctaggccgagaggcaaccctccacatagcgctccttgtgtccccaatggttcagcctatagtggcgactacatggagcccgaaaagcctggggctccccttctgcctccaccaccccagaactcagttccacactatgccgaggcagacattgtgacgctgcagggagtcaccggagggaatacctatgctgtgcccgctctccccccaggagcagttggggatggaccccctcgagtcgattttccacggagccgactaaggttcaaggagaaactgggggaaggtcagtttggtgaagtgcatctttgcgaagtggacagcccccaggacctggttagtttggactttcccctcaatgtaaggaaaggacatccattgttagttgccgtgaaaatcctgcgccctgacgctacaaagaatgctcgtaacgatttcctcaaggaagtgaaaatcatgtcaagacttaaggatcccaatataatcagactgctgggtgtctgcgttcaagacgaccccttatgcatgataactgactatatggaaaacggagacctcaatcagttcctctccgcccatcagctcgaagataaagctgcagagggcgctcctggcgatggccaagctgcccaaggcccaactatttcctaccccatgttgctgcacgtggccgcacaaatagcttctgggatgaggtacctcgccacactaaactttgtgcaccgggacctcgcgaccaggaactgtctggtgggggagaacttcactatcaaaatcgcagacttcggtatgtctcggaacttatacgcaggtgactattatcgagtacaggggagggccgtcctgccaatccggtggatggcgtgggagtgcatccttatggggaaattcaccaccgccagcgacgtctgggcattcggagtgacactgtgggaagtgttgatgctgtgcagggcacagccattcgggcagctcaccgatgagcaagtcattgagaatgctggagagttctttcgcgaccaaggcagacaggtgtacttatcaagaccaccagcatgtccccagggactgtacgaactgatgcttagatgctggagcagggaatcagaacagcggcctccgtttagtcagctccatagattcctcgctgaggacgcattgaatacagtgtag

SEQ ID NO: 11746 - DNA, 216 bp, synthetic construct
  misc_feature 1..216: note = source = /note="Description of Artificial Sequence: Synthetic coding sequence"
  source 1..216: mol_type = other DNA
atgcccgctggggttcccatgtctacttacctcaagatgttcgccgcatctctcctggccatgtgcgccggagccgaggtagtgcacagatactaccggcctgatcttacaatcccagaaatccctcccaaacggggtgagctgaagacagagttattgggccttaaagaaaggaaacacaagccccaggttagccaacaagaagagcttaagtag

SEQ ID NO: 11747 - DNA, 2760 bp, synthetic construct
  misc_feature 1..2760: note = source = /note="Description of Artificial Sequence: Synthetic coding sequence"
  source 1..2760: mol_type = other DNA
atggggcctgaagcgctatctagtttattactcctccttttggttgcttctggggatgcagatatgaaaggccattttgatccggctaagtgcagatacgctcttgggatgcaggaccgaacaatacctgatagcgatatatctgcatcttcgtcctggtctgattccactgccgcaaggcactctcgattggagagcagtgacggcgatggagcttggtgccctgcgggtagcgtgtttccgaaagaggaggagtatctgcaagttgatcttcaaaggctgcatttagtagcccttgtaggaacacagggaagacacgccggtggacttggaaaggaattctcccgttcctatcggctcagatattcccgggatgggaggcggtggatgggctggaaagaccggtggggccaagaggtgatttctggcaacgaggacccagagggagtggtgctgaaagacttagggccacctatggtggccagattagtgcggttctaccctagggcagacagagttatgagtgtctgcctcagggtggagctgtacggatgtctgtggcgggatggcctcctgtcttataccgctcctgtcggccaaaccatgtacctgtccgaggccgtgtacctgaatgattcgacatacgatggacacaccgtcggcggacttcagtatggcggactgggtcaactagccgatggggttgtgggtttggacgactttcggaagagccaggaactgcgggtctggcctgggtacgactacgtgggttggagtaatcatagcttcagctctggatacgttgaaatggagtttgaattcgatcgtctacgggcttttcaggccatgcaggtacattgtaacaatatgcatactctcggcgctcggttgccaggtggtgtggaatgtagatttagaagaggcccagccatggcatgggagggcgaaccaatgaggcacaacctgggaggtaacctgggggatcctagagctcgtgctgttagcgtgccactgggagggcgtgtcgccaggttcctccagtgcagattcctgttcgctggtccgtggctcctgttttccgagatcagtttcatctcagatgttgtgaacaatagtagtccagctctgggaggtaccttccccccagcgccatggtggcctcccggtcctccacccaccaacttcagttcgctagaactcgagccccgaggacagcaacccgtcgctaaggcagagggctcccccaccgccattcttattgggtgcctggttgccatcattctgcttctgctgttaatcatagcactgatgctgtggcgccttcactggcgtagacttctctctaaggcggaacgtcgcgtgctggaagaagagctcacagtccacctgagcgtgcctggcgacacgattctcatcaacaacaggccaggcccaagggagccccctccataccaggagcctcggcctagaggcaacccaccacactcggcaccctgcgtgccgaatggttccgccctgctactatcaaacccagcctaccgactgcttctggcgacatacgctcgtcccccacggggaccaggacctcccacccctgcctgggccaagcccacaaacacacaagcctactcaggggactatatggagcccgaaaagccaggggctcccctgctcccgcctcctccacagaattcagtgccgcactatgcggaggcagatattgtgaccctgcagggggtaactggcggtaacacatacgccgtccccgcactgccaccaggagcggtgggagacggacccccaagagtggactttcctcgttctcgcctgcggtttaaggaaaaactgggggagggtcagttcggggaggtgcacctctgtgaggtcgactctccacaggacttagtttcattagacttcccactgaacgtacggaaagggcatccactgcttgtcgccgtgaagattctgcgcccagatgcgacaaagaatgcctctttttctctgttcagtcggaacgactttctaaaagaggtcaaaatcatgagcagactgaaggacccgaacattattcgcctgctcggagtttgcgtccaagatgacccattgtgtatgattaccgattatatggaaaacggtgatctgaaccagtttctcagcgcccaccagctagaggacaaggccgcagaaggtgcacctggtgacggccaggcagcccagggtccgaccattagctatcccatgttgctgcacgtggccgcacagatcgcctcaggcatgcggtacctggcaactctcaacttcgtgcatcgcgatctggctaccaggaactgtctggttggcgagaacttcactatcaagattgccgacttcggtatgtccagaaacttgtacgcgggtgattactaccgggtgcaggggcgagccgtcttgccgatccgctggatggcctgggagtgtattttgatgggcaaattcacgactgcatctgacgtatgggccttcggcgttacattgtgggaggtgctaatgctctgcagagcccagcccttcggtcagcttactgatgagcaagtgattgagaatgctggcgagttctttcgagatcaaggacgccaggtgtacttatcccgacctcccgcttgtccacagggcctgtatgagctgatgctgcggtgttggagcagagagagcgagcaacgtcccccttttagccagctgcacagattcctggctgaagacgccttaaacacagtatag

SEQ ID NO: 11748 - DNA, 447 bp, synthetic construct
  misc_feature 1..447: note = source = /note="Description of Artificial Sequence: Synthetic coding sequence"
  source 1..447: mol_type = other DNA
atgcagacctttcctgtggcaggcgctttggacccggctatactggatacatcaagtccacaggcactgtacaccgtcctcctaattgtgctggtcatgatgtctctagtgttcggtaaattcgtgcccgttaattgggagcctccacagcccctgcccttccctaaatacctgagatgctataggtgtctgctcgagaccaaagagctaggttgcctgctggggagcgatatttgtcttacaccagctggcagctcctgtattacactacacaaaaagaacagcagcgggtcagatgtaatggtatctgactgtagatctaaagagcagatgagcgattgtagtaacaccagaacaagccccgtgtctggcttctggattttctcacagtattgttttctagacttttgtaatgaccctcagaatcgcggtctgtacactccttag

SEQ ID NO: 11749 - DNA, 5097 bp, synthetic construct
  misc_feature 1..5097: note = source = /note="Description of Artificial Sequence: Synthetic coding sequence"
  source 1..5097: mol_type = other DNA
atgagactgctgtggggcctgatctgggctagctctttctttaccctgagcctgcagaaacctcgcctcctcctgtttagcccaagtgtggtgcaccttggagtccctcttagtgtgggcgtccagctgcaggatgttcctcgcggtcaggtagtgaaagggagtgtcttcctcagaaacccatcgaggaacaatgtcccgtgctcaccaaaggtggatttcacgctgagtagcgagcgggattttgccctgctcagcctgcaggttcctcttaaggacgctaagagttgcggcttgcaccagctactccgcggaccagaggtgcagctggttgcccattcaccatggttaaaagacagtctgtcccggacaacgaacatacaaggcataaacctgttatttagcagccggagaggccacctgtttctccaaactgatcaaccgatttataatcccggtcagcgggtgcgttaccgagtctttgcgctggatcagaagatgagaccgtccacagatactattaccgttatggtcgagaactcccatgggcttcgcgtccgtaagaaggaagtgtatatgccctcttccatctttcaggacgactttgttatacccgacatttcagagccaggtacatggaaaatttctgcccgattcagcgatgggctcgagtctaactccagtacccagtttgaagtcaagaagtacgtgctgcctaatttcgaagtgaagatcactcccggaaagccctatatcttgacggtgcccggtcacctggacgagatgcagcttgacatccaagccagatacatttatggaaaaccagtgcagggtgttgcctacgtccgctttggcctattagatgaggacggcaagaagacattctttcgcggactcgagtcccagactaaattggtcaacggacaaagtcacattagcctgtccaaggcagaatttcaggacgccctggagaagctgaacatgggcattactgacttgcaaggcttgcggctgtacgtagcagcggcaattatcgaatacccgggtggggaaatggaagaagctgaactgaccagctggtacttcgtgtctagtcctttcagcctggacctgtcgaaaaccaagcgccatttggtccctggtgccccttttcttctacaggccctagttagggaaatgtccggttctcctgcttctggcattcctgtaaaagtctcagcgacggttagttctccaggcagcgtgcccgaagtccaggatattcagcaaaatacggacggctccgggcaggtgtcgataccaattatcatcccccagacaatatcagagctgcaattgagcgtgagtgcgggaagtcctcatccagcaatcgcgcgactcactgttgcagccccacctagtggaggtccaggcttcttgagcatcgagcggcctgactcccggccacctcgcgtcggcgatactttaaaccttaatctgcgcgcagttggttcgggtgcgacattttcacactattactacatgattttgtctagaggccagatcgtgttcatgaacagagagcccaaacgcactctgactagcgtgtctgtgttcgtggaccatcacctagctccatcattctacttcgttgccttctattatcacggcgaccatcccgttgccaatagtctgagggtcgatgtgcaggccggagcttgtgagggtaagctggagttgtccgtagacggcgctaaacagtaccggaacggcgagagtgtcaaattacacctcgaaaccgactcactcgcactcgttgcattgggcgcactggatacagctctttacgccgcaggctcaaagagccacaagccactgaacatgggaaaagtgtttgaggcaatgaactcctacgatctcggttgtggtcccggaggcggagattctgcactgcaggtgtttcaggctgcaggcctcgccttctccgacggggaccagtggactctgtcacgcaaaagactcagttgcccaaaagaaaaaacaactcgcaagaagcgaaacgtcaattttcagaaagctattaatgaaaaattagggcagtacgctagtcctacagcaaaacggtgctgtcaggacggggtgaccaggttgcctatgatgcggtcctgcgagcaaagggcagcgagagtccagcagccggactgtcgggagccttttctgtcatgttgccagtttgctgaaagcctgcgtaagaaaagcagagacaaaggccaagctggattgcagcgcgcactcgagattctacaggaagaagatctgattgatgaagacgatatacccgtcagatcgttctttccagaaaattggttgtggcgtgtcgagactgtcgacaggttccagatcctcacactgtggttgcccgactctctcacgacatgggagattcacggcctctctttgtcaaaaaccaaaggcctttgcgttgcgactccggtacagctgcgggtcttccgagaatttcacctccacctaagactccctatgtctgtgcggaggttcgaacaactcgagctgcggcctgtgctgtacaattacctagacaagaatctgactgtgagtgtccacgtttcaccagtagaagggctgtgtctagctggcggaggcggactggcgcaacaagtgctggttccagccggttccgctcgccctgtcgccttttcagtggtaccaacagccgcagctgccgtgagtctcaaagtggttgccagagggtcttttgaattccccgtgggcgacgccgtctctaaggttttacaaattgagaaggaaggtgcaattcacagagaagaactggtatatgagctgaatcctctagatcacagaggcaggacactggaaattccaggcaatagtgaccccaacatgattccggacggtgatttcaactcctacgtacgcgtcactgcttccgaccctttggacactctgggttccgagggggcattgagtcctggcggagtggcctccttactgcgcctccccagggggtgtggggagcagaccatgatttatctggcacctactctcgccgcatccaggtatctggataagaccgagcaatggagcactctgccacccgagacaaaggatcatgccgtcgatctgattcagaagggctatatgcgcattcagcagtttaggaaggctgacggtagctatgccgcttggctgtcgcgcggatccagcacatggttgacagcgtttgttctgaaggtgttgtcactggcccaggagcaagtgggaggctcgcctgaaaagttacaggaaacgagcaattggcttttaagccagcaacaggccgacgggtcctttcaggacctatcaccagtgatccatagatccatgcagggaggactggtggggaatgacgaaaccgtcgccctaacggcattcgtgaccatcgccttacaccacggattggccgtgttccaagatgaaggagctgagccattaaagcagcgggtggaggcctcaataagcaaggcatcctcctttctgggggagaaagcttccgcagggctgctgggcgcacacgccgctgctatcactgcatacgccctcactttgactaaggccccagccgacttacggggagtagcacacaacaatctcatggccatggcacaggagacaggggacaacttatactggggctctgttacggggtcccaatccaacgccgtgagccccactcccgctcctagaaacccctccgatccaatgcctcaggcgcctgcactgtggattgagactaccgcttacgctctactgcatctgctgttgcatgagggaaaggctgaaatggctgaccaggctgccgcatggctgactcgccaaggctcgttccaggggggatttagatccacgcaagatacggtcatagcgctggacgcactctcagcatactggattgcgagccatactactgaagaacgcggtcttaatgtcacgctctcatcgacagggagaaatggatttaagtcacatgccctgcagctcaacaataggcagatcagagggctggaagaagaactgcagttctccctgggctctaaaatcaatgtcaaggtagggggaaactccaagggaactctgaaggtacttcggacctacaacgttctggacatgaagaatacaacctgtcaagacttgcagatcgaggtgacagtcaaaggacatgtcgaatatactatggaagcaaatgaggactatgaggactacgagtatgatgaactgcccgctaaagatgatccagacgctccattgcagcccgttacccccttacagctcttcgagggacgacggaaccgtaggcggagggaagcacctaaactaacttcactgtccgatagatacgtgtcccactttgagaccgagggccctcacgttctgctgtatttcgattccgtcccaactagccgagagtgcgtaggttttgaggctgtgcaagaggtgcctgtgggtctggtgcagccggcttcagctaccctgtatgactactataaccctgagcgacgttgctccgttttctatggagctccctcaaagagcagactgctggccaccctctgttctgccgaagtgtgccagtgtgctgaagggaagtgccccagacagcgccgagcattggagagaggtttacaagatgaagatgggtacagaatgaagttcgcctgctattacccaagggtcgagtatggctttcaggtgaaggtgctgagggaagactcacgcgcagccttcagactgttcgagaccaagattactcaagtactgcattttaccaaggacgttaaggccgcagccaatcagatgcgaaatttcttagttcgcgcttcatgccggctgcggctggagcccggaaaagaatatttaataatgggactggatggcgcaacatatgacctagaggggcatccacagtacctcttagactctaactcatggatagaggaaatgcctagcgaacgtctctgtagatcgacacgtcagcgggcagcatgcgcacagctgaacgacttcttgcaggaatacggcacccaaggatgccaggtgtag

SEQ ID NO: 11750 - DNA, 1986 bp, synthetic construct
  misc_feature 1..1986: note = source = /note="Description of Artificial Sequence: Synthetic coding sequence"
  source 1..1986: mol_type = other DNA
atggacttagttcttaagaggtgtctgcttcatttggccgtcatcggggcactcctggctgtgggcgctacaaaggtccccaggaaccaagactggctgggcgtgtccagacagcttcggacgaaagcatggaacagacagctctaccctgagtggacggaggcacaacgattggactgctggagggggggtcaggtgtcccttaaggtctcaaatgatggaccaacactgattggtgctaacgctagctttagtatcgcactcaattttccagggtcccaaaaagtgttgcccgatggacaggtgatttgggtcaacaacacaataatcaacggctcccaggtgtggggaggccagcctgtatacccacaagagacagacgatgcatgcatcttccccgacggcggaccctgtccatcaggcagctggtctcagaagcgctcatttgtatacgtgtggaaaacttgggggcagtattggcaggtgctcggagggccagtgtccggattatccattggcacaggccgtgcaatgcttggcactcacacgatggaggtgacggtctatcatagacgcggtagtaggagctatgtccctcttgcccacagttccagcgcattcaccattactgaccaggttcccttctcagtctctgtatcccagttacgggcactggatggaggcaataaacattttctgaggaatcagccattaactttcgccctgcagctgcatgatccctctggatatctcgccgaggccgatcttagttatacctgggacttcggcgactcctccggaactctgatatcacgggcattggtcgtcactcatacgtatctggagcccggacccgtaacggcgcaggttgtgctgcaggctgcaattccccttaccagttgcggaagcagccccgtacctggaacaaccgatggacataggccaaccgcggaagccccaaatacaaccgcaggacaagtccctacaactgaagtggtgggaactacacctgggcaggcgccaacagctgaacctagtggtacaacatccgtgcaggtgccaaccaccgaagtcattagtacggcgcctgttcagatgcctacagcagagtccaccgggatgacaccggaaaaagtccccgtgagcgaagtcatgggcacaactctggccgaaatgtccacccccgaggcaacaggcatgaccccggcagaagtttcaattgtggtcctgagtggcactacagccgcacaggtgacaactaccgagtgggtggagaccacggctagagaattaccaatccccgagccagaaggccctgatgccagcagtattatgtcaacagaaagcatcactgggtcattgggtccactactggacggaaccgcaacactccggttagttaaacgtcaggtgcccctggattgtgtattatacaggtacggatcgtttagcgtgaccttggacatcgtccagggaatcgaaagcgctgaaatcctgcaggccgtgccatcaggggaaggtgatgcttttgagcttacagtctcatgccagggaggcttacccaaagaagcctgcatggagatttcctctccaggctgccagcctcctgcccagcggctgtgccagccagtcctgcccagccctgcatgtcaattggtgttgcatcagattctaaaggggggatctggcacctactgcctgaatgtatctcttgccgataccaactcactggctgttgtgagcacccagttaataatgcctggacaggaggccggactcggccaggtacccctgatcgttggcattctgctggtattgatggcagtcgttctcgcttccctcatctatcgacgcagactcatgaaacaggatttcagtgtgccccagctgccacactcttcctcccactggcttagactcccaagaattttctgctcttgtccaattggagagaacagtccactgcttagcggccagcaggtttag

SEQ ID NO: 11751 - DNA, 516 bp, synthetic construct
  misc_feature 1..516: note = source = /note="Description of Artificial Sequence: Synthetic coding sequence"
  source 1..516: mol_type = other DNA
atgcgccacaacctgggaggcaatctcggggatcctcgcgcaagggctgtttctgtgcccctgggaggtagagttgccagattcttacagtgtagatttctgttcgcaggcccttggcttctgttcagtgaaatctcctttataagcgacgtcgtgaataactcctcaccagccttaggtggtactttcccacctgcgccttggtggccgccaggccctccccctaccaatttctcctcgctggagttggagccacgcggacaacagccagttgccaaagcagaagggagcccaacagcgattcttattggctgtctggtcgccattattctgctgcttctgcttattatcgctcttatgctgtggagactccactggcgccgactgctttcaaaggtcctcgaatctcaccctcggactcgaagcccaggactcgttggaatcaggcccacccccctccctgtctccccgatggctctggtgcacctatgcgaagtggattcaccccaagactag

SEQ ID NO: 11752 - DNA, 1986 bp, synthetic construct
  misc_feature 1..1986: note = source = /note="Description of Artificial Sequence: Synthetic coding sequence"
  source 1..1986: mol_type = other DNA
atggacctggttctgaaacggtgcctgctccatctggccgttataggtgccctgctggctgtgggggctaccaaggtgccacggaatcaggactggctgggggtctctcgccagctgcgcacaaaggcgtggaatcgccagctctacccagagtggaccgaggctcaacgcctggattgttggcggggagggcaggtgtcactgaaagtctcaaatgatgggcctactctaatcggggctaacgcttctttttcaattgcattgaatttccctggctctcaaaaggtgttgcccgatgggcaggtgatttgggtgaacaacactatcataaatggcagtcaggtgtggggtggccagccagtttacccacaagaaaccgatgatgcttgcatctttcccgatggagggccttgtccaagcgggtcttggtcccagaagagatcctttgtctacgtctggaagacctgggggcagtattggcaggtcctgggtggaccggtatcaggtctttccatcggaaccggaagagccatgctgggcacacacaccatggaagtcacggtctaccaccggcgaggctccagaagctatgtgcctttggcgcactcatcctctgcctttacaattacagatcaggtgcccttcagcgttagcgtttcccagctgcgcgctctcgacggaggcaacaagcactttctgcgcaaccagccactgactttcgctctccagctacatgatccgtccggctatttagccgaagccgatctatcgtatacctgggatttcggagactctagtggaacactgatatctcgtgcccttgtggttacacatacctatctggagcctggtcccgtcactgcccaagtggtgttgcaagcggcaatacctctgactagttgtggaagctcacccgtccccggaaccaccgacggacatcgacctacagccgaagcacctaatacgacggctggacaggtcccaaccaccgaagtggtaggcaccacccctgggcaagctccaaccgcggaaccgagcggcacgacatccgtgcaggtgcccaccaccgaggtcatctccacagcccctgttcagatgcctactgcggagtcaacaggcatgaccccagaaaaagttcccgtctcggaggtcatgggtacaacgttggcagaaatgtcaactccagaagcaacgggaatgacacccgcagaggtgagtatcgtcgtgctctctggcacaacagcagctcaagtgactaccaccgagtgggttgagacaacggccagggagctccccattccagagccagaagggcctgacgcgtcgtccataatgagcacggagtctatcacaggtagcctggggcctctgcttgacggcacagcgacactgaggcttgtcaaacgacaggtccccttagactgcgtcctgtatcgatacggatcattcagtgttacattagacatcgttcaggggatcgaatccgctgagattctgcaggcagtgccgagcggcgaaggtgacgcatttgaactgacggtctcatgtcagggaggcctgccaaaggaggcctgcatggagatttccagccctggatgccagccgcctgcccagcgcttatgccagcctgtgctgcccagccccgcttgtcagttggtgttacatcagatcctcaagggcggatctggtacctactgtctgaacgtgtctctagctgataccaactccctggccgttgtaagcacccaactcatcatgcctggccaggaagctggactggggcaggtccccctcattgttggtatcctcctggtgctgatggctgttgtgttggcgtctctgatctatcggaggcggctaatgaaacaggacttcagtgttccacagctgcctcatagctctagtcactggctgaggctgccaagaattttttgcagctgtccaataggcgagaactcgcccctcttgtcagggcagcaggtttag

SEQ ID NO: 11753 - DNA, 1737 bp, synthetic construct
  misc_feature 1..1737: note = source = /note="Description of Artificial Sequence: Synthetic coding sequence"
  source 1..1737: mol_type = other DNA
atgttactccttctcctacttgcccctctcttccttcgacctccaggagctggtggcgctcaaaccccaaatgctactagcgaagggtgtcagatcatacatcctccttgggagggcggaattaggtatcggggtctgacccgtgaccaggtcaaggcgattaatttcctgccggtggactacgaaattgaatatgtttgtaggggggaacgcgaagtagtgggacctaaagtgcgtaaatgtctagcaaatggctcttggaccgatatggatacgccatctcgttgcgtgaggatttgcagtaagtcttacctcaccctggagaacggcaaggtcttccttaccggcggtgacctccctgcccttgacggggctagagttgattttaggtgcgaccctgatttccacctcgtaggcagcagtcgcagcatctgctctcagggccagtggtctacacccaaaccacactgtcaggtgaacagaaccccccatagcgaacgccgtgcagtttacatcggagcccttttcccgatgtcaggcggttggccgggaggacaggcctgtcagccagccgtggagatggccttagaagatgtaaattcccgacgagatatactgcctgattatgagctaaagctgatacaccatgattctaaatgcgaccctggacaggccaccaagtacctatatgagctcctctataatgacccgattaagatcatactaatgccaggatgttcaagtgtatccactcttgtagccgaagccgcacggatgtggaacctaatagtgttatcttatggctcttcctccccggctctaagcaacagacagagatttcctacgttctttagaacacacccatctgcaacacttcacaaccccactcgtgtgaaactgttcgagaagtggggttggaaaaaaatcgcaaccattcagcagacaacggaagtttttacgagcacacttgatgatctagaggagagagtgaaggaagcgggtatcgagatcacattccgtcagtcctttttctccgacccggcagtgccagttaaaaacctgaagcgccaggacgctagaattattgtgggactgttttacgaaacggaggctagaaaggtcttctgcgaagtttataaggagcggctcttcgggaagaagtacgtctggttccttatcggctggtatgctgataactggttcaagatctacgatcccagcataaactgtacggtggatgaaatgactgaagcagttgagggacacattactaccgagattgtgatgctgaatccagcgaacaccagaagcatcagcaatatgacatcccaggaattcgttgaaaagctgacaaagcgcttgaagcggcatcctgaagaaaccggcggatttcaggaagcccctcttgcctacgacgcaatctgggcgctcgcactcgccctgaataaaacttctggagggggaggaagaagtggggtcagactggaggacttcaactataacaaccaaacaatcaccgaccagatctatagggccatgaattcgtcctctttcgaaggagtgagcggccacgtcgtgttcgacgcatcaggctcccgcatggcctggaccctcatcgagcagttgcagggcggatcgtacaagaagataggttattacgattctaccaaagatgacttgtcctggagcaagaccgacaaatggatcgtcatttctcggactcacagccctacttag

SEQ ID NO: 11754 - DNA, 1326 bp, synthetic construct
  misc_feature 1..1326: note = source = /note="Description of Artificial Sequence: Synthetic coding sequence"
  source 1..1326: mol_type = other DNA
atggaatttgaattcgacagactgcgcgcattccaagcaatgcaagtgcattgcaacaacatgcacacactgggagctaggttgcccggtggggtggaatgcagattccgaaggggccctgccatggcatgggaaggagagcctatgcggcataatttaggcggaaatttgggcgacccgagagcgagggctgtctctgtgccactaggcggacgggtggcaaggttcctgcagtgccggttcctgttcgccggtccgtggctgcttttttctgaaatctcctttatctccgacgtcgtgaacaattcatccccggcactgggcggtaccttccctcctgccccatggtggcctcccggtcccccacccactaacttcagctctctcgagctggagccgagagggcagcaacccgtggctaaagccgaaggaagccccaccgctatcctgatcgggtgtctggtggccataatactcctccttttgctcatcatcgccctgatgctgtggcgactgcactggagacgcctcctttctaaggtgttggaatcacatcctaggacccgcagcccgggattagttggaatccgtccgacgccgctgccagtttcacctatggctttgcggtgctgcagcccgatccaaccgaccgccagtttttggccccttacgccagtgccattggaagccagagcaccccctcacccccctggtcccaacccgccaacacccagaggagtgaccggaggtaatacatacgcagtgcctgccctgcccccaggagccgtgggagacggaccgccacgtgttgacttcccccgttctcgcctgagattcaaagagaagctgggggagggacagtttggcgaggtgcatttgtgtgaggtcgattccccgcaggacttagtttcattggattttcctctaaacgtgcgaaaggggcacccgctgttggtggctgtcaagatcttgcggccagacgctacaaagaacgctcggaatgacttcctgaaggaggtcaaaatcatgtcaagactgaaagatcccaatatcattagactgctaggcgtctgcgtacaagacgacccactgtgcatgataacggattatatggaaaacggagacctgaaccaattcctaagcgcccatcagttggaggataaagctgcagagggggctcctggtgacggccaagccgctcagggtccaaccatcagttacccaatgcttcttcatgtcgccgcacagattgcctccggaatgaggtacctcgcgaccttaaacttcgtgcacttctggggagagaggcacaggtttctgcactag

SEQ ID NO: 11755 - DNA, 447 bp, synthetic construct
  misc_feature 1..447: note = source = /note="Description of Artificial Sequence: Synthetic coding sequence"
  source 1..447: mol_type = other DNA
atgcaaacgttccccgtcgcaggggctctggaccctgccatcctggatacttcctcccctcaggcgctttacacggtgttactgatcgtgcttgttatgatgtcactcgtgttcggcaaatttgttccagttaattgggagcccccacaaccgcttccatttccaaagtacctccggtgctatcggtgtctgctcgagaccaaggagctgggctgcctgctgggttctgacatttgcctgacccccgctggctcatcctgcatcactctacacaagaagaactcttccgggagcgacgttatggtgagtgattgcaggtctaaagagcaaatgtcagactgctctaacacaagaacgagccccgtgtccggcttttggattttttcacagtattgtttcttggacttctgcaatgacccccagaacagaggtctctacaccccctag

SEQ ID NO: 11756 - DNA, 732 bp, synthetic construct
  misc_feature 1..732: note = source = /note="Description of Artificial Sequence: Synthetic coding sequence"
  source 1..732: mol_type = other DNA
atggggccagaggctcttagcagtctgttactcttattactggtggccagtggcgatgccgatatgaagggccactttgacccagccaaatgtaggtacgcgctgggcatgcaagatcgtaccatcccagattcagatataagcgcgtcttcttcatggagcgattccacagccgcacgccattccaggctggaaagttctgacggagatggggcatggtgccccgcaggtagcgttttcccgaaagaagaggagtacctacaggtggaccttcaacgcctacaccttgtagccttggtgggaacacagggcaggcatgcgggaggcctggggaaggagttctcgagaagttataggcttaggtactcccgcgatggaaggcgttggatgggatggaaggacagatgggggcaagaggtgattagcggcaatgaagacccagagggggtcgtgctgaaggatctgggaccccctatggtagctagactggtcaggttctatccacgcgcagacagggtaatgtccgtttgtctgcgggttgaattatacggctgcctatggcgggactgctccatgggtgtgtgggcaagctggcaaatggtgtggtggggttggatgacgttaggacgggttcgaagttgcgggagtggacaagccatgacaatgtgggatggcgctactactgcctctcccgttgcaatgtggcgttggagcttgtctttgaccggatag

SEQ ID NO: 11757 - DNA, 732 bp, synthetic construct
  misc_feature 1..732: note = source = /note="Description of Artificial Sequence: Synthetic coding sequence"
  source 1..732: mol_type = other DNA
atgggaccagaggccttgtcaagcctgctccttcttcttcttgtagcctcaggcgatgccgacatgaagggccacttcgatcctgccaagtgccgctacgccctggggatgcaagacagaacgatcccagattcagatatctccgcatcatcctcctggagtgactcaaccgcagccaggcattcccggttggaatctagcgacggggacggcgcttggtgccctgcaggctcagtgttccccaaggaagaggaatatctgcaggttgacctgcagcgactgcacctggtggcactggtaggaacacaaggccgacatgcgggtggactcggcaaggaattttcacgaagctataggctgcgttactcccgtgatggaaggcggtggatgggctggaaggatcgctgggggcaagaggtcatcagtggcaatgaggaccccgagggcgtcgtgctcaaagatctcggccctcccatggtggcccgattggtaagattctatccaagggcggaccgggtgatgtcagtctgcctgcgtgttgaactctacggatgtctctggagggattgtagtatgggcgtgtgggcaagctggcagatggtgtggtgggggtggatgactctggggagagtcagatcttgcggaagtggccaggctatgaccatgtgggatggggctacaacggcaagtccggtggccatgtggaggtggagcttgagtctcaccggctag

SEQ ID NO: 11758 - DNA, 1224 bp, synthetic construct
  misc_feature 1..1224: note = source = /note="Description of Artificial Sequence: Synthetic coding sequence"
  source 1..1224: mol_type = other DNA
atgaggctgctggcgtggcttatcttcctcgccaactggggcggtgccagagcggaacctggaaagttctggcacattgccgacctccatctggatccagactataaggtgtcgaaggacccatttcaagtttgtccctcagcaggctcacagccagtgcctgacgctggcccatggggggactacctgtgcgattctccttgggccctgatcaattcgtctatatatgccatgaaagaaattgagcctgaacctgactttatcttgtggactggcgatgatacgcctcacgtgcctgatgaaaagttaggggaggcagctgtgttagaaatagttgagcgcctaacaaaactcatcagggaagtgttccccggtgcattttactgcgaaaagcttccagggccatccggagccggaagaatagtggtcctgaatacaaacctgtattacacctctaacgccctaactgccgacatggcagacccagggcagcagttccaatggctggaggatgtgctcactgacgcatctaaggcaggagacatggtctacatagttggccatgtcccacctgggttcttcgaaaaaacacagaataaggcctggttcagagaaggcttcaatgaaaaatacttaaaggtagtaaggaaacatcatcgtgttatcgctggccagttcttcggacatcaccacacagattcttttcggatgctgtacgatgacgcgggtgtgccaatctcggctatgttcattacgcctggcgtcacgccctggaaaacaactctgcccggagtggtgaacggcgctaataacccagctatccgcgtttttgaatacgaccgggcaactctatcactgaaggatatggtgacctatttcatgaacctgtcacaggccaacgcacagggaacacccaggtgggagctagaatatcaacttacggaagcctacggcgttcctgatgcctctgcccactccatgcatacagtcctggatagaatcgccggagaccagagcacgcttcagcgctactacgtgtacaactcagtgagttatagtgccggtgtgtgcgacgaggcctgtagcatgcagcatgtgtgcgcaatgcgccaggtcgatattgacgcttacacaacatgcctgtatgcatccggaaccactccagtcccgcaacttcctttgttactaatggccctgctgggcctgtgtaccctggtgctatag

SEQ ID NO: 11759 - DNA, 756 bp, synthetic construct
  misc_feature 1..756: note = source = /note="Description of Artificial Sequence: Synthetic coding sequence"
  source 1..756: mol_type = other DNA
atgccacacctcgcgagtctctttacagccagctctcgctgctgtccacacccccttaggccggaaggatcgggcgcaatggggcctgaagccttgagtagtttgctgcttctgctgctcgttgcatcaggagacgctgatatgaagggacacttcgatcccgctaagtgccggtatgccctgggcatgcaagaccgaactattccagattccgatatatcagcttcctcatcttggtctgacagcacggcggcacgacattctagactggaaagcagtgacggcgacggggcatggtgccccgctgggtccgtctttcctaaggaagaggagtatttacaggtggaccttcaacgtctgcacttggtcgccctggtgggcacgcagggcaggcacgctgggggactaggaaaggagttcagccgttcgtaccggcttcggtatagcagggatggcagacggtggatgggatggaaggatcggtgggggcaggaggtaatcagcggcaatgaggatcctgagggagtcgtgcttaaggatttgggccctcctatggtggctcggttagttcgtttctacccgagagcagatcgagtgatgtcagtttgcctgagggtcgaactctacggatgtctctggaggggggaatggctgtctttcctcggaatctgtttcttatctcgagggcttgaagggggtgagtgtggtgagtgggcgtcacgtatcccctctcctgccggtaaactgtccttatag

SEQ ID NO: 11760 - DNA, 756 bp, synthetic construct
  misc_feature 1..756: note = source = /note="Description of Artificial Sequence: Synthetic coding sequence"
  source 1..756: mol_type = other DNA
atgcctcatctggccagtctttttacagcttcctcgcgttgttgtcctcaccctttgagaccagagggtagcggagcaatggggccagaagctctaagttctctgcttctactccttctagtggcgagtggtgatgcagatatgaaggggcactttgatcccgcaaaatgccgctatgctttgggcatgcaggacaggaccatcccagattctgatatcagcgcctcttccagctggtccgactcgaccgccgctaggcattcccgcctggagagttccgacggggacggcgcttggtgccccgctggtagcgtatttccgaaagaagaagaatacctccaggtggatctgcagcgactacacctggtagctctcgttggcacccagggcagacatgctggcggattaggcaaagagttttccaggagctatagactacggtattccagggacggcaggagatggatgggatggaaggatagatggggtcaggaggtcatatctggcaatgaagacccagaaggcgtggttctcaaagaccttggtccccctatggtagcgcgactggtgaggttctacccacgcgctgatcgggtgatgagcgtctgcctgcgcgtggagctgtacggatgcctctggagaggagaatggctgtccttcctcggcatctgtttcctgtcacgcggtcttgaaggaggcgagtgtggcgagtgggcttctaggattccctctccggctgggaagctctccctgtag

SEQ ID NO: 11761 - DNA, 456 bp, synthetic construct
  misc_feature 1..456: note = source = /note="Description of Artificial Sequence: Synthetic coding sequence"
  source 1..456: mol_type = other DNA
atggacctcgtgctgaagcgctgtctgttacatttggctgttatcggcgcactgttggctgtgggtgctaccaaagtgcccaggaaccaggattggctgggggtcagccgacagctacggacaaaggcctggaatcgtcagctgtatcccgagtggaccgaggctcagcgactagactgctggaggggcggtcaagtttccctgaaggtgtcaaacgacgggccaacactgattggagccaatgccagcttttccattgcgctcaactttcccggtagccaaaaagttctgcctgatggccaggttatctgggtgaacaatacgatcataaacgggtctcaagtgtgggggggacagcctgtttaccctcaagagaccgatgacgcctgtatctttccagatggagggccttgtccttctggtagttggtcgcaaaagagatctttcgtgtactag

SEQ ID NO: 11762 - DNA, 216 bp, synthetic construct
  misc_feature 1..216: note = source = /note="Description of Artificial Sequence: Synthetic coding sequence"
  source 1..216: mol_type = other DNA
atgcctgccggtgtgcctatgtcaacttacctcaaaatgttcgctgccagcctcctggcaatgtgcgcaggagccgaggtagtgcaccggtattaccgcccagatctgaccattcccgaaattccccctaagcgtggggagctcaaaacagaactcttagggctgaaagaaaggaaacacaaaccgcaagtgtcccagcaggaagaattaaaatag

SEQ ID NO: 11763 - DNA, 447 bp, synthetic construct
  misc_feature 1..447: note = source = /note="Description of Artificial Sequence: Synthetic coding sequence"
  source 1..447: mol_type = other DNA
atgcaaacatttcccgtagctggcgctttagatcccgctatactggacaccagttcaccccaggcgttatacacagtgctacttattgttctggttatgatgagccttgtgttcgggaagttcgttcccgtgaactgggaaccaccacagcccttgccttttcccaagtatctccgatgctacaggtgcttactggagacaaaagaactcgggtgccttctggggtccgatatttgtcttactccagcgggatcatcatgtattactttgcataagaagaactcttctggaagtgacgtgatggtaagcgattgccgctccaaagagcaaatgagtgactgttcaaacacacgaacgtcccctgtcagtggattctggatcttctctcagtactgtttcctagatttttgtaacgatccccaaaaccggggactgtatacgccttag

SEQ ID NO: 11764 - DNA, 447 bp, synthetic construct
  misc_feature 1..447: note = source = /note="Description of Artificial Sequence: Synthetic coding sequence"
  source 1..447: mol_type = other DNA
atgcagacctttccagttgctggcgcactcgatccagccatcctagacacatcatcccctcaggcgttatataccgtactgttgattgttttggtgatgatgagtcttgtcttcgggaagttcgtacccgtcaactgggagccacctcaaccactgccctttcccaagtatctgagatgctaccggtgcctcctggagacaaaagagcttgggtgcttgcttggatcggacatttgcctgacccctgctggctccagttgcataaccctgcacaagaagaacagttccggatctgacgtaatggtcagtgactgtcgaagcaaggagcaaatgtctgactgctccaacacacgtaccagtccggtaagcgggttctggatctttagtcagtattgttttttagacttctgcaatgatccacaaaatcgcggtctttacacaccgtag

SEQ ID NO: 11765 - DNA, 1326 bp, synthetic construct
  misc_feature 1..1326: note = source = /note="Description of Artificial Sequence: Synthetic coding sequence"
  source 1..1326: mol_type = other DNA
atggaatttgagttcgaccgcctgcgggctttccaggccatgcaagtgcactgcaataatatgcacaccctaggcgcacggcttcctgggggagtggagtgtaggttccgcagaggccctgccatggcttgggagggtgagcctatgaggcataacctcggaggtaatctgggcgaccccagggcgagagcagtgtccgtccctttagggggaagggttgcccgatttctgcagtgccggttcctttttgcgggtccgtggctcctcttctctgaaatctcgtttattagcgacgtggtaaataattcctcacccgctctcggcggaacatttccccctgccccttggtggccaccaggtccacctcctaccaatttcagtagcctggaactcgaacctcgtggacagcagccagttgccaaggccgaggggtccccaactgccattctgatcggctgcctggtcgccattatcctgctgctactccttatcatcgcgctcatgctctggcggcttcattggaggagactgctgtccaaggtcctggagagccaccccagaaccagatcccctgggcttgtagggattagacctacaccattgcccgtcagccctatggcactgaggtgttgtagccctattcaaccgaccgcctccttttggccattgacacctgtacccctcgaggctcgagcacctccacacccgccaggccctaatccgcctacacctaggggagtgactggcggaaatacgtatgctgtaccagctctgccacctggggctgtgggtgacggccctccacgggttgacttcccacgttcacgactcaggtttaaagaaaagttaggagagggccagttcggggaggtccatctctgcgaagtggatagcccgcaggacctcgtctccttggactttcccctgaacgtcagaaagggccaccccctgctggtggccgtgaagattttgcgcccagatgccacgaaaaatgcacgcaacgattttttaaaggaggtcaaaataatgtcacggctgaaggatcccaacatcatccgcctccttggcgtgtgcgtccaggatgaccctttatgcatgataactgactatatggaaaatggcgacctcaaccaattcttgtcggcccaccagcttgaagacaaggccgctgagggagcccctggtgacggacaggccgcacagggtcctacaataagctatccgatgctgctgcacgtcgccgctcagattgccagcgggatgagatatctggctaccctcaattttgttcacttttggggagaacgtcaccgatttctacactag

SEQ ID NO: 11766 - DNA, 2067 bp, synthetic construct
  misc_feature 1..2067: note = source = /note="Description of Artificial Sequence: Synthetic coding sequence"
  source 1..2067: mol_type = other DNA
atgctgccaacagaggtgccacagtctcatcccggtccttccgccctccttttactccagttgctgttgcctccgacaagtgcgttcttccccaacatctggagcttgttggctgctccgggatctatcacacatcaggatctcaccgaggaagcagctctgaacgtaacgcttcaactctttctggaacagccacctccaggtcgaccacctctccgcctcgaggatttcctcggacgaacgcttctggccgatgatctttttgccgcttactttgggccaggttccagtcgcaggttccgcgctgccctgggagaggtatcacgcgcaaacgctgctcaggacttcctaccaactagcaggaacgaccctgatcttcacttcgacgcggagagactaggacaggggcgtgccagactggtgggagcactcagggagaccgttgtcgccgcacgagccctggaccataccttggccagacagagacttggcgctgcccttcacgctttgcaggacttttactcacattccaactgggtggaactcggagaacagcagccccatccacatctgctgtggcccagacaggagctgcagaatctggcacaggttgccgaccctacgtgctccgattgtgaggagctatcttgtccgcgaaactggctgggctttacactcctcacatccggctacttcgggacccaccctcctaagcccccaggcaagtgcagccacgggggtcatttcgatcgctcaagttctcagccccctaggggcggaattaataaagacagcacctcgcctggcttcagcccgcaccacatgctgcacttgcaggcagctaagctggccctccttgcctctattcaggcttttagcttgctgcgatcgagactcggagaccgcgacttcagccgtctcctggatatcacccctgcaagcagtttgagctttgtcctggacaccaccgggagtatgggcgaagaaattaacgctgccaagattcaagccaggcacctggtggaacaacggcgaggcagcccgatggaaccagtccactatgtgctggtacctttccacgacccaggctttggccctgtgtttactacaagtgatcccgattctttctggcagcaattgaacgagattcatgctctgggcggaggggatgagcctgagatgtgtctaagcgccctgcagctcgcactgctgcatacgcctcctttaagcgatattttcgttttcactgatgccagtccaaaggacgcgtttctgacaaatcaggtggagtcactcacccaggagcgaaggtgtcgcgtaacgtttctcgtgacagaggatacctcccgtgtgcagggtcgcgcaagaagagagatcctgagccctcttaggtttgagccctataaagcagtggccttggcaagcggaggagaggtgatttttactaaggatcagcacattagggacgttgcagcaattgttggggaaagtatggcagctctggtgacgcttccattggaccctccagtcgttgtcccgggacagccactcgtgttctctgtggacggactgctgcagaagattactgtgagaatacatggcgatatcagtagcttttggatcaagaaccccgctggtgtttctcagggccaagaagaaggaggcggtccactcggccacacccggcgatttggtcagttctggatggtgaccatggatgatccccctcaaactggaacctgggagatccaggtgacagccgaagacacccctggggtccgcgtacaggcacagaccagcctagactttctttttcattttgggataccgatggaggatggcccacacccaggcctctaccccctgacccagccggtggctggacttcagactcaactgttagtcgagtctcagagctggggctcttctgcagcattcctcccaagacacccctctaggggaccccgagggtgtcgcactcggccaggtgctctgggtgccagagggaccagtggagccagaagcccgaggagcctcgctgtggcccacgccgcagtccacccttag

SEQ ID NO: 11767 - DNA, 1326 bp, synthetic construct
  misc_feature 1..1326: note = source = /note="Description of Artificial Sequence: Synthetic coding sequence"
  source 1..1326: mol_type = other DNA
atggagttcgaattcgataggttgcgtgcatttcaggccatgcaggtccattgcaacaacatgcacactctcggcgcaaggttacctggaggagtcgaatgtcgatttcggagggggcctgcaatggcctgggagggagagcctatgcgccacaacctagggggaaatctgggcgacccgagagcccgtgccgtgtctgtccccctaggtggcagggtggcaaggttcttgcagtgccgatttctattcgctgggccttggctccttttttcggagatttcatttatctccgatgtagtgaacaactcatctccagccctgggcggaacatttccaccagccccttggtggcctccgggaccaccccctacaaattttagcagcctggaacttgagccacggggacagcagcccgtagccaaggctgagggatcgccgaccgcaatccttataggctgtctggtggctatcatcctactgttacttctaatcatcgctctcatgctgtggcgattacattggcgaaggctgctttcaaaggtgctggaaagtcaccctcggacaaggagccccggtctggtcggcatcagaccaacactgctgcccgtgtcaccaatggccctacgatgctgttccccaatccagcccaccgcaagcttctggcctctcacacccgtgccgctggaagccagagcgcctccccacccacccggacctaaccctccgaccccacgcggtgttacaggcggaaatacgtatgccgtgccagccctgccgccaggcgctgtaggagacggtcccccacgggtggatttccctaggtcaagattacgctttaaggagaaactcggggagggtcaatttggggaagttcacctgtgcgaggtagactccccccaggacctggtgtccctggatttccctctgaatgtgcggaaaggccaccctctgctggtagctgttaagattctgcggcctgacgcaaccaagaatgcacgaaacgatttcttaaaagaggtgaagatcatgtcacgcctgaaggaccctaacatcatacgactcctgggagtgtgcgtgcaggacgatcccctgtgcatgatcaccgattacatggagaacggggacctgaaccagttcctgtcagcacaccagctcgaagataaagctgcagaaggggctcctggggacggccaagctgcccaaggtcccacaatctcctatcccatgctgctccatgttgcggctcagatcgctagtggtatgaggtacctcgccacccttaatttcgtccatttttggggcgaacgccaccgctttttgcactag

SEQ ID NO: 11768 - DNA, 2559 bp, synthetic construct
  misc_feature 1..2559: note = source = /note="Description of Artificial Sequence: Synthetic coding sequence"
  source 1..2559: mol_type = other DNA
atgctgcccaccgaggtacctcagagccatccagggccttctgccttgctgctgctgcaactcctgctgccacccacctccgctttctttccgaacatctggagtctcctagccgctccaggcagcatcacccatcaggaccttacggaagaagcagcgttgaacgtgactctccaactctttttagagcagcctcccccaggcaggcctccactgcggcttgaagacttccttgggaggactctcttagccgacgacttgtttgcagcatactttgggccaggaagctcccggagattccgtgccgctctcggagaagtctctagagcaaacgcagctcaagactttctgcctacctcaagaaacgaccccgatttgcacttcgatgccgagaggctggggcaggggagggcgcgtctggtgggcgctctgagagagaccgtggtcgcggctcgggcacttgatcataccttagccagacagaggttgggtgccgctctgcacgcactgcaggacttctatagtcacagtaactgggttgaactgggtgagcagcagccccatccacatcttctgtggcctcggcaagagctccagaatctcgcccaggtggccgatcccacatgctctgattgcgaagagctttcctgcccacgtaactggctgggtttcacattactcacctctggctactttgggactcatcccccaaagcctccaggaaagtgctcacatggagggcactttgaccgcagcagtagccaacctccacgtggcggtataaataaggactccaccagtcccggattctccccccatcatatgttgcatctgcaggctgccaaattggcactcctcgcctccatacaggcgttttctctcttacggagtaggctcggagacagggacttcagccgcctcttagacatcacgccagccagtagcctatccttcgtcctggatacaacggggtccatgggagaagagatcaatgctgcaaagattcaggcccgtcacctggtggagcagagaagggggagccccatggaaccggtacactatgtactggtcccatttcatgacccgggtttcggccctgtgtttaccacatccgacccggattcgttctggcagcagctgaacgaaattcatgctttggggggaggtgacgagcctgagatgtgcctgagtgcattgcagttagccttgctgcacaccccaccattatctgatatattcgtatttaccgatgcgtcgccgaaggacgcttttctgacaaaccaggtggaatctctcacccaggagcgcaggtgtcgcgtgacatttctcgttaccgaagatacatcacgcgtccaaggtagggccagacgcgagattctgtcaccccttagattcgagccttataaggccgtggcgctggcgtcaggaggcgaagtaattttcacaaaggatcagcacattagggatgtggctgctatcgtcggggaaagcatggcggcactggtaaccttgcctctcgaccctccagtggtggtgccaggacagcctctggtattctcagtagatggtcttctccagaaaataacggttcggatccacggagatatatcaagcttttggataaagaacccagctggtgtgtcccagggacaggaagagggaggtgggccacttgggcacaccagacgctttggccagttctggatggtgaccatggacgatcccccacagactggcacttgggagatccaggtgaccgctgaagacacacccggagttagagttcaggcccagacgtcattagacttcctctttcactttggcattcccatggaagatgggcctcatccgggtctatatcctttgactcagcctgtcgcgggactgcagacacagctcttagtcgaggttaccggactgggctcacgagcaaaccccggagacccacagccccatttcagccatgtcattttacgtggggttcctgagggcgcagagctgggacaggttcctctcgagccagtgggaccccctgagcgtggcctccttgctgcctccctgtccccaaccctcctctccacaccacggcctttcagcctggagctgattggacaggatgctgccggacgcagactgcatagagctgccccacaaccatcaacggtggtacctgtgctgctcgagctgtctggcccttcgggctttctggcgcctggctctaaggtgccactgtccctccgtatagctagtttctcgggcccacaggatttggacctgcgtaccttcgtgaatccttccttttcactcacttcaaatctgtctcgcgctcatttggaacttaatgaatctgcttggggaaggctctggctcgaggtgccagactctgccgcaccagactctgtcgttatggtgacggtgaccgccggagggcgagaggccaaccctgtcccaccaacccatgccttcctgagattgctagtctccgctcctgctccacaggttcgcaaccactattttccgtcccaaggacccgcacatcacccatataggttaatatag

SEQ ID NO: 11769 - DNA, 732 bp, synthetic construct
  misc_feature 1..732: note = source = /note="Description of Artificial Sequence: Synthetic coding sequence"
  source 1..732: mol_type = other DNA
atgggaccagaggccctgagctcactcttacttcttctccttgtcgcctccggagacgctgacatgaaggggcactttgaccctgcaaagtgcagatacgcattggggatgcaggaccggacaatccccgactctgatatctcagcatcttccagctggtcagattctactgccgcaagacattcacgactggaatcatcagatggcgatggagcctggtgtcccgctggttccgtgtttcctaaggaggaagaatacctgcaggtcgatcttcaaagactccatctcgtggcccttgtgggcacccagggcagacacgcgggaggcctcggaaaggagttcagccgcagttacaggttgcgctactccagggacgggcgtagatggatgggatggaaagatcggtggggccaagaggtcatctccggtaatgaggaccccgagggggttgtacttaaggacctcggaccacctatggtggcgaggctggtgcggttctatccgagagctgatcgtgtgatgtctgtctgccttcgtgttgagctgtatgggtgcttgtggcgcgactgcagtatgggggtctgggcttcctggcaaatggtctggtggggctggatgaccctgggcagggtgcggagctgcggatcaggacaggctatgaccatgtgggacggggcaacaacagcctcccccgtggcaatgtggaggtggagcctaagcttgactggatag

SEQ ID NO: 11770 - DNA, 2760 bp, synthetic construct
  misc_feature 1..2760: note = source = /note="Description of Artificial Sequence: Synthetic coding sequence"
  source 1..2760: mol_type = other DNA
atgggccctgaagcgctgtcatctctcctcttactgttgctcgtagccagcggcgatgccgacatgaagggacacttcgaccctgccaaatgccggtacgctctcgggatgcaggaccggactattcccgactctgatatatccgcatctagcagctggtcggactcaaccgctgccaggcacagtaggcttgaaagttctgatggtgatggtgcctggtgccctgctggcagcgtgttccctaaagaggaggagtacctccaggtcgatctgcagcgcttgcacttggtggctctcgtgggcactcaggggcgacacgccggtggacttgggaaagagttcagtaggagttaccggctacgctactcaagggatgggcgtaggtggatgggctggaaggatcggtgggggcaggaggtcatttcaggaaacgaggacccagagggcgttgttcttaaggatttgggcccaccaatggttgctcggttggtcaggttctatcctagggctgaccgcgttatgtcggtctgtttgagagtggaattgtacggctgtctctggagggatggcctgttgagctataccgctccggtaggccagactatgtacctgagtgaagcagtttatctgaacgacagcacgtatgacggccataccgttgggggtttgcaatatggcggactcggccagcttgccgatggggttgtgggtttggacgacttccggaagagccaggagctgcgggtctggcccggttatgactacgttggctggtctaatcactcattttcctctggctatgtcgaaatggaattcgagttcgatcgcctgcgggcattccaggcgatgcaggtccattgcaataatatgcatacgctgggcgcacggctccctgggggagtggagtgtcgcttcaggcggggacccgcaatggcctgggagggcgaacctatgcgacacaacctgggcggaaatttgggagatccccgtgccagggcagtgagcgtgccactagggggacgggtggccaggttcctccaatgtcgctttctgtttgcaggtccctggctgctgttctcagaaatcagttttatctccgatgtcgtgaacaattcttcaccggctctcggaggaacattccccccagcaccctggtggccacccggtccgcctcccacaaatttttcgtccctggaactcgagccgaggggtcagcaaccggtggcaaaggctgagggtagccctactgctatcctgatcgggtgtttggtggctattattctgctgttgttactaattatagctctgatgttatggagactccactggcgacgcctccttagtaaggcagagaggcgcgtactcgaggaggaactgactgtgcacctctccgtcccgggagacactattctgatcaacaatcgtccgggacctagagaacctcctccttatcaagagccccgtccgaggggaaacccgccacactctgctccatgcgtacctaatggaagcgctctgcttttgtctaacccagcctacagactgttgttagctacctatgccagaccgcctcgaggtccaggtcccccaaccccagcttgggctaaaccgaccaatactcaagcatatagtggagactacatggagccagaaaaacctggggctccattgctgccaccacctcctcagaattccgttcctcactatgccgaagcagacatcgtgaccctgcagggggtgactggaggaaacacctacgctgtgcctgctctgccacccggagctgtgggcgacggtccacctcgtgtggattttccaaggtctagattacgatttaaggaaaaactcggagaggggcagttcggagaagttcatctgtgcgaggtcgacagccctcaagaccttgtgtctcttgacttccctctgaacgtgaggaaagggcacccgctgcttgtggctgttaagatcctgaggcctgatgctacaaagaatgcttctttcagtctttttagtagaaatgactttctgaaggaggtcaaaataatgtctcgattaaaggaccctaatatcattcggttactgggggtatgtgtccaggatgatcctctgtgtatgatcacggactatatggagaacggcgatctaaaccagttcctctccgcgcatcagctggaagataaagccgctgagggggctccgggagacggacaggctgctcagggaccaaccatcagctatccaatgttactgcatgtagcggctcagattgcctctggaatgagatatctggctactcttaattttgttcatcgcgacctagccacccggaattgtctggtgggcgagaactttaccattaaaatcgctgacttcggaatgagtcggaacctttacgctggcgactactaccgtgtacaagggcgagccgtgctgccaatccggtggatggcctgggagtgtatcctgatgggtaaatttacaactgcctccgatgtctgggctttcggcgttaccctctgggaggtgctgatgctttgtagggcccagccctttggtcagcttaccgatgagcaggtcatcgaaaatgcaggcgaattcttcagagaccaagggagacaggtctatctctctcgccctcccgcatgtcctcagggtttatacgaactgatgctaagatgctggtctcgtgagagcgagcagcggccacctttttcccaactgcatagattcctcgccgaggacgctttaaataccgtttag

SEQ ID NO: 11771 - DNA, 2700 bp, synthetic construct
  misc_feature 1..2700: note = source = /note="Description of Artificial Sequence: Synthetic coding sequence"
  source 1..2700: mol_type = other DNA
atgctgcttctgctgctgctcgcccctttgtttctgagacctcccggtgccggaggagcacagactcccaacgccactagcgaggggtgccagattatccacccgccatgggaagggggtatccgatatcgcggactgacccgcgatcaggtgaaagccatcaattttctcccggtggactatgagatcgaatatgtgtgccgcggtgagagagaggtggtcggccctaaagttcgaaagtgccttgccaatggttcttggaccgacatggacaccccaagcaggtgcgtaaaccgcacccctcacagtgaacgaagagcggtgtacatcggggcacttttcccaatgagtgggggatggccaggaggtcaggcctgccaacctgccgttgagatggccctcgaagatgtgaacagccgacgtgacattctaccggattatgaacttaagttgatccaccatgactcaaaatgcgacccagggcaggctacaaagtacctgtacgagctgctgtacaacgatccaatcaagattatcctgatgccgggatgttcgagtgtgtcaaccctggtggcagaagcggcaagaatgtggaacttgattgtgttgtcatacggatcaagtagtcccgctttatcaaatagacagcgcttcccaacttttttccggacccacccttcagctacactgcataatcctactagggtgaagctgttcgagaagtggggttggaaaaagatcgccactatccaacaaactacagaggttttcactagcaccctggacgatctggaggagagggtcaaggaggctggtatcgagattacatttaggcagagtttcttttccgatccagctgtacccgttaagaatctgaaaagacaggacgcccgaattattgtcggccttttttatgagactgaagctaggaaggtattctgtgaggtgtacaaagaaaggctctttggcaaaaaatacgtctggtttctgatcgggtggtacgcggacaattggtttaagatttacgacccatccatcaattgcaccgttgacgaaatgacagaggcagtggagggccacatcacaacagaaatagttatgctcaatcctgccaacacaaggtccatttccaacatgacctcccaggagttcgtcgaaaaattgaccaaaagactcaaaagacatcctgaggaaactggagggtttcaggaagctccgctggcctatgacgccatttgggcattggcgctggctctgaacaaaacctcaggtggtgggggacggtccggggtaagactagaggatttcaattacaataatcagaccatcaccgatcagatttatagagcgatgaattcctcctcctttgagggggtttcaggccacgtcgtctttgacgccagtggttctcgtatggcatggacactgatcgaacagctgcaaggcggaagctataagaaaatcggttactacgactccacgaaggatgatttgagttggtcaaaaactgacaagtggattgggggatctccccctgccgatcagactctcgtcattaagactttcaggttcctttcgcagaaattgttcatcagtgtttcagtgttgagctcacttggaatcgtactggctgtggtgtgtttgtcattcaatatttacaattcacacgtgcggtatattcagaactcccagcctaatcttaacaacttgacagccgtaggttgcagcctggcactggcagccgtgttcccactgggactcgatgggtatcatattgggcgaaaccagttcccattcgtgtgccaggcaaggctctggctgctcggcctgggatttagcctggggtacggatcaatgtttacgaaaatttggtgggtacatacagtcttcacgaagaaggaagaaaagaaggaatggaggaagactctcgaaccctggaaactgtatgcgactgttggacttctggttggtatggacgtgctgactctggctatctggcagattgtggatccactccaccgcacaatagagactttcgccaaagaggaacctaaggaggacatcgacgtctcgatccttcctcagctcgaacactgcagttcccgaaagatgaatacgtggctcggcatcttctacgggtataagggtttgctgctgctactggggatctttcttgcctacgagaccaaaagcgtatctaccgagaagataaatgatcaccgggctgtgggcatggccatttataatgtagcagtgttgtgcttaattacagctccggtgaccatgatcctgtccagccagcaagatgctgcctttgccttcgcatccctcgcgatcgtgttctcatcttatataaccctcgtggtgctgtttgttcctaaaatgcgcagactgattactaggggcgagtggcagagcgaggctcaggacacgatgaaaacgggcagcagtacgaacaacaatgaagaggagaagtccaggctgctggaaaaggaaaacagagagctagagaaaattatagcagagaaagaggagcgcgtctctgaactgaggcatcagctacagagcaggcaacagctcagaagtcgacggcatccacctactccccctgagcctagtggaggactccccaggggcccacccgaacccccagacaggctgagctgtgatgggtcacgggtgcacctcctgtacaagtag

SEQ ID NO: 11772 - DNA, 447 bp, synthetic construct
  misc_feature 1..447: note = source = /note="Description of Artificial Sequence: Synthetic coding sequence"
  source 1..447: mol_type = other DNA
atgcagaccttcccagtcgcaggtgctctggaccctgcaattctggatacttcaagtccacaagcactttacactgttcttctgattgtgctggttatgatgtccctggttttcgggaaatttgttccagtgaattgggaaccccctcaacccttgccttttcctaagtacctgcgttgttatagatgcttgctggagaccaaagagctgggctgtctattgggatcagacatctgcctgacacctgctggatcctcatgcataacgctgcataaaaaaaattccagcggctcagacgtgatggtctctgattgtaggtctaaggagcagatgagcgattgttccaatactcgaacaagtcccgtgtccggcttttggatattttcgcagtactgctttctcgacttctgcaatgatccacagaacagaggactgtacaccccgtag

SEQ ID NO: 11773 - DNA, 516 bp, synthetic construct
  misc_feature 1..516: note = source = /note="Description of Artificial Sequence: Synthetic coding sequence"
  source 1..516: mol_type = other DNA
atgcggcacaatctcgggggaaacctgggtgacccacgcgctcgcgcagtgtctgtccccctgggcggaagagtcgccagatttctgcagtgccggtttttgtttgctggtccttggctactgttcagtgaaattagcttcatcagtgatgtggtgaacaatagtagcccagcgcttggcggaaccttcccacccgctccctggtggccccctggtccgccacccaccaatttcagttcactggagctggaaccgcgtggccaacagccagttgccaaagcggaaggctcacccacagccatacttattgggtgcctggtagcgattatattattgctgcttctcatcatcgcactgatgctgtggaggctgcactggaggaggctactaagcaaggttctggagtctcatccacgcaccagaagtcccggactggttggaattagaccaacgcccctgccagtgagccccatggcccttgtccacctctgtgaagttgattcaccccaggattag

SEQ ID NO: 11774 - DNA, 666 bp, synthetic construct
  misc_feature 1..666: note = source = /note="Description of Artificial Sequence: Synthetic coding sequence"
  source 1..666: mol_type = other DNA
atgaccacacaacttcgtgtggtccacctgctccccttgctgctggcctgcttcgtccagacatctcccaaacaggagaaaatgaagatggattgtcacaaagatgaaaaaggcaccatctacgactatgaggctattgcactcaataaaaacgagtacgttagctttaaacagtacgttggcaaacacatcctattcgtgaacgtggccacctactgcggtctaacagcgcagtaccctgaactcaacgctctacaggaggaactaaagccttatggcttggtggtactcgggtttccgtgcaatcagtttggcaagcaggaaccaggggataacaaggagattttacctggccttaagtacgttcgcccaggcggaggcttcgtccccagtttccagctgttcgagaagggggacgtcaacggggagaaagagcaaaaggtgttcagcttcctgaagcatagttgtccacacccttccgaaatcctgggaactttcaagtccatatcctgggaccctgtgaaagtacacgacataagatggaactttgagaagtttctggtcgggcctgatggcattccagtgatgcggtggtctcaccgcgctacagtctcgtccgtgaagaccgacatcctcgcatatttaaagcagtttaaaactaagtag

SEQ ID NO: 11775 - DNA, 447 bp, synthetic construct
  misc_feature 1..447: note = source = /note="Description of Artificial Sequence: Synthetic coding sequence"
  source 1..447: mol_type = other DNA
atgcagactttccccgttgcaggggctctcgatcctgctattctggacacatcatctccacaggctctatatacagtcttgctgatcgtcttggttatgatgagtctcgtattcggcaaatttgtgcccgttaactgggaacctccacagccactccccttcccgaagtacttacggtgttaccgatgcttgctggaaactaaggaactggggtgcctactagggtctgacatttgtctcactcctgcgggaagtagctgtattacccttcataaaaaaaattcaagcggatctgacgtcatggtgtcggattgcaggtccaaggagcagatgtcagactgttctaatacacgaacatcaccagtctccgggttttggatattttcccagtactgttttctggatttttgtaacgaccctcaaaatagggggctctacaccccctag

SEQ ID NO: 11776 - DNA, 1737 bp, synthetic construct
  misc_feature 1..1737: note = source = /note="Description of Artificial Sequence: Synthetic coding sequence"
  source 1..1737: mol_type = other DNA
atgttgctcctactgctccttgctccattgttccttcgccctccaggcgcaggcggagctcagacgcccaacgccacctcggagggatgccagattattcacccgccatgggagggaggcatccgctaccgcggtctgactagggatcaggtcaaagctatcaatttccttcctgtcgattatgaaatcgaatacgtgtgcaggggcgaacgtgaagtggtggggcctaaagtgcgaaaatgcttggcgaacgggtcatggaccgatatggacacacccagccggtgcgtgcgcatatgctctaaaagctatctgaccctcgagaatgggaaggtcttcttaactggcggtgatttgcctgctctggatggggcacgggttgattttcggtgtgatccagacttccatttggtcggctccagtcgtagcatctgttctcaggggcagtggtccactcccaagccccactgccaagtgaacagaactccgcacagtgaaagacgggcagtgtacatcggggctctgttcccaatgagcgggggatggcctggcggtcaggcatgccaaccggctgttgagatggcccttgaagacgtgaattctagaagggatatattgccagactatgagctgaaactgatccatcacgatagcaaatgtgaccccggacaagccactaaatacctgtacgagctgttgtacaatgaccccattaaaattattttgatgcccggttgttcttcggtttccaccctcgtggctgaggctgccagaatgtggaaccttatcgtgttgagctacggttcttccagccctgctttgtccaataggcagcgtttcccaactttctttcgcacacaccccagcgccaccctgcataacccgaccagagtcaaactttttgaaaaatggggctggaaaaaaatagctaccatccagcagaccaccgaggtgtttacttctaccctagacgatcttgaggaaagagtcaaggaagcaggaatcgagatcacattccggcagagcttcttttccgatcctgctgtgcccgtaaaaaacctcaagcgccaggacgccagaataatagttggcttgttttacgagacagaagcacgcaaggtgttttgtgaagtctacaaggagcggctgttcgggaagaagtatgtctggtttctcattgggtggtacgctgataactggtttaagatttatgacccatcaatcaactgtacagtggacgaaatgacagaggcagtggagggacacatcactaccgagattgtgatgctgaatcccgctaacactcgttctatctctaacatgacatcccaggaattcgtggagaagttgactaagcgactcaagcgccatcccgaagagacaggtgggttccaagaggccccactagcttatgatgcaatctgggctctcgcactggcgctgaataagacctccggcggaggcggacggagcggagtaaggttggaggacttcaactataacaaccagactattacggatcagatttatcgtgcaatgaacagtagcagttttgagggcgtgtccgggcatgtggtgtttgatgcgtcaggatctcgaatggcctggaccctgatcgagcaactccagggaggttcatataagaaaatcggatattatgatagcaccaaagatgatctgagctggtccaagacagacaagtggatcgtcatctctcgcacccacagcccaacatag

SEQ ID NO: 11777 - DNA, 1737 bp, synthetic construct
  misc_feature 1..1737: note = source = /note="Description of Artificial Sequence: Synthetic coding sequence"
  source 1..1737: mol_type = other DNA
atgttactcctgctccttctagcaccacttttcctgaggccacccggtgctggcggtgctcaaacacccaatgccacctctgagggttgccagattatccacccgccttgggagggtggtatccgctaccgcggtctgaccagggaccaggtcaaggccatcaacttcctacctgtggactatgagatcgagtacgtttgccggggtgagcgcgaggtggtcggcccaaaagtgcgaaaatgtctcgctaacggatcatggacagacatggacacaccttcccgttgcgttaggatctgtagtaaaagttatctcactctcgaaaatggtaaagtgttcctcacgggtggagacctcccagctttggacggcgcacgggtggatttccggtgtgatccggatttccatctcgttggctctagtcgcagcatctgttcacagggccaatggtccacgcccaaaccgcactgccaggtgaataggacccctcattcagaaaggcgcgcagtatatatcggcgctctgtttcccatgtctggcggttggcccggagggcaggcctgccagcctgctgtggagatggcactagaagacgtgaacagcagacgcgacatactgccggattacgaactgaaactgatccaccacgactctaaatgcgaccctggccaggcaacaaaatatctctatgagctcctatacaatgacccaattaagatcatccttatgcctggttgctcgtcagtgtcaactttggtcgcggaagctgccaggatgtggaatttaattgtattatcttatgggagctctagcccagctctgtccaaccggcagaggttccccacctttttccgcactcaccctagcgccacccttcacaatcctacccgtgtcaaattgttcgagaaatggggatggaagaagatagccaccatccagcagacaaccgaggtctttacatcaacactggacgatcttgaggaacgcgtaaaagaggctggcattgagatcacatttaggcaaagttttttcagcgacccggctgtccctgtcaagaatcttaaaaggcaagacgcaaggatcatcgtcggcctcttctatgaaaccgaggcacggaaggtcttctgcgaagtatataaagagcgcctgtttggtaagaagtatgtgtggttcctgatcgggtggtacgcggataactggtttaagatctacgacccatcgatcaactgcaccgtggacgaaatgacggaggctgtggaaggacacattacaactgagatagtgatgttgaaccccgctaatactaggagcatcagtaacatgactagccaagagttcgttgagaagctgactaagcgcctcaagagacaccccgaggagaccggtggctttcaggaggcaccactggcttatgatgctatttgggccctggctctggctctgaacaagacatctggcggtggcggacggtccggagtgcgcctcgaggatttcaactataacaatcaaacaattactgaccagatttatcgagcgatgaactcatcttctttcgaaggggtcagcggccacgtcgtttttgacgccagcggaagcaggatggcatggaccctgattgagcagcttcaaggcggtagctacaagaagataggatattacgattcaactaaagacgacctctcctggagcaagacggacaagtggatcgtaatttcccgaacccacagtccaacatag

SEQ ID NO: 11778 - DNA, 756 bp, synthetic construct
  misc_feature 1..756: note = source = /note="Description of Artificial Sequence: Synthetic coding sequence"
  source 1..756: mol_type = other DNA
atgccgcatctggccagcctattcactgcatcttccagatgctgccctcatcctctgcgccctgagggaagcggagcaatggggccagaagctttgtcctctctcctgctgttgcttctggtagcaagcggcgatgctgatatgaagggacactttgatcctgctaagtgtcgctacgccctcgggatgcaggaccgtacaatacccgattctgacattagcgcatcctccagctggtccgactccacagcagctaggcactcccggttagagtcctcggacggtgacggggcatggtgcccagccggaagcgtgttcccaaaagaagaagaatatcttcaggtcgaccttcaacgccttcacctggtcgccctggtgggcacccagggccgtcacgccggaggacttggtaaggagttttcacgctcctaccgtctccgctactcaagagatggcaggcggtggatgggctggaaagatcgctggggtcaagaggtcatcagtggaaacgaagatcccgagggcgtcgttttaaaagacctcggcccaccaatggtggcaaggcttgtaagattctaccccagagctgacagagtgatgtcagtatgtttgcgggtcgaactgtatggatgcttgtggagaggcgagtggctctcctttctaggcatctgcttcctgagccggggactggaagggggagagtgtggtgaatgggctagccggattcccagccctgctggcaagctaagcctgtag

SEQ ID NO: 11779 - DNA, 1764 bp, synthetic construct
  misc_feature 1..1764: note = source = /note="Description of Artificial Sequence: Synthetic coding sequence"
  source 1..1764: mol_type = other DNA
atgcgacctaggggactgccacctctgctcgtggtgctattagggtgctgggcatctgtatcagcgcagactgacgcaacgccagccgttaccacggaaggcttaaacagtaccgaggcagcactggccacttttggcacttttccctccaccaggcctcctggcactccccgtgcgccaggcccatcctctggtccacgtcccacgcccgtgaccgacgttgctgtgttgtgtgtttgtgacctctctccagcacaatgtgacatcaattgctgctgtgacccagactgtagtagcgtcgatttttctgtgttcagcgcatgctctgtcccagtggtgaccggcgactcccagttctgctctcaaaaagccgtgatctacagcctgaatttcaccgccaaccccccacagagggtctttgagcttgttgatcaaattaacccctctatcttttgtatccatatcactaactacaaacctgccctcagcttcataaatccggaggtgcccgatgaaaataatttcgacaccttgatgaagacctcagatggcttcaccctcaacgcagagtcctacgtcagcttcaccactaagctggacatccctaccgccgcaaagtacgaatacggagtgcctttgcagaccagcgattccttcctgcgattcccctcctcgcttacatcgtctctatgtaccgataacaaccctgcggcattcctggtgaatcaggccgtgaagtgcacgcgtaaaatcaacctggagcagtgcgaggaaattgaggcactctctatggccttctactccagccccgagattctgcgggtgccggattctcgcaagaaagtccccatcacggtacagtcgatcgttatccagtccctgaacaagacattgacccgcagagaggacaccgacgttctgcaacctacactggtgaatgcaggtcacttttctctttgtgtcaatgtcgtgctggaagtgaagtacagcctgacctatactgatgcaggcgaagtcaccaaggcggatctgtctttcgtcctgggtacagtgtcctcagtggtggtacctctgcaacaaaagtttgagatacactttctgcaagaaaacacgcaaccggtccccctaagcggcaatcccggttatgtggtgggtctgcctctggctgccggtttccagccacacaagggaagcggaatcatccaaacaacaaacaggtatggccagctgacaatccttcattcaactaccgaacaggattgcttggctttagaaggtgttcgaactcccgtcttattcggttatacaatgcagtcaggttgcaaactgcggctgactggcgctttaccctgccaactcgtcgcgcagaaggtgaagagcctgctttgggggcaaggttttccggattacgtcgcgccattcggcaattcacaggcccaggatatgttggattgggtgcccatccacttcatcacgcagtctttcaatcgtaaggactcttgccagctaccaggcgctctcgtgattgaggtgaagtggacgaagtacggttcactgctgaaccctcaagcaaaaatcgtcaatgttacagctaatcttatctcctcctcttttccagaggctaatagcggcaatgaaagaaccatcctgatttcaactgctgtgacgtttgtggatgtgtcagctcctgctgaggccggttttagagcaccccctgcaatcaatgcacggctcccgtttaacttctttttcccattcgtctag

SEQ ID NO: 11780 - DNA, 2067 bp, synthetic construct
  misc_feature 1..2067: note = source = /note="Description of Artificial Sequence: Synthetic coding sequence"
  source 1..2067: mol_type = other DNA
atgctgcccacagaagtgccccagtcgcatcccggaccttctgctctcctgctcttgcaattgctgctgccacccacctccgccttttttccgaacatctggtctctgttggccgcaccgggttcgatcacgcatcaggacctgaccgaggaagccgctctaaatgttacgctgcaactctttctggaacagccaccacccggaagacccccactcaggcttgaggactttctgggtcggacacttctcgcagatgacttatttgcggcatatttcggaccaggctcctcccgcaggtttagagctgcccttggtgaagtaagtcgcgcaaacgctgctcaggatttcctccccacatccaggaatgatcccgatctacacttcgatgctgaaaggctcggtcaaggccgagcacgtctggtcggcgcactgcgtgaaaccgtggtagctgctagggcactcgaccacacattagctagacagaggctgggggcagctttgcatgctctacaggatttttatagccactccaactgggtggaactgggcgagcaacagccacaccctcatctactttggccaaggcaggaattgcaaaatctggcgcaggtcgccgatcccacatgtagtgactgcgaagaactctcttgtcctcgtaattggctggggtttactctcctgaccagcgggtactttggcacgcatccccctaaacctcctgggaaatgctctcacgggggtcattttgaccggagctcaagtcagcctccaaggggaggtatcaataaagacagcacttcccccggattcagcccgcatcacatgctgcatctgcaggcggcaaagttagccctgcttgctagtatccaggcattttcccttctacgatcccgactaggcgacagagatttttcaagacttttagacatcacccctgcgtcctctcttagtttcgtgttggatacaactggatccatgggcgaggagatcaacgctgctaaaattcaggctcgccatttagtcgaacagcgaagaggatcacctatggagccggtgcattacgtgttggtaccattccacgacccgggattcggaccagttttcactacgagtgacccggatagcttttggcagcagctgaatgagattcatgcacttggcggaggcgacgaaccagagatgtgtctctctgcattgcagctggctctgctgcacactccgcctttatccgatatcttcgtgttcaccgacgcctcaccgaaggacgcgttcctgacaaaccaagttgaatctctgactcaagagagaagatgccgcgtgacgttcttggtgacagaggacacaagcagggtgcaggggagagctcgtcgggaaatccttagtccactgcgttttgaaccctacaaagccgttgccttggcctccgggggagaagtgatattcactaaagaccagcatattagagatgtcgccgcaatcgttggcgagtcgatggccgctctggtgacattgcctcttgatccaccagtggtggttcctggacaacctctggttttttcagttgacggattactgcagaagattaccgtcagaatccatggcgatatctcttcgttctggataaagaatcctgctggtgtgagccagggccaggaagagggagggggaccactgggccacactagaaggtttggacagttttggatggtgaccatggatgatccgcctcagaccggaacatgggaaatccaggttaccgctgaagatacaccgggagtacgagtgcaggcgcagacctccctcgacttcctctttcactttggcatccctatggaggatggtccgcacccaggattgtacccgcttactcagcccgtggcgggactgcagacccagctgttggtagaatctcagagctggggctcgtctgcagctttccttccaagacatcccagccgtggccctagaggatgcaggacaagacctggcgctctgggcgctcgcggtacttccggcgcaaggagtccgaggtcactagcagtggcccacgctgcggtgcacccttag

SEQ ID NO: 11781 - DNA, 303 bp, synthetic construct
  misc_feature 1..303: note = source = /note="Description of Artificial Sequence: Synthetic coding sequence"
  source 1..303: mol_type = other DNA
atgacaacacagcttagggtggtccacctattgccgctactgcttgcttgtttcgtccagacatccccgaaacaggaaaaaatgaaaatggattgccataaggacgagaaaggcaccatatatgactacgaggctattgctctcaacaaaaacgagtacgtcagcttcaagcagtatgtgggaaaacacatcctgtttgtgaatgtcgctacctattgcggcctgactgcgcagtacccaggtatgtcagtgcagggcgaggatctgtatctcgtgagctcatttctccggaagggcatgtag

SEQ ID NO: 11782 - DNA, 705 bp, synthetic construct
  misc_feature 1..705: note = source = /note="Description of Artificial Sequence: Synthetic coding sequence"
  source 1..705: mol_type = other DNA
atgaaaaccctggccggactggtcttgggcctggtcatcttcgatgccgctgtcaccgctcctactctggagagtatcaactatgattctgagacttacgacgcaactctcgaagacttagataatttgtacaattacgaaaacatccctgtggacaaagtcgaaatcgaaatcgcaaccgtgatgcctagtggaaaccgcgagctgctcaccccaccaccccaacctgaaaaggctcaggaggaggaggaggaggaagaaagtacccctaggctgatcgacggaagctcgccgcaggaaccagagttcacgggcgtgttgggtccacacactaatgaagactttcctacctgcctgctgtgtacgtgtatttccaccaccgtgtactgtgatgatcatgagctggacgccatccctcctctccccaaaaacactgcttacttctattccagattcaaccgcattaaaaaaattaacaaaaacgattttgccagcctgagtgacctcaaaagaattgacctgaccagtaacctgatttcggagatagacgaagatgcatttagaaagctcccccagctgcgggagctggtgcttagggataataagattcgccagctgcctgagctgcctactaccctgacatttattgatatcagtaacaatcgcctgggcaggaagggtattaaacaggaggcctttaaatag

SEQ ID NO: 11783 - DNA, 2559 bp, synthetic construct
  misc_feature 1..2559: note = source = /note="Description of Artificial Sequence: Synthetic coding sequence"
  source 1..2559: mol_type = other DNA
atgctgccaacggaggttcctcagtctcacccaggaccatcagctttgctgttgttgcaattgctactccccccaaccagtgccttcttcccaaatatttggagtctgctggctgccccaggaagcattacgcaccaggatctgacagaggaagcagccctcaacgtcacccttcagctatttctcgagcaacctcccccaggccgtcctccactgaggctagaagactttcttggaagaacattactggccgacgacctgttcgccgcttactttggccctggttcgtccaggagattcagagctgctttgggagaagtctctcgtgccaacgcagcacaagacttcttacccaccagtcgcaacgatcctgatctgcactttgacgccgaaaggttgggccaggggagagccaggttggttggagcgctgcgggaaacggtcgttgctgctcgagctctcgatcacacactggcacggcagagactaggagctgctctgcacgctcttcaggatttttactcccatagcaactgggtggagctcggggaacaacagcctcacccgcacttgctgtggcctcgacaggaattacagaacctggcccaggtggctgacccaacgtgctcagactgtgaggaattgtcttgtcctcgaaactggctcgggttcactctccttacatcaggatacttcggaacccatccaccgaagcctcctggaaaatgctcacacgggggtcactttgatcgaagttcttcacagcccccacgagggggaattaataaagacagcacgtccccgggatttagcccccatcacatgcttcacttacaggcagccaagcttgccctccttgcttcaattcaggctttttctcttttgcgtagtcgccttggggatcgcgatttcagtcgacttctggacatcacacctgcctcctctttgagctttgtgctggataccacgggctcgatgggggaagagattaatgctgccaaaatacaggcccgacatctcgtggagcagcgacgtggcagcccaatggaacccgtacactatgtccttgtgcctttccatgatcctggcttcgggcctgtcttcactacctccgaccctgacagcttctggcaacagctcaacgaaatccacgccttggggggaggggatgaacctgaaatgtgcctgtccgccttgcagctagcacttttgcacacacccccactgtcagacatttttgtgtttacagacgcctctcccaaggacgccttcctcacaaatcaggtggagagcctcacccaggaaagaaggtgcagagtaacgttcctggtcaccgaagacacttctagagtgcagggacgggctcgtagggagattctgtcacccctgcgatttgaaccatataaagcggtcgcgcttgcctctggaggagaagtcatctttaccaaagatcagcatatccgggatgtggctgccattgttggtgaatctatggctgccctggttaccctgcccctggatccaccagttgtagtgccagggcagcccttggtcttctctgtggacggtttattacagaagatcacagtcagaatccatggtgacatctccagcttttggatcaaaaaccctgctggtgtatcacaggggcaggaagaaggcggaggcccattagggcacactagacggttcgggcagttctggatggtgactatggacgaccctcctcagactgggacatgggagatccaggtgactgccgaggacacgccaggcgtgcgggttcaggcacagactagtttggacttcctgtttcattttggcatacccatggaagacgggccacatcccggtctgtaccccctgactcagccagtggccggtctgcaaacacagctgctggtggaagtgactgggttaggttctagggctaatccgggagacccacagccacacttctcacatgtaattctacggggtgttcccgagggagctgagctcggccaggttcctttagagccagtgggccctcccgaacggggactgctggccgcttccctttcccctaccctcctgtctacgcctcgtcccttctctcttgaattgattggccaggacgcagccggtagacgactgcatagggcggctccacagccctctacagttgtgccagtcctgctggaactcagtgggcctagcgggtttcttgctccgggttctaaggtacccctgtcactgagaattgcctcgttttccgggccacaggatttggacttaagaactttcgtaaatccctccttctctctgacttccaatctatcccgagcccacctagaactcaatgagagcgcctggggccgattgtggctggaggtgcccgattctgcggcacctgactcagtggtgatggtgaccgttacggctggcggaagggaggctaatccggtcccaccaacacacgccttcctccgcctgctcgtatccgctcctgctccccaggtgcggaaccattatttcccctcacagggtcccgctcaccatccttacaggctcatttag

SEQ ID NO: 11784 - DNA, 2760 bp, synthetic construct
  misc_feature 1..2760: note = source = /note="Description of Artificial Sequence: Synthetic coding sequence"
  source 1..2760: mol_type = other DNA
atgggtcccgaggccctgtcctctttgctcctgcttctgctggtggcttctggtgacgcggatatgaagggccattttgaccccgctaaatgtcgatacgccctgggtatgcaggatcgtacaattcctgatagtgacatctctgcctcctcctcatggagcgactctacagcagccagacactcgcggctagaatcctctgatggagacggggcatggtgtccagctggctcagtcttcccgaaggaggaagaatacttgcaagttgacctgcagcggcttcatctggtcgctctggtagggacacaggggcgtcatgctggaggactgggcaaagagttttcacgctcctaccgattacgctatagtcgggacggaagacgttggatgggctggaaagatagatggggacaagaagtcatctctggcaacgaagacccagagggtgtggtgctcaaagaccttggtcccccaatggttgccagactcgtgaggttctatcctcgcgctgatagggtcatgtccgtctgtctgcgcgtagaactctacggctgtctgtggcgagatgggctgctttcttacaccgcaccagttgggcagaccatgtatctctccgaggctgtctacttaaacgatagcacctacgatggtcatacagtggggggacttcaatacggaggtctcgggcagctcgccgatggcgtagtcggcctggacgactttcgcaagtcacaggagctgcgggtatggcctggctacgactatgtggggtggagcaatcacagtttttcttcaggatatgtggaaatggaatttgagtttgaccggttacgcgcattccaggcgatgcaagtgcattgcaacaacatgcacaccctgggtgctaggctgcccggtggggtcgagtgcagatttcgtaggggcccagctatggcctgggagggtgagccaatgcgtcataatcttgggggaaacctcggggatcctcgggctcgcgcagtgagtgtgccgctgggcggtcgggtggcaaggttcctccagtgtcggttcctctttgccggaccatggctgctgttcagtgaaatttctttcatcagtgacgtggtgaacaacagctctccagcattgggcggaaccttcccacctgctccctggtggccacccggaccacctccaacgaacttctcttctctggaactcgagcctcgcggacagcagcccgttgctaaagctgaaggttcccccactgccattctgattggctgcttagtggcgattattttactgctgctgctgatcatcgccctcatgctatggcgcctgcactggaggcgcctcctttccaaagccgagaggagggtcctggaggaagagctgacagtgcacctcagtgtgccgggtgacacaatcctgatcaacaacaggccaggcccacgtgagccccctccctatcaggagccacgcccaagaggcaacccacctcattcagctccttgtgttcctaacggatccgcacttctgctatccaatccagcatatagactgttgctggctacctatgccaggccacccaggggacccggacctccaaccccagcttgggctaagcctacaaatactcaagcttatagcggcgactatatggaacccgaaaaaccaggggcacctctcctgccacctccccctcagaactctgtccctcattacgccgaagccgatatagtcactctccagggcgtgactggcggtaatacttatgccgttccagccttacccccaggcgcagtgggcgatggaccccctcgcgttgacttccctcgatccaggctgcgcttcaaagagaaactaggcgaagggcagtttggcgaagtccacctgtgtgaagtcgattctcctcaggacttggttagtctggatttcccacttaatgtccggaaggggcatcctttactggtcgccgtaaagatattgcgccctgacgcaaccaagaatgctagcttttctctgttctcgcgcaacgattttttgaaggaggtgaagataatgtccagactgaaagatcccaatataatcaggcttctcggtgtatgtgtccaagacgacccgctctgtatgatcactgattatatggaaaacggtgacctcaaccaatttctcagcgctcatcagctagaagataaggctgccgagggggcacccggagacggacaggccgctcaaggcccaacaatctcctatcccatgctgttgcacgttgccgcacagatagcctcaggaatgaggtacttggccacgctgaacttcgtccatagggacctcgcaaccaggaactgcctagtaggagagaacttcacaatcaaaattgctgattttggcatgtctcgaaatctgtatgccggagactactatcgagtgcaggggcgtgcagtcctcccaatcaggtggatggcctgggaatgtattctgatgggaaagttcacgacagcctcagatgtgtgggccttcggggtgactttgtgggaagtgctgatgttatgtagggctcaaccttttggacagctcactgacgaacaggtaatcgagaatgctggcgagttttttagagatcaggggcgacaagtgtacctcagtaggcccccagcctgccctcagggattgtacgagctcatgttgaggtgttggtctcgagagagtgaacagcggcctccattcagccaactacacaggtttcttgctgaggatgccttgaacactgtctag

SEQ ID NO: 11785 - DNA, 1737 bp, synthetic construct
  misc_feature 1..1737: note = source = /note="Description of Artificial Sequence: Synthetic coding sequence"
  source 1..1737: mol_type = other DNA
atgctgctcctcctccttctcgcccctctcttcttacgtccacctggagcaggcggtgctcagactccaaatgctacctcagagggctgccagattatacatccaccctgggaaggaggcatccgttatcgtggtctgaccagagatcaagtaaaggcaattaattttctgcccgtggactatgagattgaatacgtctgcagaggcgagagagaagtcgtggggccaaaggtgcggaagtgcttagctaacggatcctggaccgatatggacactccttcacggtgcgtgagaatttgttccaaatcttacctgaccctggaaaatggtaaggtgtttctcactggcggagatcttccagcccttgacggcgctcgggtggattttcggtgtgaccccgacttccacttagtgggctctagtcgatctatatgcagccaaggacaatggtccacacccaaaccacactgccaggtgaatcgaacaccgcattccgaacgaagggcagtctacatcggcgcactgtttcctatgtccgggggatggcctgggggtcaagcctgccagcctgcagtcgaaatggccctagaagatgtgaatagtagaagagacatcttaccagattacgagctgaagttgatccaccatgattctaagtgcgaccccggtcaggccacgaaatatctgtatgagctgctctacaacgaccctataaagatcattctgatgcccggatgctcgagcgtttcaaccctcgtcgcagaagccgctcgcatgtggaacctgatcgtgctgtcttacggtagtagttcacctgctctctccaacaggcaacgattccctaccttcttcagaacccacccctcagccactttgcataaccctacacgcgttaagttatttgagaagtggggctggaaaaagattgccacaattcagcagacgaccgaagtatttacatctactctcgacgatcttgaggaacgcgtcaaggaggccggtatcgaaatcacttttaggcagtctttcttttcagatcccgctgtgcccgtgaagaacctgaagagacaggacgcacggataattgtcggcctcttttacgagactgaagctcgcaaggtcttctgtgaagtgtataaggaaagactatttggcaagaaatatgtctggttcctaattgggtggtatgccgataactggttcaaaatctacgacccaagcatcaattgcaccgtggatgagatgactgaagctgtggagggtcacatcactacagagatagttatgcttaacccagccaatacacgcagtatctccaacatgacatctcaggaatttgtggagaaactgacgaagagacttaagaggcaccctgaagaaacggggggtttccaggaagcccctctcgcttacgacgccatttgggccctggctctcgcacttaacaagacgagcggcggaggagggaggagcggcgtcagactggaagactttaattataacaatcagacaattaccgatcagatttatcgcgcaatgaatagcagcagcttcgaaggcgtttcaggccacgtcgtgttcgacgctagcggctcacggatggcctggactctcattgaacagctccagggtggcagctacaagaaaatcgggtattacgacagtactaaagatgatctctcatggtcgaaaaccgataaatggattgtcatctcccgaacacacagccccacatag

SEQ ID NO: 11786 - DNA, 516 bp, synthetic construct
  misc_feature 1..516: note = source = /note="Description of Artificial Sequence: Synthetic coding sequence"
  source 1..516: mol_type = other DNA
atgcgccacaacctgggtggcaatttaggcgaccccagggctcgcgcagtgagcgtacccctcggtggcagggtggcgagatttctgcaatgcagatttcttttcgccggtccctggctcctattttccgaaatatctttcatcagcgacgtggtgaataactcctcgcccgctctcggcggaacttttccaccggctccatggtggccacccggaccacccccaaccaatttcagttccctggagctcgaacccagaggtcaacagcctgttgcaaaagcagagggatcccctacagccatactgatcggatgtcttgtggccatcatcttgctgttgttgctgattattgccctgatgctgtggagactgcactggagaaggttactgtctaaagtgcttgaatcccatcccaggacgcggtcgccgggacttgtgggcattagacctacacccttaccagtctcaccgatggctctggtgcacctctgtgaggttgattcgcctcaggattag

SEQ ID NO: 11787 - DNA, 2067 bp, synthetic construct
  misc_feature 1..2067: note = source = /note="Description of Artificial Sequence: Synthetic coding sequence"
  source 1..2067: mol_type = other DNA
atgttacctacagaagtcccccagagccatcctggacccagtgcattgttattgctgcaactgctcctgccccctactagcgcatttttccccaatatttggtccctcctcgctgcgccaggcagcataacacaccaggacctaacagaggaagcagcactgaacgtcacattgcagttgttcctcgagcagcccccacccggtaggcctcctctcagactggaggacttcctcggacgaacccttttggcagacgatttgttcgccgcatattttgggccaggcagcagtcgacgcttccgtgccgcactgggcgaagtgtcccgggctaatgcagcccaggattttctgcctacatcgagaaacgaccccgatctccacttcgatgccgaaaggcttgggcaaggacgcgcacggctcgtgggagctctccgtgaaacggtagtggccgcacgagctctcgatcacacgctagcgaggcagcgactcggtgctgccttacatgctttgcaagacttttatagtcatagcaactgggtagagttaggagagcaacagccacacccacatctcttgtggccccgacaggagttacagaacctcgcccaagtcgcagacccaacttgttctgactgcgaggagctgtcctgtcccaggaactggctggggttcaccctcttaacaagcggctattttggcacgcaccctcccaagccgccagggaaatgtagtcatgggggacacttcgaccgctccagttctcaacctccacgcggtggcattaataaggactccacatctcccggtttttctcctcatcacatgttgcacttacaggcggcaaaacttgcactcctcgctagtatacaggcattctcattactgagaagccggctcggagacagggacttttcacgtctgctcgacatcacccctgcgtctagtttgagcttcgtgctggacacaactgggtctatgggcgaggagatcaatgcagccaagatccaggcacggcacttagtggagcagcgcaggggatctccaatggagcccgtacattacgtcctggtcccattccatgacccagggttcgggccagttttcactacctcggatcccgactccttctggcagcagctgaacgagatccatgcactgggcggaggggatgagcctgagatgtgtctatcagctttgcaactggctctccttcataccccacctctgagcgacattttcgtgttcacagacgcttctcccaaggatgcgtttctgaccaaccaagttgaaagccttacccaggagaggcggtgtcgggtgaccttcctcgttaccgaagacacctcgcgcgtccagggcagggcgagaagggaaatcttgagccccctgcgcttcgagccttataaggctgtggccctagccagcggaggcgaagttatattcaccaaggaccagcacatccgagacgtggcagctatcgtcggagaatccatggctgcactggtcaccttgccattggacccaccagtagtggtgccaggtcagcccttggtcttttctgtagacgggctcttacagaaaatcacagtgagaatccacggggatattagttccttctggataaagaatccagccggagtcagtcagggccaagaggaaggcggaggacctctcgggcacacacgcagatttggacagttttggatggtgaccatggacgatcctccccaaaccgggacgtgggagattcaagtcacggctgaagacacaccaggcgtccgagtgcaagctcagacctccttggactttctgtttcacttcggtatcccaatggaggatggaccgcatccaggcttgtatccactcacacagccagtcgctggcctgcagacccaactgctggttgagagccaatcgtggggttctagtgccgcattcctgccccgacacccctcccggggtccaaggggatgccgcacccggccaggggcacttggagcgagaggaacttctggagcccgaagtccgcgttccctggccgtggcccacgcggctgtacacccctag

SEQ ID NO: 11788 - DNA, 5097 bp, synthetic construct
  misc_feature 1..5097: note = source = /note="Description of Artificial Sequence: Synthetic coding sequence"
  source 1..5097: mol_type = other DNA
atgcggttgctctggggactcatctgggcctcttccttttttactttgtcactccagaagccccgattactgttgtttagcccttccgtggtccacctaggagtcccgctcagcgttggagtccagctgcaggatgtgccaagaggccaggtggtgaagggatcagtctttctaagaaatccgtctcgcaataatgtcccttgtagtcctaaagtcgacttcaccctcagtagtgaaagggatttcgcactactttcactgcaggtgcctctgaaggatgccaagagctgcggcttgcatcagcttctgcgcggacctgaagttcaactggtggcacactccccctggctgaaggactctttgagcaggaccaccaatattcaaggaattaatttgctgttctcttcacgacggggtcacctttttcttcagacagatcagcccatatataaccctggacagcgagtaaggtaccgcgtgtttgccctggatcagaagatgcgcccatctaccgataccatcaccgtgatggtggaaaacagccacggcctaagagtgagaaagaaggaagtgtacatgccatcctccatttttcaggacgactttgtcattcccgatatcagcgaacctgggacctggaagatatcagcgaggttcagcgatgggctcgagtccaattccagtacccagtttgaagtaaagaaatacgtgctgcctaacttcgaagtcaagatcaccccgggaaagccctacatcctgacagtgccagggcacttggacgagatgcagctcgacattcaggccagatacatatacggtaagccggtacagggtgtggcatacgtgcggtttggcctgctagatgaggatggcaagaagacatttttcaggggcttggagtcccagactaagctggtgaatggccaatctcacattagcttgagcaaagccgagtttcaggatgctctggagaaactcaatatgggcattactgacttacagggactgagactatacgtggcggcagccataatcgagtatccaggaggggaaatggaggaggccgagctcacaagttggtattttgtgagttcacccttttccctagacctgtctaaaacaaaaaggcatctcgtgcccggtgcaccgttccttctgcaggcactggtgagggaaatgtcaggctcacctgccagtgggatccctgtgaaagtttctgcgacagtctccagccctgggagcgtgccagaggtgcaggacatccaacagaacaccgatggcagcggtcaagtgtctatacctattattattccccagacgatcagtgagctgcagctgtcagtgagcgccggttcaccccaccccgctatagcacgtctgacagttgcagctcccccatcagggggtcccggatttctttccatagaaagaccagatagcaggcctcccagggtgggcgacactctgaatctgaatcttcgagcagttggatctggggcaaccttctcccactattactatatgatactcagccgcggacagatcgttttcatgaatagagagcctaaacgaacattgacttcggtgtccgtctttgtagatcatcatcttgcccctagcttttatttcgtggccttttactaccacggggaccatccagtcgcgaattcgctaagagtggatgtgcaagcaggcgcttgtgagggaaagctcgaactctccgtcgacggcgcaaagcagtatagaaatggtgaatctgttaagctgcatctggagaccgactccttggctctggtcgccctcggcgcactggatacagcattatatgccgcaggtagcaagagtcataaaccccttaacatggggaaagtgttcgaggctatgaacagctacgatctggggtgcgggcctggaggtggggatagtgcattacaggtattccaggctgcaggtcttgctttcagcgacggagatcagtggacactgtcaaggaagaggttgagctgcccgaaagaaaagactactcgaaaaaagagaaatgtaaacttccagaaagccattaatgaaaagctcggacagtatgcttcacccacagcgaagcgctgctgtcaggatggggttacccggctacctatgatgcgctcatgtgaacaacgagctgccagggttcagcagccagactgtcgggaacccttcctaagctgctgtcagttcgccgagagtcttaggaagaagtcacgtgacaagggacaggccggacttcaacgtgccctcgaaattctccaggaggaggatctgatagatgaagatgatatacctgtgcgtagcttttttccagagaactggctgtggcgcgttgaaactgtagaccgatttcagatcctgacactttggctcccagatagtctgactacttgggaaatccacggccttagcctgtccaagacaaaaggactttgcgtcgcaactcctgttcagctccgggtcttccgggagtttcacctccacctcaggttaccgatgtcggtccggcgatttgagcaacttgagttgcgcccagtcctttacaactatttagataaaaatcttacagtgagcgtgcatgtctcacctgtggaaggcctgtgtctggctggtggcggtggactcgctcagcaggtgctggtacccgcaggctctgcgcgaccagtagcattcagcgtagtcccaacagcggcagccgctgtttccctgaaagtcgtcgcccgtgggtcatttgaattccccgtcggcgatgcagtctcaaaggttctccagattgaaaaagagggcgctatccacagggaagagttagtctatgagctcaatccattggaccatcgagggcgtacgctggagattccaggaaatagcgatcccaacatgataccggacggagacttcaactcctatgtcagagttaccgcatctgatcctctggatactttgggttcagagggagcgctgtctcctgggggtgtcgctagcctgcttagactccccagaggctgcggtgagcaaacaatgatctacctggcccctaccctggccgcatcgcggtacttagacaaaaccgagcagtggagcacattgccacctgagacaaaagaccacgctgtcgatctcattcagaaaggatatatgagaatacagcaatttagaaaggcagacggtagctacgcagcctggctgtctcgtggaagctcgacatggcttacagctttcgtgctgaaagtgctatctcttgctcaggaacaggtcggcggatcaccggagaaactccaggaaacctcgaactggctcctctcccagcaacaagcggatggaagctttcaggatctgagtccagtgatccatagatccatgcagggcggtttggttggaaatgacgagactgttgctctgacagcttttgttaccatagctctgcaccatgggcttgcagtgttccaggacgagggagcagagcccctgaaacagcgcgttgaggcctcaatctcaaaagcgagctctttcctgggggagaaagcctccgcgggattactgggggcacacgctgccgcaatcaccgcatacgcacttacactcactaaagcacctgcagacctaagaggcgtcgcccacaacaaccttatggctatggctcaggagactggtgacaacctgtactggggttctgttaccgggtctcagtcgaacgccgtgtcaccaactcccgcaccaagaaacccttccgatcccatgcctcaggcacccgcactctggattgagactaccgcttatgccctgctgcacttactattacatgagggcaaggcggagatggccgaccaagctgctgcctggctcacgaggcaggggagttttcagggtggattcaggagcacccaggatacggtcatcgctttggacgccctaagcgcctactggatagcatcccatacaaccgaggaacggggtctcaatgtgaccttgtcaagcacaggccgaaatggcttcaagagtcacgcactacagctgaacaatcgacagattagaggattagaagaggagctccagtttagcctgggcagcaaaatcaacgtgaaagtggggggtaatagcaagggcacactgaaagttctgcgcacttataatgtcctggacatgaagaatacaacttgtcaagatctacagattgaggttacagtgaaaggacatgtggagtacactatggaggcaaacgaggattatgaggactatgagtacgatgaattgcccgctaaggacgatcctgacgctcccctccaaccagtgacacctttacaactattcgaaggtcggagaaacaggcgcaggcgagaagcaccaaaactgacttcgctgtccgatcggtatgtgtctcattttgagaccgaaggaccccacgtgctcctgtacttcgactcagtgccaacttcgagagagtgtgtcggcttcgaagcagtccaggaagtgcccgtcgggctggtgcaacctgcctcggccaccttatacgactattataatcctgaacggagatgttcggtgttttacggggctccaagtaaatctagactcctggccacactctgcagcgccgaagtgtgccaatgtgccgagggcaagtgtccaagacaaagaagggccttggagaggggactgcaagatgaagatggctatcgcatgaaattcgcgtgctactacccaagggtcgaatatgggtttcaggtgaaagtgctgcgtgaggacagtcgggctgcgtttcgcctctttgagaccaagatcacacaagttctccatttcaccaaggacgtcaaggccgcagccaaccagatgcggaatttcttggtgcgcgcatcctgccgcctgcgtttggagcctgggaaagagtacctgatcatggggctcgacggcgctacttacgatctggagggccaccctcaatacctgctcgactcaaattcgtggatagaggagatgcccagcgaacgattgtgtaggagcactagacagagagcagcctgtgctcaactcaacgatttcctgcaggaatatggtacgcagggatgtcaggtgtag

SEQ ID NO: 11789 - DNA, 726 bp, synthetic construct
  misc_feature 1..726: note = source = /note="Description of Artificial Sequence: Synthetic coding sequence"
  source 1..726: mol_type = other DNA
atgaagtttatcctgttgtgggcactgcttaacctgaccgtcgccttagctttcaatccagactatacagttagctctactcctccttatctggtctatctgaaatccgactacctgccttgcgcgggtgtgcttatccatccactgtgggtgattaccgccgcacactgtaatctgccaaaactgagggtgatactaggtgtgacgatccccgctgactccaatgagaagcacctgcaggtcatcggttacgagaaaatgatccatcatccgcacttctcagtgacgtccatcgaccacgacataatgctcatcaagctgaagaccgaggccgagctaaatgactacgtcaagctggccaacctcccatatcagaccatctccgagaacacaatgtgttctgtctcaacatggtcgtacaacgtctgcgacatctataaggagcccgattcgctgcagacggtgaatatcagcgtgattagcaagccacaatgcagggatgcatacaagacgtacaatattacagagaacatgctctgcgttggcattgtgcctggacggcgacagccatgcaaagaagttagcgccgctccggcaatctgtaacggcatgttacagggcatcctgtcctttgctgatggctgcgttctcagagccgacgtcggcatttacgccaagattttttactacatcccctggatcgaaaacgtcattcagaataattag

SEQ ID NO: 11790 - DNA, 732 bp, synthetic construct
  misc_feature 1..732: note = source = /note="Description of Artificial Sequence: Synthetic coding sequence"
  source 1..732: mol_type = other DNA
atgggtcctgaagctctctcatcactgctgctgttgctcctagttgcttccggggatgctgatatgaagggtcactttgaccccgctaaatgtagatacgcacttggcatgcaagatcgcacaatcccagactcagacatttccgcaagttcaagctggtccgattccaccgcggctagacactcaagactggagtcctcggatggggatggggcttggtgtcctgcgggaagtgtgttccccaaagaagaggaatatctacaggttgatctgcagcggcttcacctggtcgctctggttggaacacaggggcgtcacgctgggggacttgggaaggaattcagccggagttatcgtctgcggtattcacgagatggacgtcggtggatgggatggaaggacagatggggccaggaggtcatctcgggaaacgaagaccctgagggagtcgttctaaaggatctgggcccacccatggtggcacgtcttgttcgcttctatccccgagctgacagggtgatgtccgtatgtctgcgcgttgaactgtatggatgcttatggagggattgttccatgggtgtgtgggcatcttggcaaatggtctggtgggggtggatgacgctgggtagggtccgctcctgtgggtccggacaggctatgaccatgtgggacggagccactaccgcttctcccgtggccatgtggcgctggagtctctccctaactggctag

SEQ ID NO: 11791 - DNA, 1986 bp, synthetic construct
  misc_feature 1..1986: note = source = /note="Description of Artificial Sequence: Synthetic coding sequence"
  source 1..1986: mol_type = other DNA
atggatttggtgttgaagcggtgcctactgcacctcgcggtaatcggtgccttgttagcagtaggggcaacaaaagtgccccgtaatcaggactggttgggcgtgtcgcgtcagctgcgaacaaaagcatggaacagacagctatatccagaatggactgaagcgcagagactcgactgctggcgagggggacaagtgagcttgaaggtcagcaacgatggacccacgctgattggggcaaacgcttcgttttcaatcgccctgaatttccccggtagtcagaaggtcttgcctgacggacaggtgatatgggtaaacaacaccattattaatggcagccaggtttgggggggacaaccagtctaccctcaggagacggatgacgcttgtatatttcctgacggtggcccttgcccatctggatcttggagtcagaaaaggtcatttgtatacgtctggaagacatggggccagtattggcaggtacttggaggccctgtgtcaggcctgagcatcggaaccggcagggccatgctgggaacccacactatggaagttacggtctatcataggagaggatcccgctcctatgtccccctagctcattcttcatcagcgtttacaattacggaccaggtccccttttccgtgtccgtgtcgcaacttcgggctctggacggtggaaacaaacactttctgcggaaccaacctcttacattcgcactacagctgcacgacccgtctgggtatctcgccgaggcggacctgagctacacctgggatttcggcgatagctccgggactctcatctctagagctctggtggtgactcatacatatttagaaccaggcccagttaccgctcaggttgtgttgcaggcagccatccccctgaccagctgcggcagcagtccagttccaggaacgacagatgggcataggcccaccgctgaagctcctaacaccaccgcaggccaagttccaacaactgaagtcgttggcactaccccaggacaggcacctacagctgaacccagtggcactacttcggtgcaggtgcccactaccgaagtgattagcaccgcgcctgtgcagatgcctaccgccgaaagtaccgggatgacacccgagaaagtgccggtgagtgaagtgatgggtaccactctggccgaaatgtctacccccgaggcgacaggcatgacgcccgctgaggtgtccatcgtggtgctatctggaacaactgcagcgcaggtcaccaccacagagtgggtggaaactacagccagagagcttccgatccctgagcccgagggacctgacgcctctagtataatgtcaactgaaagtatcacagggtctctcggcccacttttagacgggactgccaccctgaggcttgtcaagagacaagtgcccctggattgcgtactctacagatacgggtccttctctgtcacgctggatatcgtccaggggatcgaatccgcggagatcctccaggccgtgcctagcggagagggcgatgccttcgaattaacagtgagctgccagggaggtttacccaaggaggcatgcatggagatctcctcccccggatgccagcctccagctcaacggctgtgccagcctgtcctcccatcccccgcatgtcaactcgtgctgcatcagatcctaaagggcggatccggcacttactgtttaaacgtcagtctcgccgatactaattcattagccgttgtctcaacgcagctgattatgccaggacaagaggcaggtttgggccaagtacctctgatcgtcggaatcctcctggtactgatggcagttgtgttggccagcctgatctataggaggcgacttatgaaacaggatttctcagtcccacaacttcctcattcctcatcccactggcttagactgccgaggatattttgcagttgccctataggagagaattctcctctgctgtccgggcaacaggtgtag

SEQ ID NO: 11792 - DNA, 2760 bp, synthetic construct
  misc_feature 1..2760: note = source = /note="Description of Artificial Sequence: Synthetic coding sequence"
  source 1..2760: mol_type = other DNA
atgggacctgaggcactttcttctctgctgttacttctactggtggcctctggggacgctgacatgaagggccactttgatcctgcaaaatgtcgatacgcactgggcatgcaggaccgcaccattccagacagtgatataagcgcatccagctcatggagcgatagcacagccgcaaggcactctcgactcgagtctagcgacggcgatggagcatggtgccccgctgggtctgtcttccccaaggaggaagagtacctgcaggtcgatctgcaacggctacacctcgttgctctcgtgggcacacagggtaggcacgctggcggtctcgggaaggagttctctcgatcgtacaggctacgctattctcgtgacggcaggaggtggatgggatggaaggaccggtggggtcaagaagtaatttctgggaacgaagacccagaaggggtggtgctgaaagatctggggccaccaatggttgccagactggttcggttttacccaagggccgacagagtgatgagtgtatgtctgagggtggagctttatggatgtctttggagagatggattgctgtcttacacagcacccgtgggccagactatgtacttgagtgaggcagtgtatctgaatgacagcacatacgacgggcacactgtcggtggactgcaatacggaggactggggcagctggccgacggtgtggtaggtctggacgactttcgcaaatctcaggagcttagggtgtggccagggtatgattacgtcggatggtcgaaccatagcttcagctctggttacgtggaaatggagtttgagttcgatcggttgcgcgctttccaagctatgcaggtgcattgtaacaacatgcatactctcggagcacggctacccggaggggtggaatgcagatttcgaagaggcccagctatggcttgggaaggcgaacctatgagacataacttaggcggtaatttgggagaccctagggcaagagcagttagtgtccccctgggcggtcgcgtggcgagatttcttcaatgccgctttctgttcgccggtccctggttattatttagcgagatctcctttatttcagacgtggtgaacaacagttctcccgctctaggaggcacattccctcccgctccatggtggccacccggaccgccaccaactaacttttcctccctggaactcgaaccacgcggtcagcagccggtggccaaggccgagggcagccctaccgccatcttgatcggctgtctggtagccatcattttactgctcttgttgattatcgctctgatgctttggagactccattggcggagattgctctccaaagctgaacggagggtcctggaggaagagcttacagttcacttgtctgtcccgggtgacaccatacttattaataatagaccagggccaagggagccacccccataccaggagcctcgcccaaggggcaacccaccacactccgccccatgtgtccccaatggcagtgccctacttctgagcaaccctgcttatagactattgcttgcgacatacgccagaccccctcggggaccgggtccccctacccccgcatgggccaagcccacaaatacacaggcatattccggggactacatggagcctgagaagccaggcgctccgctgctcccacctccaccccagaattctgtgccacactatgctgaagctgacatcgtgaccctgcaaggagtgactggcggaaacacttatgctgtccccgctctgcctccaggggctgtaggcgacgggccaccacgcgttgacttccctaggagtaggctgcgcttcaaggagaaacttggcgaggggcagttcggagaagtgcatctctgcgaggttgactccccgcaggatctggtgtccttagatttccccctcaatgttcggaaggggcaccccctcctcgtggccgtcaagatcttacggccagatgcaacaaagaatgccagcttctcactgttttctcgaaacgactttcttaaggaggtcaaaataatgagtcgactcaaggatcccaacatcataaggctgttgggggtatgcgtgcaggacgatccactgtgtatgataacggattacatggaaaacggagacctcaatcagttcttgtccgcacatcaactcgaggacaaggccgcagaaggagcacccggagatggccaggctgcacagggacctaccatctcctaccccatgctcctccacgtggcagctcagatcgcgtcaggaatgcgctatcttgccacgctgaacttcgtgcatcgagacttagccacccggaattgcctggtgggagagaattttaccatcaaaatcgccgacttcggaatgagcagaaatctgtacgccggagactattacagggtccagggacgagccgtgctacctatcagatggatggcttgggagtgcatcttgatgggaaaatttaccaccgcctccgacgtttgggcatttggggttacgctatgggaggtgctgatgttgtgccgcgcacagcccttcggccagttaacagacgaacaagtgattgagaacgccggagaatttttcagagaccagggacgacaggtgtatctgagtcgcccacccgcttgtccccagggcctgtacgagttgatgctgcgttgctggagtagagaatccgagcagcgaccacctttttcccaactgcaccgcttcctcgccgaagacgctctcaacaccgtgtag

SEQ ID NO: 11793 - DNA, 216 bp, synthetic construct
  misc_feature 1..216: note = source = /note="Description of Artificial Sequence: Synthetic coding sequence"
  source 1..216: mol_type = other DNA
atgccggcaggggtgcccatgtcgacgtatctaaagatgttcgccgcatcgctgctggccatgtgtgccggtgcagaggtggtccaccgctattacaggcccgatctgacgatccctgagatcccccctaagcgtggcgaactcaaaaccgagttgcttgggctgaaggagcggaaacacaaaccacaggtcagtcagcaggaggaactgaaatag

SEQ ID NO: 11794 - DNA, 2685 bp, synthetic construct
  misc_feature 1..2685: note = source = /note="Description of Artificial Sequence: Synthetic coding sequence"
  source 1..2685: mol_type = other DNA
atgtctcttcctcggtgctgcccccaccctttaaggcccgaagggtcgggtgccatggggcctgaggcgctgtcttccctgctgctgctgctccttgttgcatccggagatgccgacatgaagggacacttcgatccagcgaagtgtagatatgctctgggcatgcaagacagaaccatccctgacagcgatatcagtgcatccagtagttggtccgattccactgctgccaggcactcccgcttagaaagcagcgacggagacggcgcttggtgccccgctggatccgtctttcccaaagaagaggaatacctgcaggtggacctgcagcgtctccacctcgtggcactggtggggacccaaggacgccacgcagggggactaggaaaggaattcagtcgcagctacagattgcgttattctcgggacgggaggcgctggatgggctggaaagatcgttggggacaggaggtgatatccggaaatgaagacccggagggtgtcgtcctcaaggatctggggccacccatggtggctcgacttgtccggttttacccgagggctgacagggtgatgtcagtgtgcctgagggtagagctctatggctgcctgtggcgcgatggcttactgagctatactgccccagtgggacaaacaatgtacctgagtgaggctgtctacctaaacgactcgacttatgacgggcataccgtggggggtttgcagtacggaggcttaggtcagcttgccgatggtgtggtggggctcgatgattttcgaaagtctcaggagctccgcgtttggcccggatacgactacgtaggctggagtaatcattcattcagcagcggttacgttgaaatggaatttgagtttgataggcttagggccttccaggctatgcaagttcattgcaataatatgcacacattgggagcccgtcttcccggaggagtggaatgtcggtttaggagggggcctgccatggcatgggagggcgagccaatgcgacacaatttgggaggaaacctgggagacccacgtgcaagggccgtgtccgtaccacttggaggaagagtggcccgatttttgcagtgcagatttctgttcgccggaccatggctcttgttctccgagattagctttatctcagatgtcgtgaataactctagcccggcactgggcggaacttttccccctgcgccttggtggccaccagggcctccccctacaaatttctctagcctcgagctcgagccgcgtggccagcagcccgtggcaaaggccgaaggatcaccgaccgccattctaatcggctgtctggtggcaatcattctacttctcctgctcattattgcactgatgttatggaggttgcactggaggagactgctgtcaaaggccgagcgtagagtgctcgaagaggagctcacagtccatttatcagtgccaggcgacacaatcctgatcaataatcgaccagggccacgcgaaccccctccataccaggagcccaggccaagaggtaacccaccacactccgcaccctgcgtgcccaatggttcggcctatagcggagattatatggagccagaaaaacctggagccccattgctgccacccccacctcagaattccgtaccccactatgcagaggctgatatcgttacactgcagggggtgacgggaggcaatacatacgccgtcccggcactgccgcctggtgccgtcggggatggtccccctagggtggattttcctcggtctcgtctccgcttcaaagaaaagctgggcgaaggccagttcggtgaagtccatctctgtgaggtagatagcccccaggacctggtgtcactggactttccattaaatgtgcgaaaaggccaccctctccttgtcgccgttaaaatactgcgccctgacgccactaaaaatgcaagaaacgacttcctcaaggaagtgaagattatgtctcgattaaaagatccaaatattatccgcctgctgggagtgtgcgtgcaggatgatccactgtgcatgatcacagactatatggagaacggcgatctaaatcaatttctgtctgcccaccagttggaggacaaagccgcagaaggggctcccggagacggccaggctgcacagggacctactatttcttacccaatgctgctgcatgtagcagcccagatcgcaagcggaatgagatacttagccacgctgaacttcgtccatagagatctggcaaccagaaactgtttggtgggggaaaatttcaccattaagatcgctgatttcggcatgagccggaatctgtacgccggtgactactatcgcgtacagggcagggcagtgcttccaattcggtggatggcttgggaatgcatcctgatgggcaagttcacaaccgcctcggacgtgtgggcattcggagtgaccctttgggaggtgctcatgttgtgtcgggctcagcccttcggacagttgacagacgagcaggtgatcgaaaatgcaggggaatttttcagagaccaaggccgacaggtctacctatctcgtccgcctgcctgtccccagggactttacgagctcatgcttagatgttggtcccgggagagtgaacaaaggccccctttttcccaacttcatcgttttttagctgaagacgccctgaacactgtctag

SEQ ID NO: 11795 - DNA, 273 bp, synthetic construct
  misc_feature 1..273: note = source = /note="Description of Artificial Sequence: Synthetic coding sequence"
  source 1..273: mol_type = other DNA
atgcagctgttcttgcttctctgtcttgtattgctgagtccccagggagcatccctgcataggcaccatccccgagagatgaaaaaacgcgtcgaagacctccatgtgggcgcaaccgtggccccaagctctcggagggatttcaccttcgacctgtatcgggcacttgctagcgcagctccgtcacagtccatctttttttcgcccgtgtctatttccatgtctctcgcaatgctcagcttgggtgctggctcttcgacaaaaatgcagtag

SEQ ID NO: 11796 - DNA, 618 bp, synthetic construct
  misc_feature 1..618: note = source = /note="Description of Artificial Sequence: Synthetic coding sequence"
  source 1..618: mol_type = other DNA
atgatgagaacacttatcacgacacacccacttcccctgttacttctcccacagcagctgcttcagctggtgcaattccaggaagtcgataccgattttgatttccccgaggaggataaaaaggaggaatttgaggaatgcctcgagaagttcttctcgacaggcccagcgagacctcccacgaaagagaaggttaaacgacgggtgttgatagaacccggaatgcctctgaatcacatcgagtattgcaaccacgagatcatgggcaagaacgtgtattacaagcatcgctgggtggcggaacactatttcctcctgatgcagtatgacgaactgcagaaaatttgctataaccgtttcgtgccctgtaaaaatgggattcgcaagtgtaaccgctccaaaggtctggtagaaggggtatactgtaatctgacagaggctttcgagatcccggcatgtaagtatgagtcattatacaggaaagggtacgtgcttataacatgcagctggcaaaacgaaatgcagaagcggattccacacacaattaacgatcttgtggaaccgcctgagcatagatcttttctgagcgaggacggagtcttcgttatctcgccttag

SEQ ID NO: 11797 - DNA, 30 bp, synthetic construct
  misc_feature 1..30: note = source = /note="Description of Artificial Sequence: Synthetic coding sequence"
  source 1..30: mol_type = other DNA
atgtctttctctgcaacaatattgttctag

SEQ ID NO: 11798 - DNA, 600 bp, synthetic construct
  misc_feature 1..600: note = source = /note="Description of Artificial Sequence: Synthetic coding sequence"
  source 1..600: mol_type = other DNA
atgagctttagcgctacgattctgttcagcccccctagcggttccgaagctcgctgttgttgctgcgcgtgcaagtcagagactaatggtggcaatacgggttcacagggcggaaacccacctcccagtactccaatcacagtaacaggtcatggtctcgccgtccagagctcagagcagctgctccacgtgatataccaaagggtggataaggccgttggtttggcagaggcagccctgggcctggctagggccaataacgaacttctgaagagactccaggaagaggttggggatctgaggcaaggaaaggtttccatcccagacgaagacggcgaaagtcgggctcactcctctccgcctgaggagcctggccctttaaaagagtcgccgggagaagcgttcaaagcacttagtgccgtggaggaggagtgtgattctgtcggctccggggtgcaggttgtcattgaagaacttaggcagctcggggcagcatctgtcggcccaggccctttggggtttccagccactcagcgcgacatgcgcctaccaggctgcactctagctgcatcagaagctgcaccactgctgaacccctag

SEQ ID NO: 11799 - DNA, 633 bp, synthetic construct
  misc_feature 1..633: note = source = /note="Description of Artificial Sequence: Synthetic coding sequence"
  source 1..633: mol_type = other DNA
atgtctgctggcaagatgatgcggaccctgatcacaactcacccgctgccccttctgctgttgccacagcagctcctccagctggtgcaattccaggaggtggataccgacttcgatttccctgaggaggacaagaaagaggaattcgaggaatgtttagaaaaattcttctctactgggccagctcggcctcccaccaaggagaaagttaagcgcagggttctgattgaaccaggcatgccacttaatcatattgaatattgcaatcatgagattatgggcaagaatgtctactacaagcatcgttgggtggccgagcattacttcctactgatgcagtatgacgagctccagaagatttgctacaatcgcttcgtaccgtgcaagaatggaatcagaaagtgtaatcgctcaaagggcttagtcgaaggcgtttattgcaaccttaccgaagcctttgaaatacccgcttgcaaatacgaatccctgtaccggaagggctatgttcttatcacttgctcttggcagaatgaaatgcagaagcggattccccacacaataaatgatttggtggagccacctgagcaccggagttttctctctgaagatggtgtgtttgtcatctccccatag

SEQ ID NO: 11800 - DNA, 1221 bp, synthetic construct
  misc_feature 1..1221: note = source = /note="Description of Artificial Sequence: Synthetic coding sequence"
  source 1..1221: mol_type = other DNA
atgcagctattcctcctgttgtgcctggtgctgctgagcccgcaaggagcatcactgcaccgtcaccacccacgggaaatgaaaaagcgagtggaggaccttcacgtcggagcaaccgtggccccatcatcgagacgggacttcaccttcgatctgtacagggcccttgcctccgccgcaccttcacagagtatttttttttccccagtgtcaatttcaatgagcttggccatgctcagcttgggcgcaggaagctccaccaaaatgcagatcctggagggtctcggccttaatttgcagaagtcctccgagaaagaactgcatcgcggttttcaacagctgttacaggaactgaaccagcctagagacggttttcagctcagtctgggcaatgccctgttcacagatttggtggtagatttgcaggatactttcgtgtccgctatgaagactctgtatctggccgacactttccccaccaactttcgtgactccgccggagccatgaagcagataaacgattatgtggctaagcagactaaaggtaagattgtggacttactgaaaaaccttgattcaaacgcggtggtaatcatggtgaactacatctttttcaaggctaaatgggagacctcttttaatcacaaaggtacccaagagcaagatttctacgttacgagtgagactgttgttagggtgcctatgatgagtagggaagatcagtatcattaccttctggataggaatctctcctgtcgggtggtgggagttccttatcaggggaacgctaccgctttgtttatcctcccttctgaggggaaaatgcagcaggtggaaaatggtttatccgagaaaacgctgaggaagtggcttaaaatgttcaagaagagacagttggaactgtatttgccaaagttctctattgagggttcataccagctcgagaaagtgcttccatctctcggcatctcaaacgtgttcacaagtcacgcagatctctctggcatctccaaccattctaacatccaggtcagcgagatggtccacaaagccgtagtggaagtggacgaaagcggaacccgggctgccgctgctactggaaccatttttacctttcgctctgccaggttgaactcgcagcggcttgtgttcaacagaccatttcttatgttcatagtagacaataatatactttttttgggcaaggtgaatcggccatag

SEQ ID NO: 11801 - DNA, 600 bp, synthetic construct
  misc_feature 1..600: note = source = /note="Description of Artificial Sequence: Synthetic coding sequence"
  source 1..600: mol_type = other DNA
atggaaacctttcctcttctcttactatctctcggcctggtgttagccgaggcatctgagagcactatgaaaataatcaaggaagagttcaccgacgaggagatgcaatatgatatggcgaagtcaggccaggagaaacagactattgaaattctcatgaatcctatcctgttggtgaaaaataccagcctgagcatgtccaaagatgacatgtcaagcactcttctgacgtttcgatccctgcactataatgatcccaaaggcaactcctcaggcaatgataaagaatgctgcaatgacatgactgtatggcgcaaagtaagcgaggctaacgggagctgtaagtggagcaataacttcataagatcttctacagaagtgatgagaagggtgcaccgggcacctagctgcaagttcgtgcagaatccaggaattagctgttgcgagagtctggagctggagaatacggtctgccagtttaccaccggcaagcagttcccacgttgccagtatcactcagtcacgtcgcttgaaaaaatcttgacagtcctcacaggccacagtctgatgtcctggttggtgtgcggttcaaagctgtag

SEQ ID NO: 11802 - DNA, 411 bp, synthetic construct
  misc_feature 1..411: note = source = /note="Description of Artificial Sequence: Synthetic coding sequence"
  source 1..411: mol_type = other DNA
atgagtttctccgccaccatcctgttcagtccaccaagtggaagcgaagcccgttgttgctgctgcgcctgcaagagcgaaacaaatggaggcaacacaggatctcaaggcggtaacccgcctcccagtacccctatcacagtaacagggcacggcctggccgtccagtcctctgagcaacttctgcatgtaatttatcagcgagtagataaagccgtgggccttgccgaagccgctctcggcctggctcgggctaataatgaattgctgaagagactgcaggaagaagtgggagatctccgccaggggaaagtgagtattcccgacgaggatggagagtctcgcgcacatagttctccgcctgaagaaccagggccactgaaagagagccccggagaagctttcaaatag

SEQ ID NO: 11803 - DNA, 252 bp, synthetic construct
  misc_feature 1..252: note = source = /note="Description of Artificial Sequence: Synthetic coding sequence"
  source 1..252: mol_type = other DNA
atgtctttcagcgcaacaattctgtttagtccccctagcggctccgaggcgcgatgctgctgttgcgcctgcaagagtgaaacaaacggtgggaataccggcagtcagggaggaaacccacccccaagtacacccatcaccgtaacaggccacggtttggctgtgcagagcagtgaacagctactccacgtgatttatcagagggtcgacaaagccgtaggcctcgcagaagctgccctcgggctcgcctag

SEQ ID NO: 11804 - DNA, 30 bp, synthetic construct
  misc_feature 1..30: note = source = /note="Description of Artificial Sequence: Synthetic coding sequence"
  source 1..30: mol_type = other DNA
atgtcattctccgcgactattctgttttag

SEQ ID NO: 11805 - DNA, 519 bp, synthetic construct
  misc_feature 1..519: note = source = /note="Description of Artificial Sequence: Synthetic coding sequence"
  source 1..519: mol_type = other DNA
atgcagctttttttactactctgtttagtgctccttagtccccagggggcttcgctgcatagacaccaccccagagaaatgaagaagcgagtggaagatttacatgtgggagctacggtagcacccagcagtcggagagatttcaccttcgatctgtatagagctctggcgtccgctgctcctagccagagcatatttttctcccccgtgtcgatctcaatgtccctggctatgctgagtctgggtgccggatcttctaccaaaatgcagatcctcgaggggctgggactgaatctccaaaagtcgtccgagaaggaactgcaccgcggatttcaacagttattgcaagaactgaaccagccaagagacggttttcagctgagcctgggtaatgccctcttcactgatctagtggtcgacctgcaggacacatttgtgtcggccatgaaaactctctatctggccgatacttttccaacaaacttccgggattctgcgggagctatgaaacagatatag

SEQ ID NO: 11806 - DNA, 615 bp, synthetic construct
  misc_feature 1..615: note = source = /note="Description of Artificial Sequence: Synthetic coding sequence"
  source 1..615: mol_type = other DNA
atgcccggtggtaagaaggtcgctggtggcggaagttcaggagccacccctacttcagcagcagctactgccccaagtggcgttcgcaggcttgagacctccgaaggcacatctgcccagagggacgaggaacccgaggaagaaggcgaggaggatctgcgggatggcggagtgcctttcttcgttaatagaggtggacttccagttgatgaagctacctgggaacgaatgtggaagcacgtggctaagatccatccggatggggagaaagtcgcgcagcggatacgcggagcaacggatttacctaaaatccctatcccttctgtgcccacttttcagccctcgacacctgtccctgaacggctggaggccgtgcaacgctacattagagaactgcagtacaatcatacagggactcagtttttcgaaataaagaagtcacggcctctgaccggtctgatggatctggccaaagagatgactaaagaggcattacccattaagtgcctggaggccgtgatcctcggtatgtatccaagcagccctgaaggagagggttccggactgctgtgggcttctgcgagttgctctgagtcagaaggtggcgttggctag

SEQ ID NO: 11807 - DNA, 1221 bp, synthetic construct
  misc_feature 1..1221: note = source = /note="Description of Artificial Sequence: Synthetic coding sequence"
  source 1..1221: mol_type = other DNA
atgcagctgtttctgctgctctgcttggttctactgagcccacagggagctagtctccacagacaccacccgagagagatgaagaaacgggttgaagatcttcatgtgggggcaaccgtggccccttcctcgcgtcgcgactttacatttgatctctatcgagccctagccagcgccgcacccagccagtctattttctttagtccggtctctatcagcatgtccttagcaatgctgagtttaggagccggaagcagcactaagatgcagatcttggaaggcttggggctgaatctccagaagagctctgaaaaagaactgcatcggggattccaacaactgctgcaagagctcaaccagccccgtgatggcttccagctcagcctgggcaacgcactgttcaccgatctggtagtggacctgcaggacacgttcgtctctgccatgaagacactgtacttagctgatacattccctacaaatttcagggactccgcaggggcaatgaaacaaattaatgactacgtggccaaacaaaccaaaggaaagatcgttgaccttctgaaaaacctagactctaacgccgttgtaatcatggtaaactatatctttttcaaggccaagtgggaaacctccttcaaccacaaagggacacaggagcaggatttttatgtgacttctgagaccgtagtgagggtgccaatgatgagcagagaggatcaatatcactatctgctggatcgtaacttgtcgtgtcgggttgtgggagtgccctatcagggtaatgcaactgccttgtttatcctgcccagcgagggcaagatgcagcaagtcgagaatgggctgagtgagaaaacactgcgaaagtggttgaaaatgttcaagaagcgacaattggaactttacctacctaaattttctattgaaggctcatatcagctagagaaagtcttaccgagtctgggaatcagtaatgtgtttacctctcacgctgacctgtctggtatatctaatcactcgaatatccaggtgtccgaaatggttcacaaggcagtcgtggaagtcgatgaaagtggaactcgagctgccgcagccacgggcaccatattcaccttcagatccgcaagactgaattcacagcgccttgtcttcaacaggcccttcctgatgtttattgttgacaacaacatcctgtttctgggaaaggtcaatcggccttag

SEQ ID NO: 11808 - DNA, 3837 bp, synthetic construct
  misc_feature 1..3837: note = source = /note="Description of Artificial Sequence: Synthetic coding sequence"
  source 1..3837: mol_type = other DNA
atgcgcctgttactgctcgtcccactcctcctggcacctgccccaggaagcagcgctccgaaggtgaggaggcagtcggacacttggggtccgtggtctcagtggtcaccttgttcccggacttgtggcggtggcgtgtcattcagagagagaccgtgctactctcagcggagggacggtggcagcagctgcgttgggccagccaggtcccatcgctcatgtcgcactgagtcctgcccagatggagctagagattttagagcagaacagtgtgctgagtttgacggcgctgaattccaggggaggcggtatcgttggttgccgtactactccgcaccaaataagtgcgagttgaattgcatacccaaaggagagaatttctactacaaacatcgagaagcagtggtagatggtacaccatgtgaaccaggaaagcgggatgtatgcgttgatggctcatgcagagttgttgggtgcgatcatgagctggattcaagcaagcaggaggataaatgcttgcggtgtgggggtgatggaaccacctgctatcccgtggccggaaccttcgacgccaacgacctgagtagaggttacaaccagattttgatagttccgatgggagccaccagcatattgatcgatgaggctgccgctagccggaatttcctcgctgtcaagaatgtacgaggggaatattacctcaacgggcattggaccattgaagcggctagggctctgcccgcagcatctacaatcctgcactacgaacggggtgccgaaggcgacctggcgcctgagcgcctgcatgcgagaggacccactagcgaacctttggtgattgagcttatctcacaggaacctaaccctggcgttcactatgaataccatttaccgttgcgccgacccagccccggattctcatggtctcatggttcctggtctgactgctctgccgagtgcggcggagggcaccaatcacggctggtattttgcacgattgaccatgaggcatacccagatcatatgtgtcagcgccagccgaggcctgccgatagacgctcctgtaacctgcacccttgcccagaaacaaagcgctggaaagcaggcccttgggctccctgcagtgccagctgtggaggaggatcacagagccgctcagtatactgtatctcaagcgacggggctggtatacaggaagcagtcgaagaagctgaatgcgcagggttacccggaaaacccccagctatccaggcttgcaatcttcagcggtgcgctgcctggagccccgagccctggggggagtgcagcgtgtcatgcggggtcggcgttcggaaaagaagcgtgacttgccgaggcgaacgaggctcactgttacacactgccgcttgtagtctggaagaccgtccgcctctgaccgaaccctgtgtgcacgaggactgcccacttttgtccgatcaggcctggcacgtcggaacatggggattatgctcgaagagctgtagctccggtactaggcggagacaggtcatctgcgccataggccctccttctcactgcgggtccttgcaacactccaagccagttgacgtggaaccatgtaacacacagccctgccacttaccccaggaggttcccagcatgcaagatgtgcatactccagcttccaatccttggatgccgctgggccctcaggaaagtcccgctagtgatagccggggacagtggtgggcagcccaggagcatcccagcgcaagaggcgatcaccgtggcgaaaggggggatccgagaggtgatcaggggactcatttgtccgcattgggaccagctccgtctttgcagcagccaccatatcaacagccactgcgcagcggttctgggccacacgattgcagacacagtcctcatggctgttgtcctgacggacatacggcttccctgggtccacagtggcaagggtgccccggagccccatgtcagcagagccgatatgggtgctgcccagatcgtgtgtctgtcgctgagggcccacaccatgctgggtgtaccaaatcctatggaggagattctaccggtgggatgccccgtagtagagctgttgcctcaacagtccacaacacccaccagcctcaggcacaacagaatgagcccagcgaatgtagaggctcccaatttggatgttgttacgataatgttgccacagccgctggacctctaggagagggatgtgtgggacaaccaagccacgcttacccagtacggtgtctgctgccttccgctcacggcagttgcgccgattgggccgcacgctggtactttgtggcgtctgtcggccaatgtaatagattctggtacggcggatgccacggcaatgcgaataacttcgcttccgagcaggaatgtatgagctcttgccagggttcgctgcatggccctcgcaggccccagcccggagctagtgggagaagtacccacacggatgggggaggcagctcccctgctggagagcaggaacccagtcagcaccgaacgggtgccgctgttcagcggaaaccatggccatcagggggtttatggcgacaggaccagcagcctggccctggggaggccccacatacccaggcctttggtgagtggccctggggccaagagttgggcagtagggcccctggcttaggcggtgacgcaggctctcccgctcccccttttcactccagctcatatcgcatctcactggcgggagtggaaccgtccctcgtgcaggcagctttaggccagttggtgcgcttgtcttgttccgacgataccgccccagagtcgcaggctgcctggcagaaagatggacagcccatctcatctgatagacacaggcttcaattcgatggatcactgataattcacccactgcaggctgaagacgctggtacctactcctgcgggtcgacgcgtcccggacgggactcacagaaaattcagctacgcatcatcggcggagatatggccgtcctctctgaggcagaactttccagatttcctcagccacgggatccagcgcaggactttggccaagctggggcagccggtccccttggtgccattccatcaagtcacccacagccagccaaccggctgcgccttgaccagaatcagcccagggttgtggacgcttcccccggtcagaggatccggatgacctgtcgcgctgaggggtttcctccgcctgccattgaatggcagagggacggccagccagtttcatctccgagacatcagctgcaaccggacgggagcctggtgattagccgcgtcgctgttgaagatgggggattttacacctgcgttgcctttaatggacaggatcgagaccagagatgggtccaactccgtgtgttgggggagctgacaatcagcggactgcctcccaccgtgacagtgccagagggggacactgccagattactgtgcgtagtggcgggagagtccgtgaacatccgttggagccggaacgggcttccagtgcaagccgacggtcatcgggtgcatcagtcccccgacggaacattactgatttacaatctacgagcccgagacgaagggtcatacacatgcagtgcctatcaggggtcacaggcagtctcgcgttcaacggaggtgaaagtcgtgagccccgcacctacggcgcagccacgcgaccctggtagagattgcgtggatcaacctgagttggcaaattgtgatctgatcctccaggcccagctctgtgggaatgaatattatagcagtttctgctgtgccagctgctccaggttccagccccacgcgcagccaatctggcagtag

SEQ ID NO: 11809 - DNA, 261 bp, synthetic construct
  misc_feature 1..261: note = source = /note="Description of Artificial Sequence: Synthetic coding sequence"
  source 1..261: mol_type = other DNA
atgcagttatttctcctcctttgtctcgtcctcctctcaccccagggtgcctcactgcatcgacatcatcctcgcgaaatgaaaaagcgcgtggaagacttgcacgtcggggctaccgttgccccttcgagccgccgtgatttcacatttgacttgtaccgcgctctggcttccgccgcaccaagccaatctattttcttttccccagtctctataagcatgtccctagccatgttgagccttggggcaggctcttcctag

SEQ ID NO: 11810 - DNA, 906 bp, synthetic construct
  misc_feature 1..906: note = source = /note="Description of Artificial Sequence: Synthetic coding sequence"
  source 1..906: mol_type = other DNA
atgcaactttttttactactgtgcttggtgcttctgagccctcagggggcatcactccatcgtcatcatcccagagagatgaaaaagagggtggaagatctgcatgtgggagcgacagtcgccccttccagcagaagggatttcacatttgacctttacagagccctcgcaagcgcagccccaagccaaagtatcttcttttcccctgttagtattagcatgagcctggctatgctgagcctgggggctgggtcttcaacaaaaatgcagattctcgaggggctgggcctgaacttgcagaaaagctccgagaaggagctccaccgcggtttccagcagctgctacaagagctgaatcagccacgggatgggtttcaactgtccctggggaacgctctgttcaccgatctggtggtggatctacaggacacattcgtcagcgcaatgaagacactgtaccttgccgacacatttcccaccaactttagagattccgccggtgccatgaagcagattaatgattacgtcgcaaaacagaccaaaggaaagattgtagatctgttaaaaaacctggactccaacgctgtcgtgattatggtgaactacattttttttaaggccaagtgggaaaccagcttcaaccataaagggacccaggagcaggacttttacgtcacaagtgaaacagtagttcgggtgcccatgatgagtcgcgaggaccagtaccactacctgctggatcgcaatctgagctgtagggtcgtgggggttccctatcagggcaacgccacagcacttttcattttaccttctgaagggaagatgcagcaggtcgaaaatggattgagcgagaagactctgcgcaagtggctgaagatgtttaagaagcgctattttcagacgtag

SEQ ID NO: 11811 - DNA, 411 bp, synthetic construct
  misc_feature 1..411: note = source = /note="Description of Artificial Sequence: Synthetic coding sequence"
  source 1..411: mol_type = other DNA
atggagacctttccgctcttgttgctgtccttgggcttggtactcgccgaagcatcagagtctactatgaagatcattaaagaggaatttacagatgaggagatgcagtacgacatggccaaatccggtcaggagaagcagacgattgaaatcctaatgaacccaatcctgctggtgaaaaacacctcgctctctatgagcaaagacgacatgagctctaccctactgaccttccgttccctgcattataatgaccccaagggtaactcgtctggaaacgataaggagtgttgtaatgacatgaccgtttggaggaaagtttctgaagccaatggttcatgcaagtggtctaataatttcattagatccagtactgaagtcatgaggcgtgtccatcgcgctccaagttag

SEQ ID NO: 11812 - DNA, 1221 bp, synthetic construct
  misc_feature 1..1221: note = source = /note="Description of Artificial Sequence: Synthetic coding sequence"
  source 1..1221: mol_type = other DNA
atgcagttgtttctgctgctctgtctcgtgctgctctctcctcagggagcttcccttcataggcatcaccctcgggagatgaaaaaacgagttgaggacttgcacgtcggcgcaacagtcgctccgagcagtcgcagggactttacattcgacctgtaccgggcattggctagtgctgctccaagccaatccatttttttttcacctgtctccattagcatgtccctcgctatgctaagcctgggtgcaggtagcagtacaaaaatgcagattctggaaggcttgggcctcaacctccaaaaatcaagtgaaaaagagctgcacagaggttttcagcagttgctccaggaactgaaccagcccagagatgggttccaattgagcctaggaaacgcgctgtttacagacctggtggttgacctgcaagacacatttgttagtgctatgaagacgttgtacttggccgacacattcccgaccaatttccgcgatagtgccggtgcaatgaaacagatcaatgattacgttgccaagcagactaaaggtaagatcgtggatctgctcaaaaatctcgactccaatgcagtggtaatcatggttaattatattttttttaaagccaaatgggagacatctttcaaccacaagggcactcaggagcaagacttttatgtcacttctgagaccgtggtgcgggtccccatgatgagtcgggaggaccagtaccactatctgttggatcgcaatttgagctgtcgcgtggtgggcgtaccctaccagggaaatgcaaccgcactatttatcctgccctcagagggaaagatgcagcaagttgaaaacgggctgagcgagaagacattgcggaaatggcttaagatgtttaagaagcgtcagctggaactctacttgcccaagttttctatcgagggatcctatcagctggagaaagtgctgccttcccttggcatcagcaatgtatttacatcccacgcggacctctcaggaataagtaatcattccaatatccaagtgtccgaaatggtccataaggctgtggtggaggtggacgaatccggaactagagccgcagctgccacgggaacaatatttacctttcgcagcgcccgtctgaactctcagcgcctggtttttaatcgccctttcctgatgttcattgtcgataacaacatactgtttcttgggaaggttaaccgcccatag

SEQ ID NO: 11813 - DNA, 618 bp, synthetic construct
  misc_feature 1..618: note = source = /note="Description of Artificial Sequence: Synthetic coding sequence"
  source 1..618: mol_type = other DNA
atgatgcgtactctgataaccacacatcctctcccactgctccttctcccccagcagttgcttcagttggtacagtttcaggaggtggatacagactttgacttcccggaagaggacaagaaggaggagtttgaagagtgtctggaaaagttcttcagcacgggacctgcaagaccgcctactaaggagaaggttaaacgtagggtcctgattgagcccggtatgccgctaaatcacatcgaatattgcaaccacgagataatgggaaagaacgtgtactacaagcaccggtgggtggcggagcattattttctactcatgcaatacgatgaattacagaagatctgttataacagatttgtgccctgtaagaatggcatccggaagtgtaatcgtagcaagggcctcgtcgaaggggtttattgtaacctgacggaagccttcgagataccagcctgtaaatatgagtccctttataggaaggggtacgtacttataacctgtagttggcagaacgagatgcagaagcgcattccccatacaatcaatgaccttgtcgagccccctgagcatcgaagctttctttccgaagacggtgttttcgtcatctccccatag

SEQ ID NO: 11814 - DNA, 240 bp, synthetic construct
  misc_feature 1..240: note = source = /note="Description of Artificial Sequence: Synthetic coding sequence"
  source 1..240: mol_type = other DNA
atgtcattttctgcaactatcctgttctctccaccgtccggcagtgaggcaaggtgctgttgctgtgcatgtaaatctgagactaatggtggaaatactggttcccagggagggaatcccccaccttcaacgcccattacagttacaggtcatgggctggctgtgcagagctccgaacagcttctgcatgttatctatcagagggtcgacaaggccgtggggctcgcggaggccgcttag

SEQ ID NO: 11815 - DNA, 618 bp, synthetic construct
  misc_feature 1..618: note = source = /note="Description of Artificial Sequence: Synthetic coding sequence"
  source 1..618: mol_type = other DNA
atgatgagaacactgataacaacccaccccctgccgctgctgctcttacctcagcagctactgcagttggttcagttccaggaggtggacaccgactttgacttccctgaggaagataaaaaggaagaattcgaggaatgtttggagaaatttttttccaccggaccagcaaggcctcccacaaaggagaaggtcaagcgccgagtgctgatagagccaggtatgcctttaaaccacatcgagtactgcaatcacgaaatcatgggcaaaaatgtttactacaagcaccgctgggtcgcagagcattattttttgctgatgcagtatgacgagcttcagaaaatttgctataatagatttgtgccttgcaagaacggtattcgaaagtgcaaccgctcaaagggcctggtggaaggggtctattgtaatctgacggaggccttcgagatccctgcatgcaaatacgaatccctgtatcgcaaaggctatgtgctgatcacatgctcctggcagaatgaaatgcaaaagaggatccctcacacaataaatgacctcgtggagccacccgagcatagaagcttcctgtcagaagacggagtgttcgttatctccccatag

SEQ ID NO: 11816 - DNA, 3789 bp, synthetic construct
  misc_feature 1..3789: note = source = /note="Description of Artificial Sequence: Synthetic coding sequence"
  source 1..3789: mol_type = other DNA
atgagactgctgctgctggtccctctgctactggccccagcccctggcagcagcgctcccaaagtgcggcgacaatcagacacctggggcccttggtctcaatggtcaccgtgctctaggacatgtggcggaggcgtgtcctttagagaaaggccatgctattcacaaagacgtgatggaggctcttcctgtgtggggcctgccaggagtcataggtcgtgtcggacggagtcctgtccagacggagcaagagatttccgggctgagcagtgcgctgagtttgatggggctgagtttcaaggaagaagatatcgatggttaccctactactctgcccctaacaagtgcgaacttaactgcattcccaagggagaaaacttttattataagcatcgagaagcagtggttgatggcaccccctgtgagccaggcaagcgagacgtgtgcgttgatggctcatgccgggtggtggggtgtgaccacgaattggattccagcaagcaagaggacaaatgtctccgatgtggaggagacggcaccacgtgctaccccgtagccggtacctttgatgccaacgatttaagccggggttataaccaaattctgatcgtacctatgggagccacctcgatattgatcgacgaggcagcggcatctaggaacttcctagccgtgaagaatgtgcgtggggaatattacctgaatggccactggactatcgaagctgctcgggctctaccagctgcaagtacaatattacactatgagagaggcgctgagggggacctcgcccctgaacgccttcatgccagaggaccaacatccgagcctctggtgatcgaattgattagccaggagcccaaccccggtgtgcattacgagtatcatttacccctgcggagacccagccccggattttcctggtcccacgggtcttggtccgactgtagcgctgaatgtgggggtggccatcagtctagactggtattctgtacaatcgaccacgaagcttacccagaccatatgtgccagagacagcctagacccgcagacagacggtcatgcaaccttcatccatgtccagaaactaagaggtggaaggctggcccttgggcaccctgttctgccagctgcgggggaggctcccagtcaaggtcggtgtattgcatttcttcggacggagccggaattcaggaagcagtggaagaggccgagtgtgccggactgccaggaaaaccacccgctatccaggcatgcaaccttcagcgttgtgctgcctggagtccggaaccctggggggagtgcagtgtcagctgtggggtcggagtccgcaagcgtagcgtgacttgtcgaggcgaaaggggctcccttctgcacactgccgcatgctctctggaagaccgacccccattgacagaaccttgtgtgcatgaggactgccccttacttagtgaccaggcttggcacgtcgggacatgggggctttgctccaaaagttgcagttcaggaacccggaggcggcaggttatatgcgctattggtcctccatcacattgtgggtcccttcagcactctaagcctgttgatgtcgaaccctgtaatacacagccatgccacctccctcaggaagtcccttcaatgcaagacgttcacacacccgcatctaacccttggatgccactcggtccacaggagtccccggctagtgacagtagaggccagtggtgggcggcacaggaacacccctcagcccgtggggatcacaggggggaaaggggtgatccccgtggagatcagggcacccatctgtccgccctgggccctgcgccaagcctgcaacagcctccctatcagcagccactccgatccggctcggggcctcatgactgtcgtcacagcccacacggatgttgtccggatggccacactgcaagtttgggcccacaatggcagggatgccctggagcaccctgccagcaatcacgctatgggtgctgtcctgatcgagttagtgtggctgaaggccctcatcatgctggctgcaccaaatcttacggcggtgatagcaccggcggaatgccgagatctagggccgtggccagcaccgtgcacaatacccatcaaccccaggcccagcagaacgaaccctctgaatgtcgcggttcacagttcgggtgctgctacgacaacgtcgctaccgccgcagggcctttaggcgaagggtgcgtcggccagccgtcccatgattgggcagcacgatggtactttgtggcttcggtggggcaatgtaacagattctggtacggagggtgtcacggcaatgccaataactttgcctccgagcaggaatgtatgtcctcttgccagggaagcctgcatggtcctcgacgtccccagcccggtgccagcggccgatcaacccatacagatgggggaggcagcagtccggcaggcgagcaagagccgtcccagcacaggacaggagcagctgttcagagaaagccctggccatccggcggattgtggcgtcaggatcagcagccgggtcctggggaggcaccacatacgcaggcctttggcgaatggccctggggacaggagctggggagcagggccccaggactaggcggtgacgctggaagtccggctccacccttccattcctcctcatacagaattagtttggccggagtggagccttccttggtgcaggcagcactgggtcaactcgttcggctctcctgcagcgacgataccgccccagagagccaggctgcgtggcagaaagacggacaaccaatcagctctgataggcacaggttgcaatttgatggttctcttatcattcaccccctgcaagcggaagatgcgggaacatatagctgtggatcgaccaggcctgggagagattcacagaagattcaattgcgtatcattggtggagatatggccgtcctttccgaagccgagctctccaggttcccccagcctcgggacccagctcaagatttcggtcaggctggcgctgccggtccacttggcgcaatcccaagctcccaccctcagcctgcaaacaggctacgtctggatcagaatcagcccagggtcgtggacgctagcccgggacagcggattcgcatgacttgccgggctgaggggttccctcccccagcgattgagtggcagcgcgacggtcagcccgtgtcatcccctaggcaccagctccaaccagatggtagtctggttatctccagggtggcagtcgaggacggcggattctatacttgtgtcgctttcaacgggcaggacagagatcagcgttgggtccagctcagagtgctaggagagctgaccataagcgggctgccgcctaccgtgaccgtgcccgagggtgacaccgcgagactgctttgtgtcgtcgccggagagagcgtgaatatccggtggtcacgaaatggtctgcccgtgcaggccgatggacaccgggtgcaccaatcccctgatggaaccctgttgatctacaacttacgagcgagggacgagggctcttatacctgcagcgcttaccaagggtctcaggccgttagtcggtcgactgaagttaaggtggtctcaccggcaccaactgcccagccccgagacccaggacgggattgcgttgatcaacccgaactggcaaattgtgacttgatactgcaggctcagctgtgcgggaatgagtattactcaagtttctgctgtgcttcttgtagtcgatttcagcctcatgcccagccgatctggcaatag

SEQ ID NO: 11817 - DNA, 321 bp, synthetic construct
  misc_feature 1..321: note = source = /note="Description of Artificial Sequence: Synthetic coding sequence"
  source 1..321: mol_type = other DNA
atgtcattttcagcaacaatcctttttagcccaccatcaggctccgaggcccgatgctgctgctgtgcctgtaaaagtgagactaatggagggaacactggcagtcaaggcggaaatccccctccttccactccaataaccgtcactggtcacggcttggcagttcaatctagcgagcagctcctgcatgtcatatatcagagagttgacaaggccgtggggctggccgaagccgctctcgggcttgctagagccaataatgaactcttgaaacgccttcaggaggaggtaggggatctgagacagggcaaagtctcttag

SEQ ID NO: 11818 - DNA, 444 bp, synthetic construct
  misc_feature 1..444: note = source = /note="Description of Artificial Sequence: Synthetic coding sequence"
  source 1..444: mol_type = other DNA
atggcactgcagaggacacatagcctgctcctcctactcttgctcactctcctgggcctcggcctagtgcagccctcatacggacaggatggcatgtaccagcgcttcctgagacaacatgtgcatcctgaggagacgggcggaagtgataggtactgcaatctcatgatgcagaggcgaaagatgactttgtatcactgtaagcgatttaatactttcatacacgaagatatctggaatatccgctccatctgctcaaccaccaacattcaatgcaagaatggcaaaatgaactgccatgagggagtggtcaaggtcactgactgcagggatactggttcttcccgggctcccaattgccgatatcgagcaatcgctagcacgcgcagggtggttatcgcctgtgagggtaacccccaggtgcctgtccatttcgacggttag

SEQ ID NO: 11819 - DNA, 435 bp, synthetic construct
  misc_feature 1..435: note = source = /note="Description of Artificial Sequence: Synthetic coding sequence"
  source 1..435: mol_type = other DNA
atgcaactgtttttgctgctgtgtctggttctcctatctcctcaaggtgcctctctacacaggcatcacccccgtgagatgaagaagcgtgtggaggacctccatgtcggcgcaaccgtggctccctccagccgacgggactttacgttcgacctctatagggcgctcgcttctgccgcaccaagtcagtctatctttttctcacccgtttctatttctatgagcttggctatgctgagcctgggagctggatctagtaccaaaatgcagatactggagggactggggttgaacctgcaaaagtcttccgagaaggaattgcatcggggttttcagcagttgctccaggaactcaatcagccaagggacggctttcagcttagcctgggaaacgcactgttcactgacctcgtggtcgacttacaggacacttag

SEQ ID NO: 11820 - DNA, 540 bp, synthetic construct
  misc_feature 1..540: note = source = /note="Description of Artificial Sequence: Synthetic coding sequence"
  source 1..540: mol_type = other DNA
atgggcagctccggcttgctctccttactggttttattcgtgttgctggcaaatgtccagggcccaggactaaccgactggttattcccccgaagatgtccaaaaatccgggaagagtgcgagttccaggaaagggacgtgtgtacgaaggatcggcagtgccaggataacaaaaagtgttgcgtgttcagctgcggtaaaaagtgtttggatttgaaacaggatgtctgcgaaatgcccaaggagacaggaccatgtttggcctatttccttcattggtggtacgataagaaggataacacatgtagcatgttcgtctacggcggttgtcaggggaacaacaacaattttcagtccaaggccaattgtctgaacacatgcaagaataaacagccctgtccaaagattaaagtagagtgtgaagtggaggagatcgatcagtgcaccaagcccagagactgccccgaaaacatgaaatgttgtcctttctcacgcggtaagaaatgcctcgacttccggaaagcatctttgagcacctag

SEQ ID NO: 11821 - DNA, 444 bp, synthetic construct
  misc_feature 1..444: note = source = /note="Description of Artificial Sequence: Synthetic coding sequence"
  source 1..444: mol_type = other DNA
atggcactgcaaagaacccatagccttcttctcttactgttgctgacattgcttggacttggcttagtccagccctcctatggccaggacgggatgtatcagcgtttcctgagacagcacgtccaccctgaggagaccggaggtagcgacagatattgtaacctgatgatgcagcgcaggaagatgacactctatcattgcaagcggttcaataccttcatccacgaagatatatggaacatccgcagcatttgctcaaccacaaacatccagtgtaagaatggcaaaatgaattgccacgaaggggtggtcaaagtcacagactgccgcgacacagggtcctcccgggctcctaattgtcggtatagggctatcgctagcacccgtcgcgtagtaattgcatgtgaaggcaacccccaggttccggtacacttcgatgggtag

SEQ ID NO: 11822 - DNA, 600 bp, synthetic construct
  misc_feature 1..600: note = source = /note="Description of Artificial Sequence: Synthetic coding sequence"
  source 1..600: mol_type = other DNA
atggagacattcccactccttctgttatccttgggattggttcttgcggaggcttctgaaagcactatgaaaattatcaaggaagagtttaccgatgaggaaatgcagtatgacatggcaaagtctgggcaagaaaaacagacaattgaaattttgatgaaccccatactactggttaagaatacctctctgtctatgtcaaaggacgacatgtcaagcaccttgctgacatttaggtccctccactataatgatcctaagggcaactcctctggaaacgataaggagtgttgtaacgatatgacagtttggagaaaagtgtcagaggccaatggcagctgtaaatggagtaataatttcatccgcagctccacagaggtgatgaggcgggtacacagggctccttcctgtaagttcgtacagaaccctgggatttcgtgctgtgagtctctggagctagagaatactgtatgccaatttacaacgggcaaacagtttccgagatgccagtatcactcagtcacctcgttagaaaagatactgacggtactgaccggccattcactgatgagctggctggtgtgcggaagcaagctttag

SEQ ID NO: 11823 - DNA, 153 bp, synthetic construct
  misc_feature 1..153: note = source = /note="Description of Artificial Sequence: Synthetic coding sequence"
  source 1..153: mol_type = other DNA
atgtccttctcagctaccattctctttagtccgcctagtgggagcgaagctcgctgttgttgttgcgcttgcaagagtgaaaccaatggcggaaacactgggtcacaaggaggcaaccccccaccgagcacaccaataacggtcacaggctag

SEQ ID NO: 11824 - DNA, 75 bp, synthetic construct
  misc_feature 1..75: note = source = /note="Description of Artificial Sequence: Synthetic coding sequence"
  source 1..75: mol_type = other DNA
atgcagttattcctcctcctctgcctagttctgctgagcccccaaggcgcttctctgcacagacaccatccttag

SEQ ID NO: 11825 - DNA, 633 bp, synthetic construct
  misc_feature 1..633: note = source = /note="Description of Artificial Sequence: Synthetic coding sequence"
  source 1..633: mol_type = other DNA
atgtctgccggaaaaatgatgaggacgttgatcactacccatccactcccactacttttattgccgcagcagctcctgcagctagtgcagtttcaggaagtcgatactgactttgactttcccgaggaggataagaaggaagagttcgaggaatgcttggaaaaattttttagtactggacctgcccgaccaccaaccaaggaaaaagtcaagaggcgagtccttatcgagcctggaatgccgctcaatcacatcgagtactgcaaccatgagattatgggcaaaaatgtatactataagcaccgctgggtggccgaacattactttctgctgatgcagtatgatgaactccagaagatctgttacaatagatttgtcccatgcaagaacggcatccgcaaatgcaatagatccaaaggcttagtcgaaggggtgtattgcaatctaaccgaggccttcgaaatccccgcatgcaaatatgagagcctttaccggaaaggctacgtactgatcacatgtagttggcagaatgaaatgcaaaaaagaattccacataccattaacgaccttgtggagccacccgaacatcggtcattcctcagcgaagatggggtgtttgtgatatctccttag

SEQ ID NO: 11826 - DNA, 36 bp, synthetic construct
  misc_feature 1..36: note = source = /note="Description of Artificial Sequence: Synthetic coding sequence"
  source 1..36: mol_type = other DNA
atgtccttcagtgccacaattcttttcagcccctag

SEQ ID NO: 11827 - DNA, 444 bp, synthetic construct
  misc_feature 1..444: note = source = /note="Description of Artificial Sequence: Synthetic coding sequence"
  source 1..444: mol_type = other DNA
atgataatcatggtgatcattttcttggtgctcctcttctgggagaacgaggtgaacgatgaggctgtgatgtcgaccttggagcatctgcatgttgattacccacagaacgacgttccagtaccagcacgatactgtaatcacatgatcatccagagagtgattagagaacctgaccatacctgcaaaaaagagcacgtctttattcacgagcggcctcgcaagattaacgggatctgtatttctcctaagaaggtggcctgtcagaatctctccgctattttttgtttccagtctgagaccaagttcaagatgactgtgtgccaattgattgaagggacccggtatccagcatgtaggtatcactactcccccactgagggcttcgtattagtgacatgtgatgatttgcgccctgattcctttcttggatatgtgaagtag

SEQ ID NO: 11828 - DNA, 696 bp, synthetic construct
  misc_feature 1..696: note = source = /note="Description of Artificial Sequence: Synthetic coding sequence"
  source 1..696: mol_type = other DNA
atgcaattattccttctactgtgtctggttctcctgtcgccccaaggggctagcctgcaccgccaccatccaagggagatgaaaaaacgcgtggaagacttgcatgtgggcgctacagtcgccccatcttcgagacgcgatttcacctttgatctctatagagccctagccagcgcagctccctcccagtctattttcttctcccccgtctccatttccatgtccctagcgatgctttcgcttggggctggctcttcgaccaaaatgcagattttggaggggcttgggctgaatctgcagaagtcttccgagaaagagttacacagggggtttcagcagctgcttcaggagctcaatcaaccgagagatggtttccagctctccctgggtaatgccctgtttacggatctggtcgtcgatctccaagatacatttgttagcgctatgaaaaccctttacctggccgacacctttcccacgaatttcagggactccgctggggctatgaaacagatcaacgactacgtggcgaaacaaacaaagggaaagatcgtggatctcctaaagaacctagattcaaacgctgtcgtcattatggttaattacatattttttaaggctaagtgggagacctcattcaaccacaagggaactcaggaacaagacttttacgttacaagtgaaacagtagtgtag

SEQ ID NO: 11829 - DNA, 1626 bp, synthetic construct
  misc_feature 1..1626: note = source = /note="Description of Artificial Sequence: Synthetic coding sequence"
  source 1..1626: mol_type = other DNA
atggccaagttcggcgtgcatcggatcctacttctcgctatcagccttactaaatgccttgaatccaccaagcttctggcggacctcaagaagtgcggagatttggaatgcgaggcccttataaacagggtgagtgccatgagagactatagaggccctgactgtcggtacctaaactttacgaaaggcgaagagatttccgtctatgtgaaactggctggcgaaagagaggatctttgggctggcaagggcaaagagttcggctatttccctagagatgcagttcaaatcgaagaagtgttcatcagtgaagaaatccagatgtccacaaaagaatctgacttcctttgcctgctgggggtctcctacacctttgacaatgaggattctgagctaaatggagactacggggaaaatatctatccgtatgaagaggacaaagatgaaaagagctctatttacgaaagtgattttcagatcgaacctggcttctatgctacttatgagagtaccttgtttgaggaccaggtccccgcactcgaggcacccgaggatatcgggtcaaccagcgagagtaaggattgggaagaggtcgtcgtggaatcaatggaacaggatagaatccctgaggtgcatgtgccgcctagctctgctgtgtccggagtgaaggagtggtttggactgggtggcgagcaggccgaagagaaagcctttgagtctgtgatcgagccagtgcaggaaagtagcttccgctctcgtaagatcgccgtggaggacgaaaatgacctagaggagctgaataacggtgaaccacagactgagcaccagcaggagtccgagtcagaaattgactctgtgcccaagactcagtccgagctggcttctgagtccgaacacatccccaagcctcagtcaacgggttggtttggtggcggattcaccagctatctgggatttggtgacgaggatactggcctcgagctcatcgctgaggagtccaaccctccactgcaggactttccgaattctatctcatcagataaggaagcaaccgtaccctgcactgagatactgacagaaaaaaaagatactatcacgaatgatagccttagcctgaagcccagctggttcgattttggatttgccatccttggcttcgcttatgcgaaagaagacaagattatgctggatgaccggaaaaatgaggaggatggcggagcagatgagcacgagcaccccctgacttccgagttggatcctgagaaggagcaggagatcgagactattaagatcatcgaaaccgaagaccaaattgataagaagcccgtgtccgagaaaaccgatgagtctgacactatcccatatctgaaaaagtttctgtacaactttgacaacccctggaactttcagaatataccaaaagagaccgaactgccctttccaaagcagattttggaccaaaataatgtaatcgaaaacgaggaaactggcgagttttctatagataattacccgacggataacaccaaagtgatgatattcaaaagttcctatagcctttccgggtggtatgagaatatctatatcagaatttacttcattttcaaacacaatcttttcctctag

SEQ ID NO: 11830 - DNA, 1245 bp, synthetic construct
  misc_feature 1..1245: note = source = /note="Description of Artificial Sequence: Synthetic coding sequence"
  source 1..1245: mol_type = other DNA
atgaatcccactctcggcttagccatcttcctcgccgtcttactgactgtcaaaggcctgctgaagccaagcttctcccccaggaactataaagccctgtctgaagtgcagggatggaaacagaggatggccgcaaaggaacttgcgagacagaatatggacctgggttttaagttgttgaaaaaattggcattctacaaccccggtcgaaatatttttctaagtcctctttcaataagcacagccttttccatgctgtgtctcggagcccaggactcaacactcgatgagatcaaacagggctttaattttcgtaaaatgcctgaaaaggatctgcacgaagggttccattatatcatccatgaattgactcagaaaacccaagacctgaaactgtccatcgggaacacgctgttcatagatcagaggcttcaacctcagcgcaagtttttggaggatgctaaaaacttctacagtgcagagacaatcctgactaactttcagaaccttgagatggctcagaagcagataaacgattttatttctcagaaaacacatggcaaaatcaacaatctaatcgagaatatagatcccggtaccgtgatgctgttggccaactacatattctttagggcaagatggaagcacgaattcgatcccaatgtgaccaaggaggaggatttcttcctagaaaaaaattcaagcgtaaaagtgcctatgatgttccggagtggaatctaccaggtggggtacgatgataagctctcttgcaccatcctcgaaatcccctatcagaagaatataacagccatattcatcttacctgatgaaggcaagctgaagcacctagaaaaggggcttcaggtcgatactttcagtcggtggaaaaccctcctttcaaggagggttgtggacgtgtcggtaccaagactgcatatgaccggcaccttcgatctcaaaaaaaccctaagttacataggagtgagtaagatattcgaggaacacggcgatttaaccaagattgcgccacatcggtcactgaaggtgggcgaggcagttcacaaggcagaactgaagatggacgagagagggactgagggtgcggcagggactggagcacaaacactgcctatggagacgcccctcgtggtgaaaattgacaagccatacctgctcctgatctattcagagaagattcccagcgtgttgttcttgggcaagatcgtgaatcctattggcaagtag

SEQ ID NO: 11831 - DNA, 618 bp, synthetic construct
  misc_feature 1..618: note = source = /note="Description of Artificial Sequence: Synthetic coding sequence"
  source 1..618: mol_type = other DNA
atgatgcgaactcttatcacgacgcatcccttgcccctgctgctgctcccccagcagttgcttcagctggttcagttccaggaggtggataccgacttcgacttccctgaagaggataaaaaggaggaatttgaagagtgcctggagaaatttttctcgacagggccagctcgccctccaaccaaggagaaggtaaagaggcgggtgctcatcgaaccgggtatgcccctgaaccatatagagtattgcaatcacgagatcatgggcaaaaatgtttactacaaacaccggtgggtggccgaacactattttctcctgatgcagtacgatgaactgcagaagatctgttataatcggtttgttccctgtaaaaacggtatacggaaatgtaaccggagcaaaggactcgtggagggcgtgtattgtaacttgacggaggcttttgagatccctgcatgcaagtacgaatccctgtatcggaaggggtacgtgcttatcacctgctcatggcaaaacgaaatgcagaaaagaattcctcatacaatcaacgacctggtcgagcctccggagcacaggtctttcctgtcggaggacggggtttttgtgatatcaccatag

SEQ ID NO: 11832 - DNA, 516 bp, synthetic construct
  misc_feature 1..516: note = source = /note="Description of Artificial Sequence: Synthetic coding sequence"
  source 1..516: mol_type = other DNA
atggaaacttttcctttgttgctgctaagcttgggacttgtcttggctgaggctagtgagagtaccatgaagattatcaaggaggaatttacggacgaagaaatgcagtatgatatggccaaatctgggcaagagaaacagacaatcgaaattctaatgaatccaatcctgctggttaagaatacaagtctttccatgtctaaagacgatatgtcctcgacactgctaacgttccggagcctccactataacgaccctaagggaaattcgtccggaaatgacaaagaatgttgtaatgacatgaccgtgtggaggaaagttagcgaggctaatggcagttgcaaatggagtaacaatttcatccgaagcagcaccgaggtgatgaggcgagtccaccgtgcgccatcatgcaaatttgtccagaacccaggcatttcatgctgcgaaagtctggagctcgaaaatactgtctgccagttcacgaccggaaaacaattccccagatgccagtactag

SEQ ID NO: 11833 - DNA, 633 bp, synthetic construct
  misc_feature 1..633: note = source = /note="Description of Artificial Sequence: Synthetic coding sequence"
  source 1..633: mol_type = other DNA
atgtcagctggaaagatgatgcgtacactgatcacgactcatcccctgccactccttctgttaccacagcagcttctgcaactagttcagtttcaggaagtcgatacagatttcgactttcctgaagaggataagaaggaagaattcgaggaatgcctggagaagtttttttctactggccctgccagacccccaacaaaggagaaggtgaaacgcagggtcctcatcgagcccggtatgccacttaaccatattgagtactgtaaccacgagatcatgggaaagaacgtgtactacaaacaccgctgggtcgccgagcattactttctgcttatgcagtatgacgaactgcagaagatatgttacaacagatttgtcccttgtaagaatgggattcgtaaatgcaatcggtccaagggacttgtagagggggtgtattgcaacctcacagaggcatttgaaattccggcttgcaaatatgaaagtctctatcgtaagggctatgtgttgattacctgctcctggcagaatgaaatgcaaaagaggatcccccatacaattaacgatctcgtcgagccaccggaacatcgatcattcctgtctgaggacggagtgtttgtcatcagcccatag

SEQ ID NO: 11834 - DNA, 537 bp, synthetic construct
  misc_feature 1..537: note = source = /note="Description of Artificial Sequence: Synthetic coding sequence"
  source 1..537: mol_type = other DNA
atggaaactttcccgctgcttctgctgagcttggggctcgttctcgctgaggcatccgagtcaactatgaagattattaaagaggagttcaccgacgaggagatgcagtacgacatggccaagagtggccaggagaagcagacaatcgagatactcatgaatcctattctgctggtaaagaacacgtcattgtccatgagcaaggatgacatgtcgagtacgctcttgacatttcgcagcctgcactacaacgatcccaagggcaattcaagtggtaacgacaaggagtgctgcaacgacatgactgtctggagaaaagtttccgaggccaacggctcctgtaaatggtcaaataacttcatacgcagttccactgaggtgatgcgtcgggtccaccgggcacctagttgcaaatttgttcagaacccaggaatctcctgttgtgaatccctggagctggagaacaccgtttgtcaatttaccaccggcaagcaatttccaaggtgccagtaccattcagtaaccagtttggagtag

SEQ ID NO: 11835 - DNA, 474 bp, synthetic construct
  misc_feature 1..474: note = source = /note="Description of Artificial Sequence: Synthetic coding sequence"
  source 1..474: mol_type = other DNA
atgcagttgttcttgttgctttgtctagtcctgctgagtccccaaggcgcatccctccatagacaccatcccagagagatgaaaaaacgtgttgaggatcttcatgttggggcaaccgtggccccatcttcacgacgcgatttcacctttgatctgtatcgggctctcgcctctgcagcccctagccagagcatattcttctcccccgtgtccatatccatgtccttggccatgctatctctgggtgctggaagctccactaagatgcagatcctcgagggtctgggactgaatctccagaaatctagtgaaaaggagttgcaccggggattccagcagctgctgcaagagctaaatcagcctcgggacggatttcagctcagcctaggaaacgctttattcacagatctggttgtcgacctgcaggatacttttgtgagcgccatgaaaactctgtacttagccgacacctag

SEQ ID NO: 11836 - DNA, 1035 bp, synthetic construct
  misc_feature 1..1035: note = source = /note="Description of Artificial Sequence: Synthetic coding sequence"
  source 1..1035: mol_type = other DNA
atgccacctcgcatgctcgtggcccctttgcccttgcactttctactggctgctgtgtccagcgaaaatcggagcggaaggaggcagtggcagcaggccgtggccgctggctccggccctggacgaaatagcagtagagcaatccactggtctttgccgagggccctggttccagccacaggaacaagagcaagtgggagtcagaaacgccagcgcccaccaaagggacaggaggccctgtggagcagaccgcactcaagacattcagcagagcgcgcaggagggtcgcactctgacccaggccgtctcagcgcgcctctcggactgggtctcccttccggccgaggaagattgaccgcgatgcctggcagggcacctctcaggacagttcctggcgcactaggagcatggcttctgggaggtctgtgggcttggacactttgtggcctctgtagtctcggagccgttggcgcaccacgcccatgtcaggcaccccagcaatgggaaggaaggcaagtgatgtatcaacagtcctctggacgaaatagcagggccctattgagttatgacgggctgaatcagagagtccgtgtgttggatgagcgcaaggcactcattccttgcaaaaggctgtttgagtatattctgctctataaggatggcgtgatgttccagatagatcaagccacaaaacagtgttccaaaatgacattgacgcagccctgggaccctctggacatcccccagaatagcacgtttgaggatcagtactccatcggtgggcctcaggagcaaatcacggttcaagaatggagtgatcggaaatccgctcggtcgtatgagacatggattgggatatacactgtgaaagactgttatccagtgcaggaaaccttcaccatcaattattcagtcatccttagcactagatttttcgatatccagttgggcataaaagatccatcagtcttcaccccccctagcacatgccagatggctcagcttgagaaaatgtccgaagactgttcgtggtag

SEQ ID NO: 11837 - DNA, 321 bp, synthetic construct
  misc_feature 1..321: note = source = /note="Description of Artificial Sequence: Synthetic coding sequence"
  source 1..321: mol_type = other DNA
gggcagccaaaagctgcaccttccgtgacccttttcccccctagcagcgaggagctgcaagcgaacaaggccactctcgtgtgcttggtgtcagacttttacccaggggctgttacggtggcctggaaggccgacggatcccccgttaaggtgggggtggagacaactaagccaagtaagcagtcaaacaacaagtacgcagcatccagctatctgtctctgacgcccgaacagtggaagtcgcacagatcctactcctgcagggtcacccacgagggaagtacggtcgagaagaccgtcgctcctgccgaatgttcctag

SEQ ID NO: 11838 - DNA, 672 bp, synthetic construct
  misc_feature 1..672: note = source = /note="Description of Artificial Sequence: Synthetic coding sequence"
  source 1..672: mol_type = other DNA
atgcggttacaacgtcctcggcaggctcctgcaggcggaaggagagcgccaagagggggaagagggtctccttaccgacccgatcctggcaggggcgctaggcggctgcgacgttttcagaaggggggagagggtgccccacgtgccgatccgccatgggcgcctctgggtacaatggctctcttggcccttcttctggtcgttgctctgccgagagtgtggaccgatgcgaatctgaccgccaggcaacgggatccagaagacagccagcggaccgacgaaggcgacaacagggtgtggtgtcacgtgtgtgaacgggaaaacaccttcgagtgtcaaaatccaagacgctgtaagtggaccgagccgtattgcgtgatagctgcagtcaagatctttccacgcttctttatggtggccaaacagtgctcagccggatgcgccgcaatggaacgccctaagcccgaagagaaacgcttcttgttagaggagcccatgccttttttctacctcaagtgctgtaagatccgctactgcaatctcgagggtccacctattaacagctctgtgtttaaagagtatgcgggttctatgggggagtcttgtggtggcctatggcttgctatccttttactgctggccagtatcgccgctggtctgagtctatcttag

SEQ ID NO: 11839 - DNA, 408 bp, synthetic construct
  misc_feature 1..408: note = source = /note="Description of Artificial Sequence: Synthetic coding sequence"
  source 1..408: mol_type = other DNA
atgacgcccacacctaccgccgcatggaccccaccacctccacttagacctagcgcagctgccgcaggcgctcagtgtcgatcctgtccatttaggggaggttgcgccccatccactgctcggaccccacccgcatgcatgcgtcccgctgggccttgcgcccctccaacctggcctgcaccctccacgaccaccagcacctgcaccagtagaagagcaggctgtaccgccagtagcgccagctacagcaccctggcagcagcctgctcgctgaggaggtccggggtgcggtggcccccttcaagcgcttattccacttgggcgttcgcttcatgttgcgcgtcttcagcttcatgccgctgctgctgttgttgctgggccgctggagcctggacaagtgcatggtag

SEQ ID NO: 11840 - DNA, 1542 bp, synthetic construct
  misc_feature 1..1542: note = source = /note="Description of Artificial Sequence: Synthetic coding sequence"
  source 1..1542: mol_type = other DNA
atggcaccagcacgaacaatggccagggccagactcgcccctgccggaataccagcagttgccctgtggcttttgtgcacactaggcctacaaggcacccaggccggacccccacccgcacctccaggattgccagccggtgccgattgtctcaattcttttaccgcaggcgtcccaggcttcgtgctagacacaaatgcgtcagtctctaacggtgcgaccttcttggagtcacctacagtgagacgaggctgggattgcgtccgcgcttgctgtaccacgcagaattgcaacctggctctggtcgagttgcagcctgaccgcggtgaggacgccatcgcagcatgcttcctaattaattgtctgtacgagcagaattttgtgtgcaagtttgctccaagggaaggctttatcaactatcttacacgagaagtgtataggtcttatcggcagctccgaacccaagggtttggaggaagcggcatacccaaggcctgggcaggcatcgacctgaaagttcagccccaggagcctttagtgttgaaggatgtggagaacactgactggcgcctgctcaggggggataccgatgtgagagtcgaacggaaggatcctaatcaagtcgagctgtgggggctgaaggaggggacctacctcttccagctgacagtaacaagttctgaccatcccgaggatacagcgaatgttacagttacggtactgtccacaaagcagaccgaagattattgtctggcgtcaaacaaagtggggagatgtagagggagctttccgaggtggtattacgatccaacagaacaaatctgcaagtcttttgtgtacggcggatgccttggcaacaagaataactacttgcgggaggaggagtgcattctcgcttgtagaggggtccaaggcccttctatggagcggagacacccagtttgctctggtacgtgtcaacccacccagttccgatgctctaacggatgctgcatcgactcttttcttgaatgcgatgacaccccaaattgtccggacgcctccgacgaagctgcttgcgagaaatatacatccggcttcgacgagctccaacgtatacactttccctcagataaaggccactgtgtggacttgccggacacaggcctgtgcaaggagtccattcccagatggtattataaccctttctccgaacactgtgccaggttcacttatggtggttgctacggaaataagaataatttcgaggaggaacaacagtgtctggagtcttgtagaggaatcagtaaaaaagatgtgttcggccttcggagggaaatcccgattccctccaccggctccgtggaaatggcagtggctgtgttcttggtcatctgcatagtagtggtggtggcgatccttgggtattgtttttttaaaaatcagaggaaagacttccacggtcaccatcaccaccctccaccaacccccgctagctctacagtctctacaaccgaggatactgagcatcttgtctacaaccatactactaggccgttgtag

SEQ ID NO: 11841 - DNA, 1341 bp, synthetic construct
  misc_feature 1..1341: note = source = /note="Description of Artificial Sequence: Synthetic coding sequence"
  source 1..1341: mol_type = other DNA
atgctgcatcccgaaacctccccaggcagaggccacctgctggctgttctactggccctgcttggcaccgcttgggcagaggtctggccccctcagttgcaggagcaggccccaatggccggagcgcttaacagaaaagagtctttcctcctgctatccctacacaatagactgagatcctgggtgcagcccccagcggctgatatgagacgcctcgactggtcggactcactcgctcagttggcccaggcgcgagcggcactctgtggcatcccaactccatccctggcctccggcctgtggcgcaccctacaggtgggatggaatatgcagctgctgcccgcaggactagcttcattcgtggaagtggtgtccctctggtttgcggaaggccagcggtatagccacgcagctggagaatgcgcaagaaatgccacctgcacacactatactcagctcgtgtgggctaccagcagccagctgggctgtggtagacacttgtgcagcgctgggcaggcagccattgaggcatttgtttgtgcttactcacctcggggaaattgggaggtgaacggcaagaccattgtgccatacaagaagggagcttggtgctcgctatgcactgcctcggtgtcaggctgttttaaagcatgggaccacgccggaggactttgtgaagttccgagaaatccctgtcgcatgtcctgtcaaaatcatggaagattaaacatttccacatgccattgtcactgtccacctggttatactggaagatactgtcaggtccgctgctctctccagtgtgtgcatggacgattccgagaagaagaatgttcctgtgtgtgtgacattgggtatgggggtgcacagtgcgcaacgaaagtgcacttcccctttcacacttgcgacctgcgtattgatggtgattgcttcatggtttcaagtgaggccgacacctactatagagcccgtatgaagtgccagagaaagggaggcgtcctcgcccagataaaatctcagaaggtgcaagatattctcgctttttacctggggagacttgagaccactaacgaagttattgattctgacttcgagacccgcaacttctggataggacttacttataagacagcaaaagattccttccggtgggccactggcgaacatcaggcatttacctcctttgcttttggccagccagataatcacggctttggcaactgtgtggaactccaggcttccgccgcttttaattggaataaccagagatgtaagaccaggaatagatatatttgtcagtttgcacaagaacacatcagtcgatggggccctggatcctag

SEQ ID NO: 11842 - DNA, 936 bp, synthetic construct
  misc_feature 1..936: note = source = /note="Description of Artificial Sequence: Synthetic coding sequence"
  source 1..936: mol_type = other DNA
atgggtgttatggcaatgctcatgctgccattattgctgctgggcataagtggcctgctattcatatatcaagaggtctctaggctctggtctaagtccgcagtccagaacaaagttgtcgtaattaccgacgccatttccgggctcggcaaggaatgtgcccgagtcttccatacgggcggagccagactcgtgctctgcgggaagaactgggagcggctggaaaacctctatgatgccctaatcagtgtggctgatccgagtaaaacgttcactcctaagttagtgctgctggacctttccgacatcagctgtgtgcccgacgtagctaaggaagttctggattgctacggctgtgtggatattttgattaacaatgctagtgtgaaagtaaaaggacctgcgcacaagatatcattggaacttgataaaaaaataatggacgcaaattatttcggcccaattaccctcacgaaagcattgctgcccaatatgatcagtaggaggacaggccagatagtgcttgtcaacaacatccagggaaagtttggtatccctttcaggacaacctatgctgcaagcaaacatgcagcgttggggttcttcgattgcttaagggccgaagtcgaggagtacgacgtcgtgatctcaacagtttccccaacatttattagatcctatcacgtttatccggagcagggcaattgggaggcctctatctggaagttcttctttagaaagctgacgtacggcgtacacccagttgaagttgctgaagaggtcatgagaaccgtgcgccgtaagaaacaggaggtattcatggcaaaccccatcccgaaggccgctgtgtacgtgcgcacattctttcctgagttcttttttgccgtcgtggcctgcggggtgaaggagaagctaaatgttcctgaggaggggtag

SEQ ID NO: 11843 - DNA, 594 bp, synthetic construct
  misc_feature 1..594: note = source = /note="Description of Artificial Sequence: Synthetic coding sequence"
  source 1..594: mol_type = other DNA
atggcaaaaaacgggctcgtgatttgcatcttggtcattacactgctgctggatcagacaacaagccacacgtctcggctgaaggccagaaagcactccaaaagaagggtccgggacaaggatggcgacctaaaaacccagatagaaaaactctggactgaggtcaatgccctcaaggaaatccaagccctgcagacagtgtgtttgcgcggaacaaaggttcacaagaaatgctacctggccagtgaaggactgaagcatttccatgaggcgaatgaggactgcatctcaaaaggtgggatcctggtcatccccaggaatagtgatgagatcaatgctctgcaggattacggaaagcgttctctgcctggggtcaacgacttttggctgggcattaacgacatggtgacagagggcaagtttgtggacgtcaacgggatcgcaatcagctttttaaactgggatagggctcagccgaatgggggtaagcgagagaattgtgtcctgttcagccagagcgcccaaggcaagtggtcagacgaggcgtgcaggagcagcaagaggtatatctgcgaatttacaatccctcagtag

SEQ ID NO: 11844 - DNA, 705 bp, synthetic construct
  misc_feature 1..705: note = source = /note="Description of Artificial Sequence: Synthetic coding sequence"
  source 1..705: mol_type = other DNA
atgaaagtgctgctgttgacaggccttggagccctcttctttgcctactattgggacgataattttgatcctgggggtcttgactacttggtgcttaatcacattggaggagctcctgcaggcacccgggcaagaagtccacaggcgacaagatggctcatgcaggtgaattttgtcagctatgtgcagctcacctcacgcgcacttccttctctcaccgatagcaaaggttcacttgtggtggtaagctctctgctgggcagggtgccaacaagctttagcacgccttatagtgcagccaaatttgccctcgacggcttctttggaagtcttagacgagagttagacgtgcaggacgttaacgtggctatcactatgtgcgtgctgggactccgcgatcgcgcttccgcagctgaggccgtccgtagctctaccagccggccacggcagccagagcataggggagtccctctgcaatcgcaaacagccatgttcttgcccccaaccgtgcctggcgcaagaacgctgaccgaaactcccctgcgtggttggccccagccaaagatgaaaagtagtagacagaagtccaagactgagaagaatgatgggcatctggagcccgtgaccgcctgggaggtgcaggtccctagggtgaggcggctgtgtcggggtctggccagacctcatctgtttggccacgattag

SEQ ID NO: 11845 - DNA, 228 bp, synthetic construct
  misc_feature 1..228: note = source = /note="Description of Artificial Sequence: Synthetic coding sequence"
  source 1..228: mol_type = other DNA
atgaaggtcttgctcctcacaggcctgggcgctctgtttttcgcttactactgggatgacaacttcgatccagcttctctgcagggagctagagttttgctgacgggggcaaatgctggggtgggggaagagctggcatatcactacgcacgcctgggtagccacctggtgctgacggctcacactgaagctctcctccagaaagccggttggacgacctcctgctag

SEQ ID NO: 11846 - DNA, 225 bp, synthetic construct
  misc_feature 1..225: note = source = /note="Description of Artificial Sequence: Synthetic coding sequence"
  source 1..225: mol_type = other DNA
atgcagccctccgagatggtcatgaaccccaagcaggtgtttctgtctgtcctaatatttggggtagccggattgctactgtttatgtaccttcaggtgtggatcgaggaacagcataccggtcgcgtggaaaaaagaagggagcaaaaggtcacctccggttggggccctgtaaagtacctcagacccgtacctagaatcaaacctcaggtcagccacgcatag

SEQ ID NO: 11847 - DNA, 861 bp, synthetic construct
  misc_feature 1..861: note = source = /note="Description of Artificial Sequence: Synthetic coding sequence"
  source 1..861: mol_type = other DNA
atgaaggtcctgctcctgacaggtctgggggcacttttcttcgcctactactgggatgataacttcgaccctgcatccttgcagggtgctagagtgctactcaccggtgccaatgccggagtgggtgaggagctggcctaccactatgcacggcttggctcccacctggtactcaccgcccacacagaggccctgctccagaaagtggtgggcaattgtcgcaagctgggagcacccaaagtcttctatatcgcggctgacatggccagcccagaggcacccgagagcgtggtgcaattcgctcttgacaagctgggaggcctcgattatcttgtgctgaatcacattggcggagctccagcgggaactcgagcccgtagcccgcaggcaacaaggtggcttatgcaagtaaacttcgtctcctatgtccaactgaccagcagagcactgcccagtctcacggatagtaaaggctcactggttgtggtaagtagtctgctcggccgtgtgccgacctctttcagcaccccttacagtgcggctaaattcgctcttgatggcttttttggtagcttaagaagggagctagatgtgcaggacgtgaacgtcgcaatcactatgtgcgtgcttggcctgagggacagagcatcggctgcagaggctgtgcggggtgtcactagggtaaaagccgcaccgggtcctaaagctgccctggcagtgattagagggggagccacgcgggctgccggtgtgttctacccatggcgctttcggttgctgtgccttttaaggaggtggctgcctcgccctagagcttggttcattagacaggaattaaatgtgaccgccgcagcagcctag

SEQ ID NO: 11848 - DNA, 459 bp, synthetic construct
  misc_feature 1..459: note = source = /note="Description of Artificial Sequence: Synthetic coding sequence"
  source 1..459: mol_type = other DNA
atgcaggtcaattttgtttcatatgtgcagctaacatcacgggcattgccttccctgaccgactctaagggctccctagtcgtggtgagcagcctacttgggagagtgccaacttcgttttccacaccttactctgcagctaaatttgctctggacggattttttggaagtctgaggcgcgaacttgatgtacaggatgtcaatgtggctatcacgatgtgtgtactgggacttagggaccgagcctcagccgctgaggcagtaagaggtgtcactagagttaaagcagctccagggccaaaggcagcattggccgtgattagaggcggagcaaccagggctgctggggtattttatccttggagatttcgcctactgtgtctcctccggagatggctgccaagaccaagagcttggtttatcagacaggagctgaatgtgactgccgctgccgcttag

SEQ ID NO: 11849 - DNA, 2856 bp, synthetic construct
  misc_feature 1..2856: note = source = /note="Description of Artificial Sequence: Synthetic coding sequence"
  source 1..2856: mol_type = other DNA
atgcgcgtgctcgcatgtctgctggccgctttagtgggcatccaggctgtggagcgcctacggttggccgatggtccgcatgggtgtgctggcaggttagaggtgtggcatggcggacgatggggaaccgtctgtgacgacggctgggatcttagagacgcggcagttgcgtgtcgacaactggggtgtggaggggctctcgcggctccaggaggcgcttttttcggagaaggggcaggcccagtgtggctgagcgaacttgcatgccggggtaatgagggacagctcgggctgtgtcatcataggggatggaaagctcacatatgctctcatgaggaggacgccggagtggtctgtgccggacagcgcgtcgccaattctagagatgattcaacttcgcccctggacggagccccttggccaggactccttctggaactgagcccgtccaccgaagagccgctggtgacccatgcccctcgacccgctgggaatccacagaacgcatcccggaagaagagccctcgccctaagcaggcaaagtccacacgcgcaccactgctgaccacaggggctcctagacaggagcgactgaggctggtaagcggcccacaccgctgcgctgggaggctggaggtgtggcatggaggtagatggggtaccgtttgtgatgatgggtgggatcttagagatgccgcagtggcgtgcagggagctaggttgtggcggtgctttggctgcaccgggaggggctaggtttggcccaggcgcaggcccagtgtggatggatgatgtgggttgcggaggcggtgagcaggctctcagggactgtcctaggagcccttgggggcgatctaattgtgatcactccgaggacgccggacttgtgtgtacaggtccagccccacgcctcagactggcagacggaccacacggttgcgctggccgactggaagtttggcatggtgggaggtggggctctgtgtgcgacgatgcttgggatctgcgcgatgcagcagtcgcctgcagggagctcgggtgcggcggagccctggctgcgccaggaggtgcgttctttggggaaggttccgggcctatcatcctggacgatttgagatgtaggggaaatgaaaccgcactccgattttgtcctgcccgaccatggggccagcatgattgtcatcacagagaagacgctggggctgtctgcgatggcatgccactcggttatgttcccccaacagcgccaactgactcgaacaattccacgccccgtgaagcggcttcgcgccctcccagtacaatgacgagtcaggccccaggaacggcaggggtgagtccaccccctgcctcccctactgtgctgtgggaacctgggcctgaggctggctctcctcagttacgcttagtggccggaccttctaagtgttcaggcagactagaagtctggcatgaccagcgatggggcaccgtgtgtgacgattcatgggatatgcgcgattcagccgtagtctgtcgcgaactggggtgtgggggtccacagcagcctgatcccgctgccggaaggttcggctggggcgctggtcccatctggttggacgacgtgggatgtgtgggcaccgaggcatctctatccgactgccctgcagcaccgtggggaaaacataactgcgcccataatgaagatgtgggagtgacctgcacaggaccacctgggctagactccatttcagacccatttagctggtcatggattccgggactgggtagggaccgtgatgcatggcttcccggagagctcgcaactaaaccatctgcctctgtaaccgctagcgttctggagaagaccactaccaaagccccaggcaaaatgcctaagtccaccaaaaaatgggtgacaaaaaatgctaagcggccaacgacacaaccaccagtcatgcctaccactaagcactcccgcgctcagtctccaccagatcttactagccagaccactgcagctttgactaccgaggcaagcaggcgccctacctccgaattcaccagaagaccgaccacagaagctccccagaggtggacatctcacactaccgccactctcacaccccaagcccctcgtgagaggaccactaagacaatggccatgctgacaacccagggcccacaagagatgactagcgagtctacaatcaaaagcataccacaggcttccctcgagccctctgcagaaatcccggagggctctcctgaatccccaaaggatcccgctccttccccctccgtgagtacaacaggtgagtccggcctgttccgagtgaggctcgctgatgggcctaataggtgtgccggtaggcttgaggtgtggcacgccggtcgctggggcacagtgtgtgacgataattgggacctgcgtgatgcaaccgtggcctgctgggaacttggctgcggtaaagtgaggcctagagtggggaaaacacactatggcccaggtaccggtcctatttggttggatgacatgggctgtaagggcagcgaggccagcctcagtgattgcccctcgggtgcctggggcaagcacaactgtgatcatgaggaggatgtagggttaacctgtacaggctataccgattatgatgactaccctccctggacatgggaccctaccagccgtgaggacttagccaagggcaccacaacagccggagttcctgggcacactcttccttggcggaccaccaggagacccggaagcagttccccggcaataaggcgtttgcctgacacagagccagaggccggtgctcctagaggggatgccccaagatctcgcacagcccgagtggccgctcccccttag

SEQ ID NO: 11850 - DNA, 8430 bp, synthetic construct
  misc_feature 1..8430: note = source = /note="Description of Artificial Sequence: Synthetic coding sequence"
  source 1..8430: mol_type = other DNA
atgactctggagggactatatttagcccgaggccctctggccagactcctgctggcctggagcgccttgctttgcatggctggagggcaaggcagatgggatggagcgctcgaagccgctggacctggcagggtgcgccgacgcggttctcccggtatcctgcagggccctaacgtgtgcggatcaaggttccatgcttactgctgtcctgggtggcgcacattccccggacgaagccaatgtgtggtcccgatctgccgacgtgcgtgtggcgagggcttctgctcacagccaaatctgtgtacctgcgcagatggaaccctcgcccctagctgtggggtcagtagaggtagtggctgtagtgtgagctgcatgaacgggggaacttgccgcggtgctagttgtctgtgccagaagggctatacaggaactgtgtgtggacagccaatctgtgaccgcggatgtcacaacggcggacgatgcattggcccaaacagatgcgcctgcgtgtatggcttcatggggcctcaatgcgaacgtgattatcgcacaggaccctgctttggtcaagtgggtccagagggttgccagcaccagctgactgggttagtctgtactaaggccttgtgctgcgccaccgtgggacgcgcatggggcctaccctgcgagctatgccctgcccagcctcacccatgtcgcaggggcttcatccccaatatacacacaggagcttgccaggatgtggatgagtgtcaggccgtgcctggactgtgtcagggcggatcctgcgtgaacatggtgggctcctttcactgccgctgtcctgtcggtcaccggctgtcagattcctccgctgcatgtgaggactacagggccggagcttgcttttctgtgttgttcggaggtcggtgcgccggagatttagcagggcactacactcggaggcaatgttgctgcgatagaggcaggtgctgggcagccggtcccgtgcccgagctctgtcccccaagaggatccaacgaattccagcagctctgcgctcagcgactaccccttttaccaggtcacccagggctctttccaggcttactaggcttcggatctaacggaatggggcctcctctgggcccagctagactcaatcctcacggctccgacgctcgcggaatcccttccttgggccctggtaactctaacattggcacagccaccctgaaccagacaatagatatctgtcggcactttacaaatctgtgcctgaacggccgatgcttgcctaccccctcctcttaccgctgcgagtgcaatgtcggctatacacaggacgtgcgcggagaatgcattgacgtggatgaatgcacgagtagcccttgccaccatggagactgcgtcaatatccccggaacataccattgtcgctgttaccctggattccaggccacgccaacccgtcaggcctgcgtggatgtggatgaatgtatagtcagcggcggtctttgccacctcggcagatgcgtgaacactgaggggtctttccagtgcgtgtgtaacgctggtttcgagctcagccctgacggtaaaaattgcgtcgaccacaacgagtgcgccacaagtaccatgtgcgtgaatggcgtatgtcttaacgaggacggcagcttttcatgcctctgtaagcctggctttctgcttgcccctggaggccactattgcatggacattgacgagtgccagacacctggcatctgtgtgaatggccactgtacaaacacagaaggcagcttccgctgtcagtgccttgggggattggcagtcggtaccgatggcagagtttgtgtggacacccacgttcgtagtacgtgttatggagctatcgaaaagggtagctgtgccagaccctttcccggtacagtcacaaaatcagagtgctgttgcgccaacccagaccacggatttggcgaaccgtgtcagttatgccccgctaaagacagcgccgaatttcaggcattgtgctcctctggcctgggcattacgaccgatggacgcgatatcaatgaatgcgccctggaccccgaggtgtgtgctaatggagtttgcgagaatctccgtgggagttacaggtgcgtctgtaacctgggctacgaggctggcgctagcgggaaagattgcacagatgtggacgagtgcgctctcaactctctattatgtgacaacgggtggtgccagaactcacctgggtcctactcgtgtagctgcccgccagggtttcacttctggcaggacactgaaatttgtaaggatgtcgatgagtgtttgtcttcaccttgtgtgtcaggcgtatgccgcaatctggctggcagttacacatgcaagtgcgggccagggtcccgattagatccctcgggaaccttctgtttggacagcacaaagggaacgtgttggctcaaaattcaagaaagccggtgtgaggtgaatctgcagggagccagcctcaggtcagaatgctgcgctaccctaggggctgcctggggttctccctgtgagcgctgtgagatagacccagcttgcgcccgtggttttgcaagaatgactggtgtcacttgcgacgacgtcaatgaatgtgaaagctttcctggcgtctgcccaaacggcagatgcgttaacactgccggtagtttccgctgtgagtgcccagaggggttgatgctagatgctagcggcagactgtgtgtcgacgtgcgtcttgaaccctgcttcctacgctgggatgaagacgagtgcggggtaaccttgcccggaaaatatcggatggatgtgtgttgctgctccattggtgcagtgtggggggtcgaatgcgaggcctgtcctgaccccgagtccttggaatttgcctcactgtgccccaggggactcggttttgcgagcagggattttctgtctggcaggcccttctataaggacgtcaacgagtgcaaagtcttcccgggtctgtgtacccacggcacgtgtcggaatactgtaggttcgttccattgcgcgtgtgccggaggctttgccctcgatgcgcaggagcgtaattgcacagatatcgacgagtgcaggatatcaccagatctatgtggtcagggcacttgcgtgaacacgcctgggagtttcgagtgcgagtgcttcccagggtacgaatcagggtttatgctcatgaaaaattgtatggacgttgacgaatgcgccagagatccactgctttgccggggtggcacctgcacaaacactgacggctcatacaaatgccaatgcccccctggtcacgaactgaccgctaaggggactgcctgtgaagatatcgatgaatgcagcctctccgacggcttgtgtccacacggtcaatgcgtgaacgtaattggtgcatttcaatgctcctgtcacgctggctttcagtcaacaccagatcgccagggttgtgtcgatatcaatgagtgtcgtgtgcagaatggtggctgtgatgtgcactgcataaataccgaaggcagctataggtgcagctgcggccaggggtattcactgatgccagacggaagggcatgcgctgacgtcgacgagtgtgaagaaaacccacgggtgtgcgatcaagggcattgcactaatatgcccggtggtcatagatgcctgtgttacgatgggtttatggccaccccggatatgaggacatgtgttgatgtcgatgaatgtgacctgaatcctcatatatgcttgcatggtgattgtgagaataccaaagggtccttcgtttgtcattgccagcttgggtacatggttcgcaagggtgccacgggatgtagcgatgttgacgagtgcgaagtggggggacataactgcgatagccacgccagctgcttgaacataccaggtagcttctcctgccgttgcctcccaggttgggtgggtgacggctttgagtgccacgacctggacgaatgtgttagccaagagcaccggtgctcgcctagaggtgattgcctcaacgtgcccggttcctaccggtgtacctgtcgtcaaggcttcgccggtgatgggttcttctgcgaggaccgcgacgagtgtgcagaaaacgtggacctttgtgataatggccagtgcctcaacgcccctggtggctaccgctgcgaatgcgagatgggcttcgatccaacagaagatcacagagcctgtcaggatgtggacgaatgcgcccagggcaacttgtgtgcatttggatcatgcgagaacctcccaggtatgttcagatgtatttgcaacggagggtacgaactggaccgtggcggagggaattgtactgacatcaatgaatgtgccgatccagtgaattgtataaacggggtgtgcatcaacacaccaggaagctatttatgctcttgcccgcaggacttcgagctgaatcctagcggagtaggttgtgttgatacacgggctggcaattgctttctggagacacatgatcggggagattccgggattagctgctccgctgaaattggcgtgggcgtgactcgtgcttcttgctgttgtagcctcggacgcgcatgggggaatccttgtgagctgtgcccgatggccaatacgaccgagtatcggacactctgtccagggggtgagggcttccagcccaaccgtattaccgttatcctggaggatatagacgaatgccaggagctcccgggtctgtgccaggggggtgactgcgtaaatacctttggttctttccagtgcgagtgccccccagggtatcacctttccgagcacacccggatctgtgaggatatcgatgaatgtagcactcatagtgggatctgtggccctggaacctgttacaataccctgggcaactatacctgcgtgtgcccagcggagtacctgcaggtgaatggcggaaacaactgtatggacatgcgaaaatccgtgtgctttcgtcactacaacggtacctgtcagaacgagctcgcttttaatgtcaccagaaaaatgtgctgctgctcgtataatataggacaggcatggaatagaccttgtgaagcctgtcctacacctatttctcccgattatcagattctctgcggcaatcaagccccagggttcctgacagacattcatacaggcaagccactcgatatagatgagtgcggtgagataccggctatatgtgccaacggtatatgcattaaccaaatcggcagcttccgctgcgaatgtcccgctggcttcaactataattccattttgttggcctgcgaggacgttgatgagtgtggtagccgagaaagtccttgccagcagaacgctgactgcataaacatacctggctcttatcggtgcaagtgcacacggggatacaagctatctccgggaggagcttgtgtggggaggaacgagtgtcgggaaatcccgaatgtgtgcagccacggagactgcatggataccgaaggctcttacatgtgcctctgtcatcggggtttccaggcgtcagccgaccaaaccctgtgcatggatatcgacgagtgcgatcggcagccttgcgggaacgggacctgtaaaaacataataggctcatataattgcctctgttttcctggttttgtggtgacacacaacggtgactgcgtcgacttcgacgaatgtactacgctcgttggccaggtgtgtagatttggccattgcttaaacacagccggatcctttcactgcttgtgtcaggacggattcgaactaacagcggacgggaaaaactgcgttgataccaatgaatgtttaagcctggctggtacatgtctgcccggtacctgccaaaacttggaaggttcatttcgatgcatctgtccccctggattccaggttcagtctgatcactgcattgacatcgatgagtgctcagaggagccgaatctttgtctgtttggaacgtgtacgaattctccgggatccttccagtgcctgtgtccacctggttttgtgttgtccgacaacgggcatagatgttttgacaccagacagagcttttgttttacaagatttgaagctggaaagtgtagcgtacccaaggccttcaacacgaccaaaacaagatgttgctgtagcaagagacccggtgaggggtggggggacccttgtgagctgtgtcctcaggaggggtctgctgcgtttcaggagctgtgcccttttggacacggtgccgtgccagggcctgatgactctagggaagacgttaatgagtgcgccgagaatccaggcgtgtgtaccaacggcgtgtgcgtaaatacagacggaagtttccggtgcgaatgccctttcggctacagcctagatttcactgggatcaactgcgtcgacaccgacgaatgcagtgtagggcatccctgcggtcaggggacctgcaccaatgtaattggaggattcgaatgcgcatgcgccgatggattcgagcctgggctgatgatgacctgcgaagatatcgacgagtgttctcttaatccccttttgtgcgctttccgatgccacaacacagaaggatcctacttatgcacatgtcccgcaggctacacccttagggaggacggcgcaatgtgcagagacgtggacgaatgcgccgacggccagcaggactgtcacgcaagaggcatggaatgtaaaaatctgatcgggactttcgcctgtgtgtgcccaccaggcatgagacctttgcctgggtcaggggagggatgcacagatgataacgagtgtcatgctcaacccgatctgtgcgtgaacggccgttgcgtaaacacagctggctcttttcggtgcgattgcgacgaaggcttccagccttcaccgaccctcaccgaatgtcacgacatcaggcagggcccttgctttgccgaggttctgcagactatgtgtcgcagcctgtcaagtagcagcgaggccgttacgagggcagaatgctgttgtggcggtggcagaggttggggtccccgttgtgagctctgtcctcttcctggcacgtcagcctaccggaagctttgcccccatggctccggctacacggccgaggggagagatgtggatgagtgcagaatgctggcacacctttgcgcccatggagagtgcatcaactcactcggatcctttcgctgccattgccaggctggttacacaccagacgcgacagcaacaacttgcctggacatggatgagtgttcacaagtgcccaaaccatgtacgttcctgtgtaaaaataccaaggggtcatttctctgttcctgccctaggggatatctactggaggaagatgggagaacttgtaaagacctcgacgagtgcacatctaggcagcacaattgtcagttcctttgcgtgaataccgtaggcgcattcacatgtcggtgtcctccaggcttcactcagcatcaccaggcttgtttcgacaacgacgaatgtagtgcccaacctggcccatgtggtgcccacgggcattgccacaacacccctggaagtttccgctgcgagtgtcaccagggcttcactcttgtgagcagcggccatggatgcgaggacgtgaacgaatgtgatggcccacaccgatgtcagcacgggtgtcagaatcaacttgggggttacaggtgttcctgcccgcagggcttcactcagcacagccaatgggctcagtgtgttgatgaaaatgagtgtgcgctgtcaccgcctacatgtggatcagcttcttgcagaaatacattgggcggattccgatgtgtctgtccatccggattcgactttgaccaggcattgggcggatgtcaggaagtggacgagtgcgccggacggaggggaccgtgttcttacagttgcgcaaatactcctggcggtttcctctgtggctgtccacaagggtattttagagcgggtcaaggccactgcgttagcggacttggtttctcccccggaccgcaagacacccctgataaagaggagctgctcagctcagaggcatgttatgaatgcaagatcaatgggctaagtccacgcgataggccccgacggagcgcacacagggatcatcaagtcaatcttgccacattggactctgaggccttgctgaccctgggccttaatctgtcccatcttggcagggccgagagaatactcgagctcaggcccgctctcgaaggcctcgaaggacggattcgctatgtcattgtgagagggaacgaacagggctttttccggatgcatcacctgcgtggtgtgtcttctctacagctgggccgacgacgtcccggacccggaacctataggcttgaggtggtgagccacatggcaggtccttggggtgtacagcccgaagggcagcccggaccgtggggccaggccttacggcttaaggttcaactgcagctcctgtac

SEQ ID NO: 11851 - DNA, 291 bp, synthetic construct
  misc_feature 1..291: note = source = /note="Description of Artificial Sequence: Synthetic coding sequence"
  source 1..291: mol_type = other DNA
atgagggtaaccagtgccacctgtgccctgctgctggctctcatttgctctgttcagctcggggatgcctgtctggatattgataagctcttggccaacgtggtgttcgacgtatcgcaggaccttttgaaagaggaattggccaggtataatccctcacccctcactgaggagtcattcctgaatgtgcagcagtgtttcgccaacgttagtgtcactgagaggttcgctcactcagttgtgattaaaaaaatcctccagagcaacgattgtatcgaggcagccttctag

SEQ ID NO: 11852 - DNA, 1890 bp, synthetic construct
  misc_feature 1..1890: note = source = /note="Description of Artificial Sequence: Synthetic coding sequence"
  source 1..1890: mol_type = other DNA
atgcagcaggatggtctgggcgtgggtaccaggaatggctcaggcaaagggaggtctgtgcatccctcctggccttggtgcgccccacgtccccttcggtatttcggtagggatgcaagggccaggcgagcccagacagcagcaatggccttgctagccggaggtttatcacgaggtttaggaagtcatcccgcagcagcaggacgcgatgccgtagtcttcgtttggctactcctgagtacatggtgcaccgcccctgctcgcgctattcaggtgactgtcagcaatccgtaccatgttgtgatcttatttcagcccgtgacgctcccctgtacttaccaaatgacatccactcctacccagcccatcgtcatttggaagtacaaatcattttgcagagacagaatcgccgatgcctttagccccgcttctgtcgacaatcagctcaatgctcagttagctgctggaaaccccggttataacccatacgttgaatgccaggactcggttcgcaccgtgcgggtggtggctaccaaacagggcaacgccgtgaccctcggcgactattaccaaggccgaagaatcacaattactggaaatgcagatctgacattcgatcaaacagcctggggagatagcggcgtgtactactgcagtgttgtgagcgctcaggacttgcaggggaataatgaagcttatgccgaactgatagttctcgattggttgttcgttgtggtggtgtgcttggcagcatttctgatttttctattactcggaatttgctggtgccagtgttgcccccatacttgttgttgttatgtgaggtgtccttgttgtcccgacaaatgctgctgtccagaggcattgtatgcggctggcaaggcggcaacctccggggtacccagtatctacgcgccttcaacatacgcccacctctcccctgctaaaaccccaccccctcccgctatgatccccatgggtccagcctacaatggatatcccggtggataccccggagacgttgatagatctagttcggccggaggacagggatcctatgtgcccctcttgcgagacaccgattctagcgtggcttcagtacggtccgggtatagaatccaggccagtcagcaggacgactctatgcgggtgctatactacatggagaaagagttagccaatttcgatccgagcaggccaggtccgccatccggtagggtcgagcgggcaatgtccgaggtgacctctttacatgaggatgattggaggtcccgaccgtctcgtgggcctgccctgacacctatcagggatgaggagtgggggggtcactcgccccgaagccctagagggtgggatcaggagcctgctagagagcaggcgggtggcggatggcgggcacgcaggccgagagcgcgaagcgtggacgcgcttgacgatctgactcctccatctaccgcagaatccggatccaggtctcccacctccaacggcggaaggtctagggcctatatgcctcccaggtcccgaagtagggatgacttgtacgaccaggatgacagcagggattttcctaggagtcgggacccgcactacgacgacttccgctctagggagcgaccgccagcggatccaaggtcccatcaccaccggacccgggacccgagggataatggaagtcgatccggggacctgccctatgacggcagacttctggaggaggccgtccgtaaaaagggaagtgaggagcgcaggcggccacataaagaggaggaagaggaggcttactatcctcccgctccacctccttatagtgagacggacagtcaggcctccagggagaggagactaaagaaaaatttggcgctatctagggaatcacttgttgtatag

SEQ ID NO: 11853 - RNA, 591 nt, synthetic construct
  misc_feature 1..591: note = source = /note="Description of Artificial Sequence: Synthetic coding sequence"
  source 1..591: mol_type = other RNA
atgtcaagacgatcaatgctgctggcgtgggctcttcctagcctgcttaggctgggggctgctcaggaaaccgaagaccccgcctgttgcagtccaatagtaccgcggaacgagtggaaggccctagcctcagaatgcgcccagcatttgtccctgccactcagatatgtcgtggtgtctcacaccgccggctccagctgcaataccccagctagctgtcagcaacaggcaaggaatgtccagcattatcatatgaagacacttgggtggtgcgatgttggttataattttttaatcggagaagacgggctcgtctatgagggcagaggttggaattttaccggagcccattcaggacacctgtggaatccaatgtcaataggaataagcttcatgggtaactatatggacagagtacctactccccaggctatccgtgccgctcagggcctactggcttgcggcgtcgcccagggcgcactcaggagtaattacgtgttgaagggccatcgcgatgtgcagcggacccttagcccaggcaaccaactttaccatttaatacagaattggccacattataggagtccttag

SEQ ID NO: 11854 - RNA, 1056 nt, synthetic construct
  misc_feature 1..1056: note = source = /note="Description of Artificial Sequence: Synthetic coding sequence"
  source 1..1056: mol_type = other RNA
atggaagctttcgcactgggacccgcaaggagaggacgtaggagaacgcgagccgccggttcattactctcaagggctgccatcttattattcataagcgctttccttgttcgagtccctagctccgtggggcatctagttaggctccccagagcattcaggttgaccaaggattcggtcaagatagtagggtctactagtttccctgtcaaagcctacgtcatgcttcaccagaagagtccacacgtcctgtgcgtcacccaacaattacgtaacgccgaactaatagatcccagtttccaatggtatggtcctaaggggaaggttgtgtctgtcgaaaatcggactgcacaaattacgagtactggaagcctggtgttccagaacttcgaagagtccatgtcggggatttacacttgctttctggagtacaagcccacagtggaagaaattgttaagagactccagctcaagtatgcgatctatgcatacagggagccacattattactaccaattcaccgcacgatatcacgccgctccatgcaacagtatctacaatatcagcttcgagaagaagttgttacagatcctatctaaactcctactggacctctcgtgtgagattagcctgctcaagtcagagtgtcatagagttaaaatgcaacgtgccggcctgcagaatgagctgttcttcgccttctcggttagctccctggatactgagaaaggccccaaacgctgcacggaccataattgcgagccctataaacgcttgtttaaggcaaagaatttaattgaacggtttttcaatcagcaggttgaaatcctggggcggagagcagagcagctgccgcagatttattatattgagggcacacttcagatggtgtggattaatcggtgtttccccggctatggcatgaacgtgcaacagcaccctaagtgtcccgagtgttgtgtgatctgttctccagggtcctataaccctcgcgacggaatccattgcctgcaatgcaactcttccttggtgtatggagccaagacctgtctatag

SEQ ID NO: 11855 - RNA, 420 nt, synthetic construct
  misc_feature 1..420: note = source = /note="Description of Artificial Sequence: Synthetic coding sequence"
  source 1..420: mol_type = other RNA
atggaaacaaacgtgttccacctcatgttgtgcgttactagcgcccggacgcataagtcaacgtctctgtgcttcggacactttaattcctacccttcactccccctgatccacgacctccttctagagatttcatttcagctctctgccccacatgaagacgcaaggctcactccagaagaacttgagcgcgcctctctgttgcagatcctccctgaaatgcttggcgcagaacggggcgacatcctccggaaggcggactcttctacaaatatatttaaccctcgcggaaacctcaggaaattccaagacttctccgggcaagacccaaacatccttttaagccacctgctcgcacggatctggaaaccctacaagaaaagagagaccccagattgtttctggaaatattgtgtatag

SEQ ID NO: 11856 - RNA, 606 nt, synthetic construct
  misc_feature 1..606: note = source = /note="Description of Artificial Sequence: Synthetic coding sequence"
  source 1..606: mol_type = other RNA
atgggttcggggcgccgtgctctttccgccgtgcccgcagtcctgctggtgcttactcttcccggacttcctgtatgggcccagaacgacactgaaccgatagtgctggaaggcaagtgcctagttgtatgtgactccaatccggcaaccgattcaaagggtagctcctcttcccctttaggcatatcagtccgggctgctaactccaaggtagccttttccgccgttagatccaccaaccatgaaccttccgaaatgtccaataaaaccagaatcatctattttgaccaaatcctggtcaacgttggcaacttctttacactggagagcgtgtttgttgctcccagaaaaggaatctacagtttttccttccatgtaattaaagtgtatcagtctcagactatccaggttaatttgatgctcaatggtaagcccgtgatcagtgcattcgccggagacaaggacgttactcgagaggctgccaccaatggtgtccttctatatctcgataaagaagacaaagtctatctgaagctcgaaaagggaaatctggtgggcggttggcagtactctacatttagcggatttctggtgtttccactatag

SEQ ID NO: 11857 - RNA, 264 nt, synthetic construct
  misc_feature 1..264: note = source = /note="Description of Artificial Sequence: Synthetic coding sequence"
  source 1..264: mol_type = other RNA
atgaaagtgttgcgagcttggctcttatgcctgctgatgctggggctggctcttcgcggggctgcttcccgcacacaccggcactctatggagatccgaacccctgatatcaaccccgcatggtacgcttctcggggaatccgacctgtaggaagattcggtcgcagaagggctacgctgggtgacgtgcctaagccaggcctccgccctaggctaacgtgctttccattggaaggaggtgctatgtcatcccaggatggctag

SEQ ID NO: 11858 - RNA, 1098 nt, synthetic construct
  misc_feature 1..1098: note = source = /note="Description of Artificial Sequence: Synthetic coding sequence"
  source 1..1098: mol_type = other RNA
atgccaggcggtaagaaggtcgctggaggtgggtcatcaggagctacacccaccagtgccgcagctactgcccccagcggagtgcggcggcttgaaacatcagaaggaacgagtgcccagcgcgatgaggaaccagaagaggagggtgaagaagatctgcgcgatggaggcgttcctttcttcgtgaatcgtggcggtctgccagtcgatgaggcgacctgggagcgaatgtggaagcacgtggccaaaatccatcccgatggagagaaagtcgcacagaggatcaggggagccacagacctgccaaagatacccataccatctgtccccacatttcaaccaagtacacccgttcccgaaaggcttgaggccgtccagcgttacattagagaactccaatacaatcatacaggcacccagttcttcgagatcaaaaagtcccgcccattaacgggtctcatggacctggctaaggagatgactaaggaagccctgcctatcaagtgtttagaggctgtcattctgggcatatatctgaccaattctatgcctactctggagagattcccgatatccttcaaaacttacttttctggaaactatttcagacacatagtactgggtgtcaacttcgccgggcgttacggagccttaggcatgagtcgtcgtgaagacttgatgtataagccaccagcatttcgaacactcagcgagttagtcctggattttgaagccgcgtacggccgttgttggcacgtactcaaaaaagtgaagctcggtcagagcgtatcccacgacccacacagtgtagagcagatagaatggaagcacagcgtccttgacgttgaaagactcgggagggatgatttccggaaggaactcgagaggcacgcacgggatatgcggctcaaaatcggcaagggcacaggccctcctagtccaacaaaagaccgcaagaaggatgtgagtagcccacagcgtgcccagagtagtccccatcgcaggaattcccggtctgagaggcggccttctggggacaagaaaacttccgagccaaaggctatgccagaccttaatggatatcaaatccgggtgtag

SEQ ID NO: 11859 - RNA, 1377 nt, synthetic construct
  misc_feature 1..1377: note = source = /note="Description of Artificial Sequence: Synthetic coding sequence"
  source 1..1377: mol_type = other RNA
atggcatgggcgtcaagattggggctgctgttggccctgctgctaccggttgtgggcgcaagcacacccggcaccgtggtgagactaaacaaggccgcgttgtcatatgtgtccgagatcggcaaggctcccctccagagggccctgcaggtgaccgtcccacactttcttgactggagcggcgaagctctgcagcccacacgcattcgaatccttaacgttcatgtgcctagacttcacttaaagttcatcgctgggttcggtgtacgccttttggccgccgctaatttcacctttaaggtgtttcgcgctcctgaaccattagagctcaccctacccgtggagctgcttgcggacacccgagtgacccagagcagtatccggactcccgtcgtgtctatctccgcttgcagcctcttctctggccacgcaaacgagttcgatggctccaactctacgagccatgcattactggtccttgtccagaaacacattaaggccgtgttatctaataaactgtgtctttcaattagcaatctggttcaaggtgtaaatgtgcacctgggtactctcattggtctcaatccagtcggccccgagagtcagattagatacagcatggtctccgtgccaactgtgacatccgactatatttctttggaagtgaacgcggtgctattcctactcggtaaacccatcattctgcctaccgacgccaccccgtttgtgttgccccgtcatgtcggtaccgagggcagcatggctaccgttggtcttagtcagcaactcttcgacagcgctctactattattgcagaaggctggcgccttgaacctggacatcaccggccaactccgcagcgacgacaacctcctcaatacctcggctctgggcaggctcattcccgaggtcgcccgccagttcccagagcccatgccagtggtcctgaaagtcagactaggcgcaacaccagtggctatgctgcatactaataacgccaccctcagactgcagccatttgtagaggtcctcgccaccgcctcaaactccgcttttcaatccttgttttcactcgacgtcgtggtaaacttaagactgcagctgtccgtctctaaagtcaaattgcaaggcactacttccgttctcggcgatgtccagcttactgtggcctcaagtaatgtggggttcatagacacagatcaagtcaggacgctaatgggcactgtgtttgaaaaacccctgcttgatcatctgaatgcactgctcgcgatgggaattgctctccctggcgtggtgaacttacattatgtagctccggagatcttcgtgtatgagggctacgtggtcatctctagcggactgttttaccagagctag

SEQ ID NO: 11860 - RNA, 1815 nt, synthetic construct
  misc_feature 1..1815: note = source = /note="Description of Artificial Sequence: Synthetic coding sequence"
  source 1..1815: mol_type = other RNA
atgatgcgggccgtgtgggaggctctggcagccctcgccgctgtcgcctgcctggtaggagctgtcaggggtggacctggactgagcatgtttgccggacaagcggcacagccagacccatgttcagacgagaacggacaccctcgccgatgtatccctgatttcgtcaacgccgcctttgggaaagacgtccgggtcagcagcacctgtggccgcccaccggctcgttattgcgtggtaagcgaacggggcgaggagagattgcggagctgccatttgtgtaatgccagtgaccctaagaaagcccaccccccagcatttcttactgatttgaataacccacataatctcacatgttggcagtccgagaattatttgcaattcccccataatgtgaccttgaccctcagcttaggcaagaagtttgaagtaacttacgtcagcctacagttttgctcaccaaggcccgagtccatggctatctacaaaagcatggactacggccgcacatgggtccctttccagttctacagtacacagtgccgcaaaatgtataatagaccccatagagccccaataaccaaacagaacgagcaggaagccgtatgcacagattcgcacacagacatgcgcccactgtccggagggctaatcgctttctccacccttgacggccgcccatccgctcacgatttcgacaactcaccagtgctccaggactgggttactgcaaccgatatcagggtcgcatttagccgattgcacacttttggtgatgagaatgaggacgactccgaattggcgcgcgactcgtatttttacgccgtatctgacctgcaagtgggcgggcgctgtaagtgtaatggccacgccgcccggtgtgtgagggatagagatgattccctggtttgtgactgtagacataatacagcaggccctgagtgcgaccggtgtaaaccttttcattacgacagaccatggcagcgagctaccgcacgggaggccaatgagtgtgtagcctgcaattgtaatctccatgctcggcggtgccggtttaacatggaactatataaactgagtggccgcaagagcggcggtgtgtgtttgaactgcaggcataacacagcaggacgccactgtcactattgtaaggaggggtattacagggatatggggaaacctataacgcacaggaaggcatgtaaggcctgcgattgtcatcccgtgggggctgctgggaagacttgcaatcaaacaactggccagtgtccctgcaaggacggagttaccggtatcacatgtaacaggtgcgcgaaaggttatcagcaatcccgcagccctatagcaccatgtattaaaataccagtggcgccacccacaactgccgcgtcgtccgtggaggagcctgaggattgcgattcctattgtaaagccagtaagggaaagctgaaaattaacatgaaaaaatattgcaagaaggactatgccgtacagatccacattttaaaggctgacaaggcaggcgactggtggaagtttacagtcaacataattagcgtctataaacaaggcactagtaggatcagaaggggagaccaaagcttatggattagatctagggatattgcatgtaagtgccctaagataaaacctctgaaaaaatacctgctgctgggcaacgcagaggattctccggatcaatcaggaattgtcgccgacaaatcgtccctagtgattcaatggagggacacatgggcgcggcgtctaagaaagtttcagcagcgcgaaaagaaaggcaagtgcaaaaaggcctag

SEQ ID NO: 11861 - RNA, 675 nt, synthetic construct
  misc_feature 1..675: note = source = /note="Description of Artificial Sequence: Synthetic coding sequence"
  source 1..675: mol_type = other RNA
atgccagggcgcgcacccctgcggaccgtgcctggtgccctgggcgcctggttgttgggaggcctttgggcatggactctgtgcggtctgtgttcactcggagccgtgggagcccctcggccttgtcaagctcctcagcagtgggagggccgccaagttatgtatcagcaaagcagcgggagaaacagccgcgcccttctgagctacgatggattgaatcaacgtgtgagagttctggatgagcgtaaggctctgataccgtgcaaaagattgttcgagtacatcttactatataaggacggggtaatgttccaaattgatcaggctacgaagcaatgctctaaaatgacgctgacacagccatgggatcctcttgatattccccagaacagcactttcgaggatcagtacagcataggcggtccccaggagcaaatcacagtacaggagtggagcgacaggaaatccgcacgctcctatgaaacgtggatcggcatctacacagttaaagattgctaccccgtgcaagagacatttaccattaattactcggtcatactgtcgaccagattcttcgatatacagttgggaataaaggatccaagcgtgtttacaccaccatcaacctgtcagatggcccagctggaaaagatgagtgaagactgtagctggtag

SEQ ID NO: 11862 - RNA, 5106 nt, synthetic construct
  misc_feature 1..5106: note = source = /note="Description of Artificial Sequence: Synthetic coding sequence"
  source 1..5106: mol_type = other RNA
atggggtttctgcccaagctccttctgctggcgagttttttccccgccggtcaggcatcatggggtgtgtcaagtcctcaggatgtgcagggtgtaaaaggcagttgcttgctgataccttgtattttcagttttcctgccgacgttgaagtccctgacgggattaccgcaatatggtattacgactatagcggccaacgacaggtggtgagccattccgctgatcccaaactggttgaggcgcgattccggggtcggaccgaatttatgggaaatcctgagcatcgtgtgtgcaatttgctcctcaaagacctccagccagaagacagcggcagctacaacttccgtttcgagatctcggaagtgaaccgttggtctgacgtgaagggcaccctcgttacggtcacagaagagccccgcgtgcccaccatcgcttcccccgtcgagctcctggaaggcaccgaggtagactttaattgcagcacaccttatgtctgcctgcaggaacaggttcggctgcagtggcagggacaggatccagcaagaagcgtgacatttaattcacagaaattcgagcctaccggcgtggggcacctggaaaccctacacatggctatgtcttggcaggaccatggacgcattctgcgctgtcaactaagtgtggcaaaccatagagcacagtccgaaatccatctccaggtgaaatacgcacccaaaggtgttaaaatcctgctgtccccctcggggcgaaatatcctgcccggagaattggtaacactaacctgccaagttaacagctcttatcccgctgtaagctcaatcaaatggttgaaggatggagttcgcctgcaaacaaagaccggagtcctacatttgcctcaggcagcctggagcgatgccggagtttacacctgccaagctgaaaacggtgtaggttcactggtgtctcccccaatctccctgcatatctttatggccgaagttcaagtctcccccgccggacctatcctcgagaatcagacagtcaccctcgtatgtaataccccgaacgaggcaccttccgacctccgttacagctggtacaaaaatcacgtgctgttagaggacgcacatagtcataccctccggctgcacctcgccacccgcgccgatacagggttttatttttgcgaagtccagaacgtacacgggagtgaaagaagcggacccgtatctgtagtggtgaaccacccccctctgactccagtgctgactgcctttcttgaaacccaggctggcctggtgggcatcctccactgctccgtagtatcggagccgctggctacgctggtgctgagtcatggaggccacattctcgcctccactagcggagattccgatcatagtcctagattttccgggacttccggcccaaattctctcagattggaaattcgcgatctggaggagaccgacagcggtgaatacaaatgcagcgccaccaacagcctaggcaacgctactagtacactggactttcatgctaacgccgctcggctcctgatctctccagccgcagaggtggttgaagggcaagcggtgaccctttcctgcagatccgggctgtctcctacgccggacgcaaggttctcctggtacctgaatggcgctttgttacacgagggtcccggatcctcactgctgctgcctgccgccagctcaaccgacgccggctcctaccattgtagggcccgcgatggtcattctgcttcaggcccaagctctccggccgtcctgacagtactctacccgccccggcaacctacttttacaactcggttagatctagatgctgctggggcaggcgccgggaggcgaggtttgctcctgtgcagagttgatagcgacccccctgcgcgcttgcaactgctccacaaggatcgcgtggtggccactagtttgcctagtggcggcggctgctccacttgcggcggctgtagcccacggatgaaggtcacaaaagcccccaatctcttgcgggtcgagatacacaatcctctactcgaagaagaagggttatatctgtgtgaggcttccaatgccctgggaaatgcatctactagtgccacattcaatggacaagctacggttctggcaattgccccctctcacaccctgcaagagggaacggaggccaatctaacctgtaatgtgtctcgcgaggcagcagggtcccccgccaatttttcctggtttagaaacggcgtcctgtgggcacagggaccactggaaacggttactcttcttcccgtcgccagaactgatgccgctctttacgcctgcagaatcctgacagaagcaggcgcccaactctctacccctgtcttgttgtcagtcttgtatccgcctgacaggcctaagctgtccgccctgctggatatggggcaagggcacatggctttatttatatgtactgtcgacagcagaccgctggccctcttagcgctgttccatggagaacaccttctcgcaacctctctgggcccacaggtaccttctcacggcaggtttcaggccaaagctgaagcaaacagcctgaaactggaagtgagggaattggggctaggtgattccggctcctaccgatgcgaagcaaccaatgtgctgggcagcagtaataccagcctcttcttccaggttcgtggagcatgggtgcaagtttctccctcaccagaactgcaggagggtcaggccgtcgttctgagctgccaagtgcataccggcgtgccagagggtacaagttatcggtggtaccgggacggacaacctctccaggagagtacaagtgccacgcttcggttcgccgcgatcacactgacacaagcaggcgcttatcattgccaggcacaggcccctggtagtgcaaccactagcttagccgcccccatctccttgcatgtatcctacgctcctcgccatgtgaccctcactactctcatggatactgggcccgggcggctaggattgcttctgtgccgcgtcgactcagacccacctgctcagcttcggttgctccacggagaccggctcgtggcatctacactgcagggtgtcggaggccccgagggaagttctccaagactgcatgtcgctgtcgctccaaatactttgcgtctggaaatccacggtgctatgttggaagatgaaggggtatatatttgtgaggccagtaacaccctggggcaggccagcgcttcagctgattttgatgcccaagcagttaacgttcaagtctggccaggtgccactgtcagagaaggtcagcttgtaaacttgacctgtttggtgtggaccactcaccccgctcagttgacttacacatggtatcaggacgggcagcaaaggttggatgcccatagtataccattgccaaacgtgacagttcgcgatgctactagctataggtgcggagtgggccctcctgggcgggccccacgcctgagccggccgattactctcgatgtgctatacgcgcccagaaacttgcgactcacatatctcctcgagtcgcacggaggacagctcgctctggtcctgtgtactgtggactcgcggcctcctgctcagctggcactgagtcacgccgggcgtctgttagcttcttccacggcggcctctgtgcctaacaccctgagactcgagctgcgcgggccacagccccgagacgagggattctactcgtgcagtgctcggtctccgctgggtcaggccaacacgagtttggagctgcgcctggagggagttagagtaatccttgccccagaagcagctgtccctgaaggggcccctattactgtcacttgtgccgaccctgcagcccacgcgccgaccctctatacatggtaccataacggtcgctggctccaggagggacctgctgcctctttgtcttttctcgttgccaccagggctcacgccggcgcctattcttgccaggcccaagacgcccaaggaaccagatctagccggccagccgcccttcaggtgctctatgcgccccaggatgccgttctttcatcatttagggatagtcgagcccgatcaatggccgtcattcaatgtacagtcgattcagagccaccagctgaactggcactgagtcacgacgggaaagtcctggccacatcgagtggggtccacagcctggccagcgggacaggacatgtacaggtagctagaaacgcgctgaggttgcaggtccaagacgtgcctgccggagatgacacctacgtgtgcactgcgcagaatttactcggttccatctcaactataggccgtctgcaggtggagggcgcacgagtggtggccgagcccgggctggatgtgccagagggagctgcgcttaacctgagttgtaggctgttgggtggtccaggtcctgtgggtaactccacctttgcatggttctggaacgaccggcggctccacgccgagcccgtgccaaccttggccttcacccacgttgcccgggctcaagcaggcatgtaccattgcttggccgaattgccgacaggggcagccgcaagcgccccagtgatgctgagagttctctatcctcctaagacgccaactatgatggtgtttgtggagcccgaaggcggactgaggggtattttggactgcagggtggactcagagccactggcttccctcacactgcacttgggcagtcgattagtggcctcatcgcaacctcagggagctcccgccgagccccacatccatgtgctggccagcccaaatgcactgcgggtcgacatagaggccttacgacctagtgaccagggcgagtacatttgctccgctagcaacgtgctgggcagcgcttccacctcaacatatttcggcgttcgagctctccaccgtttgcaccaatttcaacagcttctctgggtgctagggttgctcgttggcctgctgctgttgctactggggctcggagcctgttacacctggagcagcttgattctgatgcaaccgcatgtccgccctcaacctgttcctcacccatgggccgatcaatggtgctgcctgccatctggtggtgaatcgggacagaatttatag

SEQ ID NO: 11863 - RNA, 708 nt, synthetic construct
  misc_feature 1..708: note = source = /note="Description of Artificial Sequence: Synthetic coding sequence"
  source 1..708: mol_type = other RNA
atgaccgtcctcgccccagcctggagcccgaccacgtatttgctcctgcttctcctactgtcctcaggcctatccggcacacaggactgcagcttccaacattccccgattagcagtgattttgccgtaaaaatccgggaactgtccgactatttgctccaagactatccggttacagtagctagtaatctgcaagacgaagagttgtgtggcggcctgtggcggttggtcttggcccagaggtggatggaaaggctgaagaccgtcgctggctcaaaaatgcagggattattggagcgggtgaatacagagatccacttcgtcaccaagtgtgcctttcagcctccaccttcctgtttgcgatttgtacagaccaacatcagccgactcctacaagaaaccagtgagcagctcgtggctctgaagccatggatcacccgacagaatttcagcagatgccttgaacttcagtgccaacctgactcgtcaaccctgccacccccatggtcccctcggcctcttgaggcgacagcccccacagcccctcagccaccactacttctactcctcctgttacccgtgggcttactgttactcgccgccgcttggtgcctgcactggcagcgcacccgaagacgaacccccaggccaggggaacaggtaccccccgtgccctcaccccaagacctgctgctggtggagcattag

SEQ ID NO: 11864 - RNA, 5472 nt, synthetic construct
  misc_feature 1..5472: note = source = /note="Description of Artificial Sequence: Synthetic coding sequence"
  source 1..5472: mol_type = other RNA
atggctctctcctctgcatggagatccgtccttcccctttggttgttgtggtctgcagcttgtagccgggcagctagcggagatgataatgcttttccttttgatatcgaaggctcctccgccgttgggcggcaagacccgccagaaacgagtgagcctagggtagccttgggccggttgccacccgctgccgagaaatgtaatgccggcttctttcataccttatctggagaatgtgtgccatgcgattgcaacgggaattccaatgaatgccttgatggcagcgggtactgtgtccattgtcagagaaacaccaccggggagcactgcgagaaatgcctggatgggtacattggagatagcattcgaggggctcctcaattttgccagccgtgcccttgcccactgccccacttagcaaactttgccgaatcctgctaccggaaaaacggagccgtacgctgcatttgcaatgaaaattacgctggcccaaactgtgagcggtgcgctcctgggtactacgggaaccctttactaataggctccacttgtaaaaaatgcgattgttcaggcaactctgatccgaatcttattttcgaggactgcgatgaagtgactggtcagtgtaggaactgtcttaggaataccaccggctttaagtgcgaacggtgcgcccctgggtactacggcgatgctcgcattgccaaaaattgtgctgtttgtaactgcgggggcggaccctgcgacagcgttaccggcgaatgtctggaggagggtttcgagccacctaccggaatggactgtccaacgatttcttgtgataaatgcgtctgggacttaacagatgcactccgactggcagccctcagtatcgaggaaggcaagtccggagtgctgagtgtctcctctggagctgccgctcaccgtcacgtgaatgagattaatgcgaccatttatctgctgaagaccaaactttctgagcgtgagaaccagtacgcactgcgcaagatccagatcaacaacgccgagaacacaatgaagtccttgctctcagatgtggaggagctggtggaaaaggagaatcaggcctcaagaaaagggcaactcgtccagaaggaatcgatggatactatcaatcacgcatcgcagcttgttgaacaggcccatgacatgagggacaagattcaggagattaataacaagatgttgtactacggcgaagagcatgagctgagccctaaagaaatcagcgaaaaacttgtgctggcccagaagatgttagaggaaattagaagtagacagcccttcttcactcaaagggaactggtggacgaggaggccgacgaggcttacgagctgctgtcacaagccgagtcctggcaaaggttgcataacgagacccgaacgttattcccggtagtgctggaacaacttgacgactataatgccaaactgtctgatctgcaagaggctctggaccaagccctaaactatgtgcgcgatgccgaggatatgaatcgcgccactgccgcaaggcagcgcgaccatgaaaaacagcaagagcgtgtgagagagcaaatggaagtcgtgaatatgtcgctgtcaactagtgccgacagtcttactaccccccgacttacgctgtcagaactcgatgacatcattaaaaatgcctcagggatctacgccgagattgacggagctaagagcgagctccaggtcaaactgtccaatctgtctaacctctctcacgatcttgtgcaggaggccattgatcatgcccaggatctccagcaggaggcgaacgagctgagcaggaagctccattcgtccgatatgaacggactggttcaaaaggctttggacgcatcaaacgtgtatgaaaatattgtgaactatgtcagcgaggccaatgaaaccgccgaatttgccctcaatactactgataggatttatgacgcagtgtcagggatcgatacccagataatatatcacaaagatgaatctgagaatttgctgaatcaagcccgagagttacaagcaaaagccgagagcagtagcgatgaggcagttgccgacacgagtcggcgagtgggtggcgctctcgcgcgcaaatccgccctgaaaactagactctctgatgctgtgaagcagctccaggctgcagagcgcggtgatgcccaacagagactggggcagtcccgcctaataaccgaagaagcaaacaggaccacgatggaagtgcaacaggccactgccccgatggctaataacctgaccaactggagccaaaacttgcagcattttgattcttctgcatacaatactgccgtgaattccgctagagacgccgttcgaaatctgaccgaggtggtgcctcagttgctggatcagctccggacagttgagcagaagcgcccagcaagcaacgtcagcgcctccatccaacgaatccgggagctaatcgctcagacgcgctcagtagcaagcaagattcaggtatctatgatgttcgatggccagagcgcagtcgaagtgcactccagaacatctatggacgacttgaaggccttcactagcctgtcactttacatgaagcctcccgtcaaaaggcccgaattaacagagaccgccgatcaatttatcctgtacctagggagtaagaacgctaaaaaggagtatatgggactggcgataaagaacgataacctagtgtacgtttataacctgggcacgaaagacgtggagattcccctcgactccaagcctgtgtctagttggcctgcttactttagcatcgtgaaaatcgagagagtcgggaaacatggcaaagtctttttaacagtccctagcttaagctctaccgccgaagaaaagtttatcaaaaagggcgaattctctggcgatgattcattacttgaccttgaccccgaagacacagtcttttacgtgggcggagtgccttctaactttaagttacccacgtcactgaatctgcctggatttgtgggttgtctagaactcgccactctaaacaatgatgtaattagtctgtataatttcaagcacatttacaatatggatccatccacctcggttccatgcgccagagataaacttgcatttacgcaatccagagctgcttcatacttcttcgacgggagtggatatgcagtcgtccgcgatatcacgcgtaggggcaaatttggtcaagtaaccaggtttgacatagaagtcaggactccagcagataatgggctgattctcctcatggtcaatggctccatgttttttcgcctagaaatgcgaaatggttacttacatgttttctacgacttcggcttctcagggggtcctgtgcatctggaggacacactgaagaaagcccagatcaacgacgcaaaatatcacgagatttctattatataccataacgataaaaagatgatcctcgtggttgaccggcgccacgttaaatcgatggacaacgagaagatgaaaatacccttcacagacatttacataggcggtgccccaccggagattctgcaatcccgtgccctcagagctcatctgcctctcgatatcaatttccggggatgtatgaaggggttccagttccagaagaaggatttcaatcttctcgagcagaccgagaccctgggcgtgggttacggctgccccgaggatagtttgatctccagaagagcctatttcaatggccagagcttcatagcctctattcagaagataagtttttttgacggcttcgagggggggttcaacttccggactctccagcccaatggcctgttattctactacgcctcaggctctgacgtcttctcaattagcctagataatggaacagtgataatggatgtgaaggggatcaaggtgcagagcgtggacaaacagtacaacgatggactgtcacatttcgttatctcctcggtgagccccacgcgatacgagctcattgtggacaaatctcgtgtgggctccaaaaaccctaccaaaggcaaaatcgagcagacacaggcctctgaaaaaaagttctattttggcgggtctcctatatccgcgcagtacgccaacttcactggatgcatttctaatgcttactttacaagagtcgaccgcgatgtggaagtggaggattttcagcggtacaccgaaaaggtgcacacgagcctgtatgaatgtcctatagagtcttctcctctgtttctgttgcacaagaaaggaaagaatctgtctaagccaaaagcgtcacagaacaagaagggcggcaagagcaaggacgcgccctcttgggaccctgtcgccttaaagctgcccgagcgaaatacccccaggaatagtcactgccatcttagcaattccccccgcgccattgagcatgcataccagtatggcggaacagcaaactccagacaggaatttgagcatttgaagggagatttcggtgcaaagagccagttttctatcagactcaggactcgaagtagccacggcatgatcttctatgtctcggatcaggaagaaaatgatttcatgaccttattccttgcccatgggagactcgtgtacatgttcaacgtgggtcataagaaattgaaaatccgttctcaagagaagtataatgacgggctgtggcatgacgtcatttttattagggagagaagcagcggacgcctagtcatagatggactgagagtgctggaagagtcgttgccacctactgaggccacttggaaaattaaaggaccaatctatctcggaggggtcgcacccggaaaagctgttaagaatgtacagatcaactccatctattccttcagcggctgcctatctaacctccagctgaacggggcctctatcacctccgcctcacagacattcagtgttaccccttgcttcgaaggaccgatggaaactggtacgtacttttctacagaaggcggatacgtggtacttgacgagagcttcaacatcggtctgaaattcgagattgccttcgaagtacgtccaaggtctagctcgggaacactcgtgcacggccatagcgtgaacggggaatacctcaacgtgcatatgaagaatggtcaggtcatcgtgaaagtgaacaatgggatcagggatttctctacttctgtgacacccaagcagtccctctgtgatggaagatggcatcgaattactgtgattagagactctaacgtcgtgcagttagatgttgattccgaagtgaatcacgtggtcggacctctcaacccaaaacccattgatcaccgggagccagttttcgttggaggcgtacctgagtccctgctcactccaagattggcccctagcaagccattcacgggttgtattagacattttgtgatcgatggccaccccgtgagcttttctaaagccgcccttgtaagtggagcagtctccatcaacagctgcccggccgcttag

SEQ ID NO: 11865 - RNA, 1434 nt, synthetic construct
  misc_feature 1..1434: note = source = /note="Description of Artificial Sequence: Synthetic coding sequence"
  source 1..1434: mol_type = other RNA
atgactagcaagttcctgctggtgtcttttatacttgccgctctttcgctcagcacaactttttctctccagcctgatcagcaaaaggtcctgctggtgtctttcgacggatttcgatgggattacctctataaggtgcccaccccccattttcattacataatgaagtacggagtccacgtcaaacaggtgacgaacgtttttattactaaaacgtaccccaaccactatacccttgtgacaggcctgttcgccgagaatcatgggatagtggccaatgatatgttcgaccccatccgtaacaagtcatttagcttagatcatatgaacatttacgattcaaagttctgggaggaagcaactccaatctggattaccaaccaacgcgccggtcatacttcaggagctgccatgtggcccggcacagatgtgaaaattcacaagaggtttccgacccattacatgccgtacaacgaatctgttagttttgaagaccgtgtagcaaagataattgagtggttcacttccaaagaacccattaaccttggtctactgtactgggaagatccagatgacatggggcatcacttgggacccgacagccctcttatggggcctgttatttctgacattgataaaaaactcgggtatctgatccaaatgctgaaaaaggccaagctatggaacaccttgaatctaattataacttctgaccacggaatgactcagtgttccgaagagagactgatcgaacttgatcagtatctggataaggatcactatacactgatcgaccaatctccagtcgctgctatcctgcctaaagaaggaaaatttgacgaagtttacgaagctctaactcacgctcaccctaacctcaccgtgtacaaaaaggaggatgtgcccgaacggtggcactacaagtataactccagaatccaaccaataatcgccgtggctgacgagggatggcatatcctacagaacaaatcagatgactttcttctgggaaatcacggctacgacaatgccctagccgatatgcaccccatatttcttgcacacgggcccgcattccgtaagaacttcagcaaagaagccatgaattcaactgacctgtatccccttctctgccacctccttaatataacggcaatgccacacaacgggagcttctggaacgtgcaagacctgctgaatagcgctatgccacgtgtcgttccctatactcaatctaccatcttgctgcctggatctgtcaaacccgctgaatacgaccaggaagggtcttatccatacttcataggcgtttcactcggcagcatcatcgttattgtgtttttcgtcatattcatcaagcatctgatccatagccagattcctgctctccaagacatgcacgccgaaatcgcccaaccattgctgcaggcctag

SEQ ID NO: 11866 - RNA, 1131 nt, synthetic construct
  misc_feature 1..1131: note = source = /note="Description of Artificial Sequence: Synthetic coding sequence"
  source 1..1131: mol_type = other RNA
atgctgaaaaaaatttctgtgggcgttgccggagatctgaatactgtgactatgaaactggggtgtgttctgatggcctgggccctgtatctgtctctgggggtcctgtgggttgcccaaatgctgctagctgcctcttttgaaactcttcaatgtgaagggcctgtgtgcacagaagaatccagctgccacacagaggacgatcttacggatgcaagggaggctggatttcaggtcaaagcttacacattttctgaaccattccaccttatagtgtcatatgactggttgatactccagggtcctgctaaaccagtgttcgaaggcgatttgttagtgttgagatgccaagcatggcaagattggccactgacacaggttacattctatcgtgatggctcagctctagggccccctggtcctaatcgagaattttccatcaccgtggtgcaaaaggccgattccggccattatcactgctcaggtatattccagtctccaggcccaggaattcccgaaaccgcaagtgtggttgcgattacagtgcaagaactcttccccgcaccaatcctgcgggccgttccctccgctgagccccaggctggttctccaatgacactatcatgtcaaacaaaactccctcttcagcgaagcgctgccagactgctgttctctttctataaggatggccgtatcgtgcaaagtagaggccttagcagcgagtttcagattcccacagccagcgaagatcacagcgggagctattggtgcgaagctgctacggaggacaatcaggtatggaagcagtcaccccagctggaaattcgcgtgcagggtgcatctagtagtgccgccccccccacccttaatccggctccgcaaaagtctgcggcccccggaactgcccctgaggaagctccaggtcccttgcctccccccccaacccccagcagtgaggaccccggtttcagtagtcccctgggcatgcctgatcctcatctctaccaccaaatgggactcttactgaaacatatgcaggacgtgcgggtactgctcggtcacctcttaatggaattgcgagagcttagcggacaccgcaagccaggcactactaaggcgaccgcagaatag

SEQ ID NO: 11867 - RNA, 1572 nt, synthetic construct
  misc_feature 1..1572: note = source = /note="Description of Artificial Sequence: Synthetic coding sequence"
  source 1..1572: mol_type = other RNA
atggccagaaaggcactgaagttggcttcttggacttccatggcgctggctgcctccggcatttacttttatagtaataagtaccttgatccgaacgactttggagcagtccgagtcgggagggcagtcgcaaccacggcagtcatttcttacgattatttgactagtcttaaaagcgtcccctacggatcagaggaatacctgcagctccgatccaaggttcacctccggtccgcgcgccggttatgcgagctgtgctgtgctaatcgaggaacgttcattaaagtgggacagcacctgggagcacttgattacttactccccgaggagtatacaagtaccctgaaagtcttacacagccaggcacctcagtcctccatgcaggagatccgccaggtgatccgggaagaccttggaaaggaaatacacgacttgtttcagagctttgatgacacccctctcggtaccgccagcctggcacaggttcacaaagctgttctgcacgacggccggaccgtggccgtgaaagtacagcatcctaaagtcagagcacagagctccaaagacatactactgatggaagtgctagtcctggctgtcaaacaactgtttcctgagtttgagtttatgtggcttgttgatgaagcgaagaagaacctcccccttgaactggattttctgaatgaggggcggaatgcagaaaaggttagccagatgttgcgccatttcgactttctgaaggtgccaagaatccattgggacctctctactgagcgggtgcttttaatggagttcgtcgacggcggccaggtaaacgatcgggattatatggagcggaacaaaatagatgtgaatgagatttcccgccatctgggtaagatgtactcagagatgatcttcgtaaacggatttgtgcactgcgacccacacccaggtaatgtcttggtccgcaaacatcctggcacgggtaaggctgaaattgtgcttttggatcacggtctatatcagatgttaaccgaagaatttaggctgaactactgccatctatggcaaagtcttatttggacggacatgaagcgtgtaaaggaatacagccaaaggctgggagccggcgatctgtaccccctgttcgcatgcatgctgacagcacggagctgggattctgtgaacagaggaatctcccaggcccccgtgacagcaaccgaggatctggagatacgaaacaatgccgcgaactatctgcctcaaataagtcacctcctcaaccatgtacctcggcagatgttattgatcctcaaaactaatgaccttcttcgcgggattgaggccgctctgggaactcgtgcatcagcatcaagcttcttgaacatgtcaagatgttgcatcagagccctcgctgagcataagaaaaagaacacttgctcattttttcggagaacgcagatcagttttagtgaggcttttaatctgtggcaaattaacctccacgagttgattctaagagtcaagggcctcaaactcgccgaccgcgtgctggccctgatctgctggcttttccccgcacccctttag

SEQ ID NO: 11868 - RNA, 1197 nt, synthetic construct
  misc_feature 1..1197: note = source = /note="Description of Artificial Sequence: Synthetic coding sequence"
  source 1..1197: mol_type = other RNA
atgtggctgttactgactatggccagccttatctccgtgcttggaactacacatggcctgtttggtaagctgcaccccggtagtcccgaagtaaccatgaacattagccaaatgatcacttattgggggtatccaaatgaggagtacgaagtggtgactgaggacggttatatccttgaagtaaaccggattccctacgggaagaaaaattccggcaataccggccagcgccctgtggtgttcctgcagcacggcctgctagcttccgccaccaattggatttccaatcttcctaacaattctctcgcattcatcctggcagacgcaggttacgatgtttggctaggcaactcaagagggaatacatgggcccggaggaacttgtactattctcctgatagcgtggagttttgggccttctcttttgacgaaatggcaaaatacgatctgcctgccaccatagactttatcgtaaaaaagaccggtcagaaacagctgcattacgttggtcattctcaggggactacaatcggcttcatcgctttttcgacaaatccctcactggccaaaagaatcaagaccttttacgcgctcgctcctgtagccaccgtgaaatataccaagtccttgatcaacaaacttcgtttcgtcccacagtcactcttcaagtttatttttggggataagatcttctaccctcacaatttcttcgaccaattcttagccaccgaagtgtgcagtagggaaatgctcaaccttttatgctccaacgccctgtttatcatttgtggttttgacagcaagaactttaatacatcgagactagacgtttacctgtctcataatccagctggcacatcagtccagaacatgtttcattggacccaagccgttaagtcgggaaaattccaggcctacgactggggctcccctgtgcagaaccgtatgcattacgaccagtcccagccaccctattataacgtgaccgcaatgaacgtgcctattgccgtgtggaatgggggaaaagacctgctggcggacccccaggatgtcggactgcttcttcctaaattaccaaaccttatataccataaagaaatccccttttacaaccaccttgacttcatatgggcaatggacgccccccaggaagtgtataatgatatcgtaagtatgattagtgaggataaaaagtag

SEQ ID NO: 11869 - RNA, 555 nt, synthetic construct
  misc_feature 1..555: note = source = /note="Description of Artificial Sequence: Synthetic coding sequence"
  source 1..555: mol_type = other RNA
atgagggggcagggcaggaaagagagtctaagtgattccagagatcttgatggatcctatgatcagcttacggatagtgtggacgacgaattcgaactaagtaccgtatgccataggccagagggcctagaacagttgcaagagcagacaaaattcacgagaaaagaacttcaggtgctgtatcgaggtttcaagaacgagtgtccatccgggattgttaacgaggagaatttcaaacagatttactcccaattttttcctcagggagatagtagcacttacgcgacctttctgttcaatgcattcgatactaatcacgacggatcagtgagctttgaagaaatgctcgatattatgaagagcatatacgatatgatgggcaagtacacataccctgcactcagggaggaagcacctcgcgagcacgtcgaaagtttctttcagaagatggaccggaataaggatggggtggtgacgatcgaggaattcatagagagttgtcagaaggtgcagctgcctgcactgtatatcacattaacatggacacaagcctag

SEQ ID NO: 11870 - RNA, 3900 nt, synthetic construct
  misc_feature 1..3900: note = source = /note="Description of Artificial Sequence: Synthetic coding sequence"
  source 1..3900: mol_type = other RNA
atgtctctgcaggagatgtttcgttttccaatgggactgttgttaggatccgtcctacttgtggccagcgcccctgctactctcgaaccacccgggtgcagcaataaggaacagcaagtgacagtgtcacacacctacaaaatcgatgttcctaagagcgcgcttgtccaggtggacgccgacccacagccactctcagatgacggtgcatcccttttggctcttggggaagcccgtgaggagcagaacattatcttcagacacaatatccgcctccaaacaccacagaaagattgcgagttggccgggagcgtacaagacctgttggccagggtgaagaagctggaggaggagatggtcgaaatgaaggaacagtgctcggcccagagatgttgtcaaggagttactgatctgtcaaggcactgttctggccacggtacttttagccttgagacctgcagctgccattgcgaggagggccgcgagggacctgcatgcgagcgcctggcctgcccaggtgcatgcagcggacacggaaggtgtgtggacggcaggtgcctgtgccatgagccatacgtcggcgctgactgcggctatcctgcatgccccgaaaattgttcaggacatggcgaatgtgtaaggggcgtctgtcaatgccatgaagacttcatgtccgaggactgttcagagaaaaggtgtcctggcgattgcagcggccacggtttctgtgacaccggggaatgctattgtgaagaaggatttactggacttgattgcgcacaggtggtgacaccccagggtctgcagttattgaagaatacagaagattccttactagtgagttgggagccaagttctcaagtggaccactacctgttatcctactaccccttgggcaaggaactgtcaggcaagcaaatccaggtgccaaaagaacagcactcatatgagatcctaggcctgctgcctggcactaaatacatcgtcaccctgaggaacgtgaagaatgaagtgtcgtcctccccgcagcatctcctcgctacgacagacctcgctgttctgggcacagcttgggttactgatgagaccgagaattcccttgatgtcgaatgggagaacccaagcacagaagtggactattacaaactgcgttacggacccatgacaggccaggaagtcgctgaggtcactgtgcctaagagtagcgatcccaagtccaggtacgacataaccggattgcaccctggcactgagtacaaaatcactgtcgttcccatgcgcggagaactggaagggaagccaatcctcctgaatgggcgcaccgagattgacagtccaacaaatgtcgtaaccgatcgcgtgactgaagacacagctactgttagttgggatccagtgcaggctgtgatcgataagtatgtcgtgcgatacacctccgcagacggagatacaaaagagatggccgtgcacaaagatgaatcgagtacagtgttgaccggccttaagccgggtgaggcctacaaagtgtatgtctgggcggagaggggcaatcaaggctcaaaaaaagccgatactaatgcactgacagagatcgactcacctgcaaacctggtcacggacagagtgacggagaacaccgctacgatcagttgggacccggttcaggccacgatcgataagtatgtggtacgatataccagtgccgacgatcaggagacgcgagaagttctcgtcgggaaggaacaaagcagtacagtgctgacaggccttagacccggagttgaatatacagtacacgtgtgggctcagaaaggcgatcgagaaagcaagaaagctgacacaaacgcaccaactgatatcgactccccgaaaaaccttgtgaccgaccgagtgacagaaaatatggccactgtgtcctgggatccagttcaagcagcgattgacaagtacgtcgtgcgctacacttctgcggggggtgagactagggaagtgcctgtgggcaaggaacaaagctctaccgtactgaccggcctgagacccggcatggaatatatggtccacgtctgggcgcaaaagggtgaccaagaaagtaagaaagctgatactaaggcacagacggatattgacagtccgcagaatctggtgactgatagggtgaccgagaacatggcaacagtctcctgggatcccgtgcgggctactatcgaccggtacgtcgttcggtatacttccgcaaaggacggtgaaactagggaggtacccgtaggaaaagagcagtcatctaccgtattaactggattgcggcctggggtagaatacactgtgcatgtttgggcacagaaaggagcccaagaatctaagaaagcagacacgaaagcacagaccgacattgactctccacagaatcttgtgactgactgggtgactgagaatacggccacagtcagctgggatcccgtgcaggcaaccatcgatagatatgtcgttcactacacgagtgccaacggagaaacaagagaggtcccagttggcaaagagcagtcatcgactgtcctgaccgggctgcggcctgggatggagtacactgtgcacgtttgggcccaaaagggaaatcaagaaagtaaaaaggctgacactaaggcacaaacggagatcgacggacctaagaatctggtgacagactgggtgactgaaaacatggctaccgtctcctgggaccccgtccaggcaactattgataaatatatggtcaggtatacatccgccgatggtgaaacgcgcgaggtccccgttggcaaagaacattcaagtacagtcctgacaggattgcgccctggaatggaatacatggtgcacgtgtgggctcagaaaggggctcaagagtcaaaaaaagctgataccaaggcacagacagagctggacccacctcgaaatctcagaccgtccgccgtgacccagtccggaggaattctcacttggactcccccttcagcgcagatacatggatacattcttacataccagttccctgacggtacagtgaaagaaatgcagcttggtagagaggaccagcggttcgcactgcaagggttagagcagggggctacatatcctgtcagtctggtggcttttaaaggcggaaggcgtagccggaacgtgtcaacaaccctgagtacggttggagcacggttcccgcacccctcggactgctcacaggtgcaacagaattccaatgcggctagcggattgtacaccatctacctgcacggggacgcctctagaccgttacaggtgtactgtgacatggagacagacggaggaggctggatagtgttccagcggcgcaacaccggccagctggatttttttaagagatggagatcatatgtggagggttttggagacccgatgaaagaattttggctgggcctggacaaactgcataacttaacgactggtactccagcacgctacgaggtgagagtagatttacagaccgcaaatgaatccgcttacgcgatctacgacttctttcaggtagcctcatcaaaggaaaggtacaaactcaccgtcggaaagtacagaggtaccgccggggatgctctcacataccataatggctggaaatttaccacctttgacagggataacgacatagcactgagtaattgcgcgcttactcaccacgggggttggtggtataaaaactgccatctggcgaatcctaacggaaggtacggcgagactaaacattcggaaggcgttaactgggaaccttggaagggccatgaattcagtatcccgtacgtagagctgaagatccggccgcatggctactcaagggaacccgtgctgggtcgcaaaaagagaacgctgaggggtaggctgcgcactttctag

SEQ ID NO: 11871 - RNA, 1662 nt, synthetic construct
  misc_feature 1..1662: note = source = /note="Description of Artificial Sequence: Synthetic coding sequence"
  source 1..1662: mol_type = other RNA
atgaccaggggaggtccaggcggtagacccggacttccccaaccccctcctttgcttctgttactgctgctcttacccttacttcttgtgaccgccgaaccgcctaagcccgcaggcgtatactacgctactgcttactggatgcccgcagagaaaacagtacaggtgaagaacgtcatggacaagaatggcgacgcatatgggttctacaataattctgtgaaaaccactgggtgggggatccttgagattcgggcgggatacggcagccagaccctttccaatgaaattatcatgtttgtcgccggctttttagagggctacctgaccgcacctcatatgaacgaccactacaccaatctgtacccccagttgattacaaagccatcgattatggataaagtacaggacttcatggagaaacaggacaagtggacacgaaagaatattaaggagtacaagacagattctttttggaggcatacagggtatgttatggctcaaatcgacggactgtacgttggagcaaagaagagggcaatcttagagggtaccaaacccatgactctgttccagatccagttcctgaattccgtgggggacctattggatttaataccctcattgtccccaacaaagaacggtagccttaaggtgttcaaacgatgggacatgggtcactgctctgctctgatcaaagtgttaccgggtttcgagaacattcttttcgcccatagctcctggtacacctacgccgctatgttacgcatatataagcactgggacttcaacgtcatcgacaaggacacatcctcatctagactctcttttagctcttacccagggttcctcgagagcctcgatgacttctacattttgagctccggcctcatcctactacagactacgaacagtgttttcaataagacccttctgaagcaagtaattccagagacattgctatcctggcagcgcgttcgagtggcaaatatgatggccgactccggaaaacgatgggcagacattttctctaaatacaacagcgggacctacaataatcaatatatggtgcttgacctgaaaaaagtaaaattgaaccattcactcgacaagggaacactgtacatcgtcgaacagattcctacgtatgtggaatatagcgagcagaccgacgttctgcggaaagggtactggccgagttacaatgtaccatttcacgaaaaaatatataattggagcggttaccctttgctggtgcaaaagttggggctggattattcttatgatctggcacccagggcaaagatctttcgccgtgatcagggaaaggtaactgatacagcatcaatgaaatatatcatgaggtacaataattacaagaaggacccttatagccggggcgacccatgtaacacaatctgctgtcgtgaagatctgaattcccctaatccttctccaggaggctgctatgacacaaaagtggcagacatctatttggccagtcagtatactagctatgcaatttccggtccaactgtccaaggaggcttgcctgtgttccgttgggatcggtttaataaaaccttacatcaggggatgcccgaggtctataactttgattttatcaccatgaagcctatcttgaagctggatattaaatag

SEQ ID NO: 11872 - RNA, 2271 nt, synthetic construct
  misc_feature 1..2271: note = source = /note="Description of Artificial Sequence: Synthetic coding sequence"
  source 1..2271: mol_type = other RNA
atgtccagaccaggaaccgccacccccgccctagctcttgttctgctagcggttactctagctggcgtaggcgcacagggcgccgcccttgaggaccccgattattatggtcaggagatttggagcagagaaccatattacgccagaccagagccagaattagaaaccttttcccctccactccctgcaggtcctggtgaagagtgggaaaggaggccacaagagccacgtccacctaaacgggctactaagccgaaaaaggctccaaagcgagagaaaagcgcaccagaacctcctcctcccggaaagcactcaaataagaaggtgatgcgtaccaagagctccgagaaagccgccaatgacgatcacagcgtaagagtggcaagggaggatgtgagagagagctgcccacctttgggccttgaaaccctgaagattaccgattttcaactgcatgcaagcacggtcaagagatacggcctaggtgctcaccgtggtcgtctgaacattcaagctggtattaatgagaatgatttttatgatggcgcatggtgtgccgggcggaatgacctacagcagtggattgaagttgacgctcgacgcctgacccgctttactggagtgatcacgcaggggaggaactcgttgtggttgtctgattgggtgacttcctacaaagtaatggtgtccaacgattcacatacctgggtcactgtgaaaaacggcagcggagacatgattttcgagggtaactctgaaaaagagatccctgtcttaaatgagttaccggtccccatggtcgcccgttacattcgcatcaatccacagtcctggttcgataatggaagcatctgcatgaggatggagatcttagggtgccccctgcccgacccgaataattactaccaccggcggaatgaaatgacaaccaccgatgacctcgacttcaaacaccataactacaaagaaatgcgacagctgatgaaagtggtcaacgaaatgtgccctaacattactagaatttacaacattggaaaatcccatcagggcctgaagctatatgccgttgagatcagcgaccaccccggtgagcatgaggtcggggagcccgaatttcactatattgcaggcgcacacggaaatgaggtgcttgggcgggagctgctcctgctgttggtccaatttgtatgccaggaatacttggctagaaatgcacgcatcgtacacctggtggaggaaaccagaatacatgtgttgccaagcctcaaccctgacggctacgagaaagcctacgaaggcggatccgagctcggaggatggagtctgggccggtggactcacgacggcatcgacataaacaacaactttccagaccttaatacattactgtgggaggccgaggacagacaaaatgtccccaggaaagtgccaaatcactatatcgcgatccctgaatggttcctcagcgagaacgccaccgtcgcggccgagactagggctgtgatagcatggatggaaaagatacctttcgtcctgggaggcaacttgcaggggggcgaactggttgtcgcctatccgtacgatctagtgcgttccccctggaaaacacaggaacatacccctaccccggacgatcatgtgtttagatggctggcttactcctatgcttctacccatcgcctaatgaccgacgccagacgccgtgtgtgtcatactgaagattttcagaaagaggaagggacagttaatggcgcctcctggcacacagttgctgggtctctgaatgatttctcctacctgcacaccaattgctttgagttgtctatttatgtcggatgcgacaagtaccctcacgaaagccagctgcctgaagagtgggagaataaccgtgaatccctgatcgtgtttatggaacaggttcaccgggggatcaaaggcctggtacgcgactcacacggtaagggcatacccaatgctatcatttctgttgaaggaataaaccacgatatacgcaccgcaaacgatggtgactattggcgcctcttgaatcccggtgaatatgtagtgactgcaaaggcagaaggcttcacagcgtctaccaagaactgcatggtcggttacgacatgggtgctacccggtgtgattttacactgagcaagacaaatatggcaagaatccgcgagatcatggagaagttcggaaagcagcctgtgagcctaccagcccggcggctcaaactgcgggggcagaagcgaaggcaaaggggttag

SEQ ID NO: 11873 - RNA, 702 nt, synthetic construct
  misc_feature 1..702: note = source = /note="Description of Artificial Sequence: Synthetic coding sequence"
  source 1..702: mol_type = other RNA
atggctactcccccttttagactgatacggaagatgtttagttttaaggtgtctcggtggatggggttagcttgtttccggagcttggcagccagcagcccttctatcaggcagaagaaactcatgcataaactgcaagaagagaaggcctttcgcgaggaaatgaagatatttcgtgagaagattgaggactttcgtgaggaaatgtggactttccgggggaagattcatgctttccgggggcaaatcttaggattctgggaagaggaaagacccttttgggaggaagagaaaacattctggaaagaggagaagagtttttgggagatggaaaaaagcttcagagaagaggaaaagacgttctggaagaagtaccggacattttggaaggaagacaaggcattttggaaggaggacaatgcgctgtgggagcgtgacagaaacctactccaggaagacaaggctctatgggaagaagaaaaggccctatgggtcgaggaacgggcactgctggagggagagaaggcactctgggaggataaaacaagcctttgggaggaggaaaatgcattgtgggaagaagagagggctttttggatggagaataatggacatatagccggtgaacaaatgctcgaggacggcccccataacgctaaccggggccagcgcctgcttgctttctctcgcggaagggcttag

SEQ ID NO: 11874 - RNA, 696 nt, synthetic construct
  misc_feature 1..696: note = source = /note="Description of Artificial Sequence: Synthetic coding sequence"
  source 1..696: mol_type = other RNA
atgatgctgagctgcctatttctgttgaaagcactattggctcttggaagcttagagtcatggatcaccgcaggagagcatgcaaaggaaggcgagtgtccaccccacaaaaacccctgtaaggaattatgccagggtgatgagttatgtcccgccgaacagaaatgctgcacaaccggctgtggaagaatttgtagggatataccgaagggccgcaaaagagactgtcctcgggtgattcggaagcagagctgcctgaagaggtgcattacagacgagacctgcccgggagttaaaaagtgctgtactttaggatgcaataaatcatgtgttgtgcccattagtaaacagaaactcgcggagtttggaggggagtgcccagctgatcctttgccgtgtgaggaactgtgcgacggtgatgctagctgcccacaaggccacaaatgttgcagcaccggctgtggccgcacgtgccttggcgacatagagggcggaagggggggagactgccccaaggttttggtcggactctgtatcgtggggtgcgtgatggatgaaaactgccaagccggtgagaaatgttgcaagagcggatgcgggaggttctgtgtgccaccggtgcttcccccaaaactgacaatgaatcccaactggaccgtgaggagcgattccgagctcgagatacccgtgccctag

SEQ ID NO: 11875 - RNA, 1050 nt, synthetic construct
  misc_feature 1..1050: note = source = /note="Description of Artificial Sequence: Synthetic coding sequence"
  source 1..1050: mol_type = other RNA
atggggcctattagcgcgcccagctgccggtggcggatcccgtggcagggcctgctactgacagccagtctgttcacgttctggaatccccccaccaccgctcaactcacaatcgaagccgtgccaagtaatgctgccgaagggaaagaggtgctgttactggtgcacaatctcccccaggaccctcggggatataactggtacaaaggtgaaacagtagatgccaatcggcggatcatcgggtacgtgatcagcaaccagcaaatcactcctggccctgcgtattccaaccgtgagacaatctaccctaacgccagccttctgatgcggaatgtgacaagaaacgatactggcagctatacattacaagtgatcaagctaaacctgatgagtgaagaagtgaccggtcagttttctgtccacccagagaccccaaaaccaagtatctcctccaataattctaatcctgtagaggataaagacgccgtggcatttacctgcgaacccgaaacccagaacaccacctacctttggtgggtgaacggccaatcactgccggtgagcccaagactgcagctgagtaatggtaaccggacgctgacacttttatctgttactcgcaatgatgttggcccttacgaatgcgagatccagaatcccgcctccgccaatttttccgatcctgtcacactgaatgtcctgtacggcccggacgcccccacaatctctcctagtgatacttattaccatgccggtgtcaacctaaacctatcttgccatgcagcctctaaccccccctcccaatactcatggtccgtgaatggcacattccaacagtacactcagaagctcttcattcctaatattaccacaaagaacagtggttcctatgcatgccacacgacaaactctgcaactgggcgaaaccgcactaccgtgagaatgattactgtgtcagacgctcttgtccagggctcctctccaggcttatccgcccgcgccaccgtgtccataatgatcggagtgctcgccagagttgctctcatctag

SEQ ID NO: 11876 - RNA, 510 nt, synthetic construct
  misc_feature 1..510: note = source = /note="Description of Artificial Sequence: Synthetic coding sequence"
  source 1..510: mol_type = other RNA
atgacagcgggtcggcggatggaaatgttgtgcgctgggcgtgtgcctgccctcctcctgtgcctggggtttcatctgctgcaagccgtcctttcaactaccgttatcccgtcctgtattccaggtgagagcagcgataactgtacagccctggtgcagacagaagacaacccccgagttgcccaggtttcaattacgaagtgtagctcagatatgaatgggtattgtttgcatggccagtgcatctatttagttgacatgtctcagaattattgtcggtgtgaggtgggttacactggggtcagatgtgagcatttcttcctgactgtgcatcagccattatccaaagagtacgtagctctgacagtgatcttaatcatcctgttcctcataactgtagtgggatctacgtattatttttgccggtggtatagaaataggaagagcaaagaaccaaaaaaggagtacgagcgtgtcaccagcggcgacccagagcttccccaggtgtag

SEQ ID NO: 11877 - RNA, 273 nt, synthetic construct
  misc_feature 1..273: note = source = /note="Description of Artificial Sequence: Synthetic coding sequence"
  source 1..273: mol_type = other RNA
atgaagttatccgtgtgcctccttctcgtcactctggcactgtgctgttatcaggctaacgcagagttttgccccgcgctagtgtccgagttgttagacttcttcttcatcagcgagcctctcttcaaactttctcttgctaaattcgacgctccccctgaggcggtggcagctaaactgggagtcaaaagatgtacggaccaaatgagtctccagaagaggtccctcatcgccgaagttctagtgaaaattctcaagaagtgtagtgtgtag

SEQ ID NO: 11878 - RNA, 429 nt, synthetic construct
  misc_feature 1..429: note = source = /note="Description of Artificial Sequence: Synthetic coding sequence"
  source 1..429: mol_type = other RNA
atgccacggtgccggtggctgagcctcattctccttacaatcccacttgccctggtcgcacgaaaggaccctaagaaaaacgagactggcgttttacggaaacttaagcccgtgaatgcaagtaatgccaatgtcaagcaatgtctatggtttgctatgcaagagtataacaaggagtctgaagataaatatgttttccttgtggtgaagacactgcaggcccagctgcaagtaacaaacctgctagaatatctgattgatgttgagattgcgaggtcagactgtcgaaagcctcttagcacaaatgagatttgcgccattcaagaaaattctaaactaaaacgcaaattatcgtgttcttttttagttggtgccctgccttggaacggtgagtttactgttatggaaaaaaaatgcgaagacgcctag

SEQ ID NO: 11879 - RNA, 438 nt, synthetic construct
  misc_feature 1..438: note = source = /note="Description of Artificial Sequence: Synthetic coding sequence"
  source 1..438: mol_type = other RNA
atggggattggatgttggcgaaatcctctgttgttactgatcgctctggtgttaagcgccaagctcggtcatttccagcgatgggaaggtttccagcagaaacttatgagtaaaaaaaacatgaattccacacttaatttttttatacagagctacaacaacgcctctaatgatacgtacttgtaccgagtgcagcgcctcatacggtctcagatgcagctcacaaccggagtggaatacattgtaacggttaagatcggatggacgaaatgcaaacgcaacgatacatctaatagctcctgccccttacaaagcaagaaactgcggaaatccctcatttgtgagtcgctcatttatacaatgccatggattaattattttcagttgtggaacaatagttgtctcgaagcagaacacgtcggaagaaacctgaggtag

SEQ ID NO: 11880 - RNA, 552 nt, synthetic construct
  misc_feature 1..552: note = source = /note="Description of Artificial Sequence: Synthetic coding sequence"
  source 1..552: mol_type = other RNA
atgaaacttttgtttcccatttttgcttcactgatgttgcagtaccaggttaacacagagttcatcggtttacgtagatgcttgatgggcttgggaagatgccgagaccactgtaacgtggacgagaaagagatccagaagtgcaagatgaaaaaatgctgcgtgggaccgaaggtagtcaaattgatcaagaactatctacagtatggtacccccaacgtgctgaatgaggacgttcaggaaatgttgaagcctgccaaaaatagctccgccgtaatacagagaaagcacatcctcagcgtgttgcctcagatcaaatcaacgagtttttttgcaaacaccaatttcgtcatcatccccaacgccaccccaatgaattccgccacgatcagtactatgacacccggacagatcacttatacggctactagcaccaaaagcaatactaaggagagcagagactccgcaaccgccagtccaccacctgccccgcccccacctaacattctgcccacaccatcacttgagcttgaggaagccgaagagcaatag

SEQ ID NO: 11881 - RNA, 609 nt, synthetic construct
  misc_feature 1..609: note = source = /note="Description of Artificial Sequence: Synthetic coding sequence"
  source 1..609: mol_type = other RNA
atgagaggccacccaagtctgcttctgttatatatggcgctcacaacttgcctcgacactagtccttccgaagaaaccgatcaagaagtcttcctggggccacccgaggctcaaagtttcctaagctcccataccagaatcccgagagcgaaccactgggatttggagctattgacacccgggaacttggaaagggaatgcctagaagaacgttgttcctgggaagaagccagagagtactttgaggacaacactttgaccgagcgattctgggaaagctatatatacaacggaaaaggtggacggggaagagtggatgttgcctccctggcagtcggcctgactggcgggatcctgctgatcgttctggccggtctgggcgctttctggtatctccgctggcggcagcaccgcgggcagcagccgtgtcctcaggaggcgggccttatctcccccttgtcacccttaaaccccctaggcccacccaccccgctaccccctcctcctccccccccacccggtttgcccacctatgaacaggccctggcagcaagtggggtccatgacgctccccctcccccctacacttctcttcgccgacctcactag

SEQ ID NO: 11882 - RNA, 558 nt, synthetic construct
  misc_feature 1..558: note = source = /note="Description of Artificial Sequence: Synthetic coding sequence"
  source 1..558: mol_type = other RNA
atgagattactgatcctgacttgcctggtagcagtcgctctcgcgcgccctaaactgccactccgctacccggaacggttgcaaaacccctctgaaagcagtgaacctatccctctagaatcgagggaggaatatatgaacggcatgaatcgtcagagaaacatcctgcgcgaaaaacagacagacgagatcaaagatacccgaaatgagagcacccaaaactgcgtggtagccgagcctgagaagatggagtccagtatctccagcagctccgaagaaatgagcctatctaagtgtgccgaacagttttgtcggctgaacgagtataaccaattgcagctccaggcagcccacgcccaagaacaaatcagaagaatgaatgagaactctcatgtgcaagtgccttttcagcaactgaatcagctggccgcctacccctatgccgtctggtattatccccagattatgcaatatgtgccttttcctcccttcagcgacatatctaacccaactgctcacgaaaactacgagaagaataatgtgatgcttcagtggtag

SEQ ID NO: 11883 - RNA, 1410 nt, synthetic construct
  misc_feature 1..1410: note = source = /note="Description of Artificial Sequence: Synthetic coding sequence"
  source 1..1410: mol_type = other RNA
atgattactgaaggcgctcaagcccccagactacttctcccaccacttctacttcttttaacactccctgctactggctccgatcctgtgctctgctttacccagtatgaagagtcaagcgggaaatgcaaaggtctgctgggcgggggcgtttctgtggaagattgttgtctcaacacagcatttgcctaccaaaaacggtccggcgggctgtgtcagccctgtagatcacccaggtggtctctctggtccacgtgggcgccttgctctgttacatgctccgaggggtcacagctgcgctatcgtcggtgcgttggatggaatgggcagtgtagtggtaaagtcgctcctggtactttggagtggcagctgcaagcatgcgaggaccagcagtgttgccctgagatgggcggttggagcggctggggcccttgggaaccatgtagtgtcacctgttcaaaaggcacacgcactcggagacgcgcctgcaatcacccagcccccaaatgtggaggccactgccccggtcaggcccaggagtccgaggcatgcgacacacagcaggtttgtccaacccacggcgcctgggcaacttggggcccctggaccccttgctcagcttcctgccacggcggccctcatgaaccaaaggaaaccaggtccagaaagtgttccgcccccgagccgtcccaaaaaccacctggcaagccctgcccaggtctggcttatgaacagcgccgatgcacaggcctgcctccatgtccagtggctggcggatgggggccctgggggccagtgtctccttgccctgtcacttgcggcctcggccagactatggagcaacggacctgtaaccacccagttccccaacacggtggccctttctgtgccggggacgctactcggacacatatatgtaacaccgctgttccttgtccagtggacggagaatgggacagctggggagagtggagcccttgcatccggcgtaacatgaaaagtatttcctgccaagaaataccaggacagcaaagtagggggcgaacttgtagaggccggaagtttgatgggcaccggtgtgccggccaacagcaagacatccgccattgttactcaattcagcattgtcccctaaaaggatcctggtctgagtggagcacctgggggctgtgcatgccaccgtgcgggcccaaccccacccgagcccgccagcgcctgtgtacccccttattaccgaaatacccacctaccgtttcgatggttgaagggcagggggaaaaaaacgtgacattttggggccggcccctgccccgatgcgaagagcttcaaggacaaaagctcgtggttgaggagaagaggccatgcttgcatgttccagcctgcaaagaccccgaggaagaagaactctag

SEQ ID NO: 11884 - RNA, 453 nt, synthetic construct
  misc_feature 1..453: note = source = /note="Description of Artificial Sequence: Synthetic coding sequence"
  source 1..453: mol_type = other RNA
atgctaatcgctacctctttctttctcttcttcagtagtgtcgtcgcagcacctactcactctagcttttggcagtttcaacgcagagttaagcatatcaccgggagatccgcttttttttcttactacggctacggctgctactgcgggttgggagataagggtatccccgtggacgatacagactcccccagctctccatctccctacgaaaaactgaaggaattttcatgccagcccgtactcaatagttatcagtttcacatcgtcaacggagctgtggtgtgtggctgtacactgggacctggcgcttcctgccactgcaggctcaaagcatgtgaatgcgacaagcaatctgtccactgcttcaaggaatcactcccaacatacgagaaaaactttaaacagttctctagccaacccagatgtggacggcacaagccttggtgctag

SEQ ID NO: 11885 - RNA, 1347 nt, synthetic construct
  misc_feature 1..1347: note = source = /note="Description of Artificial Sequence: Synthetic coding sequence"
  source 1..1347: mol_type = other RNA
atgcgagagtgcatttccgtccacgtcgggcaagccggcgttcaaatgggaaatgcctgctgggaactgtattgtctggaacatgggatccagcctgacgggcaaatgcctagcgataagacaatcggcggcggcgatgacagcttcaccaccttcttttgcgagactggagccgggaaacacgtgccaagggccgtgtttgtcgacctggaacccacagttatcgacgagatacggaatggcccctacagacagctgtttcatccagaacagttaatcaccggaaaggaagatgcagcaaacaactacgctcggggccactatactattgggaaagaaattatagatcccgtgttggatcgcatacggaagctttctgaccaatgcactggtcttcagggcttcctcgtattccactcatttggcggcggcacaggatctgggtttacatctctgctcatggagagactgtcagtggattatggcaagaagagtaagctcgaattttctatttacccagccccccaagtatccacggccgtagtggaaccctataactcgatcctaaccacacacaccacactggaacactccgactgtgccttcatggtggataatgaggccatttacgatatctgccgccgcaatcttgacatcgaaagaccgacctatactaacctgaaccgcctgattagccagatcgtgtcatctattaccgcctcactaaggtttgatggcgccctcaacgtcgatcttaccgaattccagacaaatctcgtgccctatcccaggatccacttccctttagctacatatgcaccagttatctcagctgaaaaggcctaccatgaacagctctctgtagccgagatcaccaacgcctgttttgagcccgctaaccagatggtaaagtgcgatccgcgccatggcaaatacatggcctgttgtctgctgtatcgcggcgatgtcgtccctaaggacgttaatgcggcaatagcagccatcaaaaccaaaagatccatacaattcgtggattggtgtccaacaggatttaaggtggggattaattatcagcctcctaccgtggttcccgggggagatctggccaaagtgcagcgcgccgtgtgcatgttatcaaataccaccgctatagctgaggcctgggctagactggaccacaagttcgatctgatgtatgccaaaagggcttttgtgcattggtatgttggagagggaatggaagaaggggagttctcggaagcccgcgaagatatggcggccctggagaaagactatgaagaagttggcattgactcctacgaagacgaggacgaaggagaggagtag

SEQ ID NO: 11886 - RNA, 942 nt, synthetic construct
  misc_feature 1..942: note = source = /note="Description of Artificial Sequence: Synthetic coding sequence"
  source 1..942: mol_type = other RNA
atgcgggttgtgacaatagtgattctgctctgcttctgtaaggccgcagagctgaggaaggcctcccccggcagcgttagaagtagagttaaccacggcagagcgggcggagggagacgcggctcaaatccggtaaaacggtatgcgcctggattgccttgcgacgtctacacataccttcacgagaaatatttggactgtcaggagcgtaagctggtctacgtccttcctggatggcctcaggacttgctccacatgctgttggcccgcaataagattcgcacacttaagaacaacatgttcagcaagtttaaaaagttgaaaagcctagacctgcagcagaacgaaatttccaagatcgagagcgaagcgttttttggccttaacaagcttacgaccctgctgttacagcataaccagatcaaggttctgacagaagaagttttcatctatacacctctgttgtcttatttacgactgtacgacaacccgtggcattgcacctgtgaaatagaaactttaatctccatgctgcagattccacgcaaccgcaatctggggaattatgctaagtgtgaaagcccacaggaacaaaaaaataaaaagttacgccagatcaagtcagaacagttatgcaacgaagaagagaaagagcagctggatccgaaaccccaggtatcaggaaggcctcctgttattaaaccggaggtcgattctacattctgtcataattacgtctttccaattcagaccctcgactgcaaaaggaaggaactcaagaaagtacccaacaatataccaccagatattgtgaagttagatctctcctacaacaaaataaaccaactgaggccgaaggaattcgaggatgtgcacgaacttaagaagctgaatctgtcttcgaatggaattgaatttatagaccctggatcgttgagatag

SEQ ID NO: 11887 - RNA, 972 nt, synthetic construct
  misc_feature 1..972: note = source = /note="Description of Artificial Sequence: Synthetic coding sequence"
  source 1..972: mol_type = other RNA
atgcaagctgcctggcttctaggagcactcgtggtaccacaactgcttgggtttggccacggtgcccgaggagcagagcgggaatgggaaggtggctggggaggagcccaggaggaagaaagggaacgggaagctcttatgttgaagcatttacaagaggccttggggttacctgccggccgtggcgacgagaatcccgctggcacagtagaaggcaaggaggattgggagatggaagaggaccagggcgaagaagaagaggaggaggccacaccgactcctagctccggaccatcaccctcccctacccccgaggatatagttacatacatactagggaggcttgcaggactggacgcgggtctgcaccaactgcatgtcaggctgcacgctcttgacacaagggtggtggagctcacccagggtctgaggcaattgcggaacgcagcgggggatacacgcgatgcagtacaggcattacaagaggcccagggcagagctgaaagggagcacggcaggctagaggggtgcctcaaaggcttaagactggggcacaaatgttttttgctttctagggactttgaggctcaggccgccgctcaggcacgctgcaccgctcgaggcgggtcattagctcagcctgcagaccgccaacagatggaagccttaacaaggtacctgcgagcagctcttgccccttacaattggccagtgtggttgggggtacatgatagacgcgctgagggactatatctcttcgagaacggccaacgcgttagcttcttcgcctggcatcgctctccccggcctgagctgggagcgcagccaagtgcctctccccacccactctccccggatcagcctaacggaggaacgctggaaaattgtgtggctcaggctagtgatgacgggagttggtgggatcacgattgtcagcgtcgcctatactacgtgtgtgagtttcccttctag

SEQ ID NO: 11888 - RNA, 1086 nt, synthetic construct
  misc_feature 1..1086: note = source = /note="Description of Artificial Sequence: Synthetic coding sequence"
  source 1..1086: mol_type = other RNA
atgaatggactgagcctgagcgagctgtgttgtctcttttgctgtccaccatgtccaggaagaattgccgcgaagctggcattcctgccaccagaggccacctacagcttggtgccagaaccagagcccggaccgggcggagccggagcagccccccttggaactttgcgcgcctcttctggagccccaggaaggtggaaattacacctcacggagcgggccgattttcagtattctcaacgggagttggacacgattgaagttttccctaccaagtctgcccgaggtaaccgtgtatcttgcatgtacgtcagatgtgtgccaggagcccggcaaggccatcaggcccaaggtggacacccacagcttgcctgggtgggacggctaggggactccaataacccggcacccggtggatgtctactcggtaagagctggggaaccggtgccgccctggcttgcggatatatacatttgctagcacgttataccgtgctgtttagtcacgggaatgcagtggacctggggcagatgagctccttctatattggcctgggcagccgcctccattgtaacatcttcagctacgattatagcgggtacggagcttcatcgggtaggccctctgaaagaaatctgtacgccgacattgacgcagcatggcaggctttgaggacaaggtacggcatctctccagactctattatcctgtacggtcaaagcattggcacagtgcccactgtagacctggcctctcgatatgaatgtgccgccgtggtgctgcacagtccgcttacttccgggatgcgggtggcctttcccgatacaaaaaaaacttattgctttgatgcctttccaaatatcgaaaaggtttccaagatcacgtctcccgttctgatcatccatggaaccgaggacgaagttattgacttctcccatggccttgctctgtatgagcgttgcccgaaggccgtagagccactctgggtggagggcgccggacacaacgatatcgagctctattcacagtatctggaaagacttcgaaggtttatatctcaagagctgcctagccagcgggcctag

SEQ ID NO: 11889 - RNA, 1404 nt, synthetic construct
  misc_feature 1..1404: note = source = /note="Description of Artificial Sequence: Synthetic coding sequence"
  source 1..1404: mol_type = other RNA
atgcgaaccgccccaagtttgcggagatgtgtgtgtctactgttggctgccattctagatctggcgcgcggttatttgactgttaacatagaacctcttcctcccgtggttgctggggacgcagtaaccctgaaatgtaacttcaaaactgatggacgtatgcgcgaaatcgtatggtatcgcgtcactgatggaggcacaattaagcaaaaaatctttacgttcgacgctatgttctcaaccaactactctcacatggagaactatcgtaagagggaggatctggtttaccaatcaactgtgaggctgccagaggtgcgcatttctgataacggcccttacgagtgccatgtggggatctatgatcgggccacacgagagaaggtggtgctagcgagtggaaacattttccttaatgtaatggcaccacccacgtcgattgaagtggtcgctgcggatacccccgcccctttctcaagatatcaggctcagaacttcacccttgtctgtatcgtttccggaggtaagccagctcccatggtgtattttaaaagggacggggagcctattgacgccgttccattgtctgaacctcccgctgcatccagtggccctctccaggatagcaggccgttccgcagtcttctccaccgggacctcgatgacactaagatgcagaagtctctctccttgctggatgccgaaaaccgaggtggccggccttacacagagcgcccttctcgcggccttacccctgatccaaatatcctgcttcagccaacaaccgaaaatatccctgaaacagttgtctcacgcgagtttccccgctgggtgcatagtgcagaaccaacctactttctgaggcacagtcgcactccctcttccgatggaacagtggaagtccgcgctttgctcacatggaccttgaaccctcagattgataacgaggcattgttctcttgcgaggtcaagcatccagccttgtccatgccaatgcaagcagaggttaccctagtcgcccctaaaggacccaaaattgtaatgaccccctcgagagctagggttggcgatacagtgaggatcctggtccacggatttcagaatgaagtattccctgaacctatgtttacctggactagagtcggttctcgccttctggacggatcagcggaattcgacgggaaggagctcgtacttgagcgggtgcccgctgaactcaacggatccatgtacaggtgcactgcacagaaccctctaggctctacagatacacacactcgcctaatcgtgttcgagaacccgaatatacctcgaggcactgaagacagtaacggatcaatcgggccgaccggagcccgactcacccttgtgctagccctgacagtgattctggaactcacttag

SEQ ID NO: 11890 - RNA, 783 nt, synthetic construct
  misc_feature 1..783: note = source = /note="Description of Artificial Sequence: Synthetic coding sequence"
  source 1..783: mol_type = other RNA
atggcgagacctggaatggaacggtggagagaccggctggcccttgtgacgggagcgagcgggggcataggtgccgccgtggcccgcgctttggttcaacagggcctcaaagtggttggttgtgctcgtactgttgggaatatcgaggagctagctgctgaatgtaaatctgccggataccctggtacactcatcccctacagatgtgacctttctaacgaggaagacatactaagcatgttctctgcaatacgatctcaacattctggagttgacatatgtattaataacgctggtctcgccaggcccgatactttactgtccgggtcaacctcaggctggaaggacatgtttaatgtgaacgtactggccctgagcatttgtacacgagaagcataccaaagtatgaaggaacggaacgtcgacgatggtcatatcattaacattaattcaatgagtggtcaccgggtgcttcctctctccgtgacccatttttacagtgctactaagtatgccgtaacagcgttgaccgaaggattgagacaggagctcagggaggctcagactcacatccgtgccacttgcatttcccccggggtcgtcgaaacccagttcgcatttaagctacatgacaaggaccccgaaaaggccgctgccacatatgaacagatgaaatgcctgaagcctgaagatgtcgccgaagccgtcatttacgtcttatctacccccgcacacatccagatcggcgatatccagatgagacctactgagcaggtgacctag

SEQ ID NO: 11891 - RNA, 1218 nt, synthetic construct
  misc_feature 1..1218: note = source = /note="Description of Artificial Sequence: Synthetic coding sequence"
  source 1..1218: mol_type = other RNA
atgtcgtctcctgctctcacagctggcgcctctggcaaggttatggattttaataacggtacctacctggtcagcttcacactgttttgggagggccaagtgtcattatcattgcttttaatccacccctctgagggtgcttctgccctgtggcgtgctcggaaccaaggatacgataaaattatcttcaaaggaaaattcgtcaacggcacttcgcacgtgtttacagaatgtgggctaacgctcaactccaatgccgaactctgtgaatatttggacgaccgtgaccaggaggcgttttattgtatgaagccgcaacacatgccatgcgaggccttgacatacatgacgactcgtaatagggaagtttcataccttaccgataaagagaacagcctttttcaccgcagtaaggtcggtgtggagatgatgaaagaccgaaagcacattgatgttacaaattgcaacaagagggaaaagattgaagaaacttgtcaggttggaatgaagccaccagtgccaggtggctatacactgcagggtaagtggatcacgaccttctgcaatcaggtgcagttggacactatcaaaatcaacggctgcttaaaaggaaaactgatttatttactgggagatagcacattgagacagtggatctactacttccctaaagtagttaagacactaaagttctttgacttacacgagaccggaatcttcaagaaacatctcctgctggacgccgaacggcacactcaaatacagtggaagaaacactcctacccatttgtgaccttccaactttattcactcatagaccacgattacattccccgtgagattgatcgactgtcaggcgataagaataccgcaattgtcatcacgtttggtcagcactttaggccatttccaatagatatcttcatccggagagccattggggtgcagaaggcaatcgaaagactctttctgagatcacccgccacgaaagtcatcattaagacggagaatattagagagatgcatatcgagaccgaaagatttggcgactttcacggctacatccattacctaatcatgaaggacatattcaaagatctgaatgtggggattatcgatgcctgggacatgacaattgcatacgggaccgacaccattcaccccccagatcacgtgattggcaaccaaataaatatgttcctgaactatatctgttag

SEQ ID NO: 11892 - RNA, 597 nt, synthetic construct
  misc_feature 1..597: note = source = /note="Description of Artificial Sequence: Synthetic coding sequence"
  source 1..597: mol_type = other RNA
atgcccgtacctgccttatgtctcctgtgggcactcgctatggttactcgcccagcatcagccgcgccgatgggcggcccagaattggcccagcacgaggaactgacgctgctttttcacggaacactgcagctcggccaagctcttaatggcgtgtatcggactacagaaggcagactcacaaaggcacgaaattctctcggactctacggcagaactattgagctactcggccaggaggtgagcaggggacgagacgccgcccaagagctgcgcgcaagcctccttgaaacacagatggaggaggacatcttgcagctgcaggccgaggcgaccgcagaagtcctcggagaggtggcccaagcacagaaagttctgcgcgattccgttcagcgcctcgaagtccagctcaggtcagcctggttaggtcctgcgtatcgagagtttgaagtactaaaggctcacgctgacaagcaatcgcatatcctctgggccctgactggccacgttcagaggcagaggcgcgagatggtggcacagcaacatcggctcagacagattcaggagaggctgcataccgctgcattgccagcctag

SEQ ID NO: 11893 - RNA, 1455 nt, synthetic construct
  misc_feature 1..1455: note = source = /note="Description of Artificial Sequence: Synthetic coding sequence"
  source 1..1455: mol_type = other RNA
atggctggcccatggacgtttaccctgttgtgcggccttctggctgccacgcttattcaggccacgctgagccctactgctgttctgattcttggtccaaaagtcataaaagagaagctcactcaggagctgaaggaccacaacgctaccagcattttgcagcagttgccactcctgtctgccatgcgcgaaaaacccgccggcggtattcctgtgctgggatcactggtgaatacagtcctcaagcacatcatttggttaaaagtgatcactgctaatattctgcaactgcaggtcaaaccctctgccaacgaccaggaactcctagttaaaataccccttgatatggtcgcaggtttcaacacacccttagtcaagaccatcgttgaatttcacatgaccactgaggcccaggccacgattcgtatggatacctccgcatccggacccacccggttagtactctctgactgtgctaccagccatgggtccctgcggatccagctgctgcacaagctcagctttctcgttaatgcactggccaagcaggttatgaacttgctggtccctagcttgcccaatctagtgaagaaccaattgtgcccagttattgaagctagctttaatggcatgtacgccgatctcctacagctggtaaaggtgccaatctcgttatcgatagaccgactggagttcgatctcctatatccggcaataaaaggcgataccattcaattgtacttgggtgccaagctgctggactcccagggtaaagttacaaagtggttcaataactctgcagcaagtctcactatgcctacactggacaatataccattttccctgatcgtatcccaagacgttgtgaaggcggccgttgccgcagttctatcacccgaagagttcatggttctgttagactctgtccttccggaaagcgcgcaccggctgaaaagctctatcggattaatcaacgaaaaagcagccgacaaactgggatctacccagatcgtgaaaatcctgacacaggacaccccagagtttttcatcgaccaggggcatgccaaggtggcccaattaatcgttttagaagttttcccctccagcgaagccctgcgtccactcttcaccctgggtattgaggctagcagcgaagctcaattctacacaaaaggagaccagctcatcttgaacttgaacaatatctccagcgaccgcatacaactaatgaactctggcattggctggttccagcccgacgtcctcaagaatattatcacagagatcatacactcaatccttctacctaatcaaaacggtaaactgcgctctggtgtgccggtgagtcttgtgaaggccctgggatttgaagccgcagagtccagcctgaccaaagacgctctagtgctcacacccgcaagtctatggaaacctagcagccccgtttcgcagtag

SEQ ID NO: 11894 - RNA, 750 nt, synthetic construct
  misc_feature 1..750: note = source = /note="Description of Artificial Sequence: Synthetic coding sequence"
  source 1..750: mol_type = other RNA
atgctacagctatggaagttagtcctcttatgcggagtccttaccggcacctccgaatctctcctcgacaacctcggcaacgatttgtccaacgtcgttgacaaactcgaaccggtgcttcacgaggggttggagactgtggataatactctgaaaggcatccttgaaaagctcaaagtggatctgggcgtcctgcaaaagtcaagtgcctggcagttagcaaagcaaaaagcccaggaggcagaaaagctgctgaataatgtgatctccaaattactgccaaccaataccgacatcttcggcctgaaaatcagtaattccctcatcctcgacgtgaaagccgagcccatcgacgacggcaagggtctgaatctgtccttcccagtgacagcaaatgtgaccgtagctggacctattataggccaaataattaatctcaaagcttctctagatttgctgaccgccgtgaccatcgaaactgacccccaaacacaccaacccgtggccgttctgggcgaatgtgcctctgatccaacatccatctccttgagcctgctggacaaacattcccaaattattaacaagtttgtcaatagcgtgattaataccctgaaatccaccgtatcctccttgcttcaaaaagagatttgtccacttatccggattttcatccactctctagatgtcaatgtaatccagcaagtggtcgacaacccgcagcataagacccaactgcagactctcatttag

SEQ ID NO: 11895 - RNA, 1959 nt, synthetic construct
  misc_feature 1..1959: note = source = /note="Description of Artificial Sequence: Synthetic coding sequence"
  source 1..1959: mol_type = other RNA
atgcaggggccactgctcctccctgggctttgcttcctgctgagtctcttcggggccgtgacacagaaaacaaagaccagttgcgccaaatgtccacccaatgcaagttgcgttaacaacactcactgcacgtgcaaccatggttatactagcggaagcgggcagaagctttttaccttccctctggagacatgtaacgacatcaatgagtgcacacccccttattctgtctactgtgggtttaatgcagtgtgttataatgtagagggcagtttctattgtcagtgtgtgccaggctaccgcctgcacagcgggaatgaacagttcagtaattctaacgagaacacttgccaagacaccacctcatccaaaacgacggagggtaggaaagagctccagaagatcgttgacaaatttgaaagtctactgactaaccagactctgtggagaactgagggccgccaagagatcagttccacagccactaccattctccgggatgtcgagagcaaggtgctggaaaccgccctgaaggatccggagcagaaggtgttgaaaattcagaatgatagtgtcgctatcgagactcaggccattaccgacaactgttcggaagaacgcaagacgtttaatcttaacgtgcagatgaacagcatggatattaggtgttctgacattattcaaggcgacacacagggaccaagtgcgatcgctttcatttcttattcaagtctcggaaacataattaacgctacgttttttgaggaaatggacaagaaagatcaggtataccttaattcacaagttgtgagcgcagctatcggacccaaacgaaatgtaagtctgtctaagtcagtgactctgactttccagcacgtcaagatgaccccatctacaaaaaaagtgttctgtgtttactggaagtcaacagggcagggctctcaatggtctagggacgggtgtttcttgatccacgtcaacaagtctcacacaatgtgtaattgctcccatctctcatctttcgcagttttaatggccctcacaagtcaagaggaggacccagtgctgacagtgattacttatgtggggctttctgtatccctactgtgtctgctcctggccgcgttaacatttctcctttgtaaagcaatccgtaacacatctaccagcctgcatctgcagcttagtctgtgcctgttcctcgctcacttactctttcttgtaggaatcgaccggaccgaacccaaggtgctctgctcaatcattgctggcgctctccattacttatatcttgccgcctttacctggatgctcctggagggcgtccacctgtttctaacagctcgcaatctcacagtggtcaactactcatctataaatcgactgatgaagtggattatgtttcccgtgggctatggtgttccagctgtcactgtcgccattagcgcagcctcatggccacatctctacgggactgcagacagatgctggctccaccttgaccagggcttcatgtggtcctttctcggccctgtgtgtgctattttttctgccaacttagtgcttttcatcctggtgttttggatccttaagaggaagctgtcctccctcaattcagaagttagcaccattcagaatacgcgcatgttggcctttaaggcaaccgctcagcttttcattctgggatgtacctggtgcctgggtctgttgcaggttggcccggccgctcaggtcatggcatacctctttaccatcatcaatagcctgcaagggttcttcatctttctggtttattgtctcctcagccagcaggttcagaagcagtaccagaagtggtttcgcgagatagttaagagcaaatccgaatctgaaacttatacactgagctccaagatgggacctgatagtaagccaagtgagggtgatgtgttcccagggcaggtaaaacgcaagtactag

SEQ ID NO: 11896 - RNA, 1263 nt, synthetic construct
  misc_feature 1..1263: note = source = /note="Description of Artificial Sequence: Synthetic coding sequence"
  source 1..1263: mol_type = other RNA
atgtcgccccctcctctgctgcagcccttgctactacttctacctcttctcaacgttgagccgtcaggcgctacactcattcgaatccctctccatcgggtgcagcccggacgtcggattctgaacctcctgagaggatggcgagagcctgctgaactgccgaaactgggcgctccatctcccggggataagccaatattcgttccgctctccaattatagggacgtgcagtactttggagagattggcctcggtactcccccgcagaatttcactgtggcctttgacacaggctcgtccaatctctgggtcccttcacgacgttgtcattttttttccgtgccgtgctggcttcaccacaggttcgatcccaaagcatcctcttctttccaagccaatggaacaaagttcgctatccagtacgggaccggacgtgtggatggcattctctctgaagacaagctgacaattggcggaattaagggagcatcagtgattttcggcgaagccttgtgggagccctccctcgtctttgctttcgctcattttgatggaattctggggttagggtttccaatcctgagcgtagaaggcgttcggccccctatggatgttcttgtggaacagggattattagataaaccggtattcagcttttacttgaaccgagatccagaggaaccggatggaggcgagctggtgctgggcggaagcgatcctgcccactacattccccccttaaccttcgtcccggtaacagtacctgcctactggcaaatccacatggagagagtcaaggtcgggccagggttgacattatgtgccaaaggctgtgctgccattctcgatacagggacatctctgattacaggccctaccgaagaaataagagccttgcatgccgccattggtgggataccacttctagcgggagagtatatcatcctatgtagtgaaattcccaagctccccgctgtttcattcttgttgggaggtgtgtggttcaacctcactgcccacgattatgtgatacaaacaacacgcaatggagtgcgactgtgcctaagtggattccaggccctggacgtccctccccctgccggtcctttttggatcctgggtgacgtgttcttgggcacttacgtggctgtatttgaccgaggagacatgaagagcagcgcaagggtcgggctggccagagccaggaccaggggcgcggacctggggtggggtgaaaccgctcaagcccagttccccggctag

SEQ ID NO: 11897 - RNA, 1293 nt, synthetic construct
  misc_feature 1..1293: note = source = /note="Description of Artificial Sequence: Synthetic coding sequence"
  source 1..1293: mol_type = other RNA
atggcttggacattcgaatgttcacggaccacatcccctgaacccttgagtacatcaccctgtcgcacaacttcgtctcgcaattcccctacgatgagctgtcccgccagcgtggcctgtgagccgtccacaagtactaccacttccagccctcccaaattgtccgtcgccccccagtttctaccgcgatcccttcgagtcgccgatctcgccgccaaccaggtgatggagattttccccctcacctttggagaaaagccagcactacgtagcgtctatctacacaataaccaacttagcaacgccggtctaccccccgacgccttcagaggctccgaagcaattgccactttgagtctctcaaataaccagctgagctacttaccaccttcactacccccttcacttgaacggcttcatctgcagaataatctgatttccaaagtgccccgcggtgcactctctagacagacacagctgagagaactatacctgcagcacaatcagctgaccgacagcgggctggatgcaacgactttttctaagttacacagccttgagtacctggatctttctcacaatcagctaacaacggtgcccgccggacttccacgcacgctggccattctacatttagggagaaaccgcatccgccaggtcgaagctgcccgactgcacggcgcaagggggttacgatatctgctgctgcaacacaatcagctgggttcctccggccttccggctggggcactcagaccattacggggcttgcacactttgcatctttatgggaacggtcttgatcgggtcccaccagctcttccacgccgtctccgcgccctggtactgccccacaaccacgtcgcggcgttgggggccagagatcttgtggcaacgccagggttgacagaactgaacctagcttataaccggctcgcgagtgccagagtgcatcacagagcatttcggaggcttcgagccctgagatctctggacttagcggggaaccagttgactcgattgccgatgggactccccaccgggttgcgcacccttcagctgcagagaaatcaattgcgaatgctcgagcctgagcctctggccggacttgaccaactgcgcgaactgagccttgcacacaatcggttgagggtgggtgacattggcccaggcacatggcacgagctacaggcactacaagtcaggcaccgccttgtgtctcacaccgtaccacgtgcccccccctctccctgcctgccctgtcatgtgcccaacatcctggtgtcatggtag

SEQ ID NO: 11898 - RNA, 3162 nt, synthetic construct
  misc_feature 1..3162: note = source = /note="Description of Artificial Sequence: Synthetic coding sequence"
  source 1..3162: mol_type = other RNA
atgtggcagccaagacggccctggccgagagtcccctggcgctgggcgctcgctcttcttgctcttgtaggcgcagggttgtgccatgcaggtcctcagccaggctaccccgcccggcctagcgcccgaaacaagaactggtgtgcctacatagtaaataagaatgtttcctgctctgtgcttgaaggcagcgaaagctttattcaagcacagtacaattgtgcttggaatcagatgccatgtccatcggccctggtctacagggtgaattttagacccaggtacgttaccagatacaagacagttacacagttggagtggcgttgctgccctggattccgaggtggagactgtcaagaaggcccaaaggacccagttaagactcttaggcctacaccagctagaccacgtaacagtctcaagaaagccactgataacgaacctagccagttttccgaaccgcggaaaaccctcagcccgaccggcactgcccagccttcctggggggtcgatcctaaggaaggacctcaagaactgcaggaaaaaaagattcaggtgttagaagagaaggttttacgtcttacacgaaccgtcctggacctgcagtcctcactggccggcgtctcggaaaatctgaagcacgcgacgcaagatgacgcaagtaggacgcgagcacccgggttgagctcccaacaccccaaaccagacacaactgttagcggggatacagagactggccaatcacccggcgtgtttaatacgaaggaaagcggtatgaaagacattaagtctgaactggccgaagtgaaagacactctgaaaaataagagtgacaaattagaggagttggacggaaaagtaaaggggtatgaaggccagctccgccagctgcaagaggccgctcagggcccaacagtaactatgacaaccaatgagctctaccaggcctacgtggactctaagattgatgcccttagagaggagctgatggagggcatggacagaaagctggccgacttaaaaaacagttgcgaatacaaactgaccggccttcagcagcaatgtgatgactatgggtcatcctacctgggcgtgattgaattgattggagaaaaggagactagcttaaggaaagagataaacaacttaagagcaagactgcaggagccatcagcacaggctaattgttgcgattccgagaaaaacggtgacattgggcagcaaattaagactctggatcagaagattgaacgggtagctgaagcaacccggatgttgaacggcagactggataacgagtttgacagactcatcgtcccagaacccgacgtagacttcgacgcgaaatggaatgaactagacgcacggatcaacgtgacagaaaagaacgccgaggaacactgcttttacatagaagagacattaagaggagctattaacggggaggttggggacctcaagcagctagtggaccagaaaatccagtctctcgaggaccgcctgggatccgttctcttacagatgaccaataacaccggggccgagctgtctccccccggggccgcagcgctcccgggcgtcagcggcagcggggacgaacgggtgatgatggagctgaatcatctgaaagacaaggtacaggtagtggaagatatatgtttactgaacattcaaggaaaaccacatggtatggagggagcccttccaaatcgagaggacagagcggtccgcgacagcctgcatctgctgaagtcattaaacgacactatgcaccggaagtttcaggaaacagagcagaccatccaaaaactccaacaggacttcagtttcctatactcgcagctcaatcatactgagaacgacgtcacccacttacagaaggagatgtccaattgtcgcgccggagagaatgccggcatgggaagatttactaaagttggcgagcaagaaagaaccgtggacactttaccgtcaccgcagcaccctgtggcccattgctgctcccagttagaggaaaggtggcaacgacttcaatctcaagtgattagcgagctggatgcgtgcaaggagtgtacccagggcgttcagcgggaggtcagcatggtggaagggcgggtctcacatatggaaaaaacctgttccaaacttgactctattagcggaaaccttcaacgaatcaaggaaggattgaataaacacgtctcgtctctgtggaattgcgtccggcagatgaatggaacactaaggagtcactctcgggacatctccggactaaaaaattccgtacagcagttttacagtcatgtatttcagatcagcacagacttacaagacttggtgaagttccaaccttctgctaaggccccatctccacctcctccggccgaagcccctaaggagccacttcagccagagccggcgcccccaagaccctcaggacctgctactgcagaggaccctggtaggcgccccgtgctccctcagcgcccgccagaagaaagaccccctcaacccccgggctctactggtgtaatcgctgagactggacaggcaggccctcccgccggtgcaggcgtatctggtcgcggcctgccacgaggcgttgacgggcagacaggcagcggcaccgtccccggagctgaggggttcgctggcgctcctggctacccaaagagtccacctgtggccagccctggagccccagtaccgtcattggtgtctttctccgcaggcctaactcagaagcccttccccagcgacgggggagtcgtcttatttaataaagtgttggttaacgatggcgatgtctataacccttccacgggggtgtttaccgccccttacgacggcagataccttataactgccaccctgacccccgaaagagacgcctatgtcgaggccgtgttgtctgtctcaaatgcctccgtggcccagttacataccgccggttaccgcagggaatttctcgagtatcaccgccctccgggagctctgcatacatgcggcggtccaggcgccttccatcttatcgtccatctgaaggcaggtgatgctgttaacgtggtggtgacaggagggaagctcgcccacactgattttgacgagatgtactccacattttccggggtattcctctacccctttctttcacatctatag

SEQ ID NO: 11899 - RNA, 1548 nt, synthetic construct
  misc_feature 1..1548: note = source = /note="Description of Artificial Sequence: Synthetic coding sequence"
  source 1..1548: mol_type = other RNA
atggcccagctttttctcccattgctggccgctcttgtcttagcacaggccccagctgccctggctgacgtgcttgagggcgacagctctgaggatcgcgccttcagggtgaggatcgccggcgacgccccccttcaaggcgtgttaggcggtgccctgacgattccctgccacgtgcattacctcaggcccccacctagtagacgtgcagtgctaggttctccacgggtgaagtggacgttcttgagtcgggggagagaggctgaggtactcgtggccagaggcgtgcgcgtgaaagtgaacgaagcatatcgatttagggtcgctttgcccgcatatcccgccagccttacagacgtctcattggcgcttagcgagttacggcccaacgattcaggcatctacaggtgcgaggtgcagcacggcattgatgactcatccgatgcagttgaagacagccagctctacccaatccagacacctcgcgaagcctgctacggagacatggacggatttcctggcgtacgcaattacggcgtggtcgatcccgatgatttgtacgacgtgtactgttatgctgaggacttgaatggtgagttgttcttaggtgaccctcccgagaaactgaccctggaagaggcccgagcatattgtcaggaaagaggagctgagatcgcgacaaccggacagctctacgcggcctgggatgggggtctggatcactgcagtcctggttggctcgctgatggctcagttcgataccccatcgtcacaccaagccagaggtgcggcggcggtctgcctggggtcaagactctgtttctgttccccaaccagactggatttcctaacaaacactctcggttcaatgtgtattgcttcaggggctccacatgcttacttccatcgctgcgacctccaactcagcctccaactcaagatggtctcgaggcaattgtaactgtcacagaaaccttggaagagctgcagctgcctcaggaggcaactgagagcgagagtagaggcgccatctatagtatcccaataatggaagacggcgggggcggcagctccacccctgaggacccagccgaggcacctcgtacattgttggaattcgaaacccaaagtatggtgccgccaacaggattttcagaggaggaaggaaaggcacttgaagaagaggagaaatatgaggacgaggaagagaaagaggaggaagaagaagaagaagaagtcgaagatgaggctctctgggcctggccatcagaactgtcaagtcccggccccgaggcttcactcccaactgagcctgccgcccaggaggagtctctgtcacaggcccctgcccgggctgttctccagcctggggcgtcccccttgcctgatggggagtccgaagcctcccgtccgccgagagttcatggaccgccgacagagaccctcccgaccccgcgcgaacggaatttggcttccccctcaccaagcacactggtcgaggcacgcgaagtgggggaggccactggcggtccggagctcagtggctag

SEQ ID NO: 11900 - RNA, 1023 nt, synthetic construct
  misc_feature 1..1023: note = source = /note="Description of Artificial Sequence: Synthetic coding sequence"
  source 1..1023: mol_type = other RNA
atgccggggtggttgactcttccaacactctgcagattcctactgtgggccttcaccattttccacaaggcgcagggcgaccctgcctcccaccccgggcctcactatctgctcccacccatacacgaggtcatccactcacacaggggagctaccgcaaccttaccctgcgttctaggaacaaccccgcctagctacaaagttagatggtctaaagtcgaacccggagaactgcgggagactctgatcttaattacaaatggcctccatgctcgcggctatgggccactcggcggaagggcccgcatgaggcgcggacacaggctggatgcttccctagtaattgcaggcgtaagattggaagacgagggtcggtatcggtgtgaactgatcaatggtattgaggacgaaagcgtggctcttactctgtctcttgagggcgtcgtattcccttatcagccttccagaggccggtatcagttcaactactatgaagccaagcaggcctgcgaggaacaagatggcagactcgccacgtactcccagttgtaccaggcttggactgaagggttagactggtgtaatgctggctggctcctggagggatcggttcggtaccccgtactaactgcaagggccccctgtgggggtcgcggaagacctggcattagatcctacggaccaagagataggatgcgcgatcggtacgatgctttctgcttcacctccgctttggctgggcaggtatttttcgttcccggtaggctaaccctctccgaagcccatgcagcatgtagaaggcgaggcgcagtggtagccaaggtaggccacctgtacgccgcatggaagttctctggcttggaccagtgcgatggaggttggctggcagacgggtccgtgcggttccccatcactacccctagacctcgctgcggagggctccctgaccccggagttcgaagctttgggtttcccaggccgcagcaggctgcatacggaacctactgctatgccgagaactag

SEQ ID NO: 11901 - RNA, 690 nt, synthetic construct
  misc_feature 1..690: note = source = /note="Description of Artificial Sequence: Synthetic coding sequence"
  source 1..690: mol_type = other RNA
atggatctgctgcagttccttgcatttctgttcgttctgctgctctctggtatgggcgcgacaggcacactgcggacgagtctggaccccagcctggaaatttataaaaaaatgtttgaggttaaaagacgtgagcagctcctggctttgaaaaacttggcccagctgaacgatatccaccaacagtacaaaattttggacgttatgctgaagggcctatttaaagttctagaagatagtagaaccgtcctcaccgcagccgatgtcctccctgatggccccttcccacaagatgagaaactgaaagacgccttttcacatgtcgtcgaaaatacagccttctttggggatgtcgttctccgcttcccgagaatagtgcattattatttcgaccataacagtaactggaacctgcttattcggtggggcatcagcttctgcaaccagaccggcgtgttcaaccaaggcccccattcacccattcttagtctgatggctcaggagctggggataagcgaaaaggactccaacttccagaacccgtttaaaatagaccgcactgaattcatcccatcaacagacccctttcaaaaggccttgagagaagaggagaaaagaagaaagaaggaggagaagcgtaaagagatcaggaagggaccccgtatctcccgatcccaatcggaactatag

SEQ ID NO: 11902 - RNA, 465 nt, synthetic construct
  misc_feature 1..465: note = source = /note="Description of Artificial Sequence: Synthetic coding sequence"
  source 1..465: mol_type = other RNA
atgtctgtgggtacatcacttgaacaggctcagatgtctacattgacctgcccactgttcattccgacggttggccgcaaaacagccttacattccggtgaagatttccaaactctactcttcgaacgggtttttgttaacctcgacggatgtttcgacatggccaccggacagttcgccgctccattaaggggcatctattttttttctctcaatgtacactcatggaactataaggaaacctatgtacacatcatgcataaccagaaagaagctgtgattttgtacgcccagccctcagaacggagtatcatgcagagccaatctgtgatgctcgatctggcttacggggacagagtttgggtgaggttatttaagcgtcagcgcgagaacgcaatatattccaatgatttcgatacatacatcactttctctggccatctgatcaaggctgaagacgactag

SEQ ID NO: 11903 - RNA, 900 nt, synthetic construct
  misc_feature 1..900: note = source = /note="Description of Artificial Sequence: Synthetic coding sequence"
  source 1..900: mol_type = other RNA
atgaggtcagtgggggaaggtgctagggaatggatcagagaatgccaacatcagtttcgacatcataggtggaattgcaccactctggaccgggatcacaccgtcttcgggcgcgtcatgctgaggtccagtcgcgaggccgcatttgtatacgctatctccagcgcaggcgtagttcacgcgattacacgcgcttgcagccagggagagctttcagtatgttcatgcgacccctacacacgcggtcggcatcatgatcagaggggggacttcgactggggagggtgctccgataatattcattacggcgtgagatttgccaaagcattcgttgacgccaaagagaagcggctcaaagacgccagggccctgatgaaccttcataacaatagatgtggccgcaccgccgtccgccgttttctgaagctcgaatgtaagtgtcatggggtgtcaggctcctgtactctgaggacctgttggcgggctttatcggatttccgccgaaccggagattacttgaggcgtagatacgatggggcggtacaggtcatggccacccaagacggtgcgaacttcacagctgctaggcaaggttatcgccgcgcaacacggacagacctggtctatttcgacaactctcccgattattgtgtgctggacaaagcagccgggtcactaggcaccgccggaagagtttgtagcaaaacgtcaaagggaaccgatgggtgcgagatcatgtgctgcggtagaggctacgacactactcgggtaaccagggtcactcagtgtgagtgcaagttccactggtgctgtgccgtcaggtgtaaagaatgtaggaacacagtggacgtgcatacctgtaaagctcctaagaaggccgaatggctcgaccagacctag

SEQ ID NO: 11904 - RNA, 1710 nt, synthetic construct
  misc_feature 1..1710: note = source = /note="Description of Artificial Sequence: Synthetic coding sequence"
  source 1..1710: mol_type = other RNA
atgcttctcctcttcagcgtcattttgatttcttgggtttctaccgttggcggtgaaggaacactttgcgatttccccaagattcaccacgggtttctctacgacgaggaagattataacccatttagccaggtgcccaccggcgaggtgttttattacagctgtgaatataacttcgtttcaccatccaagtctttttggaccaggataacatgcacagaggagggttggtctcctacccctaaatgtctgagaatgtgttcttttcctttcgtgaaaaatggccatagcgaatctagcgggctcatccatcttgagggggatactgttcagattatttgtaatacagggtattctctgcagaacaacgaaaagaacatttcctgcgtagagagaggctggtccacaccaccgatctgcagtttcaccaagggggagtgtcacgtgcccatcctggaagccaacgtggacgcgcagccaaagaaggagtcgtataaggtgggtgacgtgcttaaatttagctgtaggaagaatcttattcgcgtggggtcagactcagtccaatgttatcagttcggatggtctccaaactttcctacatgtaagggtcaggtgcggtcatgcggacccccaccccaactgagtaatggggaagtgaaggaaattagaaaagaggaatacggccacaacgaggtggtagaatatgactgcaaccccaacttcatcattaacggccccaagaagatacagtgcgttgacggcgagtggacaacattgccgacttgcgtagagcaggtgaaaacatgcggctatattcccgaacttgaatacggttacgtccagccatccgtacccccctaccagcacggtgtgtctgtggaagtcaattgcaggaacgaatatgccatgatcggaaataacatgatcacatgtatcaacgggatctggacagagttacctatgtgtgtagccacacaccaattaaagaggtgtaaaattgctggtgtgaatatcaaaactcttttgaagctttcgggcaaggagtttaaccataattctaggatccggtaccgttgctctgacatctttcggtatcggcattcggtctgcatcaatggtaaatggaaccctgaagtcgattgcacagaaaagagagagcagttttgtccgccacccccacagataccaaatgcccaaaacatgaccaccacggtcaactatcaggacggggaaaaagtagctgttttgtgtaaagaaaactatctcctgcccgaggcgaaagagatcgtgtgtaaagatggacgctggcagtcccttcctcgttgcgtggaaagcaccgcttattgcgggccccctccgtccatcaacaacggcgacacgacctcatttccgctgagcgtgtaccctccgggctcaacagtgacctacaggtgtcaatccttttacaaactccaagggtctgtgaccgtgacctgtcgaaataagcaatggtccgaacccccccgatgtcttgatccctgcgtagtgtctgaggagaacatgaacaaaaacaatatccagttgaagtggagaaatgacggcaaactgtacgcaaagacaggagatgcagtcgagtttcaatgtaagttcccgcataaggccatgatctcttcccccccctttcgtgctatatgccaagagggtaagtttgaatatcctatctgcgagtag

SEQ ID NO: 11905 - RNA, 351 nt, synthetic construct
  misc_feature 1..351: note = source = /note="Description of Artificial Sequence: Synthetic coding sequence"
  source 1..351: mol_type = other RNA
atgaagggtttaaggtcacttgccgcaacaaccctggccctgttcctggtcttcgtgttcctaggaaatagttcatgtgccccacagaggctcctggagagacggaattggaccccacaggctatgctctacctaaagggagctcagggaagacgatttatctccgaccagtccaggagaaaagacctgagcgacaggccactacccgaacgtaggtcaccgaatccccaattgctgacaatccccgaagccgccaccattcttctggcctcattgcaaaagtcccccgaagatgaggaaaagaactttgatcaaacccgctttcttgaggacagccttttaaattggtag

SEQ ID NO: 11906 - RNA, 192 nt, synthetic construct
  misc_feature 1..192: note = source = /note="Description of Artificial Sequence: Synthetic coding sequence"
  source 1..192: mol_type = other RNA
atgaagcatgtgttgaacctgtacctgcttggagtcgtgctgaccttgttaagtatttttgtcagagtgatggagtctcttgaggggctgctcgaatccccatctcccggcactagttggactaccagatcacaactcgcaaacactgaaccaacaaaaggcttacctgatcatccttcacggtccatgtag

SEQ ID NO: 11907 - RNA, 567 nt, synthetic construct
  misc_feature 1..567: note = source = /note="Description of Artificial Sequence: Synthetic coding sequence"
  source 1..567: mol_type = other RNA
atggtgcctggcgcagccggttggtgttgtcttgtgctctggctgcccgcctgcgtcgccgcccacggctttcgaatacacgattacttgtattttcaggtgctgtcccctggggacattcgctatatctttactgctactccggccaaagacttcggtggaatattccacactcgctatgaacagattcacttagttccagccgaacctccagaggcttgtggggagctgagcaacggattctttattcaagaccagatagctcttgtcgaaagggggggttgtagctttctttccaaaactagggtggtgcaggaacatggaggacgcgcagtcatcatctcagacaatgcagtcgacaatgacagtttctacgtggagatgatacaagacagcacacagcggaccgctgatattcctgctctgtttctcctggggcgcgacggatacatgataagaaggtcactcgagcagcacggcctcccctgggcaattatttcgatccctgtgaatgtaacctcaattccaaccttcgaattgctgcaaccaccctggacattctggtag

SEQ ID NO: 11908 - RNA, 2559 nt, synthetic construct
  misc_feature 1..2559: note = source = /note="Description of Artificial Sequence: Synthetic coding sequence"
  source 1..2559: mol_type = other RNA
atgaagcctatgttgaaggattttagtaacctgttgctcgtggtgctgtgcgattacgtgttgggagaggcggaatatctcctgctgcgcgagccaggtcacgtcgctctcagtaatgatactgtgtatgtagactttcagtactttgatggcgcaaatggaacgctcagaaatgtcagcgtcctgctccttgaagccaacactaatcagaccgttacaactaaatacctgctcaccaatcagtcccagggaaccctcaaattcgagtgcttttattttaaggaggccggagactactggttcaccatgactcctgaggctactgataactccacaccttttccatggtgggagaagtctgcattcctgaaggttgaatggccggttttccatgtggatctcaataggagcgctaaggctgccgaaggtacattccaagtcggattattcactagtcaacccctatgccccttccctgtagacaagcccaacattgtagtagatgtgattttcactaattctctccctgaggcacgcagaaattcacgtcagcctttagagatccgaacatctaagcgcacagagcttgcgcagggccagtgggtcgagttcggatgtgctcctctgggccccgaagcctacgtgacagttgttttgaagctccttggcagagacagcgtgatcaccagtacaggaccgatcgacttggctcagaagttcggatataagttggtgatggtgccagagctcacatgcgaaagcggggttgaggtgactgttttacccccaccttgcacgttcgttcaaggcgtcgtgactgtttttaaggaggcaccaagatacccagggaagagaactatccacctggccgagaactccctgcctctcggtgagcggcgcacaatttttaattgcacgttgttcgacatggggaaaaacaaatactgttttgactttggcattagctcaaggagccacttttccgcgaaggaggaatgtatgttaattcagaggaacaccgagacttggggcctgtggcagccttggagtcagtgcagcgccacctgcggcgacggagtaagagagcggagaagggtgtgtctgacctcctttccgagctctcccgtctgtcccggcatgtccttggaggctagcctttgcagcctggaagaatgcgccgcattccaaccctcgagcccatcccccctccaacctcagggcccagtcaagtccaataatattgtaactgttacaggaattagtctttgcctgtttatcatcatagccaccgtactcattacactgtggcgcaggtttggacgccccgcgaagtgcagtacccccgcacgacacaacagcatccactccccatctttcaggaagaatagtgacgaggagaatatatgcgagctctccgaacagagagggagcttttcagatggcggcgatggtcctaccggatctcccggggacaccggcatcccgctcacctataggagaagcggtcctgttccacccgaagatgacgcatctggttccgaatcttttcagtcaaatgcccagaagatcatcccaccactgttctcctacagactggcccagcagcagttgaaagagatgaagaagaaaggtctaactgagacgaccaaggtttatcacgtatcccagtcgcctttaacagataccgccattgacgcagctcctagcgccccactcgacctggagtcacccgaggaagctgcagccaataagtttagaataaaatccccctttcccgagcagcccgctgtctctgccggtgaaagacccccgtctagacttgatttgaatgtgacacaggcctcctgtgcgataagccccagccagaccctgatccgcaaatctcaggctcgtcacgtgggctcccgagggggccccagtgaacgctcacatgccaggaacgcacattttcgacgaacagcctccttccatgaggctagacaggcaaggccatttagggagaggtcaatgtccacactgaccccacgccaggcacccgcctatagcagcagaactagaacttgtgagcaggccgaggatagattcagaccccagtctaggggcgcccacctttttcccgagaagcttgagcatttccaagaggccagtggcacacgtggtcctctcaatcctctgcctaagtcatacactctcggccagccactgcgaaaaccagacctcggggaccaccaggctggccttgtcgccggaattgaaaggaccgagccccatcgggcccgcagaggtccttctccgagccataagagcgtatccagaaagcagtcgtcaccaatttcccccaaagacaactatcaacgcgtgtcctccctttccccatcccagtgccgcaaggacaagtgccagtcttttccaacacaccctgagttcgcgttttacgataatacgtcttttgggttaactgaggcagaacagcgcatgctcgatctacctggttacttcgggtccaacgaagaggacgagaccacttctactctaagtgttgagaagctcgttatctag

SEQ ID NO: 11909 - RNA, 369 nt, synthetic construct
  misc_feature 1..369: note = source = /note="Description of Artificial Sequence: Synthetic coding sequence"
  source 1..369: mol_type = other RNA
atgggatttcacttttgtatctggattatttttctgcttcctccaccttgcaagaaatgcctcagtcccccaaccatgaatctccgccctccaaaatcttgcggaaatgtgttctattgggtgcttgtcttgaactcaggccttctgtacaaattctgtcaaaccataaaatgccgagcaaactggcgcccagcccgggccccacgaggttggaacgaggcaacagaacgccatcaggagcgtaggactcagatggagaccgaaatgggtggcatctcgaccacgtactggcataggctatgcacttgtacagatcgaagggccgaaaaactggtaatggacgggaataactgctggtttcacaaatag

SEQ ID NO: 11910 - RNA, 978 nt, synthetic construct
  misc_feature 1..978: note = source = /note="Description of Artificial Sequence: Synthetic coding sequence"
  source 1..978: mol_type = other RNA
atgcaagggcgagttgccgggtcttgtgctccgctgggtcttctgttggtgtgtttgcacttgcccggactcttcgctaggtctatcggggtggtggaagagaaggtgtctcagaatctaggcaccaatctgcctcagttaggtcagccttcctcaacaggcccatcaaattcagaacacccacaacccgccctggacccacgctccaacgatctggcccgggtgccactcaaactcagtgtgcctgcgtctgacgggtttcccccagcaggaggctccgccgtacagcgctggccacccagttggggcctgccagcgatggactcttggccgcccgaagatccctggcaaatgatggccgccgcggctgaggatagactcggggaagctctgccggaggagttatcgtatctgagctcagccgccgctcttgccccaggatctggccccctccccggagaatcctcacctgacgccaccggactgtctccaaaggctagtcttcttcaccaggattctgaaagcagacggcttcctcgttcaaacagcttaggtgccggcggtaaaattctgtctcagcgcccaccctggtccctgattcatagagtgctccccgatcacccctggggcacattaaatccaagtgtgagttggggaggcggcgggccagggacaggttggggcacaaggccgatgcctcaccctgaagggatttggggaatcaacaaccagccacctggtacctcatgggggaacatcaacagatatcctggcgggtcctggggaaacatcaacaggtacccagggggttcctggggcaatattaatcgatatccaggcggaagctggggtaacatacacctctatcctggcatcaacaacccgttccctcctggcgtcctgcgtccaccagggtcttcttggaatattcctgccggcttcccaaacccaccctcacctagattgcagtggggctag

SEQ ID NO: 11911 - RNA, 2631 nt, synthetic construct
  misc_feature 1..2631: note = source = /note="Description of Artificial Sequence: Synthetic coding sequence"
  source 1..2631: mol_type = other RNA
atgggcccggaagccttgtcatctctcttactgttactgctagtggcgtcaggggatgcagatatgaagggccatttcgatccagctaaatgtaggtacgcactaggaatgcaggaccgaactatcccagactctgatatttccgcatccagttcttggtccgactctaccgccgcccgtcacagccggcttgagagtagcgacggcgacggagcctggtgcccggccggctcggtctttcccaaagaggaggaatatttgcaggtcgacctccagagattgcacctcgtcgcccttgtgggtactcagggccggcatgcgggaggattgggcaaggagttttctcgaagctaccgcttgaggtacagtcgcgatggcaggaggtggatgggatggaaagaccggtggggtcaagaggtcatttcaggaaacgaggatcccgaaggggtggtccttaaagacctgggccctccaatggtagcacggctcgttcgattttacccaagagccgacagagtgatgtctgtatgcttgagagtcgaattatacgggtgcctgtggcgagacggtctcctgtcatacaccgctcctgtgggtcagacaatgtaccttagcgaggccgtgtatctgaatgatagtacctacgatggacacacagtgggtggcctgcagtatggtggcctggggcaattggctgacggtgtggtaggcctagatgatttccgaaagtcccaggagctgagagtttggcccggatacgactatgtgggctggtcgaaccattcattctcctcagggtatgtagagatggagtttgagtttgatagactccgagcatttcaagccatgcaggtccactgtaataacatgcacacgctgggggctcgccttccaggaggggtggaatgtcgattcagacggggcccagccatggcttgggaaggagaacctatgaggcacaatctgggcggaaacctgggtgatccaagagcacgtgcagtctccgtacctctgggcggtagggtcgctaggttcctgcagtgtaggttcctgtttgcaggcccctggttactcttctcagaaatctcttttatcagcgatgtggtcaacaactccagtccagccctaggcggcactttcccccccgcaccctggtggcctccaggccccccccccactaatttttcaagcctggagctggaaccccgaggccagcaacccgtggctaaggcggaaggatcaccaactgccatacttatcggatgtctggttgctatcattctgctcctgctgttgataattgctctgatgctatggcggctccattggcgtcgcctgctttccaaagccgagaggcgggtcctcgaagaagagttaacagtgcatctctcagtccctggtgacacgattctgatcaataaccgccctgggcctcgcgaaccacccccctaccaggaacccagaccaagaggtaatccgccccacagtgccccctgtgtacccaatggtagcgcctactccggagactatatggaacccgagaagccaggcgctcctctgctacccccaccgccacagaacagcgtgccccattacgccgaggctgatattgtcaccctgcagggcgttactggcggcaatacatatgcagtacccgccctaccaccgggcgccgttggagacggaccccctcgggtggattttccccgttcaagacttcgctttaaggagaagctgggggagggacagtttggcgaagtgcacttatgcgaggtggattctccgcaggatttagtttccctggacttccctcttaatgttagaaagggccaccccctgctagttgccgtcaagattctgagacccgacgctaccaaaaatgctcggaacgactttctgaaggaggtgaaaatcatgagcagactaaaagaccccaacataataaggctgttgggggtctgcgtccaggacgacccactgtgcatgatcaccgactacatggaaaatggagatttgaaccaatttcttagcgcccatcagcttgaggataaggctgcggaaggagcccctggagatggacaggcggcccagggaccgactatctcttaccccatgctgctgcacgtggctgcacaaattgctagcggtatgaggtacctggccaccctgaattttgtccacagagatcttgccacaaggaactgcttggtcggggaaaattttaccatcaagattgctgacttcggcatgagcagaaacttgtacgcaggggactactatcgtgttcaaggcagggccgttctgcctatcagatggatggcgtgggaatgcattttgatgggaaagttcaccacagcttccgacgtctgggccttcggagtgaccttgtgggaagtgctgatgctatgccgggcacagccattcggacaactgacagacgaacaggtgatcgaaaatgccggggaattcttcagggaccagggcaggcaggtctatttgtcgcggcccccagcgtgcccccaggggctctatgagcttatgctacggtgctggtcccgggagagcgaacagcgaccgccttttagccagcttcaccgtttccttgccgaggacgcattaaatacagtttag

SEQ ID NO: 11912 - RNA, 672 nt, synthetic construct
  misc_feature 1..672: note = source = /note="Description of Artificial Sequence: Synthetic coding sequence"
  source 1..672: mol_type = other RNA
atgaaattcgtcccttgcctcctcctagtcacactttcttgcttaggaacgttgggacaggcaccacgccagaaacagggttccacaggtgaggaattccactttcagaccggggggcgagactcttgtactatgagaccctccagtttggggcagggagcgggcgaggtgtggctgcgagtagactgtagaaacacagaccagacatattggtgtgagtaccgtggacagccctctatgtgccaggcatttgccgcggaccctaagccatattggaaccaggcgctgcaggagctgaggcgtctccaccatgcatgccaaggggccccagtgttgaggccctcagtttgtcgcgaggccgggcctcaagcccatatgcagcaagtcacaagctctctgaaagggagcccagagcctaaccagcagcctgaggccggtacgccttctcttcggccaaaagcgacggtaaaactgacagaagccacacagctgggaaaagactctatggaagaactaggcaaagcaaaaccaaccacgagacccaccgcaaagccaacacagcccggtccccgtccaggcgggaacgaagaagctaaaaagaaagcgtgggaacactgctggaagccgttccaagccctctgcgcttttctgatctccttttttaggggctag

SEQ ID NO: 11913 - RNA, 585 nt, synthetic construct
  misc_feature 1..585: note = source = /note="Description of Artificial Sequence: Synthetic coding sequence"
  source 1..585: mol_type = other RNA
atgaccatgcgacacaactggacccccgacctttcccccctatgggtcctgctgttgtgtgcacatgttgtcaccctactcgtgcgagctacccccgtgtcccaaacaacgactgccgccactgccagcgtacgttccacgaaagatccctgtccctctcagcctcccgttttcccggccgctaaacaatgcccagctctcgaggtgacatggcctgaggtcgaagtcccgctgaacggcactcttagtctttcttgtgtggcgtgctctagattcccgaatttttcaattctttactggctggggaatggatcattcatcgaacacctgcctgggagactgtgggagggcagcacatcccgggagaggggctccactggaacacagctgtgtaaggccctagtcctggaacaactgaccccagcgctacacagtactaacttttcctgtgtccttgtcgatcctgaacaagtggtgcaaagacacgtcgtattagcacagttatgggccggattgcgtgctaccctcccgccgacccaagaggcactcccatctagccattctagtcctcagcagcaaggctag

SEQ ID NO: 11914 - RNA, 777 nt, synthetic construct
  misc_feature 1..777: note = source = /note="Description of Artificial Sequence: Synthetic coding sequence"
  source 1..777: mol_type = other RNA
atgatcgccatatccgctgtaagcagcgctctcctcttctcattactgtgtgaagccagtactgttgttcttctcaattccacagactcctcaccccccaccaataatttcacagatatcgaggccgcactgaaggcacagctagactctgccgatatacctaaagctagacggaagaggtacattagtcaaaacgacatgatcgccatcctggactatcacaaccaagtgagaggaaaggtgttcccccccgctgcaaatatggaatacatggtctgggatgaaaaccttgcgaagtccgccgaggcctgggcagccacatgcatttgggatcacggcccgtcatatttattaaggttccttggccagaatctgagcgtaagaacaggacggtatcgcagcattttacaactggtaaaaccctggtacgacgaggtcaaagactacgccttcccctacccacaggattgtaatccccgctgtccaatgcgatgcttcggaccaatgtgtactcattacactcagatggtgtgggctacctccaatcggatcggctgcgctattcatacctgtcagaatatgaatgtttggggcagcgtatggcggagggctgtctatctcgtctgcaactacgcaccaaagggcaactggatcggagaggcaccatataaagtcggtgtgccatgcagttcgtgcccgccatcttacggtggtagttgtacggataacttgtgtttccctggagtcacttctaattatttgtactggttcaagtag

SEQ ID NO: 11915 - RNA, 906 nt, synthetic construct
  misc_feature 1..906: note = source = /note="Description of Artificial Sequence: Synthetic coding sequence"
  source 1..906: mol_type = other RNA
atgcttcctctaaccatgacagtcctgatccttctcttgctccctactgggcaggcagccccaaaagatggagtgacccggcccgatagtgaggttcagcatcagcttcttcccaatcctttccagccaggtcaagaacagcttgggctgctgcagagctacctgaagggcttaggacgtaccgaagtacagctggagcatctctcaagggagcaggtcctcctgtatctgtttgctttgcacgattacgatcaatcagggcagctcgacggtctcgaacttttgagcatgctgacagccgcgttggcccccggagccgccaatagtcccacaactaatccagtcattctcattgtggacaaggttttggagactcaggacttgaatggagacggacttatgactccagcggaactgattaatttccccggtgtcgccctgaggcatgtggaacccggagagcctctggccccatctccacaggagccccaagctgtcggaaggcaatcattgctggccaagtcacctctgcggcaagaaacccaggaggcccccggaccgagggaggaagcaaagggccaggtggaagcacggagagaaagtttagaccccgtacaggagcctggcggtcaagcagaggcggatggcgatgttccaggcccaagaggagaagctgaaggccaagcagaggctaaaggcgatgcccccgggcctcgaggggaagccggcggccaggctgaggcagaaggcgatgcaccagggccccgcggcgaagctggaggtcaagctgaagcccgcgaaaacggggaggaggccaaggagttgccgggagaaacgctggagtccaaaaacacacaaaatgattttgaagtacacattgtgcaagtcgaaaacgacgagatttag

SEQ ID NO: 11916 - RNA, 969 nt, synthetic construct
  misc_feature 1..969: note = source = /note="Description of Artificial Sequence: Synthetic coding sequence"
  source 1..969: mol_type = other RNA
atgaagaccctagctggactcgtgttgggcttggttatattcgacgccgccgtgacagcgcccaccctcgagtctattaactacgacagtgagacctacgatgctactctagaggacttggacaacctgtataactatgagaacatccctgtggacaaagtcgagatcgaaatagccacagtgatgccgtccggcaatcgcgagctgctgacaccacctccacagccagagaaagctcaagaggaagaggaagaagaagaatccacgccgcgcttgattgacggcagcagcccccaagagcccgaatttacaggcgtgctcggccctcacacaaacgaagacttccccacctgtctgctgtgtacctgtatatctacaactgtgtactgtgatgatcatgaactcgacgccattcctcccttgcccaaaaatactgcctacttttacagtcggttcaaccgaatcaagaagataaataaaaacgactttgcatccttaagcgatctcaagaggatcgacctgacctccaacctgatctcagaaattgatgaggatgccttcaggaaactcccacaactgcgcgaattagtactccgggataataaaatcaggcaattaccagaactgcccaccaccctgacattcattgatatttccaataatcgcttgggcagaaagggcatcaagcaggaagccttcaaagacatgtacgaccttcaccacctttacctgactgacaataacctggatcatatcccactgcccctgcccgaaaacctccgggcactccacctgcagaacaacaacatacttgaaatgcatgaggatactttctgcaatgtcaagaatctgacttacattcgtaaggcactggaagatatccgcctcgatggcaaccctataaacctctccaaaacccctcaagcctatatgtgtctccctcgccttcccgttggatcattagtctag

SEQ ID NO: 11917 - RNA, 618 nt, synthetic construct
  misc_feature 1..618: note = source = /note="Description of Artificial Sequence: Synthetic coding sequence"
  source 1..618: mol_type = other RNA
atggttaatctggccgctatggtgtggcgccggctactgaggaaacggtgggtgttggctctcgtttttggcttgtctttggtatacttcctctcttcgacatttaaacaggaagagcgcgctgtgcgggaccggaaccttctacaagtgcacgaccataaccagccaatcccatggaaagttcaatttaacctgggaaactccagcagaccaagtaatcaatgtaggaattccattcaagggaaacacttaattactgacgagctgggctatgtctgtgagcgcaaagatttgctcgtgaacggctgttgtaacgttaacgttccgtcgaccaaacaatactgctgtgacggctgttggccaaatggatgctgctccgcctacgagtactgtgtcagttgttgcttacaacctaacaagcagcttctactagaaaggttcctgaacagagcagctgtcgcctttcagaacttgttcatggccgtggaggaccactttgaactctgccttgctaaatgtcggacgtctagtcaatctgtccagcatgagaatacttacagagaccctatcgcaaagtactgttacggtgagtcaccccccgagctgttccctgcgtag

SEQ ID NO: 11918 - RNA, 3057 nt, synthetic construct
  misc_feature 1..3057: note = source = /note="Description of Artificial Sequence: Synthetic coding sequence"
  source 1..3057: mol_type = other RNA
atggtgagccatttcatgggctctttatccgtcttatgctttctcctattacttggatttcagttcgtctgtcctcagccctctacacaacatcggaaggttccccagcggatggctgctgagggggcaccggaagatgacggcgggggcggtgccccaggtgtgtggggggcttggggtccttggtcggcctgtagtaggagttgttcagggggagttatggagcagactagaccctgtctgcccagatcctatcgcctgaggggcggacaacgacctggagcgcctgctcgcgcctttgcagatcatgtggtgagcgcagttcgcacctccgtgcccctgcaccgttcacgtgatgagacaccagcactggcaggcaccgacgcctctagacaaggaccaaccgtactgaggggctcccggcatcctcagccccaggggctagaagtgaccggtgatcgtcgatcccggacccgaggaaccattggcccaggtaagtacggctacggaaaggctccttatatactccccctgcagaccgacacagcccacacaccacagaggctccgtcgtcaaaagctctcctcacgacatagtcggagtcagggagcatcatctgcccggcacggatattcaagcccagcacatcaggtaccccagcacggacccctctatcagtccgacagtggtcctagatctggactgcaggcggcggaagcccccatttatcagctgccgctaacacacgatcaagggtacccagccgctagctccctgttccactcacctgagacctcaaataaccacggggtaggaacccatggtgccactcagtctttctcccaacctgctcgctctacagctatttcctgtatcggagcctatcggcaatacaaactctgcaacaccaacgtctgccccgaaagcagccgatcaatccgcgaagtgcagtgtgccagttacaataataaaccgttcatgggccgattctacgagtgggagccatttgccgaggtgaagggcaacagaaagtgcgaactgaattgccaggccatgggttatcgattctatgtcagacaggccgaaaaagttattgacggcactccctgcgaccagaacggcacggccatctgcgtgtcaggtcagtgtaagtcaattggctgtgatgactatcttggttctgataaggtggtggacaaatgtggggtatgtggaggagacaatactggttgtcaggtcgtgtccggcgtattcaaacatgccctaacatcactcggctaccacagggttgtggagatccccgagggcgctaccaaaataaacatcacagaaatgtataagtcaaataactacctcgccctgaggagtcggagcggcaggtctataatcaacggcaattgggcgattgaccggccggggaagtatgaaggcgggggcaccatgtttacttataagcgaccgaatgagatctctagcacagcgggcgaatctttcttggctgagggtcctacaaacgagattctcgacgtgtatatgattcatcagcagcctaatccaggagttcactacgaatacgttatcatggggactaacgccatttccccccaggtacctccccacagacgtccaggtgagccttttaacggccaaatggtgaccgaggggcggtcacaggaagagggcgagcagaaaggaaggaatgaagagaaggaggacctgcgtggggaagctcctgagatgtttacctccgaatccgcgcagacttttccagtgcgtcacccagaccgcttttcaccacaccgtcccgataatttagtcccgcccgcgcctcagccgccacgacgttcaagagaccataattggaaacaattgggaactaccgagtgttctaccacgtgcggtaaaggatcacagtatcctatttttagatgcgtccatcgatctactcatgaggaggccccggaatcttactgtgactctagtatgaagccgacacccgaggaagagccctgcaacatctttccctgtcccgccttttgggatatcggcgaatggtcagagtgctccaagacctgtggtctcgggatgcagcaccggcaggtactgtgccggcaagtttacgcgaatcggtcattaaccgtgcagccctatagatgtcagcacttagaaaagcccgaaactacaagtacctgccagctcaagatttgctctgagtggcagatccgcacagactggacctcgtgttccgtgccttgtggcgtgggtcaacgaactcgggatgtgaagtgtgtttccaatattggggacgttgtcgacgatgaggaatgcaacatgaaactccgccctaatgacattgaaaactgtgatatgggtccctgcgctaaaagctggtttttgaccgaatggagcgagcggtgctccgctgaatgcggtgctggggtgaggaccagatctgtagtttgcatgaccaatcatgtctcttcactacctttggagggatgcgggaacaaccgtcctgcagaggccaccccatgtgataatggcccttgtaccggtaaggttgagtggtttgccggctcctggtcccagtgcagcattgagtgtggctccggcacacagcagagagaagtcatctgtgttagaaaaaacgccgatacttttgaagtcttggacccatctgaatgttcatttctcgagaaacccccaagtcaacagtcctgccacttaaagccctgcggagcaaagtggttttctaccgagtggagtatgtgttccaaatcttgtcagggtggatttcgggttcgcgaggtccgctgtctgagtgatgatatgaccctctccaacttatgtgacccccagctcaaacccgaagagcgcgaatcttgtaatccacaggattgtgtacctgaggtcgacgagaattgtaaagataagtactacaactgtaatgtcgttgtccaggctcgcctgtgtgtttataactactacaagaccgcttgctgcgcttcatgtaccagagtcgcaaatcgacagacaggctttttaggcagcaggtag

SEQ ID NO: 11919 - RNA, 1503 nt, synthetic construct
  misc_feature 1..1503: note = source = /note="Description of Artificial Sequence: Synthetic coding sequence"
  source 1..1503: mol_type = other RNA
atgaagtgcacggcgagagagtggttgcgagtgaccacagtgctgtttatggcccgcgctattcccgccatggtggtaccgaacgccaccctactcgaaaagttgttggagaaatacatggatgaagatggcgagtggtggatcgcaaaacagcgcggaaaaagggctattacggacaacgacatgcagtccatactagacctacacaataagctaaggtcgcaggtgtatcctaccgcatccaatatggagtatatgacatgggacgtggaactagaaaggagcgcagaaagttgggctgaatcatgcctctgggagcacgggcctgcctcactgttaccttctatcggccaaaaccttggggctcattggggccgttatagacctccaacctttcatgtccaaagctggtatgatgaggtgaaggatttctcttacccatacgaacatgaatgcaacccttactgccctttccgctgctccggtcctgtatgtacccattatacacaggtcgtctgggccacctctaacagaataggctgcgccatcaacctgtgtcacaacatgaatatttggggccagatctggccgaaggccgtgtacctcgtgtgcaattactcacccaagggcaattggtggggccacgctccttacaaacacggacgcccttgttccgcctgtccgccttcattcggcggtggatgtcgcgagaatctctgctacaaggagggctccgacagatattacccaccaagggaagaagaaacaaatgagatagaacggcagcagagccaggtgcacgacacccatgttaggacacgctcagacgacagttcaaggaatgaggtgatctcggcccagcagatgtctcagatcgtaagttgcgaggtgcgacttcgggatcagtgtaaaggcactacatgcaaccgttatgaatgcccagcaggctgcttagattcaaaggctaaggtgataggaagtgtgcactatgagatgcagtccagtatttgccgggcagccatccactatggcattattgacaacgacggtggctgggtagacattactcgtcaggggaggaaacattatttcatcaagtcaaacagaaatgggattcaaactataggtaagtatcagtcagccaatagctttaccgtgagtaaggtcacagtgcaggccgttacatgcgagacaacagttgaacaactttgcccattccataagccggcctcccactgccctagagtgtattgcccacgaaactgcatgcaagctaatcctcattatgctcgcgtaatagggactagggtctactcggacctcagtagtatctgtcgcgccgcggtccacgctggcgtcgttagaaaccacgggggatacgttgatgtcatgccagtggacaagcggaagacttacattgcctcatttcaaaacgggatcttcagcgagtcattgcaaaacccaccaggtggaaaggcttttcgggtgttcgccgtagtgtag

SEQ ID NO: 11920 - RNA, 2070 nt, synthetic construct
  misc_feature 1..2070: note = source = /note="Description of Artificial Sequence: Synthetic coding sequence"
  source 1..2070: mol_type = other RNA
atgaaattcggcgctgtgacccgtattggcggcccaccgctcggcaaccaaagcccgtcctcgtgctcactattgcacgaaaaggatccacccacaacctctggaccccagacagatcaacctaaaaagcacctgacaaactttaagagtgcgactcggcgggtcgcgcgcactcagtggctaacagcagaccgacagacatgggccagtattagcagcgtaccttgggcccaaacaatcagcgaaaagaagccgggcggatcactgtgggagaccagatcctcaccacctaccacggccggtactgaggaagctatgaatacaaccagccttctggcacctgcagctgagataatggccaccccaggcagccctagccaagcctcaccgaccctgggggccttcacccatggcacacagactcctagtcctacaaaggctacagctccccggtaccctcagaccggcgacctctcagcagagtggcctttcactgccggcgaggagcccgtcctggtccccagaccacatcaagtaagccgcgttaggagcagctgttgcctcagccccatcctgtgcagccccgccatgattgcattcctcctgacgagtgttctgatgataccacatgccgggggccacccgctcgatactccacacttgcctcaagaactgcctccagggctgcctaataatattaacatcaccttcttctctggaatgttcaagaacgttgagagcgtcgcagaaatctttgactgcctgggccctcacttcacgtggttgcaggccgtgtttaccaattttcccgtgctgattcaatttgtgaacgggatgaagtgtgttgctgggctttgtcccagagatttcgaggattacgggtgtacttgtaggttcgaaatggagggccttcctgtggacgaatccgactcctgctgcttccagcaccgtcgctgctatgaggaggcagccgaaatggattgtctgcaagacccggccaaattaagcactgaagttaactgcgtgtctaagaagattatatgtgaaagtaaagacaactgcgagcatttgttgtgtacgtgcgataaagccgcgattgagtgtttagcccgtagctccctgaacagctctttgaatttgctggacaccagcttctgtttagcgcagacacctgaaaccaccatcaaagaggacctcacaacactgttgccccgtgttgtaccagttgaacctaccgacacaagtctaaccgctctctccggcgaggttgctgctgaaacggaagccgaccgcttgatcaccctgagcaaaaaaaaggccggccatgatcaggaaggcgttggagcagcccgcgccacgagtcccccgggttccgccgagatcgtagctacccgagtcacagccaagatagtgaccttagtcccagccggcattaagagcctcggactggctgtcagctccgtggagaacgatccagaagaaactaccgagaaagcctgcgatcggtttacttttctccatctgggatcaggagataacatgcaggtaatgccccagttgggcgagatgcttttttgcctgacttcgcggtgccctgaggagtttgagtcctatggctgttactgtggacaggaagggaggggagagccgagagacgatcttgaccgttgttgtctgtcgcatcattgttgtctggaacaagttcgacgtcttggatgcttgcttgagcgcctgccatggtctcccgtagtgtgtgtagatcataccccgaaatgcggtggtcaatcgttgtgcgaaaaactgttgtgtgcctgtgaccagactgcagccgagtgtatgacttccgccagctttaatcagagtttgaaatcgcctagtcgactggggtgtccaggccagcccgcggcgtgtgaagactctctccatccagtaccagccgctcccactcttggcagctcaagcgaagaagacagcgaagaagaccctccccaagaggacctgggacgagcaaaacgctttctgaggaaatcccttggaccacttggcattggcccactgcacggtaggtag

SEQ ID NO: 11921 - RNA, 1359 nt, synthetic construct
  misc_feature 1..1359: note = source = /note="Description of Artificial Sequence: Synthetic coding sequence"
  source 1..1359: mol_type = other RNA
atggaattggcattgagacgaagccctgtgcccagatggctactgctgctgcccctgcttctgggactcaacgcaggagccgtaatcgattggcccacagaggagggcaaagaggtgtgggattatgtcaccgtacgaaaggatgcttatatgttttggtggttatactacgcaactaacagttgcaagaatttcagcgagttgccactggttatgtggcttcaaggcggcccaggcggttcctcgaccgggttcgggaactttgaggagattggacctctcgatagtgatttgaagcctcgcaagaccacctggctgcaggctgcttctctgctgtttgttgataatcccgtcggcacaggttttagctacgtgaatggctcgggcgcctatgcaaaggatctcgccatggtggctagcgacatgatggtgctactgaaaaccttcttttcctgccataaagaatttcaaaccgtcccgttttatatcttctcggaaagttatgggggaaagatggctgctggcatcggcctggaactttacaaggcaattcagcgaggaactatcaaatgtaattttgccggagttgcacttggcgactcttggattagccctgtcgattctgtcctttcctggggaccctacctctactccatgtccttgctagaggataagggcctcgctgaagtgtccaaggtggcagaacaggtcctgaacgccgtgaacaaaggcttatatcgagaagcgactgaactttggggtaaagcggagatgattattgagcagaatactgacggagtcaatttttacaatatactgaccaagagtacacctacctccacaatggaatcctcgctggaatttactcagtctcacttggtatgtctttgccagcgccatgtacgacatttgcagagagatgccttatctcaattgatgaacgggccaatcagaaagaagctgaagataatacctgaggaccagtcctgggggggccaggctacaaacgtgtttgtcaatatggaagaagatttcatgaagcctgtgatttctatagtggacgaactgttggaggccggtatcaacgtgactgtgtataacgggcagctagacctcattgttgacactatgggccaagaagcatgggtgaggaaactcaagtggcccgagctgcccaaattctcacaacttaaatggaaagccctgtacagtgaccctaaaagtttagaaacatctgcctttgttaagtcatataagaacctagctttctattggatacttaaggctggtcacatggtgcccagtgatcagggagacatggccttaaagatgatgcggctggtcacgcaacaggagtag

SEQ ID NO: 11922 - RNA, 1395 nt, synthetic construct
  misc_feature 1..1395: note = source = /note="Description of Artificial Sequence: Synthetic coding sequence"
  source 1..1395: mol_type = other RNA
atggtgcggctggccgctgagctcctgctgcttctgggtctgctactcttaaccctgcacatcaccgtgttacgcgggagcggagccgcagatggacctgatgcagccgccggcaatgcatcccaagcacaactgcagaacaacctaaacgtaggctctgacactacctctgaaacctctttttctcttagcaaagaggcccctagagagcaccttgatcaccaagcggcgcaccagccttttccccggccccgattccggcaggagacagggcatccttcactccagcgagacttccctcgctcttttctcctcgatctccccaattttcctgatctgagtaaggctgatattaacgggcaaaatcccaacattcaagtaaccatcgaggtcgtcgacggcccagacagcgaggccgataaagatcagcaccccgagaataaaccatcttggtctgtaccctctcccgactggcgcgcctggtggcaacggtcattatcattggctagggccaacagtggcgatcaggactacaaatatgactctacgtctgatgatagcaacttcctcaaccctccgaggggatgggaccatacggctccgggacatagaacttttgaaactaaagaccaacccgagtacgattctacagatggagagggcgattggtcattgtggtccgtgtgtagcgtgacatgtggcaatggaaatcagaagcggactcgatcctgcggatacgcctgcacagcgactgagagcagaacctgcgacagaccaaattgtcccggaatcgaggatacctttcgcaccgcagctaccgaggtctctcttctggcaggcagcgaggagttcaacgccacaaagttatttgaagtcgatacagactcttgtgagagatggatgtcctgcaagtcggagtttttgaaaaagtacatgcacaaagttatgaatgaccttccttcttgtccttgcagctatcctaccgaagtggcttatagtaccgccgatatctttgatagaatcaaaagaaaagattttagatggaaagacgcttctggtcctaaagagaaactagagatctacaaaccaaccgcaagatactgcatacgatcgatgctttccctggagtcaaccacactcgctgctcagcactgttgttacggcgacaacatgcaactaataacaaggggaaagggcgccggcaccccaaacctgatttctacagaattctctgccgaactccactacaaggtcgacgttttgccttggatcatttgtaaaggcgactggtcccgctacaacgaggcaaggccaccaaataatggccagaaatgcaccgaaagtccatcagatgaggactatatcaagcagttccaggaagctcgcgaatattag

SEQ ID NO: 11923 - RNA, 1536 nt, synthetic construct
  misc_feature 1..1536: note = source = /note="Description of Artificial Sequence: Synthetic coding sequence"
  source 1..1536: mol_type = other RNA
atgctggttgacggcccaagcgaaaggccagcactctgtttcctgctgttagccgtcgcaatgtcatttttcgggtctgcgttgagcattgacgaaacccgagcacatctcctgttaaaagagaaaatgatgcggctgggtggaagacttgtactcaacaccaaagaggaactggcgaacgaaagattaatgacactgaaaatcgcagaaatgaaggaggctatgagaactctcatttttccaccttcgatgcatttcttccaggctaagcacctgattgaaagatcccaagtcttcaacattttacgtatgatgcctaaaggcgccgccctgcacctgcatgatatcggtatcgtgaccatggattggctcgtacgtaacgtcacatatcggccccattgtcacatttgttttacaccgcgtgggattatgcagttccgctttgcacatcctacccctaggccttcggaaaagtgcagtaaatggatcctgctcgaagactaccgtaaacgagtccagaatgtaaccgagttcgacgattctctccttaggaactttaccttggttacccagcatccagaagttatctacaccaatcagaacgtcgtgtggtccaagttcgagactatctttttcacgatctccggcctgatccattacgccccagtttttagggactacgtctttagatctatgcaggaattttatgaggataacgttctttatatggagattagggctaggctgctgccagtgtacgaattgtcaggagagcaccatgacgaggagtggtcggtgaagacttatcaggaggtggctcagaaattcgtggaaacacaccccgagtttattggcatcaagattatatacagtgatcatagaagtaaagacgtcgctgttatagctgaaagtattagaatggcaatgggcctgcgtatcaaattccccacagttgtcgcaggattcgatttagtcggccacgaggacaccgggcattcactgcacgattataaagaggccctgatgatccccgctaaggatggcgtcaagctcccctacttctttcacgccggggaaacagattggcagggaactagtatagaccggaatattctggatgctctgatgttaaatacaaccagaatcggacatggcttcgcattgtccaaacaccccgcagtgcgaacttattcatggaaaaaagatatccctattgaggtgtgtcctattagtaatcaggtcctgaagctggtctccgatctacgcaatcacccagtggctactctgatggcgacaggacatcctatggtcattagctcagatgatcctgcgatgtttggcgctaaaggattatcatacgacttttacgaagtgtttatgggcatcggaggcatgaaagctgacctgcggactctcaaacagctcgccatgaattctataaagtactctacgctgctcgaaagcgaaaagaacacgttcatggaaatatggaagaagagatgggataaattcatcgccgacgtggccactaagtag

SEQ ID NO: 11924 - RNA, 777 nt, synthetic construct
  misc_feature 1..777: note = source = /note="Description of Artificial Sequence: Synthetic coding sequence"
  source 1..777: mol_type = other RNA
atgaaacagatcctccatcccgcgctggagactaccgccatgaccctttttcccgtgctactcttccttgttgcaggcctcctcccatcgtttccagcaaatgaagacaaagatccagctttcacggcattgttgactactcagacacaggtacagagggagatagtcaataaacataatgagctgcggcgcgctgtgagcccaccagctagaaacatgctaaaaatggaatggaataaagaggctgctgctaatgcacagaaatgggctaaccagtgtaactacaggcacagcaatccaaaggaccgcatgacttcactcaagtgtggagaaaacctttacatgagttctgcaagttcctcctggagccaggctattcagagctggttcgatgagtacaacgattttgatttcggcgtgggaccgaaaaccccaaatgctgtcgtcgggcactacacccaagtggtctggtacagctcctacctcgtggggtgtggcaatgcttattgccccaatcagaaagtgttaaagtattactacgtttgtcaatactgtcccgctggtaattgggctaacaggctttacgtgccttacgagcagggagccccatgcgcctcatgtcctgacaactgcgacgacgggctgtgtacaaatggatgcaagtacgaagacctgtatagtaactgcaaaagcttaaaactgactctaacatgtaagcatcagctggttcgagattcatgcaaggccagttgtaattgcagcaattccatttattag

SEQ ID NO: 11925 - RNA, 714 nt, synthetic construct
  misc_feature 1..714: note = source = /note="Description of Artificial Sequence: Synthetic coding sequence"
  source 1..714: mol_type = other RNA
atggttacgcctccccctccccctgtgtttagcctgctaaaaatcagccagcgaatagtctgcctcgtactggataagtctgggagtatgggtggaaaggatagactgaataggatgaaccaggctgctaagcactttctgctacagactgtagagaatggatcttgggtcggaatggtacactttgatagcaccgctactatcgtgaataaattaatacaaataaagtcctctgacgagcgaaatactctaatggccggactccctacataccccctaggcggtacttctatctgttccgggataaagtacgcctttcaggttattggcgaactccacagtcaactcgacggtagcgaggtactgcttttaacagacggagaggacaatactgcaagctcttgcattgatgaggttaaacaatctggagccatcgttcattttattgcgcttggccgagcggcagacgaagccgtgatcgagatgtctaaaattaccggcggatcacatttttacgtttcagacgaagcccagaacaatggcttgattgatgcatttggagccctcaccagtggtaataccgatctgagccagaaatccctgcaggtgcgcgtgctaattccttgggtttttatgttcacatttgctacccgcaagaatcacctagtggtcatcagttttgaatttcacattttcctgaaggtgaacttctag

SEQ ID NO: 11926 - RNA, 459 nt, synthetic construct
  misc_feature 1..459: note = source = /note="Description of Artificial Sequence: Synthetic coding sequence"
  source 1..459: mol_type = other RNA
atggacaatgtgcagcccaaaattaagcatagacctttttgttttagtgtaaaaggacatgtgaagatgctgcggctggcactgacagtaacaagtatgacttttttcattatagcccaagcccctgaaccttatatcgtgattaccggctttgaagtcaccgtgatcttgttttttattctactgtatgtgctgagactcgaccggcttatgaaatggctgttctggccacttctggacattattaattcccttgtcacaacagtgtttatgctgatcgtgagtgtgctcgcccttattcctgaaacaactacccttacggttggcggcggcgtgttcgcccttgtaacagcagtctgttgtttggctgatggggcccttatttatcggaaattactttttaatccaagcggaccttaccagaagaaaccggttcacgagaagaaagaagttctctag

SEQ ID NO: 11927 - RNA, 3744 nt, synthetic construct
  misc_feature 1..3744: note = source = /note="Description of Artificial Sequence: Synthetic coding sequence"
  source 1..3744: mol_type = other RNA
atgttggctagctcatcaagaatccgggctgcatggacgagagcgctcctgttgcctctgcttctcgccggacccgtcggttgtctgtctcgacaggaactttttccattcggtcctggtcagggcgacttggagttggaagacggtgatgactttgtgagccccgcactggagctgtcaggcgccctgcggttttacgatcgcagcgatattgacgccgtgtacgtgaccacaaacggaattatagctacctccgagccgccagcaaaagagtctcacccaggcctattcccccctacattcggtgctgtagctccttttctggcggatttggatacaaccgacgggcttggcaaggtgtattaccgtgaagacttgagtccatcaatcacccagagggcggcagagtgcgtacaccgggggtttccagaaatttcttttcagccctcttccgcagttgttgtcacatgggaatctgtggctccataccagggccccagtagggatcctgatcagaagggtaagagaaatacattccaggccgtccttgctagttcagacagctctagctacgccatatttttatatcctgaggatggcctgcagttccataccacgttcagtaagaaggagaataatcaggttccagcagtagtggccttctcacaaggctcagtggggttcctgtggaagtccaacggcgcgtacaacatcttcgccaatgacagggaatccgtcgaaaaccttgcgaagagcagcaacagcggccagcaaggggtatgggtgtttgagatagggtccccggctaccactaacggcgtggtgccagccgacgttatccttggaaccgaagacggcgctgaatacgatgatgaagacgaagactacgacctggccaccactcggctgggactcgaggacgtcggcacgacacctttcagttacaaagccctgagacgcggcggcgctgacacatactccgtgccctcagtactcagccccagaagagcagcaaccgagaggcctttgggccccccaactgagagaacccgaagttttcaacttgctgttgagaccttccatcagcagcatccacaggtgattgatgtggacgaggttgaggaaactggggtggtattctcctataacaccgactccagacaaacgtgcgccaataatcgccaccaatgctcagtgcacgcggagtgccgtgattatgctaccggtttttgttgttcctgcgtggcaggttatactggtaacgggcgccagtgcgtggcagaaggttcgccacagcgagtaaacggtaaagtcaagggccggatctttgtcgggtctagtcaggtacccatcgtatttgagaatacagatctccatagctacgtggtgatgaaccatggtcgctcatataccgctattagtactatccctgagactgtcggatatagtctgctgccactggcaccggtgggcggaatcataggatggatgtttgctgttgaacaggatggcttcaaaaacgggttttctatcaccggcggcgagtttacacggcaggctgaggtgacatttgtcggacatcccggaaatctggttatcaagcagagattttctggcatagatgaacatggacaccttactatagacacagagctagaaggcagagtgcctcagatcccctttggctcaagcgtgcatatcgaaccgtatactgaattgtatcattactcaacatctgtgatcacctcatccagcactcgggagtatacagtcacagagccagagcgcgacggggcaagcccatcaagaatttacacataccagtggcgacagaccataaccttccaggagtgcgtgcatgacgattctagacccgccttaccgtccacacagcagctgtccgttgattcagttttcgttttatacaaccaggaagagaaaatacttcggtacgccctatcaaattccatcggtccagtacgcgagggatctccggacgcccttcaaaatccatgttatattggtactcacggctgcgatacaaacgctgcctgtaggcctggtcccaggacacagtttacatgcgaatgttctataggcttccgcggagacgggcggacgtgttacgacatcgatgaatgctctgaacaacctagtgtctgcggctcccacacaatttgtaacaatcacccagggacctttcgttgtgaatgcgtggaaggatatcagttcagtgatgaaggcacctgtgttgcggtggtggatcagagacccattaactactgcgaaaccggtctccataactgtgacattccacagcgcgcacagtgcatctacaccggtggttcaagctacacatgcagctgcctcccggggtttagcggtgacggccaggcatgccaggacgtggacgagtgtcagcctagccgttgccatccggatgcattctgctacaacacacctggctcctttacctgccagtgcaaaccaggctatcagggcgacggcttccggtgtgtacctggcgaagtcgagaaaacccggtgccagcacgaaagggaacatatcctgggagcggccggagcaaccgatccccagagaccaatccctcccggattgtttgttcctgagtgtgacgcacacggccactacgcacctactcaatgtcacggctctacagggtactgctggtgtgtcgaccgagatggtcgggaggtagaaggtacaaggacacgaccaggcatgacgcccccttgtctctcgactgtcgctccccctatccaccagggccccgctgtcccgacagccgtcattccgctcccgcctggcacccacctgctgttcgcccagacagggaagattgagaggttacctcttgaagggaacaccatgcgtaagactgaagccaaggcgtttctccatgtgccagcaaaggtaatcatcggactggcatttgattgcgtcgataagatggtttattggactgacataacagagcctagcataggcagagccagcttgcacggtggtgaacctaccacaattatccgccaggatcttggctctccggagggcattgctgttgaccacctgggtcgcaacatcttctggactgattctaacctagacaggattgaagtcgccaagcttgacggtacgcagcggagggtgctgttcgaaactgatcttgtgaatcctagggggattgtcacagacagtgtccgtggtaacctgtattggaccgattggaaccgcgacaatccaaaaattgaaacttcgtatatggacggtacaaacaggcgcatactagtccaggatgatctgggccttcctaatggattgacatttgacgccttttcatctcagctatgttgggtagacgccgggaccaatagagccgagtgcctgaatccatcgcagcctagccggagaaaggctctggaaggcctgcagtatccattcgccgttacttcttacggaaagaacctgtactttacagactggaagatgaatagtgtcgtggcccttgatctagctatttcaaaggaaacagatgcctttcagcctcataagcagacgcgtctatatggtatcactaccgcactctcacagtgtcctcaaggccacaactattgcagtgtgaacaatggaggctgtactcacttatgcctcgctactccgggctctagaacatgtcgctgtccagacaataccctcggtgtggattgcattgagcagaagtag

SEQ ID NO: 11928 - RNA, 525 nt, synthetic construct
  misc_feature 1..525: note = source = /note="Description of Artificial Sequence: Synthetic coding sequence"
  source 1..525: mol_type = other RNA
atgctccggacagagtcctgccgaccgaggagccctgcagggcaagtggctgctgcatcccctttgttattacttctgctattactggcatggtgtgcaggggcctgtcggggggctcctattttaccgcagggtctccagcccgaacagcagttgcagctgtggaacgagatcgacgatacttgctcttcctttttatctatcgactcccagccccaggcctcaaatgcattggaagaactatgcttcatgataatggggatgttacccaagccccaagagcaggacgagaaagataacactaaacgtttcctctttcattattcaaagacgcagaagctcggcaaatccaacgtggtcagttctgtagtgcaccccttgctccaactggtcccccacttacatgaaagacgtatgaaacggtttcgagttgatgaagaatttcagtcccctttcgcaagtcagagccggggatatttcttgttccggccaaggaatgggcgcagaagtgctgggttcatctag

SEQ ID NO: 11929 - RNA, 1218 nt, synthetic construct
  misc_feature 1..1218: note = source = /note="Description of Artificial Sequence: Synthetic coding sequence"
  source 1..1218: mol_type = other RNA
atggacaccatcttcctttggtcattgctcctcctgttttttggttcccaggcaagccgctgctcagcacagaagaacaccgaattcgcagtggatctgtatcaggaagtctcactctctcataaggataacataattttctctccgctcggtatcacactcgtcttagaaatggtacagttaggagcaaaaggtaaagcacagcagcagattcgacagacgctcaagcaacaggagacatccgctggggaggaattctttgtgctaaagtcgtttttctctgccattagcgagaaaaaacaggagttcacttttaacctggccaacgccctgtatttacaggaggggttcacagtcaaggagcagtatttacatggtaacaaggagttcttccaatccgctatcaagctagtggactttcaggacgcaaaagcatgtgctgagatgatttccacttgggtggaacgtaagaccgacggaaagataaaggatatgttttccggagaagagtttggcccacttacccggttggttctcgtcaacgccatttactttaaaggagattggaaacagaaatttaggaaggaagacactcaattgatcaatttcacaaaaaagaacggcagtactgtaaagatacctatgatgaaggccctcttgaggacaaaatacggctacttttcagaaagcagcttaaactatcaggtactcgagctaagctataagggggatgaattcagcttaattattatactccctgccgagggaatggacatcgaagaggtcgagaagcttatcaccgctcagcagattctgaaatggttaagtgagatgcaggaagaggaagtagaaatctcccttccaaggttcaaagtggagcaaaaggtagacttcaaggatgtgttgtatagccttaacataaccgaaatttttagtgggggatgtgaccttagtggtattaccgacagctctgaagtttatgtgagccaggtgacccaaaaagtattctttgaaattaatgaagatggttccgaggctgctacatctactggaatccatatccccgtgatcatgtccctcgcgcagtcacagtttatcgcaaatcacccatttctgttcataatgaagcacaatccgaccgagtctatcctctttatgggacgagtcaccaatccagatactcaggagatcaaaggacgcgacctcgacagtctatag

SEQ ID NO: 11930 - RNA, 3687 nt, synthetic construct
  misc_feature 1..3687: note = source = /note="Description of Artificial Sequence: Synthetic coding sequence"
  source 1..3687: mol_type = other RNA
atgaagggagcacgcctgtttgtcttgctcagcagtctctggagtggtggtattgggctaaataactctaagcattcgtggaccatccccgaggatgggaactctcagaagacaatgccctctgccagcgtgccacccaacaagatccagtccctgcaaatcctgcctaccaccagagtgatgtctgctgagatcgccaccacccccgaggcccgcacgagtgaggattcactgctaaaaagtactctcccaccatccgaaaccagcgcacctgcagaaggcgtgagaaaccaaacccttacaagcacagaaaaagcagagggcgtcgtgaaacttcagaatttgaccctgcctacaaacgcctccataaagtttaaccctggagccgagagcgttgtgctgtccaactccactctcaagttcctacagtccttcgcaagaaaatcaaacgagcaggccaccagccttaatacagtgggcggaaccggtggcattggaggcgttggtgggaccgggggggtcgggaacagggctccgagggaaacttacctgagcagaggcgacagttcctccagccaaagaacagactaccaaaagtctaattttgagacaactcgggggaaaaattggtgtgcctacgtgcatacacgcctctccccaaccgtgatcttagataaccaggtgacatacgtgccagggggcaaaggaccctgcgggtggaccggcggatcctgtccacagaggtcacagaaaatctctaacccggtgtataggatgcagcacaagattgtgacgagcctggactggcgatgttgtccaggatacagtggcccgaagtgccagctgagagcccaagagcagcaaagtcttattcataccaatcaagctgagtcccatacggctgtggggcggggtgtcgccgaacaacaacagcaacagggatgtggggatcctgaagtgatgcagaaaatgacagatcaggtcaactaccaggccatgaaacttaccctgctgcagaaaaaaatcgataatataagtctgaccgtaaatgacgtgcgcaacacctacagttctctggaaggcaaggttagtgaggataagtcaagagaattccagtctctcttgaagggcctcaaaagcaaatcgatcaacgtgctcataagagacatcgtgagggagcagttcaagatattccagaacgatatgcaggaaacagttgcccagctgttcaagactgttagctctctctctgaggatcttgagtctacccgtcaaatcatccaaaaggtgaacgaatctgttgtttccattgctgcacagcaaaagtttgtactggtacaggagaaccgaccaactcttaccgatatcgtagaactgcgtaaccacatagtgaacgtccgccaagaaatgaccctaacgtgtgagaaaccaataaaggagcttgaagtgaaacagacacacttagaaggagcactggaacaggaacactctcgcagtatcttgtattacgaaagtttgaataagacattgtccaaattgaaagaggtgcacgaacagctgctttccacggagcaggtgtccgaccaaaagaacgcgcctgcggctgagagtgtatcaaacaacgtcacagaatatatgtcaacccttcatgagaacatcaaaaagcagtccctgatgatgcttcaaatgtttgaggacctgcacattcaagaatctaaaatcaataatctgacagtctcactggaaatggagaaagagagcttgagaggcgagtgcgaagatatgttgtctaagtgtcggaacgatttcaagttccagcttaaggacacggaagaaaacctgcacgtcctgaaccagactctcgccgaggtgctgtttccaatggataataaaatggataagatgagcgagcagctgaacgatctaacctacgatatggagattctgcagcctctgctcgaacaaggtgcatccctgaggcagactatgacatatgaacagccgaaggaggctatcgtgatccgcaagaaaatcgaaaatcttacatccgccgtgaactctctcaacttcatcatcaaagaactgacaaaacgccacaatcttcttagaaatgaggttcagggcagggacgacgcgctggagagacgaattaatgagtatgctctggaaatggaggatggcctgaacaagacaatgacaataatcaacaacgccatcgactttatccaagacaactacgcacttaaagagactctgagtaccatcaaggacaactcagaaattcatcacaaatgtacttctgatatggaaacgattcttaccttcattccccaatttcacagactaaatgactcaatacagacactcgtgaacgacaaccagcggtacaattttgtgctacaggttgctaaaacactggccggaattccgcgcgacgagaagctgaaccagtcaaatttccagaagatgtatcagatgtttaacgagaccacctcacaggttcggaaatatcagcagaacatgtcgcacctggaagagaaattgctccttacgaccaaaatcagcaaaaacttcgagactagactgcaggacatcgagtctaaggttacgcagacgctcattccatattatatttcagtaaaaaagggctctgtcgttaccaacgaacgggaccaggcactgcagctccaggtcctgaatagcaggttcaaggcgttggaagcaaaatcaattcacctgtctatcaacttcttctcgctgaacaaaacacttcatgaggtgctgacaatgtgccataacgcttcgacctccgtctctgagttgaacgccactataccgaaatggatcaagcacagccttcccgatatccagcttctccagaaaggattaacagaattcgtggagcctataatacagatcaagacccaagcggcactctccaatctgacctgctgcatcgaccgttcgctgcccgggtcattggcaaacgtggttaagtcccagaagcaagtgaaatcactgcctaagaaaatcaatgccttgaaaaagcccactgtcaacctcaccacagtgctgattggacggacgcagaggaatacggataacatcatttaccctgaggaatactcatcctgctccagacacccatgccagaatgggggtacatgtattaacggtcgtacttcatttacgtgtgcctgccgacacccattcaccggtgataattgcaccattaaactggttgaggagaatgccctggcccccgacttctccaaaggttcataccgctacgctccaatggttgcattttttgcttctcatacttacggcatgactatacccgggcctattctttttaataatctggacgtgaactacggcgcttcctatacaccgcggaccggtaagttcaggattccgtacctgggtgtatatgtattcaagtatacaattgaaagcttcagcgctcatatctctggattcttggtcgtggacggtatcgataaacttgctttcgagtctgaaaacataaacagcgaaattcattgcgatagggtgttaacaggtgacgcattactcgaactgaattacggtcaggaagtgtggcttcgcctggctaaggggaccatccccgccaagtttccgcccgtgacaacgttttctggatacctgctttacagaacctag

SEQ ID NO: 11931 - RNA, 1365 nt, synthetic construct
  misc_feature 1..1365: note = source = /note="Description of Artificial Sequence: Synthetic coding sequence"
  source 1..1365: mol_type = other RNA
atgtggcccctaaccgttcctccacctctgttgctcctgttgtgttcagggctggccgggcagacactctttcagaatcccgaggaaggttggcagttatacactagtgctcaagcccctgacggcaagtgtatttgtaccgcagttatcccagcccagagcacgtgttcccgagacggcagatccagggagctcagacaactgatggaaaaagtccagaatgtctcccagtcaatggaagtgctggaactgaggacctacagggacctccaatacgtgcggggcatggaaactctcatgcgatccttggatgccaggctgcgagccgcggatggttccctctccgctaaatctttccaggaactgaaagatcgtatgactgaactgctgccactgtcatctgtgctggagcaatataaagcagatacacgaaccatagtgcgcctgcgcgaagaagtacggaatctctctggcagtcttgccgcaatccaggaagagatgggcgcctacggatatgaagacttacagcagagagtcatggcactcgaggctaggctgcatgcttgcgcacaaaagttaggatgtggaaagctgaccggcgtttccaatccgattacagtccgggcaatgggctctcgtttcgggtcttggatgacagataccatggcacctagtgcagactcaagggtgtggtacatggacgggtattacaaagggaggcgggtgctggagttccggaccctgggcgacttcattaaaggacagaacttcatccaacacttgcttcctcaaccctgggccggcaccggacacgtagtgtataacgggagtctgttttacaataagtaccagtccaacgtggtcgtcaaatatcatttccgcagccgatctgttcttgtccaacgaagtttaccaggcgcaggatacaacaatacattcccatactcttggggcggcttcagcgatatggactttatggtggacgaatctggtctctgggcggtttatacaacgaatcagaacgccggtaatatagttgtgtcacgtctggacccccacacgctggaagtaatgagaagttgggacaccggttacccaaaacgaagcgctggagaggcgttcatgatctgcggggtgttgtacgtgacaaattctcatttagccggtgccaaagtttacttcgcctattttaccaatacaagcagttatgaatatacagacgtaccctttcacaaccagtatagccacatctccatgctcgactacaacccaagggaacgtgccctgtacacctggaacaacggccatcaagtgctatataatgtgacactgttccacgtgataagtacttctggcgatccctag

SEQ ID NO: 11932 - RNA, 909 nt, synthetic construct
  misc_feature 1..909: note = source = /note="Description of Artificial Sequence: Synthetic coding sequence"
  source 1..909: mol_type = other RNA
atgtgcgcggaaagactggggcagttcatgacgctggctttggtcctagctacttttgatccagcccgggggacagatgctaccaacccccccgaagggccccaggatcggagcagccagcagaaaggccgcctatcattacaaaacacagccgagatccagcactgccttgtaaatgcaggcgacgtagggtgcggagtatttgagtgctttgaaaacaattcctgcgagattcggggcctccatggaatttgtatgaccttcctgcataacgccggtaagttcgatgcacagggcaaaagctttatcaaggacgcgctgaagtgcaaagcgcacgcacttcgccaccgattcgggtgcatctccagaaaatgtcctgcgatccgagaaatggtgtctcagctgcaaagggaatgctatctgaaacatgatctatgtgccgccgcccaggaaaatacacgcgtgatagtggagatgattcactttaaggacctgctgctccacgagccctatgttgatctggtgaacctgctgttgacctgcggtgaggaagtgaaggaagccattactcattcagtacaagtacagtgcgagcagaattggggatccctatgctccattctttccttctgtacttctgctatccaaaaaccgccaaccgccccacccgagcggcagccccaggtggatcggacaaaattgagcagagcacaccatggagaggccggacaccacctgccagagccatcatctcgagaaactggaaggggagccaaaggcgagcgcgggagcaagtctcacccaaacgcacacgccagaggccgagtcggggggctaggtgcccagggccctagtgggtctagtgaatgggaggatgagcagtcagaatacagcgatatccgccggtag

SEQ ID NO: 11933 - RNA, 2529 nt, synthetic construct
  misc_feature 1..2529: note = source = /note="Description of Artificial Sequence: Synthetic coding sequence"
  source 1..2529: mol_type = other RNA
atgaagcctggtggtttttggctccacctgacactactcggagcatccttaccagcagccctcggatggatggatccaggcacttctaggggtcctgacgtgggcgtgggagagtcacaggcagaagaacccaggtcattcgaagtgacccggagggaaggtctgtccagccataatgagctccttgcatcttgcggcaaaaagttctgctcccggggaagtagatgcgtgttgtctcggaaaacaggggaaccagagtgccaatgtcttgaagcctgtaggccatcatacgtccctgtttgtggaagcgacggccgcttctatgagaaccactgcaagctgcaccgagccgcttgtcttttggggaagcgcattacagtgattcactccaaagactgtttccttaaaggagacacctgtaccatggcaggttatgcccgtctgaaaaacgtactgttagcactgcagactcggctccagcccctgcaggagggcgacagtaggcaagatcctgcctcccaaaagagactgctcgtggagtctctgtttcgcgatctggacgctgatggaaatggtcacttgagcagttccgaactggcacaacacgttttgaagaagcaggatctggatgaggacctgctgggatgtagcccaggcgatttgctcagattcgacgattataactccgactcatctctgacactccgcgaattttacatggcatttcaggtagttcagttatctctcgctccagaagacagggtgagcgtcacaactgtgaccgtggggctgtccaccgtccttacgtgcgccgtgcatggcgatctgcgtccacccatcatctggaaaaggaatgggctcactctcaattttctggacctcgaagatatcaacgatttcggcgaggatgactctctatatattaccaaagttaccacaatccatatgggaaactacacctgccacgcctcaggccatgaacaactgtttcagactcatgtgctacaagtcaacgtaccaccggtgatcagagtgtaccctgaatctcaggcacaggagcctggggtggccgcaagtctgagatgtcacgcagaaggtataccgatgccccgaatcacttggctcaagaatggcgtcgacgtttccactcagatgagcaaacagctgtccctgctggctaatggctccgagctccacatctccagtgttcggtacgaagacaccggagcctacacgtgtatcgccaagaacgaggttggcgtggacgaggacatcagctcattgttcatcgaggattctgctcgtaagacgcttgcaaacattttatggagggaggagggattgtcagtggggaacatgttttatgtcttctctgacgacggtatcatagtgatccatcccgtggactgtgagatccaaaggcatctcaagcccacagaaaaaattttcatgagttacgaagaaatctgcccccagcgcgagaagaacgctacgcagccatgccagtgggtgtcagctgtcaatgttcggaatcggtacatttatgtggcccagccagccctctcccgggtgctcgtggtggacattcaggcccagaaggtgttgcaatctatcggcgtcgaccccctgcctgcaaagttgtcttacgataaatcacacgatcaggtatgggtgctttcttggggagatgtacacaaaagccgaccaagcctccaggtcattaccgaagcctcaactggacaatctcagcatctaataagaaccccctttgcgggggtggacgatttctttattcccccaactaacctgattattaatcatatccggttcgggtttatattcaacaaaagcgaccctgcagtgcataaggtcgatcttgagacaatgatgccattaaagacaatcggcttacaccaccacgggtgcgtgccgcaggcgatggcccacacccacctgggtggatacttttttattcagtgcagacaggactctcccgcctcagcagcccgccagctcctggtcgattcggtgacagattctgtccttggtcccaatggcgacgtgaccggaacgcctcacacatcccccgacggacgcttcatcgtgtctgccgcagccgacagcccatggttgcacgtgcaagaaattaccgttaggggagagatccagaccttgtatgacctgcagatcaatagcggaatcagcgaccttgcctttcagcgctccttcaccgaatccaatcagtacaatatttacgctgccctgcacactgagccagatctcctgttcctcgagttaagcacaggtaaggtaggcatgttaaagaacctgaaggaacccccggcgggccctgctcagccatggggcggtacccacaggataatgagagactcggggctgtttggtcagtatttactcacacctgcaagggagagcctttttctcatcaatggcaggcagaatacccttcgatgtgaagtgagcggcattaagggtggcactaccgtggtatgggtcggtgaagtctag

SEQ ID NO: 11934 - RNA, 2256 nt, synthetic construct
  misc_feature 1..2256: note = source = /note="Description of Artificial Sequence: Synthetic coding sequence"
  source 1..2256: mol_type = other RNA
atggctttccgaaccatctgcgtgctggtgggcgtgttcatttgttccatatgcgttaagggaagcagccagcctcaggcccgcgtttaccttacattcgacgagcttcgggaaacaaagacctcagagtacttctccttatcccaccaccctttggactaccggatattattaatggatgaagaccaggaccgcatctacgtgggatccaaagatcatatcttgtccctgaacatcaacaacatctctcaggaagccctgagtgtattctggcctgctagcactattaaagtcgaggaatgtaagatggccggaaaggatccgacacacgggtgcggaaacttcgtaagggtcattcaaacctttaaccggacccatttatacgtatgcggttcaggcgccttttctcccgtctgcacttatctcaatcgaggccgcaggtcagaggatcaggttttcatgatcgattccaagtgcgaatccggaaaaggcagatgtagctttaatccgaacgtaaatacagtctccgtgatgattaacgaagaacttttcagcggaatgtatattgattttatgggcacagatgccgctattttccgctccctgacaaagcgtaacgcagtgcgaaccgaccagcacaactcaaaatggctctccgagcctatgttcgtagacgcacatgtgatcccagacggaaccgaccccaacgacgccaaggtgtacttcttcttcaaggaaaaactgactgataataatcgcagcacaaagcagatccatagcatgatcgcgcgcatctgtcccaacgatactggtgggcttagatcactagtgaataaatggacaacctttctgaaagcaaggctagtgtgctccgtgactgatgaagatggcccagaaacacatttcgacgagctggaagacgtattcctgttagagaccgataatccaagaactaccctcgtgtatggcattttcactacgtcttcatctgtgtttaagggatcagccgtgtgcgtgtaccacctgagcgacatccagacagtgtttaatggcccttttgcccacaaggagggacccaatcaccagctgatttcctatcagggccgcattccatacccaagaccaggaacatgcccaggtggagctttcacgcccaatatgagaacgaccaaagagttccctgatgatgttgtaacgtttatccgtaaccatccccttatgtacaattcaatttatccgattcacaagcggcctctgatcgtcagaattggaaccgattataagtataccaagatagcggttgacagggtgaacgctgccgacggtaggtatcacgtcctgttcctggggactgatagagggaccgtccagaaagtggtagtcctccctacgaataattccgttagcggagaactcatactggaggagctggaggtattcaagaaccatgcaccaatcacgaccatgaagatctcgtctaagaaacagcagctgtacgtatcgagtaatgagggcgttagccaggtgtcactgcataggtgccatatctatggtacagcgtgtgcagactgctgtctggctagagacccctactgcgcgtgggatggccatagctgctcacgtttctacccaaccgggaaacgtaggtctaggaggcaggacgtgcgacatggaaaccccctaacccagtgtcgaggctttaacctgaaagcttataggaatgctgccgagatcgtccaatacggagtgaaaaataacactaccttcctggagtgtgcacctaaaagtccccaagcttccataaaatggctgctacagaaagacaaggatagacgaaaggaagtcaagctcaacgagagaatcatcgctactagccaaggtttgctcatcagatcagtgcagggctccgaccaggggctctaccactgcattgcaaccgaaaactccttcaaacaaacaattgccaaaattaattttaaagttctcgatagcgagatggttgccgttgttactgacaaatggtccccatggacttgggcttcctctgtccgcgccttaccattccatcctaaggatataatgggagcctttagccatagcgaaatgcaaatgatcaaccagtattgcaaagacacacggcagcagcaccagcagggagacgagtctcagaagatgcgcggagactacggaaagctgaaggcactaataaactcgaggaagtctcggaaccggaggaatcaattgccagagagctag

SEQ ID NO: 11935 - RNA, 2316 nt, synthetic construct
  misc_feature 1..2316: note = source = /note="Description of Artificial Sequence: Synthetic coding sequence"
  source 1..2316: mol_type = other RNA
atggggtggctcaccaggatcgtgtgcctattttggggagtgcttttgaccgccagagctaactatcagaacggtaaaaataacgttccacgtcttaaactgagctataaagaaatgctggaatcaaacaatgtgataaccttcaatggcctggcgaattcctcttcatatcatacctttctgctggatgaagagaggtctcgcctttacgtcggcgcaaaagatcacattttctcgttcgatttggtgaacataaaggatttccagaagatcgtgtggcctgttagttacacacgacgggacgaatgcaagtgggccggcaaggacatactgaaggagtgtgccaacttcatcaaagtacttaaggcatacaatcaaacacatttgtatgcatgtggaacgggggcatttcaccctatatgcacgtacattgaaattggtcatcatcctgaggataacatcttcaagctggagaacagccatttcgagaatggacgaggcaagtccccctatgacccaaaactcctgacagcctcacttttgatcgacggggaactctattccgggactgccgccgatttcatgggtcgtgattttgcaatatttaggacattggggcaccatcaccccatcagaacagaacagcatgactcccgatggcttaatgatcctaaattcataagtgctcacctcatcagcgaatctgacaacccagaggacgataaggtgtatttcttcttccgcgagaacgcgattgacggagaacactccggaaaggccactcatgccagaattggtcagatctgtaaaaacgactttgggggacataggtccttagtcaataagtggacaacatttctcaaggctcgattgatatgttcagttccaggtcctaacggaattgacactcatttcgatgaactgcaggacgttttcctcatgaattttaaagatcctaagaacccagtcgtctatggtgtattcaccacaagttccaacatcttcaaaggatctgctgtgtgcatgtattctatgagtgacgtgcgccgggttttccttggcccctatgcacaccgcgacggccccaattaccagtgggtcccttatcaaggtagggtcccctatcctcggcctgggacatgtcctagcaagactttcggaggatttgactccacgaaggacctaccggatgatgttataacctttgcgcgatctcatcctgctatgtataacccagtcttcccaatgaataaccgccccatagtaatcaagactgacgtgaattaccagtttacccagatagttgtcgatcgtgtggatgctgaagacggacaatacgacgttatgttcattggtacagatgttgggacagtgctaaaggtggtttccatccccaaggagacctggtatgatctggaggaagtactgcttgaagaaatgacagtgttcagagagcccaccgcaatttctgccatggagttgagtaccaaacaacagcagctgtatattggaagcaccgcaggcgtcgcccagttgcccctgcaccggtgtgacatctatgggaaggcttgcgcagagtgttgtctggcacgagatccatattgtgcctgggacggctcggcttgctccagatacttccctaccgctaaaagacgaacgagacgacaagacattcgcaatggggaccccctgacacactgctctgatctacatcacgacaatcaccatggccattcgccagaagagcgaataatttacggagtggaaaactcttcaaccttcctagaatgttctcccaaaagccagagagcactggtgtattggcagttccagcggcgaaatgaggaaagaaaagaagaaatcagggtagacgaccacataataagaactgaccagggactgctattaagatcccttcagcagaaagactcaggcaattatctatgtcacgccgttgagcacggcttcatccaaactctgctgaaagtgactctggaggttattgatactgagcaccttgaagaactcctgcacaaggatgacgatggcgacggctccaagaccaaggaaatgtctaattccatgaccccttcccaaaaagtgtggtaccgtgactttatgcagctgattaatcatccgaacctaaatacaatggacgagttctgtgaacaggtgtggaagcgagaccggaagcaaaggcgccagagacccggacatacacccgggaactccaacaagtggaagcatctccaggaaaacaagaaaggtcgcaaccgccgtacgcacgagttcgagcgggcaccaaggtcagtctag

SEQ ID NO: 11936 - RNA, 4605 nt, synthetic construct
  misc_feature 1..4605: note = source = /note="Description of Artificial Sequence: Synthetic coding sequence"
  source 1..4605: mol_type = other RNA
atggcgctcacccctggctggggctctagcgctggtcccgttaggcctgaactgtggctgcttttatgggcggctgcctggaggctgggcgcctcagcttgtcctgccttgtgtacatgtacaggaacaaccgttgactgtcacggcaccgggttgcaggctatccccaaaaatatcccacgcaacacagagaggttggaattgaacggcaataatatcactagaatccataaaaatgacttcgccggactcaagcagcttagagtcttacagcttatggagaatcagatcggggccgtggagagaggcgctttcgacgacatgaaggagctggaacgattacgtctgaatagaaaccagttgcacatgcttcccgaactgttgtttcagaataatcaggccctgtcccgacttgatttgtcagagaatgcgattcaggcaatccctcgaaaagccttcagaggagcgactgacctcaagaacctgcaactggacaagaaccagatcagctgcatcgaagaaggggcatttagggcattacggggactagaggtccttacactcaataataacaacataacaaccatccccgtgtcctccttcaaccatatgccaaaactgcgaacattcaggctccatagcaaccaccttttctgtgattgccacctggcctggctgagccagtggttgcgccagaggcctacaatcgggctgtttacgcagtgcagtggcccggcatcactgcgggggctaaacgtggcagaagtgcaaaagagcgagttctcctgttctggtcagggagaagcaggacgagtacccacctgcactctctcctctggcagctgcccggccatgtgcacatgctccaacggaattgtggattgccgaggcaaagggttgacagcaatacctgccaaccttcccgaaactatgacagagatacggctggaattaaatggcatcaaaagcatccctcctggagccttcagtccttatcgcaaacttcggaggattgatttatctaataatcaaattgccgaaatcgcacctgatgcatttcaggggctccggagcctcaatagcttggtgttgtatgggaataagatcaccgatctgccacgcggtgtcttcggggggctgtataccctgcagctgctccttctgaatgctaacaaaatcaattgtatacgcccagatgcatttcaggatctacaaaaccttagcctacttagcctctatgataacaaaatccagtctctcgctaaggggacttttaccagtctccgcgctattcaaacattgcacctcgcccagaatcctttcatctgtgactgtaacctaaaatggctcgccgattttctacgcacaaatcctattgagacaagtggcgcacgttgtgcaagccctagacgactggctaacaagcgcatcggccagatcaaatctaagaaatttaggtgttcagcaaaggagcaatattttattcccggaaccgaggactaccagctgaacagcgagtgcaactcagacgtggtctgcccacataaatgccggtgcgaagccaacgtcgtagagtgctcatctttgaaattaaccaagatccctgagcggattccccagtctacagcggagctgagactgaacaataacgaaattagtatactggaagccacaggtatgtttaaaaagctgacccacctgaagaagatcaacctgtcaaacaataaggtgtctgaaatcgaagatggagcctttgagggggcggcctccgtatctgagctgcatctcaccgccaaccagctagaaagcatccggtccgggatgttcagaggactggacggactccgcactctcatgctccgaaataatcggattagttgtatccacaatgatagctttactggtctccggaatgtcaggttgctgtccttgtacgataatcagattactacagttagcccaggagctttcgacacactacagtcgttgtctaccttgaatctgctggctaacccctttaactgtaattgccaactcgcctggctcggggggtggcttaggaagaggaaaattgttaccgggaaccctaggtgtcagaaccccgattttctgcggcaaattccactgcaggatgtcgcgtttcccgattttcgatgcgaggagggacaggaggagggcggctgcctgccccgtccacaatgtcctcaggaatgtgcctgcctggataccgttgtaaggtgctcaaacaaacatctgcgagccttgcccaagggtattccaaagaacgttaccgagttgtacctggatggtaatcagttcacattggtccctggacaattgtctacctttaaatatttacagctggtggatctcagtaataacaagatttcctccctctcaaattccagttttactaatatgtcacagcttacaaccctgatcttgagctataatgccctgcagtgcatcccacccttagcatttcaaggactgagatccctgcgcctgctgagcctccatggcaacgatatctctacacttcaggaaggcatctttgccgacgtgacctcactcagccatcttgctataggtgctaatcccttgtattgcgattgtcacttgcggtggctaagcagttgggtcaagacgggctataaagaacctggcatcgcccgatgtgccggccctcaggatatggagggcaaactgttattaactacgcctgctaagaagtttgaatgccaggggcccccaacacttgccgtgcaggccaaatgcgacctctgtctatcctcaccttgccaaaaccagggaacttgtcacaatgacccactggaagtctatagatgtgcctgcccaagtggctataaagggcgagattgcgaagtatctttagatagctgcagtagcggcccctgtgaaaacggcgggacctgtcatgcgcaggagggcgaggatgctccttttacttgttcatgccccactggatttgagggccctacctgcggtgtgaatacagatgactgtgtggaccacgcttgcgcaaatggcggagtttgtgtcgacggggtgggcaattacacttgtcaatgccccctccaatatgaaggcaaggcctgtgagcagctggtggacctgtgcagccctgacctaaatccttgccagcacgaggcacagtgtgttggaactcccgatggtccaagatgcgaatgcatgcccggctacgccggagataactgctcagaaaaccaggatgattgtcgggatcaccgatgtcaaaacggcgcccagtgtatggatgaagttaactcgtactcttgcctttgcgctgaggggtactctggccagctctgtgaaatcccccctcacttacctgcgcctaagtctccttgcgaagggaccgaatgtcaaaatggagccaactgtgtggaccaaggaaaccggcccgtatgccagtgtctccccggctttggcgggcccgagtgcgagaaactcctgtctgttaacttcgttgatagggatacatatcttcagttcactgacttgcagaactggccccgagcaaacatcaccctgcaggtgagtacagctgaggacaatggaatcttgctttataacggcgataacgatcacattgcggtggaactctaccaaggccatgtccgcgtaagttacgatccagggtcttaccctagcagtgcgatctactctgccgagacaattaacgacggtcagttccatacagtagagttggtcgcgttcgatcagatggtgaatcttagtatcgacgggggttctcctatgactatggacaatttcggaaaacactacaccttgaatagcgaagctcccctgtacgtgggcgggatgcccgttgatgttaactctgccgcctttcggctctggcagatccttaacgggaccggctttcacggctgtatccgcaacctgtacatcaacaacgaactgcaagattttacaaaaactcaaatgaagcctggagtggtgcctggctgtgagccttgccggaaactgtactgcctgcatggaatctgtcagccaaatgccacacccggaccaatgtgccactgcgaagctggctgggtgggcctccactgtgaccaacccgccgacggcccatgccacggtcacaaatgtgtacacggtcagtgcgtacctctcgatgccctttcatacagctgccagtgccaggacggttatagtggagccctgtgtaatcaggccggagcccttgctgaaccgtgcaggggccttcagtgcttacatggccattgtcaagcctcaggcaccaaaggggctcattgtgtctgcgacccgggtttttcaggcgagctctgtgaacaggagtccgaatgtcggggcgaccctgtgcgggattttcaccaagtgcaaagggggtatgccatatgccagactactagacctcttagttgggtggaatgtagaggtagctgtccaggtcagggatgctgtcaaggcttgcgtttgaagcggagaaagtttacgttcgagtgttccgatggcacctcattcgccgaagaggtagaaaaaccaaccaagtgtggctgtgccctttgtgcatag

SEQ ID NO: 11937 - RNA, 342 nt, synthetic construct
  misc_feature 1..342: note = source = /note="Description of Artificial Sequence: Synthetic coding sequence"
  source 1..342: mol_type = other RNA
atggattccagacaggccgctgcactgttggtgcttctactgctgattgacggagggtgcgcagaaggtccaggtggccagcaagaggatcaactcagcgccgaggaagatagtgagccattaccaccacaggatgcgcagacctcaggttctctactccactaccttcttcaggctatggagcggcctggccgatcacaggcttttttatttcagcctcagcgctttggcagaaacacacaggggtcttggcgaaacgagtggttgtctccccgagctggagaggggcttaactcacagttttggagcctcgcggcaccacagaggttcggcaagaaatag

SEQ ID NO: 11938 - RNA, 2568 nt, synthetic construct
  misc_feature 1..2568: note = source = /note="Description of Artificial Sequence: Synthetic coding sequence"
  source 1..2568: mol_type = other RNA
atggcaagacatctccttttgccactcgttatgctggtgatttcacctatcccaggagctttccaggactcagcactaagccctacccaagaagagccagaagacttggattgtggccggcctgagcccagcgcccgcattgtgggtggaagtaatgcacagccaggaacttggccatggcaagtgagtttacaccacggcgggggacatatttgcggcggttccttgattgcacccagctgggtgctctcggctgcccactgctttatgactaatgggacactggagcctgcagctgaatggagcgtcctgcttggcgtgcactcccaagatggcccgctggacggagcccatactagagctgttgcggcaatagtggtgcctgcaaactattcacaggtcgaacttggagctgaccttgcactcctgagacttgcttcccccgcttcactgggcccagctgtctggccagtttgtctgcctcgtgcatcacatcgatttgtgcatggtacagcttgctgggcaacaggttggggagacgtgcaggaagccgatccactcccactgccttgggtgctgcaggaagtggaattgcgtcttctcggagaagcaacttgtcagtgcctttattctcagcccggcccctttaacttgaccttgcaaatcctgcctggaatgttgtgtgccggataccctgagggaaggagagacacctgccagggagactccggaggtccattggtgtgcgaggagggcggtagatggttccaggccggaattactagctttggttttggatgtgggaggcggaatagaccaggggtgtttactgctgttgccacatacgaagcatggatccgtgagcaggttatgggaagcgaacccggccccgccttccccacacagccacaaaaaacccagagcgacccccaggagcctagagaagagaattgcaccatagcactccccgaatgtggtaaagcccctcgccctggcgcctggccttgggaggcccaggtgatggtccccggctcacgcccatgtcatggcgccctagtatccgagtcctgggtgcttgccccagcaagttgtttcttggacccaaatagttcagattctccgccgcgggacttggatgcatggcgggttctgttgccctctaggccgagggccgaacgggtggctcgcctcgtccaacacgagaacgcatcatgggataacgcgtccgacctggctctgctccagttgagaacaccagtgaatctgagtgctgctagtaggccggtatgtctgccccatccagaacattacttcctgccgggaagcaggtgtaggctcgctagatggggccgaggagagcctgcactcggtccaggagcactattagaggccgagcttctcggcggttggtggtgtcactgcttgtatggacggcagggcgcagccgtccccctgccgggagacccgcctcacgccctgtgtcccgcctaccaagaaaaagaggaggtaggatcgtgctggaacgactcccgatggtctctcctgtgtcaggaggagggtacatggttcttggcaggcattcgagattttccctcaggttgcttgaggccccgggcctttttcccgcttcagacacatggcccttggatcagccatgtgacgagaggtgcctacctggaggaccagttggcttgggactgggggccagatggtgaagagaccgaaacacagacctgtcctccacataccgagcatggagcttgcggcctgagactggaggctgcccctgttggcgttctttggccatggctggctgaggtccatgtggctggcgacagagtctgtactggaatcctactagctccagggtgggtgttagctgccacacactgcgttttgcggcccgggagcactacagttccatatatagaagtgtatctaggccgagcaggagcaagttcattgccccagggccaccaggtcagtcggctggtcatttccattagactacctcagcacctgggtctgcggccacccctggcactcctcgaactcagctccagagtagagcccagcccttccgcgctccccatctgtctccatcccgccggaataccccccggtgcttcttgttgggtcctgggctggaaagaaccccaggatcgagtgcccgtagccgcggctgtgtcaatcctaacacaacggatttgcgattgtctgtatcagggcattctgccgccaggtaccttgtgcgttctctacgcagagggtcaggaaaaccgatgtgagatgacttctgctcctccactgctgtgccagatgacagaagggagctggattctagtaggaatggccgttcagggatcaagggaattattcgccgccatcggaccagaagaagcttggatctcccagactgtgggcgaagctaacttccttcccccatcggggtctccccactggcctaccggcggatctaacttgtgtccgccagaactggcgaaagctagtggttcgccccacgccgtgtatttcttgctcctcctgactctgctgatccagtcctag

SEQ ID NO: 11939 - RNA, 912 nt, synthetic construct
  misc_feature 1..912: note = source = /note="Description of Artificial Sequence: Synthetic coding sequence"
  source 1..912: mol_type = other RNA
atgcttcacccagaaacgagccccggacggggccaccttctcgccgtgttactggctttgcttggaaccacgtgggcagaggtctggcccccgcaactccaagagcaggcacccatggctggagcactcaaccggaaagaaagcttcctcctgttatctctgcacaaccgtcttcgctcatgggtgcagccccccgccgccgacatgagacggttagactggagtgacagtcttgctcaattagctcaggcaagggctgccttgtgcgggatccccaccccatctctcgcttcaggcctgtggcggaccttgcaagtgggttggaacatgcagctgcttccggcaggtctggcctccttcgtcgaggtggtctcattatggttcgcggaaggccagcgctactctcacgcagccggcgagtgcgcccggaacgcgacctgtacccactacacccagctagtgtgggcaacctcttcccagctgggctgcggacggcacctatgttcggccggtcagacagctatcgaggcattcgtgtgcgcttactcccctcgcggcaattgggaagtgaatggaaaaacgattatcccctacaagaaaggcgcttggtgctcactatgtacagcctcagtctctggttgctttaaggcttgggatcatgctggaggtctctgcgaggtgccaagaaatccttgtagaatgtcttgtcaaaaccatgggcgtctgaatatcagtacctgccattgccattgtccgcccggctatactggaaggtattgtcaggtgaggtgcagcctccaatgcgtgcatggcagatttagagaggaagagtgcagctgtgtgtgcgatatcgggtatggcgagcccagcgtgcctccccggtgcatatttccctccactcccgttacttag

SEQ ID NO: 11940 - RNA, 1158 nt, synthetic construct
  misc_feature 1..1158: note = source = /note="Description of Artificial Sequence: Synthetic coding sequence"
  source 1..1158: mol_type = other RNA
atgaaaatgctccccggggtgggtgtcttcggtaccggcagttcggcccgggtattggtccctctcctgagagccgaaggctttacagtcgaggccctgtggggcaagacagaggaggaagccaaacagttagctgaagagatgaatatagccttctacacttcccgaacagatgacatcctcctacatcaggacgtggatctggtgtgcatcagcattcctcctcccctgacccgacagatctccgttaaagctctcggtattggaaagaacgttgtctgtgagaaagctgctacgtccgtggacgcttttcgaatggtaacagcctcccgctactatccacagctgatgagccttgtcggtaacgtgctgcgatttctccctgccttcgtccgaatgaagcagcttatctcagaacactatgtgggagctgtgatgatctgtgacgcgcgtatctattctggttcactcctctcaccctcctacggttggatttgcgacgagctgatgggcgggggcggcctgcataccatgggtacatacattgtcgatctactgacccacctgacaggccggcgagcagaaaaagtacacgggcttctaaaaacattcgtgagacaaaacgcggctatccgaggcattcgccatgtgacttccgacgacttctgcttttttcagatgcttatggggggaggcgtgtgttcaacagtgacactgaacttcaatatgccaggggccttcgtgcacgaagtgatggtggttggaagcgcgggtcggttggttgctagaggcgccgatttgtatggtcagaaaaacagcgctacccaggaagaattactgctgcgggactcacttgcagttggtgccggcctccccgaacaagggccacaggacgtcccgctcttatacctgaagggaatggtgtacatggtccaggctctaaggcaatcgtttcaggggcagggagataggaggacatgggatcgaactcctgtgtccatggcagcctcatttgaagatggactctatatgcaatctgtggtggatgccattaagcgcagctctcgatccggggaatgggaggcagtggaagtcctgaccgaggaaccagacactaatcagaatttgtgcgaagctttacagcgtaacaacctgtag

SEQ ID NO: 11941 - RNA, 1470 nt, synthetic construct
  misc_feature 1..1470: note = source = /note="Description of Artificial Sequence: Synthetic coding sequence"
  source 1..1470: mol_type = other RNA
atgccagttactttcgcgttactgctcctcttagggcaggcaaccgctgacccttgctacgatccacagggccggccccaattctgtctcccaccagtcacacaactagcagccgttgctgcatcatgtcctcaagcttgcgccttgtctcccggtaaccatttgggagctagagagacttgtaacgggtcgctgacattggctcttggaggaccatttctgctgaccagtgtgtctctaagattttgcaccccgggcccccctgccttaatcctctccgcagcttgggcatcaggcggcccttggcgactgctgtggcaccggcccgcttggcctggtgcattgggagggcctgaacgggttacatttcacagtacacctggacctaaagcaacagtagctgctagtcacttacgggtggagttcggcggacaggccggcttggcagctgctgggttgagaggcagatgtcagtgtcatggacacgcagctcgctgcgccgcccgggcccgaccccccagatgccactgtaggcaccacacaactggcccaggctgtgaatcctgtcggccttcgcatagagattggccgtggagacccgccacaccaagacacccccatccctgtctgccgtgttcctgcaatcagcacgccaggagatgtcgattcaattcagaactattccgcctatctgggggtcgcagtggcggcgtttgtgagcgctgtcggcatcacacggctgggaggcactgtcattattgccaacccgggttctggagggatccaagtcagcctatcttttctcgccgagcctgcagagcatgtcagtgtcatcccatcggtgctacagggggcacttgtaatcagacttcaggccagtgcacctgcaagctcggcgtcacaggcctcacatgcaatcgctgcgggccggggtatcagcagtcaagatctccgcgcatgccctgccaacgcattccggaagcgactactactttggccacaacacccggggcttatagttcggatcctcagtgtcaaaactactgcaacatgtccgacaccagagtacacatgagccttagacgatactgtcagcaagatcacgtcctgagagcccaggtcctcgcaagcgaagctgcaggacccgcctggcaacggcttgcggtgagggttctggcggtctataagcagcgggcccagcctgtaagacgcggtgatcaggacgcttgggtcccccgcgcagacttgacatgcggctgtctgcgactgcagcctgggacggattacctactgctggggtccgctgtgggcgatccagacccgacacggttgatcctagatcggcacgggttagcactaccttggcgacccagatgggcaagaccgttaaaaaggctgcaacaggaggaacgcgccgggggatgtcggggcgttagagcgcccactccttccccccgcccagagcactag

SEQ ID NO: 11942 - RNA, 8430 nt, synthetic construct
  misc_feature 1..8430: note = source = /note="Description of Artificial Sequence: Synthetic coding sequence"
  source 1..8430: mol_type = other RNA
atgacactcgagggattgtatctcgcaagagggcctctggcacggttgctgctcgcctggtccgcactgctatgcatggccggcggacaaggacgctgggatggggcccttgaggccgctggacccggacgggtcaggagaagaggaagtcctggcattctccaagggcctaatgtgtgtggtagccgttttcacgcctactgctgtcccgggtggagaacgtttccagggagaagtcagtgcgtggtgcccatctgtaggcgggcctgtggagaggggttctgttcgcagccaaacctgtgtacctgtgccgacggaaccctagcaccctcatgtggagtcagccggggttctggctgcagtgtttcttgcatgaatggcggcacgtgtcggggggcgagctgcctgtgtcagaaagggtacacaggtacagtgtgtggccaacccatctgcgatcgtggctgccacaacggggggcgctgcatcggccccaatcgatgcgcctgtgtctacggctttatgggccctcaatgcgaacgggattaccgtacaggtccttgttttggccaggtggggccggaagggtgtcagcaccagctcacaggccttgtttgtacgaaggcactgtgttgcgcgacagttggaagagcctggggcctgccatgcgaactctgtcctgcccagcctcacccatgcagaagggggttcattccgaatattcacacgggagcctgccaggatgttgacgagtgtcaggctgtgcctgggctgtgtcagggcgggtcatgtgtgaatatggtgggctcctttcattgtagatgtccagtcggccatcgtctgagtgactctagcgccgcttgtgaggactatcgggcaggggcctgcttctcagtactgtttgggggccgatgcgccggagacctggcgggacattatacgcgcaggcagtgctgttgcgatcgcggtcggtgctgggcggctggacctgtccccgaattgtgcccgcccagaggatctaatgagttccagcagctctgcgcgcagagactgcccctacttcccggacatccgggcctgtttcccggccttctggggttcggatctaatggtatgggcccaccattaggccctgcccggctgaacccacacggaagcgatgcgcgtggcattccaagcctgggcccaggcaactccaatatcggcaccgcaacgctgaatcaaactatcgatatctgcaggcattttacaaatctatgtctgaacggtcgctgtcttcccacaccctctagttatcgttgtgaatgtaacgtaggctatacccaggatgtccgcggagaatgtatcgatgtggatgagtgtaccagcagtccctgccatcacggtgactgtgtcaatattcccggaacgtaccactgtcgatgctatcctggctttcaagctacccctacaagacaggcctgcgtcgatgtggatgaatgcattgtgagcggaggactctgtcacctgggccgatgcgtcaacactgagggctcatttcagtgcgtttgcaatgctggcttcgagctgtcccccgacgggaaaaattgtgttgatcataacgaatgcgcaacgtccaccatgtgtgttaatggtgtttgtctgaacgaggatggcagtttcagctgtctgtgtaagcctggtttcctgcttgctccgggaggccactattgtatggatatcgacgagtgtcagacacctggaatctgtgttaacggacactgtacgaatactgagggtagctttcgctgccagtgtctgggcggactggctgtgggcaccgatggccgagtttgtgtcgacactcatgtccgaagcacttgctacggtgcaattgaaaaaggatcctgtgctagacctttccctggcaccgtcactaaaagtgaatgttgttgcgcaaacccagatcacggtttcggagagccctgtcagctctgtccggccaaagatagtgcggagtttcaagcactctgctcctcaggtctcggtataactactgatgggcgggatataaacgagtgcgccctggaccctgaggtctgtgcaaacggcgtttgtgaaaaccttcgtgggagttaccgctgcgtgtgtaacctgggctacgaggccggtgcttccggaaaggattgcactgacgttgatgagtgtgctctgaacagtttactctgtgataatggatggtgtcaaaattctcccggatcctactcttgctcgtgccctcctgggttccatttctggcaggacacagagatttgtaaagatgtggacgagtgcctttcaagtccgtgtgtttccggagtatgtcgcaacctggctggctcttacacctgcaaatgcggccccggatctcgcctggacccctcgggcaccttttgcttggacagcactaaagggacgtgctggcttaaaattcaggaatcccggtgcgaggtgaatcttcaaggagcttccctgcggagcgaatgttgcgcaactttgggagctgcctgggggagcccgtgcgagcgatgtgagattgacccagcgtgtgcccgtgggtttgcaaggatgaccggagttacctgcgacgacgttaatgagtgcgagtcgttccccggggtgtgtccaaacggtcggtgcgtcaacacagccggatcttttaggtgcgaatgccccgagggactcatgttggacgcaagcgggcgcctgtgtgtggatgtacgcctggaaccctgttttctgcggtgggacgaagatgaatgtggagttacactacctggcaaatataggatggatgtctgttgctgctctatcggggccgtttggggcgtggagtgtgaagcctgtccagatcccgagtctttagagttcgcatcactgtgccctcgggggctgggctttgcgagtcgggatttcctgtccgggcggcccttctacaaagatgtaaacgagtgcaaggtgttccccggcctttgcacacacggaacatgccgcaatacagtgggatcctttcattgtgcttgcgccgggggattcgctctggatgcacaagaacggaattgtactgatattgatgaatgtaggatatcaccagatctgtgtggacaaggcacatgtgtaaacacccccggcagtttcgaatgcgagtgttttcctggctatgaaagcggatttatgctgatgaaaaattgcatggatgtagatgaatgtgccagagatcctctcctctgccggggcgggacatgcacaaatactgacgggagctataaatgtcaatgccctccaggccacgaattgaccgcaaaggggacagcctgcgaggatatcgacgaatgctcgctgtctgacggcttatgtccgcacggccaatgcgttaatgttatcggggccttccagtgcagttgtcatgccggctttcagtctacaccggatagacagggctgcgtggacattaatgagtgcagagtacagaatggcggttgcgatgtccattgcatcaatactgaaggatcttaccgttgttcttgcggccagggctattcactgatgcctgacggacgggcctgtgctgatgtggatgagtgtgaagaaaacccccgggtctgcgaccaagggcattgcaccaatatgccagggggtcatagatgcttgtgttacgacggcttcatggcgacacccgatatgagaacctgtgttgacgttgacgagtgcgacctgaatcctcatatttgtttgcatggtgactgcgaaaataccaaagggtctttcgtgtgccactgtcagttgggctatatggttaggaagggtgctactggctgtagtgacgtggacgagtgcgaggtcgggggacacaattgtgatagccatgcctcctgtctgaatatccccggatccttttcatgccgatgtctcccagggtgggtgggtgatggatttgaatgccatgatctagatgaatgtgtaagtcaggaacaccggtgctctccccgcggggattgcctcaatgttccaggttcttatagatgcacctgccgtcagggcttcgccggtgacggattcttttgtgaagacagagatgagtgtgcagagaacgttgatttgtgtgataatggtcaatgtctcaatgcccctggtggctacaggtgcgaatgtgaaatgggattcgatccaaccgaagatcaccgtgcctgtcaggatgttgacgagtgcgctcagggaaacctatgcgcgttcggaagctgtgagaacctgcccggtatgttcagatgcatctgcaatggcggttacgagttagaccggggcgggggaaattgcaccgacataaacgagtgtgcggacccagtgaactgtattaatggggtgtgtataaacacgcccggaagttacctgtgttcctgtccacaggactttgaactcaacccgtcaggcgtagggtgtgttgatacccgggctggtaattgtttcctcgagacccatgatagaggagactctgggatttcttgtagtgcagagatcggcgtcggcgtgaccagggcttcatgttgttgttcacttgggcgcgcctggggaaatccctgcgagctgtgccctatggccaacacaactgaatataggacactctgtccgggaggggagggctttcagcctaaccggattaccgtgatccttgaggacatcgatgagtgccaagaacttcctggactttgccaaggcggggactgtgtcaatacatttggaagcttccagtgcgaatgccctccgggataccatctgagcgagcacacacggatttgcgaggatatagatgagtgctcaactcactcaggaatttgtggaccaggaacttgctacaacacactgggcaactatacctgtgtctgcccagcagagtacctgcaggtcaatgggggaaacaattgcatggatatgagaaagagcgtatgttttagacactataacggaacctgccagaacgagttggcctttaatgtgacgagaaagatgtgttgctgctcttacaacatagggcaggcttggaacagaccctgcgaagcatgccctacaccaatctcccccgactaccagatcctttgcgggaaccaagcccccggctttcttacagacattcacaccggtaaacccctggacattgacgaatgtggggaaatcccggcaatttgcgccaatgggatctgcatcaaccaaataggttccttccggtgtgagtgccctgctggctttaactacaacagcattcttttggcttgcgaagatgtggacgaatgcggcagtagagagtccccctgccagcaaaacgctgattgtattaatattcccggaagctatcggtgcaagtgcacacgcggatataagctttccccgggtggggcctgcgtcggccgaaatgagtgtcgcgaaatccccaatgtatgcagccatggcgactgcatggatacagaagggtcctacatgtgcctgtgccatcgaggatttcaggcgtccgctgaccagaccctttgcatggacatcgatgagtgcgatcgacagccttgtggcaacggtacttgcaagaacatcatcggttcctacaattgcctttgtttcccgggcttcgtagtcactcataatggggactgcgttgactttgacgaatgtacgacgctcgttgggcaggtgtgccgcttcggacactgcctgaatacagctggatcttttcactgcctgtgtcaagatggcttcgaactgacagctgatggaaagaactgtgtcgacacaaatgaatgtctaagtctggccggaacatgcttgcctgggacttgccagaacttggagggatccttccggtgcatatgtccgcccggctttcaggtccagtcagatcactgcatcgatattgatgaatgcagcgaggagcccaatctgtgtctgtttggaacctgtacaaactcccccggaagtttccagtgtttgtgccctcccggattcgtgctgtccgataatggccatagatgttttgacacccgccagtcgttttgtttcacccgcttcgaagcgggtaagtgtagcgtgccaaaggccttcaacacaactaagactaggtgctgttgctcaaagcgccccggggaaggctggggggacccctgcgaactatgtccgcaggaagggtccgcagcattccaggagttgtgcccattcggtcacggggctgtgcccggacccgacgattctagggaagacgttaatgaatgcgccgaaaatccaggggtttgtacaaatggagtttgcgtcaacacagacggatcctttcggtgtgaatgtccttttgggtacagcttggatttcactggaatcaactgtgttgacactgacgaatgctcagttggacacccctgcgggcagggcacctgtacgaatgtgatcggggggttcgaatgtgcttgcgctgatggcttcgagccaggcttgatgatgacttgcgaggacatagacgaatgctctttaaacccattgctgtgcgcttttaggtgccataacacagagggcagctacttatgtacctgccccgccgggtacaccctcagagaagatggggctatgtgcagagacgttgatgaatgcgctgacggacagcaggactgtcacgctcgcggaatggaatgtaagaatctgattggtacttttgcttgcgtgtgcccgccagggatgcgcccccttcccggttcaggtgagggctgcacagatgacaatgagtgtcacgcacagcctgacttgtgtgttaatggtcggtgcgtgaataccgcgggaagtttcaggtgtgactgtgacgagggtttccaacctagcccgacgctaacagaatgccacgatattcgacaaggaccctgcttcgcggaggtgctgcagaccatgtgtcgaagcctgtcaagctcctccgaagccgttacccgcgctgagtgctgttgcggcggtggtaggggatggggccctaggtgcgaattgtgcccactgcctgggacttcagcatacagaaaactctgcccccatggttctgggtacacagctgagggaagagatgtagatgaatgcagaatgttggcacacttgtgtgcgcatggagaatgtatcaacagcttggggtcctttagatgtcactgccaggcaggttacactcccgatgcaaccgccacgacttgcctggatatggatgaatgttcccaggtccccaagccctgtaccttcttatgcaaaaatacaaagggcagcttcctttgctcttgcccccgcggatatctcctcgaggaagacggtagaacctgcaaagacctggatgagtgcaccagccgacagcataattgtcagttcttgtgtgttaacacggtgggtgccttcacctgccggtgcccacccggcttcacacagcaccaccaggcgtgttttgataacgatgaatgctctgcccagccaggaccgtgtggcgcccacgggcactgccacaatacgccaggaagctttcgttgcgaatgccaccaaggctttaccctggtctctagtggtcatggttgtgaagatgtcaatgaatgtgatgggccccaccggtgccagcacgggtgtcagaaccagcttggtggatatagatgctcttgcccccaaggtttcacacagcatagccagtgggcccagtgcgttgacgagaatgagtgcgctctgtccccacctacatgcggctctgcatcctgtcgtaataccctgggcggctttaggtgtgtttgtccatccgggtttgacttcgatcaggctctgggaggatgtcaggaggtggacgaatgcgcgggtcggcggggtccatgtagctactcttgcgccaatacccccgggggctttctgtgtggctgtccccaaggatatttcagagccgggcaggggcactgtgtgtcaggacttggattcagccctggcccacaggatactcccgacaaggaggaactgctgtcatccgaggcatgctatgaatgtaagatcaatgggctgagtccgcgggatcggccacgacgcagcgcccacagagaccaccaagtgaatctggcgacactggacagtgaagctctcctgacacttggcttaaacctttcgcacttggggcgcgccgaaagaattttagagctgcgtccagcactcgaggggctggagggccgcatccgatacgttattgtgcgggggaacgaacaagggttcttcagaatgcaccacctgcgaggagtgtcatcattgcaactggggagacgtagacctggccctggtacataccggttggaagtcgtatcacacatggcaggaccttggggcgttcagcccgaggggcagccaggtccctgggggcaggcattacggctgaaagtgcagttgcagcttctgtag

SEQ ID NO: 11943 - RNA, 303 nt, synthetic construct
  misc_feature 1..303: note = source = /note="Description of Artificial Sequence: Synthetic coding sequence"
  source 1..303: mol_type = other RNA
atggagacccgtcaagtgtcaaggagtccccgtgttcgtttgttactgctgctgctactgcttttggtggtgccttggggcgttagaacagcatcaggcgtggcactgccccctgtgggagtcctctctctgagaccgccaggaagggcatgggcagatcctgctacaccacggccgcgacgctctctggccttggcagatgacgcagcttttcgggaacgtgctcgtctcctggccgccctggaaagacgccattggcttaactcctatatgcataagctattagtcctcgatgccccttag

SEQ ID NO: 11944 - RNA, 1404 nt, synthetic construct
  misc_feature 1..1404: note = source = /note="Description of Artificial Sequence: Synthetic coding sequence"
  source 1..1404: mol_type = other RNA
atgtggcgctgcccactgggcctgcttttattactgcccctggctgggcacttggcactgggagctcagcaaggacgaggcaggagagaactcgctcctgggttgcaccttcggggcataagggatgccggaggaagatattgccaggaacaggacttatgttgtagggggcgcgccgatgattgtgccttaccctacctaggcgccatctgctattgtgatcttttttgcaacagaaccgtcagcgactgttgccctgatttttgggacttctgcctgggagtgcccccacctttcccacccatacaggggtgcatgcacgggggaaggatctaccctgtattaggcacttattgggacaattgcaataggtgtacttgccaggagaatagacagtggcagtgcgatcaggaaccttgccttgtcgatccagacatgataaaggccattaaccagggaaattacggatggcaggcaggaaatcactcggctttttggggcatgaccctcgacgagggtattcgctatcgcctgggcaccatccgtcctagcagtagtgtgatgaatatgcacgaaatctacacagtattaaatcccggcgaggttcttcccacagcctttgaagcttcagaaaaatggccaaacctcattcacgaacccttggaccaagggaactgtgccggctcttgggccttttcaacagccgccgtcgctagcgatcgcgtctcgattcacagtctggggcacatgaccccagtgctgtccccacaaaacctactttcatgcgatacacaccagcagcagggctgccgaggcggcagactcgacggcgcttggtggttcctccgccgtagaggcgttgtctcagatcattgttatcccttctcaggacgggagcgggacgaggctggacccgcacccccatgtatgatgcactctcgagccatggggcggggaaagcggcaagccactgctcactgtcctaattcctacgttaacaacaatgacatctaccaggtcacacctgtctatagacttggttccaatgacaaagagattatgaaagagctaatggagaatgggcccgtccaagctctgatggaggtgcatgaagacttttttctgtataaggggggcatttatagtcatacgcccgtgtcactggggaggccagagcgctaccgtaggcacggcacacatagcgtgaaaattaccggatggggagaagagactctgccagacggaagaaccctgaagtattggacggctgcaaattcctggggcccagcatggggggagcgagggcactttcggattgttaggggcgttaatgaatgcgatattgagagcttcgtgctaggggtgtggggccgggttggaatggaagacatgggacaccattag

SEQ ID NO: 11945 - RNA, 2205 nt, synthetic construct
  misc_feature 1..2205: note = source = /note="Description of Artificial Sequence: Synthetic coding sequence"
  source 1..2205: mol_type = other RNA
atgttttacgtctgtagctcatgtgtttttttatgtggctctaacttccccaacttcccatttcaggtagccagcgcaaagagcgctcccgagattcctacaatcgatcaggcatatagcaaactgtccaactccatcactgttgaatgggccactgtgcccggagccacgtcttacttattgactgctgaggatggcgatacggtcatcgaaacaacagtggctaatagtccaggaacggtgacagggttgaaagccgccacatggtacgagattacgatacggagcattagtgctgctgggagaagccaagcatcaccacctaagcaggctaagactgttcttgccgcgcctatcctggaagtgtcttcaccctcatctgattcgatcttggtgcagtgggaagctgtgtacatggcaatcgcattcagtgtgtctatcatgagggctaatggcctggggtcaatctggaaggagaacaccacgaacacctctctcacttttacttccctggaagcggggacactgtataccattaaggcttatgcctggaatgccaaccggatccctggtgacgacagtacttgcaatcagcgaacatcgcctcgcgccccagcaaatattcaggtatctttcgactctggtgctctgaaagcatccttctcttgggcacgagccgagggcgcattcaactacacagttatggcgttgtctgactcttccgagctgacatgctccaccacattctcatcatgtacaatatcttctctccaatgcggtactgagtatttaattagcgtcctggctagtaatgacgcgggatctagcaagtccagctctgctatgaccctgaagaccgtggcctgcgctccgggtcgcgtgacaatacaggaagacccccctggacacttatccgtagcatggagctcagtggacttgggggactattatgtggtgtttgtgaaatccgacgatggccttgaggtccattgcaacacttcactaactcaatgtaatttcttgagcgagtgtggctttacttactttatttctgtgttcgtttacaacaaggccggccagagcccactgggcgatatcttcaattacactaccgcgccttgctgtcccagcgacataaatccagttctagtgtcctccgatcgagtagaaatagtgtggtccccagttcggggagctgagctatatgagaccaaagctgtggacggctataatatggtcgagtgtaatgacacgacacccgcatgtactttgtctgcgctggagtgtgacaccaaatacaatatcaccgtctattcattcaatgaagttcgagggagtaacatgtcctgtaccccacaattcatcacgactgcaccgtgtagccctgagatcaaaaacgtctccagagacgctttttcgatgattaatgttcactggagatcaacaaatgacgacgctacatatactgtgacggctcaaggtgaaaaaggcctgtatcagtgctcatctaccggggagagttgtacaatgagggggcttccttgtggaagcgtcttctccgtgacagccgtagccgaaacccaggcaggaagaagcctcccctcctattcagtgcccttggaaactgtgccgtgctgccccaccggattaaccgtaactcagattacacagtccgtgataaacgtgagttggaccattggccgcgttgcacagactcacgtagccgtgctggagagccataccggccagtctaaatgccatactcaccaaaatcactgtctactggggtgcatcacctgcgggatcaattacaccgtcacgttgaaagccatttccgcaactgggttaaccgccgactgctcatatcaaagctacttctctggcgcttgttgccccctgggtgtcaagctgtacaggttaggacctaacggcattcgcatctattggcaggcatctcgtgggagcgcaaattatagcacagatttgtatggctccaaagggatctttacatgcacaccaagcgcaggcctgtccttctgtgacgtgacggaaattccctgcggtgatgtgtacaccgtcatggtttcccccgtggccaagaccggtctcaagttaacattttgtcccaaaaaaatctactccgtaacctgttctggttctacactcgggatggtgatatatagagggaagcggaacgaagagtag

SEQ ID NO: 11946 - RNA, 1098 nt, synthetic construct
  misc_feature 1..1098: note = source = /note="Description of Artificial Sequence: Synthetic coding sequence"
  source 1..1098: mol_type = other RNA
atgttggacggatcacccttagcaaggtggctggccgctgcattcggcctgactctgctgctcgctgctcttcgccccagtgctgcttacttcggactgaccggatcagagcctctgaccatacttcctttaacgctcgaacccgaggccgcagcacaggcccactataaagcttgtgatcgcttgaaattggaaaggaaacagagacgcatgtgtcgtcgggaccccggggtggctgagacccttgtggaggccgtatccatgtcagcgctggaatgccagtttcaatttcgttttgagaggtggaattgcaccctggaggggcgatatagggcaagtctgttgaaaaggggatttaaagaaactgcgtttttatacgctatctcttctgccggcctcacacacgccctagctaaagcttgcagcgctggtcggatggaacgctgcacgtgtgatgaagcccctgacctggagaatcgggaagcttggcagtgggggggttgcggggataatcttaagtactcatcaaagttcgtaaaggaattccttgggcgacgctcctctaaagatctcagagcgcgagtggacttccacaacaatttggttggcgtgaaagtaattaaagccggcgtggaaactacttgcaaatgccacggggttagcggtagctgcactgtcaggacgtgttggcggcagctggcaccttttcatgaggttggcaagcatcttaagcataagtatgaaaccgcactgaaagttggcagcaccaccaacgaggccgcgggcgaagcaggtgcgattagtccccccagagggcgggcttcaggagccgggggcagcgatcccttaccaaggacacctgagctcgtacatttggacgacagtccctctttttgtctggcagggagattttcacctgggaccgccgggagaaggtgtcatagggagaagaattgcgagtcgatctgttgcggcagagggcacaatacacagtctagggtcgtaacgaggccgtgccagtgccaagtgcgttggtgctgctacgtagaatgtcgtcagtgcacacagcgggaggaagtgtacacgtgcaagggatag

SEQ ID NO: 11947 - RNA, 795 nt, synthetic construct
  misc_feature 1..795: note = source = /note="Description of Artificial Sequence: Synthetic coding sequence"
  source 1..795: mol_type = other RNA
atgaggctacgccctctgcccttggtggtggtcccgggtttgctgcaattgctgttctgcgatagtaaggaggtggtgcacgccacagaggggctagactgggaagacaaagatgctcccgggacgttggttggcaatgtcgtacattcaaggattattagtccactaaggctgttcgtaaagcagtctccagtccctaagcctggaccaatggcatatgccgacagcatggagaatttttgggattggctcgctaatatcaccgagattcaggagcctctggcacggacgaagagaaggcccattgtgaagacaggcaaattcaagaagatgtttggctggggagatttccactctaatattaaaactgttaaactaaacctactaatcaccggtaagatagtcgaccatggcaacggtacattttcagtttatttcaggcataacagcactggactggggaacgtcagtgtgtcactagtccctccatccaaagtagtggaatttgaagtaagcccccagagcacattggaaaccaaagagtccaaatctttcaactgtcgcatcgagtatgagaagacggaccgtgctaagaaaacagccctctgcaattttgatccatcaaagatttgttatcaggaacagactcagtctcacgtgtcctggttatgctccaagcctttcaaagttatttgtatctatattgccttttactccgtggactacaaactggtgcaaaaggtctgtcccgactacaactaccacagcgagactccctacctcagctctggttag

SEQ ID NO: 11948 - RNA, 1125 nt, synthetic construct
  misc_feature 1..1125: note = source = /note="Description of Artificial Sequence: Synthetic coding sequence"
  source 1..1125: mol_type = other RNA
atgaaacctctccttgagactctttatttgctcggcatgctggtacctggtggcttgggatacgaccgctccctcgcacagcacaggcaggagattgtggacaagagcgtttccccatggtcactggagacctattcttacaatatctaccatcctatgggcgagatctatgaatggatgcgggagataagcgagaagtacaaagaagtcgtcactcagcactttcttggagtgacatacgaaacacaccccatgtattatctgaagattagtcagccttcagggaatcccaagaagatcatttggatggactgcggaatccacgctagggagtggatcgcaccagccttttgccagtggtttgtaaaggaaatactgcagaatcataaagacaactcttctattcgaaaactcctacggaacctcgacttttatgtactgcctgttcttaacattgatggatacatctacacttggaccactgaccgactgtggcgcaaaagcaggagcccccacaataatggtacttgtttcggaacggacctgaaccgcaactttaacgcctcttggtgttctataggggcaagtcggaattgccaggatcagactttctgcggaaccgggcctgttagtgagccagaaaccaaagcagtggcaagtttcatcgaatcaaagaaggatgacattctgtgtttcctgaccatgcatagttacggacagctgatcttaactccctatggctataccaaaaacaaaagttcaaatcaccctgaaatgatccaggtaggtcaaaaggcagcaaatgccctgaaggccaaatacggcactaattacagagtgggatcctccgcggacatactgtatgcaagtagtggcagctcaagggactgggcaagagacatcggtattccattttcctataccttcgagttgcgcgattctggtacctatggtttcgtcctgccagaggcacagatccaacctacctgtgaggagacaatggaagccgtgttgagcgtactggacgatgtttacgccaagcactggcacagcgactccgccgggcgtgtgacctccgccacaatgctgctgggactcttagtcagctgcatgagccttctttag

SEQ ID NO: 11949 - RNA, 1728 nt, synthetic construct
  misc_feature 1..1728: note = source = /note="Description of Artificial Sequence: Synthetic coding sequence"
  source 1..1728: mol_type = other RNA
atggcatcctggttacgcagaaaactcagaggaaagcgtcgccctgtgatcgcattttgtttgctgatgatcctatctgctatggctgttacaagattcccgccacaaagacctagtgcgggccctgaccccgggcccatggagccccagggagtcacaggtgctccagctactcacatcagacaggctctctcaagctctcggcgccaaagggcaaggaacatggggttttggaggtcacgcgcactccccaggaattccatactcgtttgtgccgaggaacagggccaccgagcccgagtcgacaggtcccgcgagtccccagggggtgatcttcggcaccctggcagagtgaggagggacattaccttgagtggccatccccgactgagtacacaacatgtggtgctcctccgggaggacgaagtgggcgaccctggaacaaaggatctgggacatccacaacacggctcccctatccaggagacacaatccgaagtggttactcttgtctcaccccttccgggcagcgacatggccgccctccctgcatggcgggccacttctgggctcacactgtggcctcatactgctgagggccgagacctcctgggtgcagagaacagggccttgaccggaggacagcaggctgaagatccgacattggctagtggcgcgcatcagtggccaggtagcgtggaaaaactgcaggggtccgtgtggtgtgatgccgaaactcttctttcttcttcccgaactggaggtcaggcccctccgtggttaacagatcatgatgtacaaatgctcaggctattggcacagggtgaggtcgttgacaaggcaagagttccagctcatggacaagtgctgcaagtcgggttcagcactgaggcggctcttcaggatctatcaagccctagacttagccagctttgttcacagggactgtgtggactaattaagagacctggggacctgccagaagtgctctcctttcacgtggaccgggtcctgggcttgaggcggtctctccctgccgtggcccgcaggttccacagccctctgttaccttatagatacacggatggcggagcacggccagttatttggtgggctccagatgtgcaacatctgagcgatcccgacgaagatcagaatagcctagctctagggtggcttcagtaccaagctctgctggctcattcctgcaattggcctggccaggcgccctgtcccggcatccatcacaccgaatgggcccggctcgccttgttcgatttcctcctccaagtccacgataggttggatcgttactgttgcggattcgaaccagagccttcagatccctgtgtagaggaacgactgcgagaaaagtgccagaaccctgctgaactcagattggtccacatcctggtgcgtagttctgacccaagccatttggtttatatcgataacgctggaaacctgcaacaccctgaagacaaactcaactttaggctgctggaagggatagacgggtttccggagagcgcagtgaaagtgctggcttcaggctgtttgcaaaatatgctactaaagtccctgcagatggatcctgttttttgggagagtcaagggggcgcgcaggggctcaagcaagtcctccaaaccctggagcagaggggccaggtgctgctaggccacatccaaaagcacaatctcactctcttccgggatgaagatccttag

SEQ ID NO: 11950 - RNA, 1680 nt, synthetic construct
  misc_feature 1..1680: note = source = /note="Description of Artificial Sequence: Synthetic coding sequence"
  source 1..1680: mol_type = other RNA
atgtggacaaactttttcaaacttcggctgttttgctgcctcttggcggttctcatggttgtggttctggttattaacgtaacgcaggtggagtacttggatcacgaaacagtttccgccacatttattgacagctcaggccaattcgtgagttctcaggttacaggaattagtagaaacccctactgcggctatgaccaacagactctatcctctcaagagcgcatggaagaagacagcctgctcgcggcactacacagacaggtgccggacgtcggtcctgtgcccttcgtgaagagcactgatccgtcttcctcttatttcgtgatcttgaattctgctgctttttttaaggtcgggagtcaactggaagtgctcgtacatgtgcaggattttcagcgaaagccaaaaaaatacgggggagattatctgcaggcccgcatacacagcctcaaacttcaggcaggagctgttggccgcgtggtcgattatcaaaatggtttttacaaggtcttcttcacactgttgtggccgggcaaggtgaaggtgtcggtaagcttagtgcacccatctgaaggcatcagagtgctgcagcgactgcaagaagataaacctgatcgcgtgtactttaaaagtctgtttaggtcagggcgcatcagcgagacaacagaatgcaacgtgtgtttgccaggaaacctgcctttatgtaactttactgatctgtacactggcgagccctggttctgtttcaaacctaagaaactaccgtgctcttcccgcatcacacatttcaaaggtggctatctcaaggggttgctcactgcggccgaatccgctttctttcagtcgggggtaaatattaaaatgccagtgaactcatccggcccggactgggtcaccgtaattccccgccgaatcaaagagactaacagcctggagttgtcccaaggctctggaacttttccatccggttattattacaaggaccagtggcgccccaggaaatttaagatgcggcaattcaacgatccggataatattaccgagtgtcttcagaggaaggtggtccatttatttggcgatagtactattaggcagtggttcgaatatctgacaacttttgtcccggatctcgtggagttcaacctggggagtccaaagaacgtggggcctttcttggcggttgatcaaaagcacaacatcctgttaaaatataggtgccatggacctcccatccgatttactacagtgttctctaatgagctgcactacgtcgcaaacgagcttaacggcatcgtggggggtaaaaatactgttgttgccatcgccgtctggtcacattttagcacatttccccttgaagtgtatattaggcgtctgagaaatattcgcagagccgttgttaggcttctcgaccggagcccgaaaacagtcgtggtgatcagaactgctaatgcgcaggaactaggccccgaagtgtcactcttcaatagcgattggtacaactttcagctggacactattctcaggcgcatgttctctggcgtcggagtctacctagtggatgcgtgggaaatgacgctggcacattatttgccacataagctgcatcctgacgaggtaattgtgaaaaaccaacttgacatgtttctgagcttcgtatgtccactagagacttag

SEQ ID NO: 11951 - RNA, 3624 nt, synthetic construct
  misc_feature 1..3624: note = source = /note="Description of Artificial Sequence: Synthetic coding sequence"
  source 1..3624: mol_type = other RNA
atgaggttgactcacatttgttgctgttgccttctgtaccaactgggtttccttagtaatggcatcgtttctgaactgcagttcgccccagacagggaggagtgggaggtcgtgtttccagcactttggaggcgggagcctgtcgacccagcgggaggatcaggagggagcgctgaccctggatgggtgcgcggcgtaggagggggcggcagtgccagagcacaggcagcagggtcttcccgggaggtcaggtccgtcgctcccgtccctctggaagagcccgttgaggggcggagcgagtcccgtctgcgaccccccccaccttccgagggggaggaggacgaggagctggaatcgcaggagctcccccgtggcagcagtggagcagccgccctcagccctggcgccccggccagctggcagccccctcccccaccacagccaccgcctagcccccctcccgctcaacatgccgagccagacggcgatgaggtcttgctgcggatacctgctttttcacgggatttatacctgctcctgcggagagacggccgttttctggctccacgttttgccgtcgaacagcgacccaacccgggccctgggccaacaggggcggcctcagccccccaaccgcctgccccgccggatgcaggttgcttttatactggtgcagtcttacgacacccggggagcctcgctagcttttccacttgcggcggcggattgatgggctttatccaactgaacgaggatttcatctttattgaaccgcttaacgacacaatggctatcaccggacaccctcaccgcgtgtaccggcagaagagatctatggaggagaaagtaaccgagaagtcagctcttcattcccactactgcggaattatctccgataagggtagaccaaggtcaaggaaaatcgcagagtctggacggggtaaaagatattcctataagctaccacaagaatacaacattgaaactgtcgtggttgctgaccctgcgatggttagctatcacggtgcggacgctgctcggcgcttcatcttgacaattctgaatatggtctttaaccttttccaacataaaagcctcagcgtccaggtcaacctccgggttataaagctgattttactccacgaaacaccaccagaactttacattggccaccacggcgagaagatgttggaatccttctgtaaatggcaacacgaggagtttggcaagaagaatgatattcacctagaaatgtctacaaattggggggaagatatgaccagcgtcgacgctgccatcctcattacgaggaaagatttttgtgtccacaaggacgaaccctgtgataccgtgggcattgcatacctctcaggcatgtgctctgaaaaaaggaaatgtattattgccgaagacaacgggctgaacctggccttcaccatcgcccatgagatgggccataacatgggtatcaaccacgataacgaccatccttcttgtgccgacggactccacattatgtctggagaatggattaaaggccagaacctgggtgatgtcagctggagtcggtgttccaaggaggacctggaacgcttccttagaagcaaggcttccaactgcttgctccagacaaacccgcagagcgtgaactccgtgatggtgcctagtaaactcccagggatgacttacaccgccgacgagcaatgccaaatactctttggacctctggccagtttctgccaggaaatgcaacacgttatttgtacagggctttggtgcaaggtggagggcgagaaggaatgtcgcaccaagctcgatccgcccatggacggaaccgattgtgatctgggcaagtggtgcaaggctggcgaatgtacctcaaggacatcagcacctgagcacttagcaggggaatggtccctctggagcccctgttcaaggacctgcagcgccggtatcagctcaagggaacggaagtgccccggcttggactcagaagccagggattgtaacgggccccgaaagcagtatagaatttgtgaaaatcctccctgtccagctgggcttcctggattcagggactggcagtgtcaggcgtactctgtgaggacgtctagccctaagcacatactgcagtggcaggctgtgttggacgaagaaaagccttgcgcgctcttctgcagcccggtcggaaaagagcagcctatcctgctcagtgaaaaggtcatggacggcactagctgtggctaccaggggttggatatttgcgcaaatggtcgctgccaaaaagtgggatgtgacggactacttggctcccttgcgcgggaggaccactgcggagtgtgcaatgggaacgggaaaagctgtaagattattaagggagactttaatcacacccgaggggccgggtacgtcgaggtgctcgtgattcccgctggtgcccgccgcataaaagtagtcgaggagaaaccagctcactcatatctggcgcttcgcgacgctggaaaacaaagcataaatagcgattggaagattgaacacagcggggcattcaatttagccggcacaacagtgcattatgttaggcgcggactgtgggaaaaaattagtgcgaaaggaccgactactgctccactgcacttacttgtcctcctctttcaggatcagaattatggacttcattatgagtataccatccctagcgatccccttccggagaatcagtcgagcaaggcccctgaacctttatttatgtggacgcacacatcctgggaggactgcgacgcaacctgcggtggcggcgagcgcaagacaaccgtttcctgcaccaaaatcatgagtaagaacatttctatagtggacaatgagaaatgcaaatacctaacgaaacctgaacctcaaatccggaaatgcaacgaacagccatgccagacacggtggatgatgaccgagtggactccctgctcaagaacctgtgggaagggcatgcagagccggcaagtggcttgcacgcagcagctcagcaacggcacccttattagggccagggaacgagactgtattggtcccaaacccgcctctgcacagcgatgcgaaggccaggattgcatgactgtttgggaagccggcgtctggtccgaatgctccgtgaaatgcggaaaggggatccggcacagaactgtacggtgtacaaatccacgtaagaagtgcgtgttaagcacacggcctcgagaagcagaagattgcgaggattattctaagtgttacgtgtggcgcatgggtgattggagcaagtgtagtataacttgtggcaaagggatgcagagtagagtcatccagtgcatgcataaaattacagggcggcacggcaatgaatgcttttcgtcggagaagcctgctgcctacaggccttgtcacctgcagccatgcaacgagaagattaatgtgaatactattacctcacctagactggctgccctgacctttaaatgtctgggagaccaatggccagtgtattgtcgggtcatccgagagaaaaatctgtgtcaagacatgcgatggtaccagcggtgttgtgagacatgtcgggacttttatgcccagaagctgcagcagaagagctag

SEQ ID NO: 11952 - RNA, 258 nt, synthetic construct
  misc_feature 1..258: note = source = /note="Description of Artificial Sequence: Synthetic coding sequence"
  source 1..258: mol_type = other RNA
atgaaaatcacaggcgggctcctcctgctttgcaccgtcgtgtacttttgcagttcctccgaagctgccagtttaagcccaaagaaagtcgattgtagtatctataaaaaatatccggtagttgccattccctgtcctattacttaccttccagtgtgcggaagcgactacataacttacggaaatgagtgccatttatgcacggaaagtctcaaaagcaatggtcgcgtccagttcctgcacgatgggtcttgttag

SEQ ID NO: 11953 - RNA, 2982 nt, synthetic construct
  misc_feature 1..2982: note = source = /note="Description of Artificial Sequence: Synthetic coding sequence"
  source 1..2982: mol_type = other RNA
atgggctccgggagggttcctggcctttgcctgttggtactcctagttcatgcccgcgcagcacagtactcaaaagccgctcaagatgtggacgaatgcgtcgaaggaactgacaactgtcatattgacgccatatgtcagaatactcccaggagttataaatgcatttgtaagtctggttacaccggggacggtaagcactgcaaagacgtcgatgagtgtgaaagggaggacaacgccggatgcgtgcatgattgtgtgaacattcccgggaattaccggtgtacatgttacgatggatttcacttagcacatgatggacataattgcttggacgtggacgaatgcgccgaggggaatggcggttgccagcaatcttgtgttaatatgatgggctcttacgagtgccactgccgggagggcttttttctgagcgataatcagcacacatgcattcagaggccagaggaaggcatgaattgcatgaataagaatcatggttgtgcccatatctgtcgggaaacacctaagggcggtattgcctgtgagtgtcgcccaggatttgagttgacaaagaatcagagagattgtaagctgacttgtaattatgggaacggcggctgtcaacatacatgcgacgatacagagcaagggccaaggtgtggttgtcatatcaagtttgttctccacacagacggcaaaacatgtatcgagacttgcgcagtcaacaatgggggatgcgacagcaagtgtcacgacgctgctactggagttcactgcacctgcccagtggggtttatgctgcagccggaccgcaagacgtgcaaggacattgacgagtgtcgcctgaataatggcgggtgcgatcatatctgcagaaatacagttggatccttcgagtgcagttgtaaaaaagggtacaagctgttaatcaatgaaaggaactgccaagatatcgacgagtgtagtttcgacaggacctgcgaccatatctgtgtgaatacaccggggtcattccaatgcttatgtcaccgcggctacttgttatatgggattactcattgtggcgatgttgacgagtgcagtattaaccgaggcggctgcagatttggatgtataaacactcctggctcataccagtgcacttgcccagcaggccaaggccgtctgcattggaacggaaaagattgtacagaaccactgaagtgtcaaggatcccccggggccagtaaggctatgttgtcgtgtaatagatctgggaagaaggatacttgtgccctaacctgcccaagtcgcgctcgctttttgcctgaatctgagaatggcttcaccgtgtcctgcggtactcctagtccaagagcggcccctgcccgtgccgggcataacgggaattctacaaattcaaatcattgccatgaagccgcagttctgtccataaaacagcgagcttcattcaaaatcaaggatgcaaaatgcagattgcacttgaggaataagggtaagaccgaggaggccgggcgcatcactggtcccgggggcgcaccctgcagtgaatgccaggtgacttttattcacctaaagtgcgacagttctaggaaaggcaaagggagacgggcccggactccacccggcaaagaggtgacccgtctgaccctggaactggaagccgaggtgcgagccgaagagacaactgcatcatgcggcctgccttgcttacggcagcgcatggagaggagactcaaaggctcactcaagatgctaagaaaatccattaatcaggatcggtttttgttacggctcgcgggcctcgactacgaactcgcacataagcccggactggtggccggagagagagccgagcccatggaatcatgtcggcctggacagcatagagcagggacaaaatgtgtatcttgcccacagggaacctactaccacggacagacagagcaatgtgttccctgccccgccgggactttccaggagcgcgaggggcagctgagctgcgacttatgtcccggctcagacgctcatggacccctcggggctaccaacgttaccacgtgtgccggacagtgcccgcctgggcagcactcagtggatgggttcaaaccatgtcagccttgccctagaggtacataccagccagaagcgggcaggacattgtgtttcccctgcggcggtgggttaactactaaacacgagggagctatctctttccaagactgcgatacaaaagtgcagtgtagcccaggccactactacaacacctcgattcacaggtgcatcagatgcgcgatggggtcctaccagcctgatttccggcagaatttctgcagccgctgtcccgggaatacgagtaccgattttgacggttccacctccgtcgctcagtgcaaaaacaggcagtgcggcggcgagctaggtgaattcaccggctatatagagagccctaactacccaggaaattatcccgctggcgtggagtgcatttggaatatcaatcccccccccaagcgcaagattctgatcgtcgtcccagagatattcctgcccagcgaagacgaatgtggagacgtcctggtcatgagaaagaactcctcccccagcagtatcacaacatacgaaacatgccagacctatgaacgccccattgcatttacagcccgttctcgcaagttatggatcaattttaagacctcagaagcaaattcagctcggggctttcaaattccctacgtaacgtatgatgaggattatgagcaactggttgaggatatcgtcagggacggccgactgtacgcatcagaaaaccatcaggaaattcttaaggataaaaagctgataaaggccttttttgaggtgcttgcccaccctcaaaactattttaagtataccgagaagcacaaggagatgctgcccaaaagcttcattaaacttctgagatctaaggtctcctctttcctgcgaccttacaaatag

SEQ ID NO: 11954 - RNA, 4773 nt, synthetic construct
  misc_feature 1..4773: note = source = /note="Description of Artificial Sequence: Synthetic coding sequence"
  source 1..4773: mol_type = other RNA
atgccagggggggcatgcgtattggtcatcgctttaatgttccttgcctggggagaggctcaggagtgctcccctggaggacaccaattcttgagatccccttacagaagtgtgagattcgattcctggcaccttcagcagtctgccgtgcaagatctgatatgcgatcattcattgtcacccggatggtataggtttctgatcctggataggccggctgagatgcccactaagtgtgtggagatgaaccactgtggtactcaagcacccatctggctcagtctcagggatagtgagacccttccttctcccggagagattaagcaactcacagcttgtgccacatggcaatttttgtttagcactactaaggactgttgcctgtttcagatcccagtctcagtaaggaactgtggaaatttcagtgtttacctgctgcaacctactcaggggtgtatgggctactgtgccgaagccatcagcgatgcaagactccacccatgcggcagtgacgagacggagacaggcggggactgcgtgcggcaactggctgcttcccttccacctccgccagcagggcgcccagaagttttagttgaactgatagaaagccgattattttgccgctgtagttttgatgtgccagctactaaaaatagtgttggatttcacatcgcttggtccagactgagcagccaggaggtcaaagaggagttgacccaagaaacaacagtacaggcctttagtttattggagctcgatggcatcaacctgagactgggcgaccgtatcttctgctccgctagtgtcttctttctcgagaacccacatgtgcaatcagtagctatcgaatcccaggagtttttcgcgggcttcaaactccagcctgagctgagcactatttctgaggatggcaaagagtactacttgcgcatcgaatcaacagttccaataatttgctctgagtttagtgaactggaccaggagtgtaaaatcagtcttaagctgaagacaatcgggcaagggagagaacatcttggactgaaccttgctctctccagctgtcacgtcgatctcttacagacgtcatcatgcgccaacggaacctgctcacacaccttcgtgtattataccgctgtcactgactttagccgagacggcgacagggttagcaacatcgtggtgcaaccaattgtgaatgaggactttctgtggaataactacatcccagactctattcagataaaggtcaaagacgtaccgaccgcatactgctatactttcaccgacccgcacattattacattcgacggaagagtgtatgacaactttaaaaccgggaccttcgtgctgtacaaaagcatgagcagagacttcgaggtgcatgttcggcagtgggattgccggagcttgcattatcccgtcagctgtaactgcggtttcgtggcgcaggagggtggcgatatcgtgacattcgatatgtgtaacggacagctacgagagagccagccttatctttttataaaatcgcaagatgtcacaaggaatataaaaatctcagaatcatatctaggccgtaaagtgacaatttggttcagtagcggtgccttcattcgagctgacctcggtgagtggggaatgtccctgaccattcgagctccttcagtggactatagaaacacacttggcctctgcgggaccttcgatgagaacccagaaaatgactttcacgataaaaacggcatgcagattgatcaaaactttaacaattatgttgccttcatcaatgaatggaggatattgcctggcaagtcaatgagcgatacattgcctgtgagtatgacatcacccggaaagccctcatactgctcttgtagtttggatacagccgcgtacccgagttcagaagacctggactcagtcagtcgttccgagattgctctgggctgtaaggaccttaatcatgtcagtctgagcagcctgatccccgagctcgacgtgacctccgaatacattaatagcgacactcttgtcagggagatcaataaacataccagtcccgaagaatataacctgaatctgttcctgcaagagaagaaacacattaaccttaccaagctgggcttgaacgtacaaaagcaccctggcaacgagaaggaagacagcttacagtatctcgccaataaaaagtatacccagggacgtggctcgcacagtcaggagatgagatacaaccgtcagaacagatggaagaggcagaacttccacgaatttcctcccttatttgcgtttcctagcctgagccagacggacctggaggaattaacttatttcttccccgaggatcatgccgaggacgtgcagcaagaattctttcccagctggccaaccccaagcggcctgactgagtactccactttaaccttgtgccaggagacactagctaactctagcatcggccgactctgtcttgccttcttgggcaaaaggctggacagcgtaatcgagatgtgtgtgaaagacgtcctgctgaaggatgacctgagttgggccgaagctggcgtggctcttctagagaatgaatgtgaaaaacgcatcgttgaagaagggaagtataacacagaggaatacggcacatcaatcgaggatatcttgtccgtgcttaagtgcccaaatctgtgcagcgggaatgggcagtgcatggagtggggctgtgcatgttctccttctttctccagctatgactgctctgattcctacgacaaggcgcccgagattacagaactgggtaatgccggattttgtgatgtacagaagtataattgtatgatggtgcgagtgttcggcaagggctttaaggagttgccctctatcaagtgcgaggtgacgaaactacagtacaactctagcgagtggatgccaggcgagcccatctacacacagacagtctttcataacagccgggctgttgactgtcaactgcctacagatgtgcagcagtttgacacaatggacctagtgggcggtaaacctacgggtaagtggcagctaaaggtgtccaacgatggatacaaatttagtaatcccaaaataaccgtgatctatgatggcgcatgccaagtgtgcgggctgtataaaaacgactcctgtactattaaagaaaacgtctgtataatcgacggactttgctacgtagaaggtgataaaaatccaacctctccgtgcctgatctgtagacccaaaatcagtcggttcacttggtctttcctggagaataatcagcctcccgtgatacaggccctgcaggataagctccaaaccttctacggcgaaaacttcgagtatcagttcgtggccttcgatccggaaggttcagacatacactttaccttggattctggccccgagggggccagcgttagcagtgcgggacttttcatgtggaaaactgatctgctcaccactcagcaaatcacagttcgcctaaatgatgactgcgacgccgaaactcgcgtcacgattgaagtcaccgtgaagagctgtgattgccttaacggcggctcctgcgtctctgaccgcaacttctccccaggaagtggagtctatctgtgtgtatgcttacctggattccatggatccctttgcgaggttgacattagtgggtgtcagtccaatccttgtggtttgggatcctacatttcaggatttcattcctatagctgtgactgccctcccgaattgaaggtggagacacagtttgtgaatcagttcactacacagaccgtcgtgttgacaagatctgacaaaagcgtgaacaaggaagaagatgacaagaatgcccaagggaggaaaagacacgttaaaccaaccagcggcaacgccttcaccatatgtaagtatccatgcggcaaatctcgcgagtgtgtggctccaaatatatgcaagtgcaagcccgggtacatcgggtctaattgccagacagccctgtgcgatcccgactgtaaaaaccatggaaaatgtatcaaacccaatatttgtcaatgcttaccaggtcatggcggagctacatgtgacgaggagcactgcaaccctccatgccaacacggtggcacatgcctagcaggtaacctctgcacttgcccctacgggttcgtgggtccacgatgtgaaacaatggtctgcaacaggcactgtgaaaatggcggccaatgtctaaccccagacatttgtcagtgtaaaccgggctggtatggcccaacctgttcgaccgcgctttgtgatccagtctgtctaaatgggggatcctgcaataaaccaaacacttgcctgtgtccgaacggatttttcggggaacattgtcaaaatgcgttctgccatcctccctgcaaaaatggaggtcattgcatgcgcaacaatgtgtgtgtgtgtcgcgaagggtatactggaagacggtttcaaaagagcatttgtgaccctacttgtatgaacggcggtaaatgcgtcggaccatctacttgctcctgtccaagcgggtggagcgggaaacgatgcaatactcctatctgtctgcagaaatgtaagaacggcggggaatgtattgcaccctcaatctgccattgcccgagttcttgggagggcgttcgatgccaaatccctatatgcaatcctaagtgtctttatggagggcggtgtatctttccaaacgtctgttcttgtaggacagagtattctggtgtcaagtgtgagaagaaaatccagatccggaggcactag

SEQ ID NO: 11955 - RNA, 624 nt, synthetic construct
  misc_feature 1..624: note = source = /note="Description of Artificial Sequence: Synthetic coding sequence"
  source 1..624: mol_type = other RNA
atgtcgactaaacctgatatgatccagaaatgcttgtggttggaaatcctcatgggaatatttatcgcaggaacactttcactggattgtaacttactcaacgtgcacctgagacgcgtgacttggcaaaatttgagacacctcagctctatgtcaaattcattccccgtggagtgtctcagagagaatatagccttcgagctcccgcaagagtttcttcagtacactcaaccaatgaagagagacatcaaaaaagcgttctacgaaatgtcactgcaggcattcaacatcttctctcagcatactttcaaatattggaaagagcgacatctgaaacagatacagattgggttggatcaacaagcggaataccttaatcaatgccttgaagaagacaagaacgagaatgaggacatgaaggagatgaaggaaaacgagatgaagccatcggaggctcgggtgccacagctgtcatctctagagttgcgacgctattttcacagaattgataattttctgaaagaaaaaaaatactcggactgcgcatgggagatcgtgagagtggagattcgccggtgcctctactacttctataagttcacagcactgtttagacggaaatag

SEQ ID NO: 11956 - RNA, 939 nt, synthetic construct
  misc_feature 1..939: note = source = /note="Description of Artificial Sequence: Synthetic coding sequence"
  source 1..939: mol_type = other RNA
atggagtcagctttacccgcggcagggtttttatactgggttggagctggcactgtcgcatacctcgcactgaggatttcatacagcctgtttactgcgttgagagtgtggggggtcggcaatgaggcaggggtgggtcccggccttggagaatgggccgtcgtgactggatcaaccgacgggattggcaaatcatacgctgaagagcttgccaaacatggtatgaaggtagtcctcatttccaggtccaaagacaagctggatcaagtcagttcagagataaaggaaaagtttaaagttgaaactagaactatcgctgtcgatttcgcatccgaagacatttacgacaaaattaagactgggctggccggtctcgagatcgggattctcgtgaataacgtaggcatgtcatatgagtacccagagtacttcttggacgtccccgatctggataacgtaattaaaaaaatgataaacattaatatattgtccgtctgtaagatgactcagctggttctgcccggcatggtcgaacggtccaaaggggcaatactaaatattagttcaggttctgggatgctccctgtccccctgctaaccatttactcagctacaaagacgtttgtagacttcttttcccagtgtctgcacgaggaataccgcagcaaaggcgtgttcgtgcagtctgtgttgccctatttcgtagccacaaagctagcgaaaattagaaagcctacccttgataaaccatcacctgaaacttttgtcaaatccgctatcaagaccgtgggccttcagtctagaaccaatggatatcttattcacgctctgatgggtagtataatctcaaatctgccatcttggatttacctcaaaattgtgatgaacatgaacaagtccactagagcacactatctcaagaagaccaagaagaactag

SEQ ID NO: 11957 - RNA, 2214 nt, synthetic construct
  misc_feature 1..2214: note = source = /note="Description of Artificial Sequence: Synthetic coding sequence"
  source 1..2214: mol_type = other RNA
atggagctgggttgctggacccagctgggattaacatttttacagctgctgcttattagttccttgcctcgagaatacaccgtgatcaacgaggcatgtccaggagccgaatggaatatcatgtgtcgcgaatgttgtgagtacgatcagattgagtgtgtttgccccgggaagcgggaggtggtaggttacacaataccgtgctgtcggaacgaagaaaacgagtgcgactcctgtctcatccaccctggctgtactatctttgaaaactgcaagtcctgcaggaacggttcgtgggggggcaccttggatgatttttacgtaaagggattttattgtgccgaatgtcgcgccggctggtatggcggggactgtatgcgctgcggccaagtacttagagcacctaaagggcaaattctgctagagtcctatccactgaacgcccactgtgagtggacaatccacgccaaaccaggcttcgtcattcagttgaggtttgtgatgctctctctagagtttgactacatgtgccagtacgattacgtggaggtgagggacggtgacaatagagacggacagattatcaagagagtgtgtggcaatgaaaggcctgcccccatccagagcatcggctctagcctccacgttctgtttcactccgacggatccaaaaattttgacggttttcatgcaatctacgaagaaatcactgcatgtagttcctcaccatgcttccacgatggcacctgtgtcctggacaaggctggtagctataagtgcgcatgcctggcgggatataccggacagaggtgtgaaaatcttcttgaagctggaaaaagcaagataaaagccagcgaagactccctttccgtgctcgaagaacggaactgttctgatcctgggggcccagtgaacggctatcagaaaatcacagggggaccaggcctgatcaacgggagacatgccaaaattggtactgtggtaagcttcttttgcaataacagttacgttctgtctggaaatgaaaagcgcacctgccaacagaacggggaatggagcgggaaacaacccatctgcattaaagcatgtagagaaccaaagatctcggatcttgtgaggagaagagtactacctatgcaagtgcagtctagggaaactccacttcatcagctgtattccgccgctttcagcaaacagaaactgcagtctgcgccaactaagaagcctgcacttcccttcggagatctgcctatgggctatcagcatctacatactcaattgcagtatgaatgtatttcacccttctacagaaggctgggtagctcccgccggacctgcttaagaaccggtaagtggtcggggcgggcgccctcctgtatcccgatctgcggcaaaatcgagaatataaccgctccaaaaacgcaaggtctgcgctggccttggcaggccgccatatatagacgcacgtctggagtccacgacggctcccttcataaaggcgcttggtttcttgtgtgtagcggggctctggtgaacgaacgcactgtggtggtggccgctcactgcgtgaccgaccttggaaaagtcaccatgatcaagacagccgacttgaaagtggttcttggaaagttttatagagacgacgatcgggatgagaagacgatccagtcactgcagatttcggctattattctccacccgaattatgatccaatccttctcgacgctgatattgccattctgaagctcttagataaggctagaataagtacccgagtgcagcccatctgtctcgcagcgagccgagacctcagtacaagcttccaggagtctcacattacagtggctggatggaatgtacttgcagacgtgagatcccctggatttaagaacgataccctcagaagcggcgtggtgagtgtggtggattccttgctatgtgaggaacagcacgaagatcatgggataccggtgtctgttacagataatatgttctgcgccagttgggaaccaacggcccctagtgatatttgcaccgcagagactggcgggatcgcagccgtgtcctttcctgggcgagcctctcctgagcccagatggcacctcatgggccttgtatcttggagttacgataagacatgcagccacaggctctccacagcctttaccaaggtcctgccatttaaggactggattgaacggaacatgaaatag

SEQ ID NO: 11958 - RNA, 1503 nt, synthetic construct
  misc_feature 1..1503: note = source = /note="Description of Artificial Sequence: Synthetic coding sequence"
  source 1..1503: mol_type = other RNA
atgggcaccgccagatggctcgcactgggcagtctgttcgctctcgcgggactccttgaggggagactggtcggcgaagaagaagctgggtttggtgagtgtgacaaattcttttatgccgggactccaccggccggccttgccgcagattcacacgtaaagatatgtcagagagcagagggtgccgagagattcgccaccctgtactccaccagggacagaattccagtctactctgcttttcgcgccccacggcctgctcccggcggcgccgaacagaggtggctggttgaaccccagatcgatgaccccaattctaatctggaagaagccatcaacgaggctgaggcaatcacgtcggtgaactccctcggaagtaagcaagctctgaacaccgattatctggacagcgactaccaaagaggccagttgtaccccttttctctttcatctgatgtgcaagtcgcaacattcaccctgacaaattctgccccaatgacgcaatcatttcaggaacgttggtacgtcaatctccactctctgatggatcgagcactgacaccccaatgcggctcaggcgaggatttatatatactgacaggcaccgtgcctagtgattatcgagtcaaagacaaagttgcagtcccggagtttgtttggcttgctgcctgctgtgcagtccccgggggcggctgggcgatggggtttgtaaaacatactcgggatagtgacatcattgaggacgtgatggtcaaggatctccaaaaacttctgccctttaatccacagctgtttcagaacaattgtggggaaactgaacaggatactgaaaagatgaaaaagattctcgaggtagttaatcagatacaggacgaagagcggatggtgcagagccagaaatcctcctcccccctttcctctacacgctctaaaaggtcgaccttgttgccccctgaggcatccgaagggtcttcatcattcttgggcaagctgatgggttttattgccacacccttcatcaagctctttcaactgatctactatctggtcgtggcaatcctgaagaatatcgtgtactttctctggtgtgttacaaaacaggtgatcaatgggatcgaatcttgtctctacagacttggatccgcgaccatcagctatttcatggcgatcggcgaggagttggttagcatcccatggaaagtgcttaaggtcgtggccaaggtcatccgtgccctactcaggattctttgctgcctgctgaaagcaatctgcagggtcttgtcaatcccagtgagagtgctggtagacgtcgcaacatttcccgtgtataccatgggagcaatccctatcgtctgtaaagatatcgcattgggactggggggcaccgtctctctgctcttcgatacagcctttgggaccctgggagggctgttccaggtggtctttagcgtttgtaagagaattggctataaagttaccttcgacaatagcggcgaactgtag

SEQ ID NO: 11959 - RNA, 300 nt, synthetic construct
  misc_feature 1..300: note = source = /note="Description of Artificial Sequence: Synthetic coding sequence"
  source 1..300: mol_type = other RNA
atgaaatcagcaaagttgggcttcctcctaaggtttttcatattctgcagtctcaacaccctgttactgggcggagtaaacaaaatagcggagaaaatctgtggagacttaaaagacccatgtaagctggacatgaacttcggctcttgctacgaggtgcactttagatacttctacaaccggacatcaaaacgctgcgaaacttttgtgttctccggctgcaatggtaatttgaataacttcaaactgaagatcgaacgagaggttgcctgtgtggccaagtataaaccccctagatag

SEQ ID NO: 11960 - RNA, 390 nt, synthetic construct
  misc_feature 1..390: note = source = /note="Description of Artificial Sequence: Synthetic coding sequence"
  source 1..390: mol_type = other RNA
atgccgatggcctcgccacaaacactggtcttatatctgctcgtgttagctgtcacagaggcttggggccaggaagcagtgatccctggctgccacctacatcccttcaatgttacggtccggtccgaccgccagggtacatgccaaggatcccacgtggcacaagcttgtgtcggacattgtgaaagtagcgctttcccttcaagatattctgtactcgtggctagcggctacaggcacaacatcaccagtgtgtcccaatgctgtacaatctccgggctgaaaaaggtcaaggtccagctccagtgtgtggggagccgacgagaagagctcgaaatattcaccgcccgagcctgtcagtgcgatatgtgtcgccttagccggtactag

SEQ ID NO: 11961 - RNA, 1965 nt, synthetic construct
  misc_feature 1..1965: note = source = /note="Description of Artificial Sequence: Synthetic coding sequence"
  source 1..1965: mol_type = other RNA
atggcgaaatttggggttcatcgcatccttcttctggccatctctttgacgaagtgcctggaatccacaaaactactggctgatttgaagaagtgtggggacctggaatgtgaagcacttatcaatagggtcagcgcaatgagagactataggggcccagattgccggtaccttaacttcactaaaggagaagagatcagtgtctacgttaagttagccggagaaagggaggatctatgggcaggctctaagggcaaagagttcggatatttccctcgggatgctgtacagatagaagaagtgttcatcagcgaggagatacagatgtctaccaaggagtctgacttcctgtgccttttaggcgtgagttacaccttcgacaatgaggattcagagctcaacggtgactacggagaaaatatttatccatacgaggaagacaaggacgagaagtcttctatctacgagagcgatttccaaattgaaccggggttttatgcgacttatgagagtactcttttcgaagatcaggtgccagcactggaggcccccgaagacattggaagcacctcagaatcaaaagactgggaagaagtcgtggtggagagcatggagcaggatcgcattccggaagtgcacgtacctccatccagtgccgtgagcggtgtgaaagaatggtttggcctggggggagaacaagctgaagaaaaagcattcgagtccgtaatcgagcctgtgcaggagtcctctttccgttcacgaaaaattgcggttgaggacgaaaatgatttggaggagctcaacaatggcgagccacagaccgaacaccaacaagaatccgaatccgagatcgatagcgttccaaagacacagtctgaactagccagcgagtcagagcatatacccaagccccagtctactggctggtttggtggagggttcacaagttatctagggttcggcgatgaggacacaggactggaactgatagccgaagaatcgaatcctcccttacaggatttcccaaattccatttcttccgacaaagaagctactgttccatgcacagagatcctcactgaaaaaaaagacactatcaccaatgacagcctgtccttgaaaccatcttggtttgatttcggcttcgcgatcttgggctttgcttatgccaaagaagacaaaattatgcttgatgacaggaagaacgaggaggacgggggtgcggacgagcatgagcatccgttaacgtctgagctcgatccagaaaaagaacaggaaatagaaaccattaagattatagagaccgaagaccagatcgacaagaagccagtatccgaaaagacagacgaatcggatacgattccttacctgaagaaatttctctacaactttgacaacccatggaacttccaaaatattcccaaggaaaccgagcttccttttcccaagcagattctggaccagaacaacgtgattgagaacgaggaaacgggggaattttcaattgataattatcccacagataacacaaaggtcatgattttcaaaagctcttatagcctctccgatatggtgtccaacattgaactccctacaaggatccatgaggaagtctattttgaaccatcttccagcaaagactctgatgagaattctaagccatcggtagacacagaaggacctgccctagtagaaattgatcgatctgtggaaaacaccctgcttaacagtcaaatggtctccacagacaactcactgtcatcacagaattacattagccaaaaagaagacgcttcagaattccagattctcaagtatttgttccagatcgacgtttatgattttatgaacagcgcttttagccccatcgtgattttgacagaaagagtttcccttcctttcaagccctttgctattatcctgccgatcttgctaaatattagagttgccacaaagtacgtgtag

SEQ ID NO: 11962 - RNA, 1152 nt, synthetic construct
  misc_feature 1..1152: note = source = /note="Description of Artificial Sequence: Synthetic coding sequence"
  source 1..1152: mol_type = other RNA
atggcgggcatcccaggtttgcttttcctacttttctttctcttgtgcgccgtcgggcaggtatctccgtacagcgcaccatggaagcccacatggccagcataccgcttgcccgtggtattacctcagtcaacattgaatttagcaaagcccgacttcggcgcggaggccaagttggaagtcagctcttcttgcggtccgcagtgccacaaaggaacgccactgccgacatacgaagaggccaaacagtatctaagctacgagacattgtatgcaaatggttctagaacagaaacacaggttggtatatacattttgtcatcgtcaggagatggtgcccagcatagggactcaggatcttcaggtaaatcacgccgtaaacgacagatctatggttacgacagcaggtttagcatcttcggcaaagattttctccttaactatcccttctcgacttcagtgaaactgtctacagggtgcactggaacgcttgtcgcggagaaacatgttttgaccgccgcccactgtatccacgatggcaaaacttacgtaaagggaactcagaagttgagagtggggttcctgaagccgaaatttaaggatggtggccggggcgctaacgattcaacaagcgccatgcctgagcagatgaaatttcagtggataagagtgaagagaactcacgtgcctaaggggtggataaagggcaacgctaatgacattggcatggattatgattatgcattactggaactcaaaaagccccacaaaagaaagtttatgaaaatcggagtatcgccccctgctaaacaactgccaggtggcaggatccactttagcgggtatgacaatgacagacctggcaacctcgtgtacaggttctgcgatgtgaaggacgaaacttacgacctgctttatcagcaatgtgacgcacaacccggggccagcggttctggcgtctacgtccggatgtggaaacggcaacaacagaaatgggagaggaaaataatcggtattttttcagggcatcagtgggtggacatgaacggctctccccaagacttcaatgtcgccgtcaggattacacctttaaagtatgcacaaatttgttactggatcaaggggaattatctcgattgtcgcgagggatag

SEQ ID NO: 11963 - RNA, 1662 nt, synthetic construct
  misc_feature 1..1662: note = source = /note="Description of Artificial Sequence: Synthetic coding sequence"
  source 1..1662: mol_type = other RNA
atgaaatggtgttggggccctgtgctcctcattgccggtgccaccgtcctgatggagggcctacaggccgcccaacgggcctgcggtcaacggggccctggcccaccgaaaccacaggagggaaacaccgtgcctggagagtggccatggcaggcatccgtcaggcgccaaggtgcgcacatatgcagtggttccttagtggcagatacttgggtgctgaccgctgcccattgtttcgagaaggccgccgcaactgagctcaactcttggtctgttgtgctgggcagcttgcagagagaaggtcttagtccaggcgccgaggaagttggagtggccgctctgcagttaccacgggcctacaaccactattcacaaggctctgatttagctttactgcagctcgctcaccccaccacgcacacacctctctgcctgcctcaaccggcgcaccgctttccattcggtgcatcttgttgggctaccggttgggatcaggatactagtgacgcacccggaaccctgaggaacctgaggttaagactcatctcgcggcctacctgtaattgtatctataatcagctccaccagcggcacttgagtaatccagcccgtcccggtatgctttgcggcggaccccagccaggggttcagggcccgtgccagggcgatagcgggggacctgtattatgcctcgagcccgacggacattgggtacaggccggcatcatctcatttgcctcctcctgcgcacaagaggatgctcctgtactgctgaccaacacagccgctcattctagctggcttcaggcccgtgtgcaaggcgcagcctttctggctcagtcgcccgagacgccagagatgtcggatgaggactcatgtgtcgcctgtggttccctgaggactgctggccctcaggccggcgctccaagcccatggccatgggaggccaggctcatgcaccagggccagctcgcttgcggcggagccttagtctccgaggaggcagttttgacggctgctcactgcttcatcggtcgacaggccccagaggaatggtccgtcggattggggacaagaccagaggagtggggactgaaacagctcatactgcacggggcgtacacccaccctgaaggtggttacgatatggccctgcttttgctggcacaaccagtcacactgggagcttccctgaggccactgtgcctgccctaccccgaccaccacctgcccgatggcgagcgaggatgggtgttaggcagagctaggccgggcgctggcatatcgtctctccagacagtcccagtcacactgttgggtccccgcgcctgttcccggctccatgccgcacccggtggcgatgggtcacctatactacccggcatggtttgcacatccgctgtcggagagttgccatcctgcgaaggcctctctggcgccccactagttcacgaggtgcgaggtacctggttcctcgctggactacattcatttggagatgcatgccagggaccagccagaccagctgtgtttactgcgttaccagcttatgaagactgggttagctccctcgactggcaggtttattttgccgaggaaccagaaccagaagcagaacccggctcatgcctggccaacatatctcagcctacgtcgtgttag

SEQ ID NO: 11964 - RNA, 936 nt, synthetic construct
  misc_feature 1..936: note = source = /note="Description of Artificial Sequence: Synthetic coding sequence"
  source 1..936: mol_type = other RNA
atgggaattattcagtcaatcttggccacctcaagagactgttactcctttaagaaaaaacccatacccaaaaaaccaactatgctggccctggccaaaatactgctgattagtacgctattctattccctgctgtctggatcacacggaaaggagaatcaggatattaatacaacacaaaatattgctgaagtcttcaagacaatggagaataagcccatttccctagaatccgaggctaatcttaatagcgataaggaaaatattacaacctctaatctcaaagcttctcattctccaccactcaatttgcctaacaattcacacggaatcactgactttagtagcaacagttcagccgaacactcccttggcagccttaagcctacctccacaataagcacaagccccccgcttatccactcatttgtctccaaggtaccttggaacgccccaattgccgacgaggacctgcttccaatctccgcgcaccccaatgccacccccgctctaagcagcgagaatttcacttggtcactggtcaacgataccgttaaaactcctgataatagttctatcactgtgtctattctgtcctcagagcccacttcccccagcgtcacccctctcatcgttgagccatcaggctggctgactacgaattccgacagctttactggatttacaccctatcaagaaaagaccactctgcaacccaccctgaagtttaccaacaattccaagctattccctaatacaagtgacccccagaaggtgctgcgactggataacgcccccgaaccatatgatgtgtcatttggcaatagctcctattataacccgaccctgaacgatagtgctatgccggagtctgaagaaaatgctagggacggtatccctatggatgatatccctccacttcgcacctcggtctag

SEQ ID NO: 11965 - RNA, 3120 nt, synthetic construct
  misc_feature 1..3120: note = source = /note="Description of Artificial Sequence: Synthetic coding sequence"
  source 1..3120: mol_type = other RNA
atgcagagtagactgctcctgctgggtgctccagggggacacggcggtcctgctagccgccgcatgcggttgctcctcagacaggtggtacaaaggcgtcctggcggcgatcgccagcggccagaggtgaggctcctccatgcagggtccggcgccgacaccggagacacagttaacataggcgacgtgtcgtataaattaaaaatcccaaaaaaccccgaattagtaccacagaactacatttccgactcactcgcacagtccgttgttcaacatcttcgctggattatgcagaaagatctgttggggcaggatgtgtttttaatcggtcccccaggcccgctccgccgctcaatcgcaatgcaatatctggagttgaccaagcgggaagttgagtatatcgcgcttagccgggatacaactgaaacggaccttaaacagagaagagagattagggcaggcactgccttctacattgaccagtgtgcggtaagagcagctactgaaggtcgcacactcatcttagaaggattggagaaagctgagcgtaatgttcttcctgtgctgaacaatcttctcgaaaacagggagatgcagctggaggatggaaggttcctcatgtccgcagagagatacgacaaattacttagagatcatacgaaaaaagagctcgatagctggaaaatcgttcgcgtgagcgagaatttcagggtaattgcactggggctgccggtccccagatacagcggaaaccccctcgatccacccctcaggtcaagatttcaggctagagacatctactatctaccgttcaaggaccagctgaaactcctttatagtattggcgccaatgtgagcgcagaaaaagtgagtcagctcttaagtttcgcgactactctgtgctctcaggaaagcagcacacttgggcttcctgattttcctctggacagtctcgctgcagctgtacagatcctcgactccttccccatgatgcctatcaaacatgcaattcagtggctctatccctattccattctgctgggacacgaagggaaaatggccgtggaaggcgtcctcaagcgtttcgagttgcaggattccggtagctctcttttgccaaaagaaattgttaaggtcgagaaaatgatggagaatcatgtctctcaggccagcgtgaccattcgtatcgccgacaaggaagtaacaatcaaagtgccagccggtacacgtctgctctctcaaccttgtgcttccgatcgctttatccagactcttagccacaaacaactccaagcagaaatgatgcagagccatatggtgaaagacatttgtttgattgggggtaaaggatgcgggaagactgtaatagccaaaaactttgctgacacactgggttacaatatcgaacctatcatgctgtaccaggacatgactgctcgggatctgctgcagcaacggtatacgttacccaacggagatacggcctggcgaagctcaccccttgtgaacgcagctctggaaggaaagcttgtgctactggatggcattcaccgggtgaacgccgggacactggccgtcttgcaacgtctgatccacgacagggaactttccctttacgatggctccaggctgctcagagaagataggtatatgagactcaaagaagagctccagcttagcgacgagcaactgcagaaacgcagcatcttcccgatccacccgagtttcagaataatcgcactggcagagcctccagtgatcgggtctacagctcatcagtggctagggcctgagttcctgaccatgttctttttccactatatgaagccccttgttaaaagcgaggaaatccaggtgatcaaagagaaagtgccaaacgtgccacaggaggcactggataagctgctgtccttcactcacaagttgcgagaaacacaggacccaacagcccaatccctcgctgcaagcctctccaccaggcagcttctgcgaatttcccggagactttcccaatatccaaacgagaatcttcactccgcggtcaccaaggcttgcctgtctcgctttctcccctcgctggccagatctgcactggagaagaacctggccgatgccacaatcgagattaatacagatgacaacttggagcctgagctcaaagattacaagtgtgaagtcactagcggcactcttaggattggcgccgtttcggcccccatctataacgcccatgagaagatgaaggtcccggatgtgcttttctatgataatattcagcacgtgatcgtaatggaggacatgctgaaagactttttgctcggggaacacctcctgctggtcggtaatcagggtgtcgggaagaacaaaatagtggataggttcctacacctcctgaatagaccaagggagtacattcagctccatcgcgacacaaccgtccagaccctgacactacagcccagtgtgaaggatggactcatagtgtatgaggactcacccctggtgaaggctgtcaagttaggccatatcttggtggttgatgaggcagataaggcacccacaaatgtaacatgcatattgaagacgctggtggaaaacggcgagatgatcctcgctgatggtcgccgcatagttgcaaattctgcaaacgttaacgggcgggaaaacgtggtggtgatccatccagatttccgaatgattgtgcttgcgaatcggccaggatttccttttttggggaacgatttctttgggaccctcggcgacattttctcgtgccatgcagtggacaacccaaagccccattctgagctcgaaatgctgagacaatatggaccgaacgtgccggaaccaattttgcagaagctggtggctgctttcggggagttgcgttcactcgcagaccagggcattattaactatccctattcaacccgcgaagtggtaaatatagtgaagcatctccagaagtttccgactgagggcttgagtagtgtagtaagaaacgtatttgattttgatagctataataatgatatgcgtgaaatattgataaacactctgcataaatatggaattccaatcggagccaaacccacaagcgtccagcttgctaaggagtag

SEQ ID NO: 11966 - RNA, 801 nt, synthetic construct
  misc_feature 1..801: note = source = /note="Description of Artificial Sequence: Synthetic coding sequence"
  source 1..801: mol_type = other RNA
atgcgcctcctgtttcttgctgtcctgaggccccacaccgggaatgcagtcacggctcagagggtgcgggctcatcttgaagcggcaggacatgtatgtgtgctcaaggacgccttcgacttcgagagccgatctgaaatcgccaacttgattctggctgaaaactgtgaagccgcacttgctttgcacctgtatcggggcggccgactgctccaaggccatcgcatcccttttggggtcatttttggagggacagatgtcaacgaagatgctaaccaggcagagaaaaatacggtgatgggtagggtgttggaagaagcccgatttgcagtcgcattcacggaaagcatgaaagaaatggcgcaggcacagtgggttgatcctgtatttactagggaggttaaagcgaaggttaagagagcagctggagtccgacttatcggggaaatgccacaggaggatcttcacgctgtcgtgaagaactgcttcgctgttgtgaatagctccgtaagtgaaggaatgagcgctgctatactggaagcaatggatctcgaggtgcccgtgctcgcaagaaatattccaggaaatgctgccgttgttaagcacgaggttacaggtctcctgtttagcaaccctcaagagttcgttcatctcgcaaaaaggttggtctctgatccggcgcttgagaaggagatagttgtaaacggccgggaatacgtaaggatgtaccattcttggcaagtggagcgtgacacctaccagcagttgataaggaagttagagggctccaccgaagactag

SEQ ID NO: 11967 - RNA, 2478 nt, synthetic construct
  misc_feature 1..2478: note = source = /note="Description of Artificial Sequence: Synthetic coding sequence"
  source 1..2478: mol_type = other RNA
atgtttagcggatttaacgtcttccgagtgggaatcagtttcgtgataatgtgcatcttttacatgccgacggtaaatagcctccctgagctgtcaccacagaagtatttttccaccttgcagccaggtaaggccagtctcgcatatttctgccaggcagattcgcccaggacgtcagtattcctggaagaactgaatgaagcggttagacctctccaggactatgggatatccgtggctaaggtgaactgcgttaaggaagagatcagcagatactgcgggaaagagaaggatctgatgaaagcctacctcttcaagggtaatattctgctccgcgagttccccactgacactctgttcgacgtcaacgcaatcgtcgctcatgtgctattcgccctgcttttctctgaggtaaagtacatcaccaatttggaagaccttcagaacatagaaaatgccctcaaaggcaaagcaaacataatctttagttatgtgcgggctatcgggatccctgagcacagagccgtaatggaagccgccttcgtatacggcaccacctaccaattcgtactgacaacagaaatcgccctcctggagtctataggatccgaagacgtcgagtatgcccacctgtattttttccattgcaaattggtgctggatctgacacagcagtgtcggcgcaccctgatggagcaacctctcactacattgaatatccacctgttcatcaaaaccatgaaagccccactcctgactgaggtcgcagaggaccctcaacaagtctcaactgtacacctccagcttggcctgcccctggtgttcattgtctcccaacaagcgacatacgaggccgacagacgtacggccgaatgggtagcgtggagactcctgggtaaagccggcgtactgctgttactaagagacagccttgaagtcaacatccctcaggatgcaaatgtggtgtttaagcgagctgaggaaggagtgcctgtggaatttctggtcctgcatgacgtggatctcattattagtcacgttgaaaacaatatgcacatcgaggaaatccaagaagacgaggacaatgatatggaagggcccgacatcgacgtccaggatgacgaagtggccgagactgtgttccgtgaccgtaagcgcaaactgcctctcgaactgacagtggagctgaccgaagagacctttaatgcaacagtcatggcatccgattcaatcgtgttattttatgccggttggcaggccgtgtctatggcatttctgcagtcgtacattgatgtggccgtgaaattgaaaggaacatccactatgctgctcacgaggattaattgtgcagattggtcagacgtctgtactaaacaaaacgtaacagagttccccatcatcaagatgtacaagaagggggagaacccagtatcctacgccgggatgcttggcacggaagatctgctcaagtttatccagctcaatagaatcagctacccagtgaatatcacttcgattcaggaagcagaggagtacctttcaggagagctctataaagatctgatcctctatagttctgtaagcgttctgggactcttctcacctaccatgaagacggctaaagaggattttagcgaagctgggaattatcttaagggatatgtgatcacggggatttatagcgaagaagatgtcctgctcctatcaactaaatatgcagcctcccttcctgccctattattggcccggcacaccgaaggtaagatcgagagcatcccattggcttcaacccatgcccaagatatcgtccagataatcaccgacgccctgttagaaatgtttccggaaatcacagtggagaatctgccctcttacttccgactccagaaacctttgctcatccttttctcagacggtacggtcaatccccagtacaaaaaggccatcctgacactggtgaagcagaagtatctggacagcttcactccatgttggctgaatcttaagaatacccccgtgggccgcggcatcctcagagcctactttgaccctcttcccccactccctctcttggtactggtcaaccttcactccggtggtcaagtgtttgcgtttccctctgatcaggcaatcattgaggagaaccttgtgctctggctgaaaaaactggaagcaggtttggagaaccacattacaattctgccagcacaggagtggaagcccccattgcctgcctacgacttcctgtccatgatagacgccgcaacttcccagcgaggtacccgaaaagtacccaagtgtatgaaggagactgatgttcaagaaaatgataaggaacagcacgaagacaaatccgccgtccgcaaggaaccaattgagaccctgcgcattaagcattggaacagaagtaactggttcaaggaggctgagaagtcattccggcgggataaagagcttggctgcagtaaagttaactag

SEQ ID NO: 11968 - RNA, 672 nt, synthetic construct
  misc_feature 1..672: note = source = /note="Description of Artificial Sequence: Synthetic coding sequence"
  source 1..672: mol_type = other RNA
atgacatggagacaccatgtacgactcctctttactgtgtctttggcactacaaatcatcaatcttggaaatagctatcagagagaaaaacataacgggggacgggaagaggtcaccaaagtggctactcaaaagcataggcaatcccctctgaactggacctcaagtcacttcggcgaggtaacaggatctgctgagggctggggcccagaagaacccctcccatactcttgggcgttcggagagggtgcatcagcaagacccagatgttgcaggaatgggggtacgtgcgtcctgggcagcttttgcgtttgtcctgctcacttcactggtaggtactgcgagcacgatcagagaagatccgagtgcggagccctagagcatggggcgtggacacttcgagcctgccatctctgtagatgcatctttggagctctgcactgtctgcctctacaaacaccagaccgctgcgacccgaaggatttcttagcgtctcacgcccatggaccctctgccggcggcgcaccctcactgctgctcctccttccttgtgctcttttgcatcgcttgcttagaccagacgctcccgcccatccacggtccctggtgccctctgttctgcaaagggaaagaagaccctgcggaaggccggggctcggccaccgtctgtag

SEQ ID NO: 11969 - RNA, 1320 nt, synthetic construct
  misc_feature 1..1320: note = source = /note="Description of Artificial Sequence: Synthetic coding sequence"
  source 1..1320: mol_type = other RNA
atgccagctatcgcagtactggccgccgccgccgccgcctggtgctttttacaagtggaatctcggcatctcgacgctctagccggtggagccggccctaaccacgggaatttcctggataatgatcaatggctcagcactgtgtctcagtatgatcgagataagtactggaaccgatttagggacgatgactatttccgaaattggaaccccaacaaacctttcgaccaggctcttgatccatctaaggatccttgcctaaaagtaaagtgttctcctcataaggtatgcgttacgcaggactatcagaccgctctttgcgtgagtcgtaaacacctgttgcctcgccagaagaagggaaacgtcgcacagaagcactgggtcggtccttctaacctcgtgaaatgtaaaccttgtcccgtggctcagagcgcaatggtttgcgggagcgacgggcactcctatacttcaaaatgcaaactcgagtttcatgcttgctccactggcaaatcgttggcaactctgtgcgacggcccctgtccttgccttccggaacccgaaccgcccaagcacaaggcagaaaggtctgcatgcacggacaaggagctgcgtaatctggcatctcggttgaaggattggtttggagccctgcatgaagatgccaatcgggtgattaaaccaactagttctaacaccgcccagggaagatttgacacttcgatcctgcctatttgcaaggattccctcgggtggatgttcaacaagctggacatgaattatgaccttctgctcgatccaagtgagattaatgcgatctatctcgacaaatacgaaccttgcatcaagccattgttcaactcatgtgatagcttcaaggacgggaaactgtctaacaacgagtggtgctactgcttccagaaacctggtgggcttccctgtcagaatgagatgaacagaatccagaagctaagcaaaggaaaatcgctattgggcgctttcattcccaggtgtaatgaagagggttactacaaagcaacacagtgtcatggtagtaccgggcaatgttggtgtgtcgataagtatggcaatgaactggctgggagcagaaaacagggcgctgtcagctgtgaggaagagcaggaaacaagtggagacttcggaagtggaggctcggtggtgcttttggatgacctagaatatgagagggagctcggccccaaggacaaggagggaaagcttagagtccataccagagctgtgacggaagacgacgaggacgaggatgacgacaaagaagatgaagttgggtatatttggtag

SEQ ID NO: 11970 - RNA, 7872 nt, synthetic construct
  misc_feature 1..7872: note = source = /note="Description of Artificial Sequence: Synthetic coding sequence"
  source 1..7872: mol_type = other RNA
atgaaagtgaagggcagaggtatcacatgtctgctagtgagcttcgccgtgatatgccttgtggccactcctggaggaaaagcctgcccaaggcgctgtgcctgctatatgcccacagaagttcactgtacatttaggtatctgacatcaatcccagatagtattccaccaaatgtggagaggatcaacctgggatacaattcgctggttaggcttatggaaaccgatttctctggccttacgaaactggaactgctgatgctgcattcgaacggaatccacactatccccgataagacgttctcagacttgcaggcgctgcaggtgctgaagatgtcgtacaacaaggtgagaaagctccagaaagacaccttttacggactccggtcccttacaagattgcatatggaccataataatatcgaattcattaatcccgaagtgttttatgggctgaattttctgcgcctggttcatcttgaaggcaaccagctcaccaaactacatcctgatacattcgtgagtctatcgtatctgcagattttcaagataagcttcattaaatttctctacctgtcagataactttttgacctcactccctcaagaaatggtgagctacatgccagacttggacagcctgtatttacacggaaatccttggacctgcgactgccacctgaagtggctgtcagattggatccaggaaaaaccagacgtcattaagtgcaaaaaggaccgcagccccagcagtgctcagcaatgccccctctgtatgaaccctaggacctctaaaggcaaacccctggccatggtttctgccgccgccttccaatgtgccaagcctactatagacagtagtcttaagagtaagagtctgaccatcctggaggatagcagcagcgcattcataagcccgcagggctttatggctcctttcggatccctcacattgaatatgacggatcaaagtggtaatgaagccaacatggtgtgctctatccagaaaccttctcgcactagccctatagcctttaccgaggagaatgactacattgtgctgaatacctcattctcaacatttcttgtgtgtaacattgattacggacacattcagcctgtgtggcagattctggctctctactctgacagcccccttatccttgagaggagccatctgttgagcgagaccccacagctgtactacaaatacaagcaggtcgccccaaagcccgaggatatcttcaccaacattgaagcggacctgagggccgacccaagctggctgatgcaggatcaaatcagcctgcagctgaatagaacagcgaccacttttagtacactgcagattcaatattcctctgacgctcaaataacacttccacgggcagagatgcgacctgtgaagcacaaatggactatgatctcgagggacaataatacaaagctggaacacaccgtcctcgtcggaggcaccgtcgggctaaactgtcccggacaaggagacccaactccacatgtggattggctgctagctgacggcagcaaagttcgagccccttatgtgagcgaagatggccgcatcttgattgacaagtccggaaagcttgagctgcagatggcagactcttttgatacaggcgtatatcattgtattagttctaattatgatgatgctgacattttgacctacaggatcacagtcgtcgagccgcttgtcgaggcataccaagagaacggcatccatcacactgtctttatcggggagactttggacttgccttgccattccacaggaatccccgacgcctcaatcagctgggttattcccggaaacaacgtattatatcagtctagtagagataaaaaggtcctaaataacggaactctccgaatcctgcaagtaacacctaaagatcagggatattacagatgtgttgccgcaaaccctagcggagtggatttcttaatcttccaagtgagcgtgaagatgaaaggccagaggcctctcgaacatgatggcgaaacagaagggtcaggccttgatgaatccaatcccatcgcgcacctgaaagagcccccaggcgctcaactccgtacaagcgcccttatggaggcagaagttggcaaacatacaagttctacgtccaagaggcataactacagagagctgaccttgcagagaagaggcgactcaacccatagacgtttccgagaaaaccgtagacacttccctccttctgcacgacgcatagaccctcagcactgggccgctctgctcgagaaggccaagaaaaatgccatgccagataaacgcgagaacacaaccgtgagcccgccccccgtggtgacacaactccccaatatccccggggaggaggacgatagttcaggcatgttagccctccacgaggagttcatggtgcctgctacaaaggccctgaacctcccagctcgaaccgtcactgccgactccagaacgatttccgactctcccatgaccaacattaactacggtacagagttctctcccgtggtcaacagccagattctcccgcccgaggagcccacagattttaaactatctactgcaattaaaacaactgcgatgagtaaaaatatcaacccgactatgtctagccagattcaaggtactaccaatcaacattcctctacagttttcccgcttctgctaggcgcaacggaatttcaagactctgatcaaatgggaagaggaagagaacatttccagagtagaccgcccattaccgtgaggacaatgatcaaggatgtgaatgtgaaaatgctgagttctacaaccaacaaactgcttttagaaagcgttaacaccactaattcccatcaaacgtccgttagagaagttagcgagcctagacacaaccacttctatagccacacaacccagatacttagcaccagtacgtttcccagcgacccacacacagccgcccactcacaatttcccatacctagaaacagcacagtcaatatcccactgttccgccggttcgggaggcaacgtaaaattggtggccgaggccgaattatttccccctatagaacccccgtcttgcgacgccaccgctattcaatttttcgatcaactaccagaggctcttcagagaaaagcaccaccgctttctccgcaaccgtgcttaacgttacatgcctgagctgcttaccccgtgaacgcctaaccaccgcaacagcagctctaagttttcccagcgctgcccccataacgttccctaaagccgacatagctagagtcccatctgaggaatccacgacacttgtccagaatcctctgttgctgttagagaacaagccttctgtcgaaaaaaccacaccaaccatcaagtactttaggacagagattagccaggtgaccccaacaggtgcagtgatgacctacgccccgacatctatccctatggagaaaacgcacaaagtgaacgcttcgtacccaagggtttctagcaccaacgaagcaaagcgcgatagcgtgatcacttcttccctctccggagccataactaagcctcccatgacaattatcgctattacccgatttagccggcgaaaaatcccttggcaacagaacttcgtaaataatcacaatccaaaagggcgtctgagaaaccagcacaaagtcagcctgcagaagtcaacagcggtcatgctcccaaaaacttcccccgcactccctagggacaaggtgtccccattccatttcactacattatctacctcagtaatgcagataccgagcaacaccctaactaccgctcatcacactactactaagacccataatccaggctctctgcctaccaaaaaagagctacctttcccccccttgaatcccatgctgccctcaattatcagcaaggactcatctaccaagagcatcattagcacccaaacagcaatccctgctacaacacctacctttcccgcttcggtgatcacatatgagactcagaccgaacgatcccgcgcacaaacaattcaacgagagcaggagccacagaaaaaaaaccggaccgaccctaatatctctccagaccagagctccggtttcacgacccctactgcaatgacccctccagtattaaccacagctgaaacatctgtgaagccttcggtgtcagcattcactcactctccacctgagaacaccaccggtatctcgtcgaccataagctttcatagcaggacactcaatctgaccgacgtgatagaggagctcgcccaggcatctacccaaacgctgaaaagcactattgcttctgagaccaccctgtcatcaaagtcgcaccagtctactaccacacgcaaggctatcattcgccactcgactattcccccttttctgtcaagctctgcaacactgatgcctgttcctatatctccccccttcactcagagagcagtgaccgataatgtcgctacccctatcagcggcctgatgaccaacaccgttgtgaagctgcatgaaagctcgcggcacaacgcaaagccccaacaacttgtcgccgaggtcgccacgtccccaaaagtccaccccaatgcaaagttcactattggaactactcacttcatatattccaacctgctgcacagtacccctatgcccgccctcaccacggtaaaatcacaaaattctaaactcaccccatctccctgggccgagaaccaattttggcacaagccttactcggaaatcgcagaaaagggaaagaagcctgaagttagcatgctcgcgactacgggattaagcgaggccacaacactcgtaagtgactgggacggccagaaaaacacaaagaaatcagacttcgacaaaaagccggtccaggaggccactactagcaagcttctcccatttgactccctgagtcggtacatcttcgagaaaccccgcattgtcggaggaaaggccgccagttttaccatcccagccaacagcgatgcattcctgccctgcgaagctgttggcaacccactgccgactattcactggacaagggtcccatcgggcctcgatctgtcaaagcgcaaacaaaactcaagggtccaggtcttgccaaatggcaccctgagcatccagagggtggaaattcaagatcgaggacagtatctctgctcagcctctaacttattcggcaccgatcacctgcacgtgactttgtctgttgtaagctatccccctaggatccttgagcgacggacgaaggagattaccgtgcactctgggtcgactgtggagctgaaatgtagggctgagggaagaccttcccctactgtgacatggatcctggcaaaccagaccgtcgtttctgagtcatcccagggctctcgccaggctgtggtgacagtggacggcacattggtgctgcacaacctcagcatctacgatagaggcttctacaaatgcgtggctagtaatcctgggggccaggactctcttcttgtgaaaatccaggtgatagccgcaccccccgtgatcttagaacagagacgccaggtcatcgtcggcacctggggcgaatctctcaagctcccatgcacagccaagggaaccccgcagccgtcggtgtactgggttctatccgacggaactgaggtgaaaccccttcagttcaccaattcgaagctgtttctgttcagcaatggcactttgtatatccgtaatctcgctagcagtgatagaggtacctatgagtgcattgccacaagctccaccggtagcgaacgtagggtcgtcatgttaacgatggaggaacgagttacatcacctcgcatcgaagctgcgagtcagaagcgaacggaagtgaattttggggacaagctgttattaaattgctcagcaacaggcgaacccaagccccagatcatgtggaggcttccctctaaggcagtggtcgaccagcaacatagggtgggatcttggatacatgtttatccaaatggctcactctttataggaagcgtgactgagaaagattcaggcgtctatctttgcgtggccagaaataaaatgggcgacgatcttattttgatgcatgtctcccttcggcttaaaccagctaagatcgaccacaagcagtacttccgcaagcaggtgcttcacgggaaggacttccaggtggactgcaaagcctcaggtagccccgtcccagagatttcatggagcctgcccgacgggaccatgatcaataatgccatgcaggccgatgactcgggtcaccgaacaagaaggtacacattgttcaataatgggacattgtatttcaacaaagtcggagtggctgaagaaggcgactacacttgttatgcgcagaataccctcggaaaagacgagatgaaagtgcatctgactgtaatcactgcagccccaagaatacgtcaatcgaacaagacaaacaagcgaatcaaggctggtgataccgcagtgctcgattgcgaggtcacgggggatcccaagcccaaaattttctggttgctaccctccaatgacatgattagtttttcgatcgaccgatatacctttcacgctaacgggtccctgacgatcaacaaggtgaagctcttggattccggggagtacgtctgtgttgcgcgcaatcccagtggggatgacacgaagatgtacaaactcgatgtcgtcagcaaaccccccctaatcaatggattgtacacaaataggacggttatcaaggctacagcagtacgtcattctaagaaacatttcgactgcagagccgagggcaccccatctcccgaggtgatgtggatcatgcccgataacattttcctcaccgcgccttattatggatctaggatcacagtgcacaaaaacggcaccttggaaatacgaaatgtcaggctctccgactcagctgacttcatttgcgtcgcaaggaacgagggcggggaaagcgttctagtggtccaactggaagtgttggaaatgctgagacgacccacctttcgaaacccctttaatgaaaaaatcgttgcccagctgggaaaaagcacggcattgaactgctctgtcgacggaaaccccccgcctgagatcatttggatcttacccaacggaactagattcagtaatgggccgcagtcttaccaatatcttatcgccagtaacggctccttcattatttccaaaaccactcgtgaggacgcaggaaagtaccggtgcgctgcgagaaacaaagtgggctatatagaaaaacttgtcattttagagattgggcagaaacctgttatcctgacctatgcacccgggaccgtcaaggggatctctggggagtcactaagcctccactgcgtgtctgatggcattcccaagcccaacatcaaatggaccatgccatctggatacgtggtggacagaccccaaatcaacggtaaatatatccttcacgataacggcaccctcgtgatcaaggaggcaacagcttacgacaggggaaactatatatgtaaggcacagaattccgtcggtcatactctgatcaccgtgcccgtcatgattgtagcttatccacctcgaattaccaatcgacccccgcggagtatagtcactcgtacaggcgcagcatttcaactacactgcgtggctctcggcgtgcctaaaccagaaatcacctgggagatgccggaccatagtctgctctcaacagcctctaaagagcgtactcacggatctgaacagttacacctgcaaggtaccctggtcatccagaaccctcagacatccgacagcgggatctacaagtgcaccgcaaaaaaccccttaggaagcgactatgccgccacgtatatccaggtgatctag

SEQ ID NO: 11971 - RNA, 1995 nt, synthetic construct
  misc_feature 1..1995: note = source = /note="Description of Artificial Sequence: Synthetic coding sequence"
  source 1..1995: mol_type = other RNA
atgaaaaccggcctgttcttcttgtgtcttctgggtacagccgccgccattcctacaaatgctaggttacttagcgaccactctaagcctacagctgaaaccgtcgcccccgataacactgcaatcccatctctgcgcgctgaggctgaggagaacgagaaagagacagcggtttccacagaggatgacagtcaccacaaagctgagaaaagttctgtgcttaagtctaaggaagaatcgcacgagcagagtgccgaacagggtaagtcgtcttcccaagaattgggattaaaggaccaagaagacagtgacggccatctgtctgttaacctcgaatacgcaccaaccgaggggaccctggacatcaaagaggacatgtctgaaccacaagagaaaaaactgtctgaaaacactgattttctggccccaggagtctcctccttcactgacagtaatcaacaagagtcaataactaaaagagaagaaaaccaggagcagcccaggaattattctcaccaccaactaaaccggtccagcaaacactctcagggtctgcgtgatcaaggcaaccaggaacaggatccaaatatatctaatggagaggaagaggaggaaaaagagccgggagaggtggggactcacaacgataaccaggaaaggaaaaccgaacttccaagggagcacgccaacagtaaacaagaagaagataatacacagagcgatgacattttagaggaaagcgatcagcccacgcaggtgtccaaaatgcaggaagacgaatttgaccagggcaatcaagagcaggaggacaattcaaacgctgagatggaggaagagaacgccagtaatgtcaacaagcacatccaagagactgaatggcagtctcaggaaggcaagaccggacttgaagctatctctaatcacaaggaaacagaggaaaagacagtcagcgaagctttattgatggaaccgacggatgacggtaacacaacacctagaaatcacggcgtggatgacgacggcgacgacgatggtgacgacgggggcactgacgggcctcgccacagtgccagcgacgactattttatcccttcccaagccttcctggaggccgagcgcgcccaaagcatcgcttaccatctgaaaattgaagagcaaagggaaaaagtacacgagaacgagaacataggcaccacggagccaggggagcaccaggaagcgaaaaaagcagagaactcctctaatgaagaggaaactagcagcgagggaaacatgcgtgtgcacgctgttgactcttgcatgtcatttcagtgtaaaagaggacatatctgcaaggcagatcaacagggaaaaccccactgcgtgtgccaggatcctgtgacatgccccccaacaaagcctctggaccaggtgtgtggcactgataatcagacctacgcgtcaagttgccacctatttgctacgaaatgtcgcttggaagggaccaaaaagggacatcagttacagctggactatttcggcgcctgtaaatcaatccccacgtgtacggatttcgaagtgattcagtttcccctgcggatgagggattggctcaagaacatactgatgcagttatacgaggccaactccgagcatgccggatacctgaatgagaagcaaagaaacaaagtaaagaagatttatctagacgagaagcgcctgcttgccggagaccaccccatcgacctgcttctgagagatttcaagaaaaattatcacatgtacgtatatcctgtccactggcagttctctgagctagaccagcacccaatggatagagttctcactcactccgagctggcccccctcagggcctccctcgttccaatggaacattgtatcaccaggtttttcgaggagtgtgatcccaataaggataaacacataacgctcaaagaatggggccactgtttcggcatcaaggaagaggacattgatgagaatttgctcttttag

SEQ ID NO: 11972 - RNA, 1254 nt, synthetic construct
  misc_feature 1..1254: note = source = /note="Description of Artificial Sequence: Synthetic coding sequence"
  source 1..1254: mol_type = other RNA
atgttagccttgcttgttttggtaacagttgcactcgcctccgcgcatcatggcggggagcattttgagggcgagaaagtgtttcgagtcaatgtggaagacgagaatcacatcaatataatacgcgagttggcatcgacgacccaaatcgatttctggaaaccagatagcgtcacccaaattaaacctcatagcacagtggatttccgagtgaaggcagaagacactgtgacagtggaaaacgtcctgaaacaaaacgagttacagtacaaggtgttgatatcgaacttacggaacgttgtggaggcccagttcgactcccgggtcagagctactggtcattcatacgaaaagtacaacaaatgggagaccatcgaagcttggacgcagcaggtggccactgagaaccccgcattaatctccagaagcgtgatcggcacgaccttcgaaggcagagcaatttaccttttgaaagttgggaaagccgggcaaaacaaacccgcaatttttatggactgtggttttcatgccagagaatggatatcgcccgcattttgccagtggtttgtgcgcgaagcagttagaacatacgggcgggagatccaagttaccgagctgctcgataagctggatttctatgtgcttcccgtccttaacattgacggctacatatacacctggaccaaaagcaggttttggcggaagacacgttccactcacaccgggtcttcctgtatcggcaccgaccccaatcgtaacttcgatgcaggctggtgcgagattggcgcttcaaggaatccgtgcgatgagacatattgtggcccagcagccgagtctgaaaaggagactaaggccctagctgacttcataaggaataaactgtcctctattaaagcctacctgactattcactcctattcgcagatgatgatctatccgtattcttatgcatataaactgggagagaacaacgccgagctcaatgccctggcaaaagccactgtaaaagagctcgcatcgctacacggtactaagtacacctacggacccggggccaccactatctaccccgccgcgggcggatccgacgactgggcctacgatcaagggatacgctattcttttacttttgagctgcgagataccggtagatacggattcctgctaccagagtcacagattagagcgacctgcgaggaaacttttctggccattaagtacgtagccagctatgttcttgagcacctgtattag

SEQ ID NO: 11973 - RNA, 588 nt, synthetic construct
  misc_feature 1..588: note = source = /note="Description of Artificial Sequence: Synthetic coding sequence"
  source 1..588: mol_type = other RNA
atggcagtgagccagggggatggaacactttgctttgtgctgctgctgtgttgctggcaggagaccgagttaaggcctaggaccgtgattccagggagcccgaccgagatacctttttcttctaaacaggaggacatgagtgaactattagatgagattctggtgcaagagattctcgacctgaataagaccaccccatccgaaatgccctcaacagcctccacactgtccacccctctacatgccggaattgacgagaattatcaggccggaggatcagagaattatcatgaactcctagaaaatctgcagttctcacccggaattgaagtcaagatcagcaacgacgaggccaacgctaacgcaaatctacacggcgatcctagcgaaaattacaggggaccccaagtgtcgcccgggtctgagaaatcagtgtcttcaaaagaaaagaactctaagaatacacaatacgagaatctcagcattttggaccaaatactccagaacattgggagatcaagcggaaatatctttcataaggagcaacagaggacaagtgcacaacgtagaagccagggtagccagtag

SEQ ID NO: 11974 - RNA, 2334 nt, synthetic construct
  misc_feature 1..2334: note = source = /note="Description of Artificial Sequence: Synthetic coding sequence"
  source 1..2334: mol_type = other RNA
atgaacgcgaacaaagatgagagactgaaggctcggagccaggacttccacctgtttcccgcactcatgatgctatcgatgacgatgctattcctccccgtcaccggcacgctgaagcagaacatcccacgcctgaagctgacatacaaggatctactgctcagtaattcctgtataccatttctaggtagtagtgaaggactggattttcagaccctactgttagatgaggaacgcggtaggttactgctgggcgctaaagatcacatcttccttctctccctcgtggatctgaataagaacttcaaaaaaatctactggcctgctgccaaagagcgcgtggagttatgtaagctcgctggaaaggacgccaacacagaatgcgccaactttattagagttcttcaaccctataacaagacacacatctatgtgtgcggaactggggcattccatccgatttgcggctacatcgatctgggcgtctataaggaggatatcatatttaagctcgacacccacaacctggagtcaggtaggctgaaatgtcccttcgatccacaacagccattcgcgagtgtaatgaccgatgagtatctgtactccggcacggcctctgatttcttagggaaggatactgcctttacgaggagcctcggccctacccacgatcaccactacatccgtacggatattagcgagcactattggttaaatggggccaagtttattggtaccttttttattcctgatacttacaaccccgacgacgacaagatttacttttttttccgtgagtcctctcaagagggttcaacctctgacaagactattctgtctagggttgggagggtatgcaagaacgacgttggcgggcagcggtcactgattaacaagtggactacattcctcaaggctagactgatttgctccataccagggtccgatggcgcagacacttattttgacgaactgcaagatatctatctcctgcctacaagagacgaaagaaatccagtggtatatggcgtgtttaccacaaccagctccatctttaaagggtctgcagtgtgcgtctactcgatggctgatataagggctgtttttaatggcccctacgcccacaaggagagcgcagatcatcgctgggttcagtatgatggtaggattccgtacccaaggcccgggacgtgcccaagcaaaacgtatgacccgctgatcaaaagcactcgcgactttcccgacgacgtgattagtttcatcaaacgtcatagcgtgatgtacaagtccgtgtaccctgtcgccgggggacctacctttaaacgaattaacgtggattatcgacttacccagatcgtggtggaccacgttattgcagaggatggacagtatgatgtaatgtttctcggcaccgacatagggacagtgctgaaagttgtatcaatctctaaagagaagtggaacatggaggaggtagtgttggaagagctgcagatcttcaagcattcaagcatcatcttgaacatggaacttagcttgaagcaacagcaactttacattgggagccgcgatgggctggttcaacttagtctgcataggtgcgatacatatggaaaagcttgtgccgactgctgcctcgcacgtgacccatattgcgcatgggacggcaatgcttgttcccgatacgcccccacctcaaaacgacgggcacgtcgacaagacgttaagtacggagaccccatcacacagtgctgggacatcgaagattctatctcacacgagacggcagatgaaaaggtgatatttggtatcgaattcaattctacctttcttgagtgtatccccaaatcccaacaggctactattaaatggtacattcaaagatccggggacgagcaccgagaggaactgaagcccgacgaacggataattaaaacagagtacggcctcctcatccgcagtctgcagaaaaaggactccggcatgtactattgcaaagcccaagagcataccttcatccatacaatcgtgaagctgactttgaacgtcattgagaatgaacaaatggagaacactcagcgcgcagaacacgaagagggaaaagtgaaagacctcctagcagagtctcgcctgcggtacaaggattacattcagatcctgtcctccccaaacttctcactggaccagtactgcgagcagatgtggcatcgagaaaaaagaaggcagaggaacaagggaggaccaaagtggaaacacatgcaggagatgaagaaaaagagaaatcgtcgccaccatagagaccttgacgagctccctagagccgtagctacctag

SEQ ID NO: 11975 - RNA, 1332 nt, synthetic construct
  misc_feature 1..1332: note = source = /note="Description of Artificial Sequence: Synthetic coding sequence"
  source 1..1332: mol_type = other RNA
atgcagcccagcgagatggtgatgaatccgaagcaagtcttcctgtccgtccttatttttggagtggctgggctcttgctgttcatgtacctacaagtatggatcgaagaacagcacactggtcgggtcgaaaagcgaagggaacagaaggtgacctctggttggggaccagttaaatatctgcggcctgtgcctcgcatcatgagcactgaaaagatacaggaacatataacaaaccagaaccctaagttccatatgcctgaggacgtgagagaaaaaaaagagaacctcttgctcaactctgaacgatccactcgtcttctgaccaaaaccagtcactcccagggcggggatcaagctttgagtaagtcgactggatcccctaccgaaaagctgatcgagaaacgacagggggccaagacagtgtttaataagttttccaatatgaactggccagtcgacatccatcctctgaataagagtctggtgaaagataacaaatggaagaagactgaggagacccaagaaaagagaaggtccttcctacaggaattttgcaagaaatacggaggcgtttctcatcatcaatcacatctgttccacactgtgtcacgtatctatgtcgaggataaacacaagattttgtattgtgaggtcccaaaggccggctgtagcaactggaaacgtatcctcatggtcctgaatggactggcatcctccgcgtataatatatctcataatgctgttcactacggcaaacaccttaagaaactggactcgtttgacttaaaaggcatctataccagactcaacacctatacgaaagctgtgttcgtcagggatcccatggaacgcctagtgagtgccttccgtgataaatttgaacaccccaactcatactatcatcccgtgttcggcaaggctataattaagaagtacagacccaacgcttgcgaagaagccctcatcaacggctctggagtgaagttcaaggaattcatacactacctattagattctcatcgtccggtcggcatggatatccactgggagaaggtaagtaaactgtgttacccctgtttgatcaattatgacttcgtcggcaaattcgagaccctggaggaagacgctaactattttttacagatgataggagcccccaaggagctgaaatttcctaactttaaagatcgacattcctcagacgagcgcaccaatgctcaggtagtgcgacaataccttaaggacctgacacgaactgaacgccagctgatttacgatttctattacctcgattacctcatgttcaattacacaacgccttttttgtag

SEQ ID NO: 11976 - RNA, 3228 nt, synthetic construct
  misc_feature 1..3228: note = source = /note="Description of Artificial Sequence: Synthetic coding sequence"
  source 1..3228: mol_type = other RNA
atgcgagggggtaagtgcaatatgctctccagtctgggatgcttgctcctgtgcggttctataaccctcgcccttgggaacgctcagaagctcccgaaaggtaagaggcctaacctgaaggtgcacattaacacgacaagtgactcgattctgctgaagttccttaggccttccccaaacgttaagcttgaaggtctcctgcttggctatggcagcaacgtcagccctaaccaatatttccccctgcctgccgagggtaagttcactgaagctattgtcgatgcagagcctaaatatcttattgtggtgcggcccgcgcctcctccctctcagaaaaagagctgctcaggcaaaacccggagtagaaagccccttcagttagtagtaggtaccctaacccctagctccgtctttctcagctggggtttcctaataaacccacatcacgattggaccttaccatcccattgcccaaatgatcgcttctacaccattagataccgtgaaaaggacaaggaaaaaaaatggattttccagatatgccccgcaaccgagacaatcgtggaaaacctgaaacccaatactgtttatgagtttggtgtgaaggataacgttgaaggaggcatctggtccaaaatttttaaccataaaaccgtcgttggaagtaagaaggtgaatgggaaaatccagtccacctacgatcaagatcacacggtacctgcctacgtaccgaggaagttaatcccgattacaataattaagcaggtgatacagaatgtgacccacaaggattctgccaaatcccctgaaaaggctcccctcggaggagttatccttgtacacttaattattcccggcctgaatgagacgaccgtgaaactgccagcctccctcatgttcgagatttctgacgccctgaaaactcagttggctaaaaacgagacactcgctctacccgctgaaagtaagacccccgaagtcgagaaaatttcggccaggccaaccacagtgacgcccgaaacagttccaagatctacaaaaccaacaaccagtagcgctctggacgtgagcgagaccacactggcttcatctgaaaagccctggatagtgccaacagcaaaaatttccgaggacagtaaggtcttacagccccaaactgcgacctacgatgttttcagtagcccgacaactagtgatgagcccgagatcagcgattcctacacggcgacttcagaccgaatcctggattctatcccacctaaaactagcaggactctggagcagcccagggccacactggcgccctcagagacaccttttgttccccagaagctagagattttcaccagccctgaaatgcagcctaccacccccgcccctcagcaaacaactagcattccatcaaccccgaagagacggccccggccgaagccacccagaactaagccagaaagaacgacgtccgccggaacaatcactccaaaaatttctaaaagccccgaaccgacatggacgacccccgctccgggtaaaacccaattcatttcattgaagcccaagattcctctgagcccggaggtgacgcacaccaagcccgcgccaaaacagacaccaagagcccctcccaaaccaaagacttctccgcgacctagaatccctcaaacacagcctgtgcccaaagtcccccagagggttactgcaaagcccaagacctctccaagcccagaggtgtcctacaccacccctgctcctaaggatgtcctgcttccccacaaaccctaccctgaggtgtcacagagcgagcccgctcctctcgagacccgaggaatcccgttcattcccatgatttcaccgagcccctcccaggaagaattgcaaacgacattggaggagaccgaccaatcgacacaagagccattcactaccaaaattccccgcacaaccgagctcgccaagaccacccaggccccccatcgtttctatacaactgtccgcccaagaacatccgacaagccacatatccgccctggagtaaaacaggccccccgcccaagcggagccgacaggaacgtatcggtggattcaactcatcccaccaagaagccagggacaagacgccccccactgcctcctcgacccactcacccacggcgcaagcctcttcctccaaataacgttaccggaaaacctggctctgctggaattatctcgagcgggcccatcactaccccccctttacgaagtactcctcggccaaccggcactccattagaaagaatagaaactgatatcaagcagcccacggtgcccgcatccggggaagaactggaaaatataaccgatttcagctcaagtccgacgcgcgagactgatccactcgggaaaccaaggttcaaaggaccccacgtgaggtatatacagaaacccgacaactccccgtgctccattactgacagcgtgaagaggtttcccaaggaagaggcaaccgagggaaacgccacttccccgccccagaaccctccaactaatctgaccgttgtgactgtcgaaggatgcccgagtttcgtgattttagactgggagaagccactgaatgataccgtaacagaatacgaagtaatctcgcgtgaaaatggatcttttagtggaaaaaataaaagcatacagatgaccaaccaaacgttctcaaccgttgaaaatctgaagcccaacacatcctacgagttccaagtgaagcctaagaacccattgggcgaaggccccgtgagcaacacggtggctttctcaacggagtccgctgaccctcgagtttccgagcccgtgtctgccggaagggacgcaatttggacggaacgcccctttaattccgatagttatagcgaatgcaaaggaaagcaatatgttaagcgtacttggtataagaagtttgttggtgtgcaactctgcaatagtctgcgctataaaatatatctatctgattccctcactggaaagttctataacatcggagatcagaggggccacggggaggaccactgtcagtttgtcgactcgttcctggacggtcggacagggcagcagcttacgtcagaccaactgcccattaaagaagggtatttcagggccgtgaggcaggaaccagttcaattcggcgaaatcggtggacacacccagattaactatgttcagtggtacgagtgcgggacaactatccccggcaaatggtag

SEQ ID NO: 11977 - RNA, 483 nt, synthetic construct
  misc_feature 1..483: note = source = /note="Description of Artificial Sequence: Synthetic coding sequence"
  source 1..483: mol_type = other RNA
atgttgcccttcctcttcttttccacgctttttagctctatcttcactgaggcacagaaacagtactgggtgtgtaactcatcagatgcttctattagctatacatactgcgataaaatgcaatatcctatttcaattaatgtgaacccctgtatcgaactcaaaaggtccaagggcctattacatatcttttatatccctaggcgggatctgaaacagctttactttaacctatacattaccgtaaacaccatgaatcttccaaaaagaaaggaagttatctgtcggggtagcgacgatgactatagcttctgcagagccttaaagggcgagacagtcaacaccacaatttcattcagcttcaagggcataaagttttcaaagggcaagtacaaatgtgtggtagaggctatctccggcagccctgaagagatgttattttgtttggaattcgtgattctgcaccaacctaactccaactag

SEQ ID NO: 11978 - RNA, 780 nt, synthetic construct
  misc_feature 1..780: note = source = /note="Description of Artificial Sequence: Synthetic coding sequence"
  source 1..780: mol_type = other RNA
atggcagctttgatgaggagtaaggattcttcgtgttgtctcttacttctggctgctgttttgatggtggaaagttcacagattgggtcatctcgagcgaagctgaacagcattaagagctccttgggaggggagacaccagggcaggcggccaacaggtccgctggcatgtaccaaggcttagcatttggcggttcaaaaaagggcaaaaatctgggccaggcttacccttgctctagcgataaggagtgtgaggtaggccgatattgccacagtccacatcaaggatcatctgcttgtatggtgtgtagacgaaagaaaaagaggtgtcacagggacggaatgtgctgcccttctactcgttgtaacaacggtatctgtatccccgttacagaaagtatactcaccccacacataccagcccttgatggaaccagacaccgagacagaaatcacggacattactccaaccacgatttggggtggcagaacctagggaggccacataccaagatgtcacatataaagggccacgagggtgatccatgtttgaggtcttccgactgtattgaaggcttctgttgcgcgcgccacttctggacaaagatttgtaaacccgtgttgcatcaaggtgaggtgtgtacaaaacagagaaaaaaaggtagtcatgggctagaaatctttcaaagatgtgactgcgcaaaagggctcagctgtaaggtgtggaaggatgccacttattcaagcaaagccaggttgcatgtgtgccagaaaatatag

SEQ ID NO: 11979 - RNA, 3030 nt, synthetic construct
  misc_feature 1..3030: note = source = /note="Description of Artificial Sequence: Synthetic coding sequence"
  source 1..3030: mol_type = other RNA
atgggacaattgtgttggctacctttacttgcccccctgctcctgttgcgtcccccaggagtccaatccgctggtccaattcgcgctttcgttgtgccacattcccacatggacgtgggttgggtctacacagtccaggagagcatgagggcttacgcggccaatgtttatactagtgttgtggaggaactggctagagggcagcagcgaaggttcattgccgtcgagcaggaatttttccgcctctggtgggatggggtggctagcgatcagcagaagtaccaggtccggcaactgctggaggagggaagactggagtttgtgataggggggcaggtcatgcacgatgaggcagtgacccatctcgacgaccagattcttcagctgactgaagggcacggttttctgtatgaaacctttgggattcgccctcagttctcttggcatgtcgatccttttggagcttctgctacaactccaacactgtttgccttagctggctttaatgcccacctaggatcccgcatcgactatgatctaaaggcagcaatgcaggaagctcgtgggttgcagttcgtgtggcgtggcagcccgtccctgtcagaacgtcaggagatttttacccacatcatggatcaatacagttattgcacaccttcacacataccgttctccaaccgctcgggattctactggaatggtgtcgctgtctttccaaaacccccacaggatggggtctatcctaatatgtctgaaccagttacgccagcaaatatcaatctctatgccgaagcactggtggctaacgtgaagcaaagggccgcgtggttccggacgccccacgtcctttggccctggggttgcgataaacaatttttcaatgctagtgttcagttcgcgaatatggacccactgctggaccacattaactcacatgcagcagaactcggcgttagcgtacaatatgccacattgggggattattttagggctcttcacgcccttaatgtcacctggcgcgtgcgagatcaccacgacttcctgccatactcaacagaaccctttcaggcctggacaggattctacacttctcggtcaagtctcaaggggctggcccgacgggcatctgccctgctctacgccggggaatccatgttcactcgctacctgtggcctgctccaaggggtcacctcgacccgacatgggctctgcaacagctgcagcagcttcgctgggctgtctctgaagttcagcaccatgatgcaatcacgggcacagagtcgccaaaggtccgggatatgtatgcaacccaccttgcatctggcatgttgggcatgcgtaaattgatggctagcattgttttagacgagctgcagccacaagctcctatggcagcttcctctgatgccggtcctgccggtcattttgcgtctgtctacaacccactcgcttggacggtgactacaatcgttacattgacagtggggtttcctggagtccgtgtcaccgacgaagctgggcatccagtcccttctcagatacagaactccaccgaaactcccagcgcttatgacctgctcatcttgaccacgataccaggcctgagctaccgtcactacaatatccgtcctaccgctggcgctcaagagggcacacaggaacctgcagctacagtggccagtaccttgcaattcggacgacgattgaggcggcgaacatctcatgctggacgctacttagtcccagtggcaaacgactgttacatcgtgctgctggaccaggataccaatttgatgcacagcatttgggaacgacagagcaatcgcaccgtccgggtcacacaggaatttctggagtatcacgttaacggtgatgtcaaacaagggcccatcagcgacaattatttattcaccccaggcaaagctgccgtcccggcctgggaagccgtggagatggaaattgtggccggtcagcttgtgaccgaaatcaggcaatatttctatcgcaatatgacagctcagaattatacctatgcgatcaggtcaagattaactcatgtgccacagggccacgatggtgaactgctgtgtcacagaattgaacaggagtatcaggctggcccactggagctgaaccgcgaagccgtgctgagaacaagcacgaaccttaattctcaacaggtgatttactctgacaacaacgggtaccagatgcaacggagaccctacgtctcctatgttaacaattcgatagctaggaattattaccctatggtacagtcggccttcatggaagacggtaaatcccggttggtgctactgagtgaacgcgcccatggcattagctctcagggtaatggccaggtggaggttatgttacatcggcggttatggaacaattttgactgggacttaggttacaatctcactttgaacgacaccagcgtcgtccaccctgtgctctggctccttcttggctcctggagcctaacgacggcattgaggcaaagatcagccctggcgttgcagcatagacccgtagtgctttttggcgacctggctggcactgccccaaagctgccgggccctcagcagcaggaagccgtgactctccccccaaatctccatttacagatcctttctatcccaggttggaggtactcttcaaatcataccgaacacagtcagaatttaaggaaggggcaccggggtgaggcccaagcagacctgcgtcgggttctactgcggctgtatcatctttacgaggtaggcgaggaccctgtgctctctcaacccgtcacagtgaacttggaggctgttcttcaagccctggggtccgtggtggcggttgaggaacgctctctcaccggcacctgggacctaagcatgttacaccggtggtcctggcgcaccggccccggccgccatcggggggatactacctctccatctaggcctcccggaggaccaatcattacagtgcacccaaaagagatcaggaccttctttatccattttcagcagcaatag

SEQ ID NO: 11980 - RNA, 1443 nt, synthetic construct
  misc_feature 1..1443: note = source = /note="Description of Artificial Sequence: Synthetic coding sequence"
  source 1..1443: mol_type = other RNA
atgttatttaggaatcggttccttctgctgttggccctagctgcgctgttagcttttgtttccctcagtctacagttcttccacctaatccccgtgagcacgcctaagaacggcatgtcgtcaaaaagccggaaaagaatcatgccagaccccgtgacggagccccctgtaacagaccccgtgtatgaagctctgctctactgcaatataccgagcgtcgcagaacgatctatggagggccatgccccccaccatttcaagttagtctcagtgcacgtatttattcgccatggggaccggtaccccctttatgtgattccaaaaactaaaagaccggagatcgattgtactttagtcgctaaccgcaagccataccaccctaagctggaagcattcatttctcacatgtcaaagggcagcggagcatcctttgagtccccgctcaattccctcccgttataccctaatcaccctctctgcgagatgggcgagctgacacagaccggcgtggtacagcacctacagaatggccaactcctgcgtgacatttaccttaagaagcacaaacttttgcccaatgattggtcggcggatcagctttacctggagactactggaaaaagtcgtaccctccaaagtggactcgctctgttatacggatttctccctgatttcgattggaagaaaatctacttccgacatcagcctagtgcattgttctgttcgggttcgtgttattgtcccgtccgcaatcaataccttgagaaggaacagagacggcagtacttgctgcggttaaaaaactcccaactagagaagacctacggtgagatggcaaagattgtagacgtgcccacaaaacaattgcgtgcagctaatcctattgacagcatgctatgccatttctgccacaacgtgtcttttccctgtacaagaaatggctgtgtagacatggaacactttaaggtaattaagacacaccaaatcgaagacgagcgggagcgcagggagaagaaactctactttggttatagtctactcggcgcccatccaatcttgaatcagaccattggtcggatgcagcgggccaccgaaggccgtaaagaagaactgtttgctctctactcggctcatgatgttaccctgtcacctgtgctgtcagctctgggtctgagcgaggcccggtttcctagattcgcagccagacttattttcgaactgtggcaggatcgggagaaaccgtccgagcatagcgtgcgtatcctttataatggcgttgatgttacctttcacacgtccttctgccaggaccaccacaaaagatcccctaaacctatgtgtcccctggaaaacctcgttagattcgtgaagagggatatgtttgttgccttgggtggctcaggaaccaactactatgatgcatgccatcgggaaggcttctag

SEQ ID NO: 11981 - RNA, 1341 nt, synthetic construct
  misc_feature 1..1341: note = source = /note="Description of Artificial Sequence: Synthetic coding sequence"
  source 1..1341: mol_type = other RNA
atgctgcacccggaaacttccccaggcagaggccacctacttgcagtgctgctggccctgttgggcactgcctgggcagaggtgtggccgccacagctgcaagagcaagcccccatggccggagcccttaatcgcaaggagagtttccttctgctgtccttgcacaatcgccttaggagttgggtgcaacctcctgcagccgatatgagacggttggattggtccgactctctcgcccagttggcacaagcccgagctgccctgtgtggcacccctaccccaagcctggcgagtggactgtggcgcaccttgcaggtagggtggaatatgcagctgctcccagctggccttgtctcattcgtagaggttgtgtccctgtggtttgcagaagggcaacgctatagtcatgcagcgggagagtgcgctcggaacgctacctgtacccactacacacaactggtttgggccacttctagccaactggggtgtggtaggcatctgtgctccgcaggacaggccgccatcgaagcttttgtctgcgcatattcaccaagaggcaattgggaggttaatggaaagaccatcgttccatacaagaagggtgcatggtgttctctatgcacagcctccgtatctggatgttttaaggcatgggatcacgcaggtggcctgtgtgaggtgcccagaaatccttgccgaatgagttgccaaaaccacggaaggctcaatatatctacatgccactgccattgtcccccaggttacacagggcggtactgtcaagtaagatgcagcctgcagtgtgtacatggaagatttagggaagaggagtgtagctgtgtctgtgacattggctacggtggggcacagtgcgctacaaaagtgcattttccctttcatacctgcgatctgagaatcgatggtgattgtttcatggtgagctccgaggctgacacatattatagagcgcgtatgaagtgccagcgtaagggaggcgtgctggctcagattaagtcacagaaggtgcaagacattctagcattctatctgggacgactcgagaccacaaatgaagtgattgattccgattttgagacgaggaacttttggataggactgacttataaaaccgcaaaggatagcttcagatgggcgactggtgaacaccaggcttttacctcatttgcctttggccagccagacaatcacggtttcggaaactgtgtagaactgcaagcgagcgctgcctttaattggaacgatcagaggtgtaaaacgcgcaaccgatacatctgccagttcgcgcaggagcatatctctcgctggggacctggatcctag

SEQ ID NO: 11982 - RNA, 2313 nt, synthetic construct
  misc_feature 1..2313: note = source = /note="Description of Artificial Sequence: Synthetic coding sequence"
  source 1..2313: mol_type = other RNA
atggttgagtcagccggccgtgctggccaaaaaaggcctgggtttctcgaaggcgggctgcttctactcctgttgctagtgacagccgctctggtggcactgggcgttctgtacgctgatcgccgtggcaaacagctgcctcgactggcatctagactgtgttttttacaggaggagcgaacttttgtgaagcggaaaccacgaggaattccagaagctcaagaggtgagtgaggtgtgtacgactccaggctgtgtgattgccgccgccagaatcctgcagaatatggacccaactacggagccctgtgacgacttctaccagttcgcctgtggaggttggctccgaagacatgttatacctgagacaaatagcagatacagtatctttgatgtcctgcgcgatgagctggaagtaatcttaaaagccgtcctggaaaattcaacagcgaaagacagacccgctgtggagaaggccagaactctgtatagaagttgcatgaaccagagcgttattgagaagagaggctctcaaccattgctcgacatcctggaggtggtcggtggatggccagttgctatggaccgctggaatgagactgtgggacttgaatgggagcttgaacggcaactcgcgttgatgaactctcagttcaaccgccgtgtacttatagacctgttcatatggaatgacgatcaaaactctagccgccacatcatctacatcgatcagcccacactagggatgccctccagagagtactatttcaacggtggaagcaaccgcaaggtgagggaggcgtatctgcagtttatggtctcagtggctacacttctgagggaggatgccaatctgccaagggattcttgccttgttcaagaggatatggtgcaggtcctagaactggaaactcaactggccaaggccacggtcccacaggaagagcgccacgacgtcattgctctatatcaccgcatgggattggaggaactgcagtctcagtttggcctcaaaggattcaactggacattattcatacagaccgtgctgtcctcagtgaaaattaagctcctgccagacgaagaggtagtggtctatgggatcccctatttgcagaatttagagaatattatcgatacatacagtgcccggaccattcaaaactatctggtatggcgtctcgtcctggacaggataggtagcctctcacagagattcaaggatacccgcgtgaactaccggaaggcccttttcggtactatggtggaggaagttaggtggagggaatgtgtggggtatgtgaacagtaacatggagaacgccgtaggttccctttacgttcgagaggcttttccgggggactccaaatccatggtacgcgagcttattgacaaggtccgcacagtattcgtggaaacactggacgagcttggctggatggacgaggaatcgaagaaaaaggcgcaggagaaggctatgtcaatccgcgaacaaatcggccaccccgattatatcctcgaagaaatgaatagaagactcgacgaggaatatagcaaccttaacttctccgaggacctctacttcgagaatagcctgcagaacttgaaagtaggggcgcagcgcagcctacggaaactgcgtgagaaagtggaccctaacctgtggattattggagccgcagttgtgaacgccttctactctccaaataggaatcaaatcgtctttcctgctggtatccttcagcctcctttcttttctaaggagcaacctcaggcactgaacttcggaggtattggaatggttatcggccacgagatcacacatggcttcgatgacaacgggcggaacttcgataagaatggaaacatgatggactggtggtcaaatttcagcactcagcattttcgtgagcagtccgaatgtatgatctaccaatacggaaattacagctgggatctagccgacgagcagaatgtgaatgggtttaataccctgggggagaacatcgccgataacgggggagtcaggcaggcttacaaggcttacctgaaatggatggctgagggcggcaaagatcagcagctcccaggcctcgaccttacccacgaacaactcttctttataaactacgcacaggtgtggtgcggatcatatcggcccgaatttgctattcagtccatcaaaactgacgtacacagtcctctcaaatatcgggtgctggggtcactacaaaacctggccgcgttcgctgacaccttccactgtgctcgaggcacaccaatgcatcccaaagaacgctgccgagtatggtag

SEQ ID NO: 11983 - RNA, 1317 nt, synthetic construct
  misc_feature 1..1317: note = source = /note="Description of Artificial Sequence: Synthetic coding sequence"
  source 1..1317: mol_type = other RNA
atgagcaaacgagataaggctgggaaggataccgctagaggtaagggtaaagacattagtaaatatggcagtgtgcagaagtcgttcgcagaccgggggctgccaaagccacctaaggaaaaacttttacaagtggagaaattaaggaaggaatccggcaaaggctcctttctgcagccaacagcaaagccccgggcacttgcccagcagcaagccgttatccgaggattcacctactacaaggcggggaagcaggaggtgaccgaggcggttgccgataacaccctgcaaggaactagctggctcgaacagctcccccccaaggttgaggggcgatccaatagtgctgaacccaattctgcggaacaggatgaagccgagcctagatccagcgaaagagtcgacctcgcctccgggacccctacgagtatcccagccaccaccacaacagccactaccacgcctaccccaacaacatcccttctcccaaccgagcccccctcgggacctgaggttagctcccaggggagggaagcaagctgtgaaggcacattgcgggcagttgatccacctgttcgtcaccactcatacggccgtcacgagggggcatggatgaaggacccggctgcacgagatgatcggatctatgtgactaattattattacggaaacagcctcgtcgaattcaggaacctagaaaattttaaacagggcagatggagcaatatgtataagctgccttataactggattggaacaggacatgtggtgtaccagggggcattttattataatagggcatttacaaaaaatataattaagtacgacctgcgacaaagatttgtagcttcctgggccctcttgccagacgtggtgtatgaggacaccacaccgtggaaatggagagggcattcggatatcgattttgccgtggacgagtcaggactatgggtgatctaccccgctgtggatgatagagacgaggcacagcctgaggtcatcgtgttgtcgcgtctggacccaggggatctgtcggtgcacagggaaacaacttggaaaacacggctgcggcggaactcttacgggaactgtttcctggtttgcgggattctgtatgcagttgacacatataatcagcaggaaggacaggtagcctatgctttcgacacccatacaggtacagatgctagacctcagctcccctttttaaatgagcacgcttacactacacagatcgattacaacccaaaggaacgtgtgctatacgcatgggataatggccatcagctcacctatacacttcattttgtggtctag

SEQ ID NO: 11984 - RNA, 3570 nt, synthetic construct
  misc_feature 1..3570: note = source = /note="Description of Artificial Sequence: Synthetic coding sequence"
  source 1..3570: mol_type = other RNA
atgccaggactccttaattggataacgggagcagctctccccctgactgcaagtgatgtgacttcttgtgtgagtggctatgctctgggactgaccgccagtctcacctacggtaatttggaagcccagcctttccaagggctattcgtgtaccccctggatgaatgcaccacggtgatcggcttcgaggctgttatcgctgatcgtgtagtgacagtgcaaatcaaggataaagccaaactggaatccggtcatttcgatgcttcccacgtgcgctcacccactgttaccgggaatattctccaggatggagtgtccattgccccccactcttgcacgccaggcaaagtgactctcgacgaggacctcgagcgcatcctgttcgtggctaatcttggtacaatcgcccccatggagaacgtgaccattttcatcagtaccagtagcgaactgcctaccttaccgtctggggcagtcagagtgttactgcccgctgtctgtgcgccaacagtcccccaattctgtacaaaatctactgggacctctaatcagcaagcgcagggcaaggacaggcactgctttggcgcgtgggcaccgggtagctggaacaagctgtgtctcgctacactgttgaacactgaagtgtcaaacccgatggagtacgagtttaattttcagctggagattcgtggaccatgccttctagccggagtggagtccccaacacacgagattcgcgcggatgccgccccaagcgcacgtagcgccaaatctattatcatcacgctggccaacaaacacacttttgacaggcccgtcgaaattctgatccaccccagtgaaccacacatgccacatgtgctgatagagaaaggcgacatgaccttgggcgagttcgatcagcatctgaaggggcggaccgatttcattaaaggaatgaaaaaaaagtcaagggccgagaggaagaccgaaatcatacgcaaacgattacacaaggacattccacatcattccgtcatcatgcttaatttttgccccgatctacagagtgtgcagccctgtcttcgcaaggctcacggagaatttattttcttgatcgaccgctccagttctatgtccggcatatccatgcaccgggtgaaagatgccatgctggtggcacttaagtctctgatgcctgcttgtcttttcaatatcattggcttcggttctactttcaaatcactgttcccttcgtcacagacttactccgaggactccctggccatggcatgtgatgatatccaacgtatgaaagccgatatgggcggtaccaacattctatccccgttgaaatgggtgatccgccagcctgttcacagaggacatccacggttactattcgtgatcactgacggggcagtgaataataccggcaaagttctggaactggtacggaaccacgccttcagtaccaggtgctattccttcggcataggccctaatgtctgccacagactggtgaagggactagcatcggtgtcagaggggtctgccgagctgctcatggagggagagcggctgcagcctaagatggttaagtctctaaagaaagccatggccccagtgctatccgacgtgacggtggaatggatctttcctgagacgacagaagtcctcgtgagtcccgtttctgcctcttccctttttccgggcgaacggctagtcggttacggaattgtgtgcgatgcctccttgcatatttcaaaccctaggtccgataagaggagacggtattcaatgttgcatagtcaggaaagcggaagttcagtattctatcattcacaggatgatggcccgggactcgagggtggcgattgcgctaagaattctggggcccccttcatcctcgggcaggcaaagaacgctcgtctcgcttctggggactctacaacaaaacatgacttaaacctgtcccaacgacgccgtgcttactctacaaaccaaatcaccaatcacaagcccctaccacgggctacgatggcatccgacccaatgcccgccgctaagcgttaccccttaagaaaggcccgcctacaggatttaacgaatcagacttcgttagacgtgcaacgctggcaaatcgacctgcaacccttactcaactccggccaggatctgaatcagggtccaaaacttcgtggaccgggtgcccggaggcctagcttgctgccacaggggtgccagccttttcttccctggggacaagagactcaggcctggtcgccagtgcgcgagcgtacatctgacagtaggtcccccggtgatcttgagcctagccaccatccaagcgcgtttgagacggaaaccagctctgactgggacccacccgccgagtcacaagagagagcctcacctagccgcccagcaaccccagcacctgttcttgggaaagctctggtgaaaggtctgcatgattcccagcgactgcagtgggaggtgtcgtttgaactcggtacccctggacctgagcgcggaggggctcaggatgccgatctgtggagcgaaacctttcaccacttggccgcccgggcgatcattcgtgactttgagcagctggcggagagggaaggagaaattgagcagggctccaatcgaaggtatcaagtatcagcgctacataccagtaaagcgtgcaacatcatctccaaatacacagcattcgtgcccgtagatgtctcaaaatcacggtacctgcccactgtggttgagtatcctaattccgccgctttacgaatgctcgggagccgtgcgcttgcccagcagtggagaggcacttcttcaggttttggccgaccccagacaatgctgggtgaggacagcgcccccggcaatgggccacaacgcagcctcgcgactaatactctgtcttccatgaaggcgagcgagaatctgttcgggtcttggctgaatcttaataaaagccgcttactaacccgtgccgcaaaaggcttcttaagcaaaccattgattaaggccgtcgagtctacttctggcaatcaaagcttcgactacattccactagtctccctccagttagcttcaggcgcctttctgctaaatgaagccttctgcgaggccacgcatatccccatggagaagttgaagtggacaagccctttcacatgtcacagagttagtttgacaaccaggccgtccgagtccaaaacaccttcgccccagttgtgtacttcttcccccccaaggcaccccagctgcgattcattctctctcgaaccactggctaagggaaaactgggcctggaaccacgggctgtggttgaacatactggcaagctttgggccactgttgtcggtcttgcttggctcgaacattctagcgcttcttactttactgagtgggagctggtcgccgccaaggcaaacagttggctcgaacagcaagaagtccccgaggggaggacacaggggactttaaaggccgcagcaaggcagctgtttgtgctactccggcattgggacgagaacctggagttcaacatgctatgttataaccctaattacgtttag

SEQ ID NO: 11985 - RNA, 1344 nt, synthetic construct
  misc_feature 1..1344: note = source = /note="Description of Artificial Sequence: Synthetic coding sequence"
  source 1..1344: mol_type = other RNA
atgccgcacgtgctcattgagaagggggacatgacattgggagagttcgatcagcacttaaaaggtcgcactgatttcatcaagggcatgaagaaaaagtcccgggcggagagaaaaacagagatcattcggaaaaggttacataaagatattccacaccactctgtcattatgctcaatttctgtcccgacctgcagtcagtacagccttgtttgagaaaggcacacggggagttcatttttctgattgatcggtccagctccatgagtggaatctctatgcaccgggtgaaggacgctatgctggtggctttgaaatctttgatgcctgcttgcctgttcaacatcatcggttttggaagcaccttcaagagtctattcccatcttcacagacatactctgaggactccctagcaatggcatgcgatgatatccagaggatgaaggcagacatgggaggcacaaacatcctttccccgcttaagtgggtcatacgccagccagtccaccgaggccacccacgcttgttgttcgttatcactgatggagcggttaataataccggcaaggtgcttgaattagtccgtaaccacgcattcagtacccgatgttactccttcgggattggcccaaatgtttgccaccgcctggtcaagggacttgcctctgtgtccgaaggtagcgccgaactgctgatggagggggagaggctgcagcccaaaatggttaaaagtttgaaaaaggcaatggcccccgttctgtctgacgtaacagtggagtggatcttccccgagacgaccgaagtgctggtatccccagtttctgcttcctcactcttccccggtgaacgactcgtaggttacggtattgtgtgcgacgcttccctccatataagtaaccctaggagtgataagaggagacggtacagtatgctgcactctcaggaatctggatcctccgttttctatcattcacaggatgatggccccgggctcgaagggggtgattgcgccaagaattccggggcaccattcatactgggtcaagctaagaatgcacggttggcatccggcgattccaccacgaagcacgacctgaacctgagccagaggcgccgggcctactccactaaccagattacgaaccacaaacctctgcctagagccactatggctagtgaccccatgccagctgctaaacgctacccgttgcgcaaggcaagactgcaggatctaacaaatcagacatctctcgatgtacaacgctggcagattgacctccaagcctttatttgcttgacttcagaagacaccttccagatcagaacaccgaccggacagtag

SEQ ID NO: 11986 - RNA, 726 nt, synthetic construct
  misc_feature 1..726: note = source = /note="Description of Artificial Sequence: Synthetic coding sequence"
  source 1..726: mol_type = other RNA
atgtggacggttagaacggaaggtggacatttcccactgcatagccctacgttcagctggcgcaacgtggccttccttctccttctgtctcttgcccttgaatggacctctgcgatgctcactaagaaaatcaaacacaaacctggactgtgccctaaggaacggctgacttgtaccactgagttaccggacagctgcaacaccgactttgactgtaaagagtatcagaaatgttgttttttcgcctgccaaaagaaatgcatggacccctttcaagagccctgcatgttacctgtgaggcatgggaattgcaaccacgaagcccaacgctggcacttcgacttcaagaattatcgatgcacaccctttaagtaccgcggctgtgaaggcaacgccaacaatttcttgaatgaagatgcctgtcggaccgcctgcatgcttatcgtcaaggacgggcagtgccctctttttccctttacagagcgcaaagaatgcccccctagctgtcactcagacatcgactgtccccaaaccgacaagtgttgcgagtctagatgtgggtttgtgtgcgcccgagcctggactgtgaaaaaaggtttctgtccaaggaaacccctgctgtgtacaaagattgacaagcctaaatgccttcaggacgaggagtgcccgttagttgagaagtgttgctcccactgtggacttaaatgtatggacccacgccggtag

SEQ ID NO: 11987 - RNA, 1074 nt, synthetic construct
  misc_feature 1..1074: note = source = /note="Description of Artificial Sequence: Synthetic coding sequence"
  source 1..1074: mol_type = other RNA
atgcgcccaccccctgccctcgctctggcgggcttgtgtctcctggctctccctgccgctgccgcctcatatttcggactgactggaagagaggtgttgaccccattccccggtctcgggaccgcagccgcccctgctcaaggcggggctcatctcaaacaatgtgatctgctaaaattaagccggcgtcaaaaacagctctgcaggcgggagcctggcctggctgagaccctgagagatgcagcacacctgggattactggagtgccagtttcaattccgccatgaaagatggaattgctcattagagggacgcatgggtctgcttaagaggggatttaaggaaactgctttcttatacgcagtaagtagcgcagcgctcacccatacgctcgcacgggcgtgtagcgccggacggatggagagatgcacgtgcgatgattcacctggtctggagagtaggcaagcttggcagtggggggtgtgcggcgacaacctcaaatactctacaaagtttctgagcaatttccttggcagtaagcgagggaataaagatcttcgtgcccgcgccgacgcacacaacacacacgtcgggattaaggcggtaaaatctgggttgaggactacctgcaagtgccacggtgtttcaggttcatgcgccgtaaggacgtgttggaagcaactgtcgccctttcgtgaaaccgggcaggttttaaaattgcggtacgatagcgcggttaaggtaagcagcgcaaccaatgaagctctgggtaggttggagttgtgggctccagcaagacagggctctttgaccaagggcctagccccgcgttctggtgacctggtatacatggaagatagtccatcattctgtcggccatctaaatattctcctggaaccgccggaagggtgtgctcccgcgaggccagttgttcttccctctgttgcggcaggggctatgacacccagagtcggctcgtggctttttcctgccactgtcaggtacagtggtgctgctacgtggagtgtcagcaatgcgtccaagaggagttggtgtacacatgtaaacactag

SEQ ID NO: 11988 - RNA, 810 nt, synthetic construct
  misc_feature 1..810: note = source = /note="Description of Artificial Sequence: Synthetic coding sequence"
  source 1..810: mol_type = other RNA
atggttcggtgcctcggaccggctctgcttctcttacttcttttgggtagtgcaagttcggtgggcggcaatcggtgtgtcgacgcggctgaagcctgtaccgccgacgcacggtgtcagagactgcggagtgaatatgtagcacaatgtctgggtcgcgctgcgcaaggtggctgtccccgcgccaggtgtcgccgggccctgcgcaggttcttcgcccgcggcccccccgctctgacccatgccctgttattctgcccctgtgccggtcccgcctgtgcagagagaagacgacagaccttcgtgccctcttgcgccttctctggcccagggcctgcccccccaagctgccttgaacctctcaatttttgcgaaagaagtcgcgtctgtcgccctcgcctgctcgcatttcaagtgagctgcacgcctgccccctcagcccccgacggatgcttgttggaccaaggtgctcgctgcctcagagcctacgctgggctggtgggaacagcggtgaccccaaactacgtcgataatgtgagcgcgagggttgcgccgtggtgcgactgcggtgcatctgggaatagaagagaagattgcgaggcctttcgtgggctctttactcgcaaccgttgtctggacggcgccattcaagccttcgcctccgggtggcccccagtgttactcgaccagcttaatccgcagggggatcccgaacactctctgcttcaggtgtcctctacaggccgtgcattagagcgccggagcttgcttagcatccttcctgttttagccttacccgccctgttgtag

SEQ ID NO: 11989 - RNA, 1728 nt, synthetic construct
  misc_feature 1..1728: note = source = /note="Description of Artificial Sequence: Synthetic coding sequence"
  source 1..1728: mol_type = other RNA
atgtctggtaactgggtgcaccccggccaaatcctgatctgggctatctgggtactcgcagctccaaccaaaggcccatctgccgagggaccccagcgaaatactagacttggctggattcagggaaagcaggtaacagtactcggctccccagtgcctgtgaatgtcttcctaggagtacccttcgctgctcccccactgggctctctccggtttacaaacccccagcccgctagcccttgggacaacctgagagaagccactagctatcccaatctgtgcctgcagaactctgagtggcttttattagatcagcatatgcttaaggttcattacccgaaatttggcgtgtccgaggattgtctttatctgaacatctacgcacctgcacacgcggatacaggaagcaagctccccgttctcgtgtggttccctggcggggcattcaaaactggctctgctagcatttttgacggttctgctctggctgcttatgaggatgtgttagtggtggtcgtgcagtaccgcctgggcatattcggcttttttaccacttgggaccagcacgcaccaggaaattgggcatttaaggatcaggtggccgccttgtcatgggtgcagaaaaatatcgagttcttcggaggggacccctcctcagttaccatttttggcgagagcgcgggagctatcagcgtgtctagtctaattttgtccccaatggcaaagggcctattccacaaggcaatcatggaatccggcgtagccatcatcccatacctcgaggcacatgattatgaaaaatccgaagacctgcaggttgtggcacatttttgcggaaataacgcatctgactctgaagcactgctgcgttgcttacgtactaagccctcaaaagagctgcttactctgagccagaagaccaagagttttacgcgagtagtcgatggggccttctttcctaatgagccactggacctcctgtcgcagaaagcctttaaagcgatcccatctatcattggtgttaacaaccatgaatgcggattccttctccctatgaaggaggcccccgagattctgtccggtagtaacaaatctttggcactccacctaattcagaacatcctgcatatcccaccccagtaccttcatctggttgccaatgaatactttcacgataagcactctttgacagagattagggactcgttgttagatctcttgggagatgtcttctttgtcgttcccgcgctcataactgcccgttaccatagggatgctggtgcccccgtgtatttctacgaatttcgccacaggcctcagtgttttgaggataccaagccagcatttgtaaaagctgatcacgccgatgaggtgcggtttgtgtttgggggcgccttcctgaaaggcgacatcgttatgtttgagggggcaacagaagaggaaaaattgctgagccgcaagatgatgaagtattgggccaccttcgcacggaccggcaatcccaatggtaacgatctatcattatggccagcgtataaccttacggaacagtatcttcagctagacttgaatatgtcccttggtcagcgtctgaaagagccccgggttgacttctggacgtcaaccatccctctcatcctgagcgcctctgacatgctgcactctccactttcgtctttgactttcttgagcctgcttcagcctttcttctttttctgcgccccttag

SEQ ID NO: 11990 - RNA, 1026 nt, synthetic construct
  misc_feature 1..1026: note = source = /note="Description of Artificial Sequence: Synthetic coding sequence"
  source 1..1026: mol_type = other RNA
atgggaaccctaccatggctgctggcgttcttcatcctgggcttacaggcctgggacacacctactatcgtctcacgtaaggagtggggtgccagaccattggcatgcagggccctcctaacgctgcccgtggcttacattataacagatcagctaccaggtatgcaatgtcagcagcaaagtgtgtgtagccagatgctgcgagggctgcagtcacactctgtgtacactattgggtggtgcgacgtagcttataacttcctggttggcgatgacggacgcgtatacgagggggttgggtggaatatacaggggttgcacacccagggctacaataatatttccttgggcatcgcattcttcggcaataaaatcggatcctcaccctctccagccgcattaagcgcagccgagggactgattagctacgctatacagaaaggtcatctgtcacccagatacatccagcccctgctgctcaaggaagaaacctgcctggatccacagcatccagtaatgccccgaaaggtatgcccaaatattatcaaacgctctgcatgggaggcccgagaaacccattgtcccaaaatgaacttaccagccaagtacgttattataatacataccgccggaactagttgtaccgtgagcactgactgtcagaccgtagtcagaaatattcaaagcttccatatggacaccagaaacttctgcgacatcggttatcatttcctcgtgggccaagacggcggcgtgtacgaaggggttggatggcatatacagggttcccatacttacggctttaacgatatcgctcttggaattgccttcataggttactttgtggaaaagccacccaacgccgctgcccttgaagccgcccaagatctgattcagtgcgcagtcgtagagggatatctaactcccaactacctgcttatggggcattcagatgtggttaacatcttgagtcctggacaggccctgtataatattatctccacatggcctcacttcaagcattag

SEQ ID NO: 11991 - RNA, 897 nt, synthetic construct
  misc_feature 1..897: note = source = /note="Description of Artificial Sequence: Synthetic coding sequence"
  source 1..897: mol_type = other RNA
atgggtattgtgtgcgctcagtgttcctttatcctgctccttagtatcattcgagcccgccctccgccatttctgttctgtcctctgagtagccagcggaccgagagtccctacaagcctgtgcaccttggactaggaccaaccgacaaggtagctgctatagcgatggctcgcattatcgaccttgtgccttgggatgatggatctactcatgtatacgcttctcccgcaatcctcctgcccatggaacgacagaggaaccagctcgccggagtcaagcaacaactgtatcatccagcactccctaccctgcgtcatatggaccgagatactgtaaaggcatgtctgccagatgagcactgtcaaagcacaacctactgccggaaggacgagtttgataatgctcatttcacattgctgggtgtacccaataaacccctgcaatgcctggacatcaccgcgactggtcaaaagttaaggaatagatatcatgagggaaaactggccccaattgcacccgggattaatcgtgtagactggccttgcttcacacgagctattgaggattggtcacatttcgtgtcttccgccggtgaatttaaactgccctgcctgagaaaacgggctgagggattgtccggatacgcagtgagatacctgaagcccgatgtgacccagacgtggcggcaggaagctttatgcggcgcctgggccggcaggccatgcagcccagacagcccccgtccttacccatgctgcccaccgcagtactgtttatcgcaaaacccctcactcgatcggtacggacagaagcctttgccattcgacagcttaaacacattcaggtctttcggatcttcttacagcagagtgaactaccttacgccatggcattag

SEQ ID NO: 11992 - RNA, 5799 nt, synthetic construct
  misc_feature 1..5799: note = source = /note="Description of Artificial Sequence: Synthetic coding sequence"
  source 1..5799: mol_type = other RNA
atggcacctggcgctctgcgaggagggtgtgaacagcgcgcccccggcggcggagcccgaactgcagccctgggtccttggccttggccaagtcccggccctgcgccttcaccaggcgccgctcctccccgttcgcgcaaaatgagcggcgccctgttatggcctctcttaccccttctgctgctcctgctaagcgcccgcgacggagtgcgcgccgctcagccccaagctccaggctacctgatagccgccccatccgtgtttagagccggcgttgaagaggtgatctcagtcacaatctttaatagcccgagagaggttaccgtgcaagcgcagctggtggcgcaaggagagccagtggttcaaagtcagggggcaatcttggataaagggaccatcaagctcaaggtacctactggattacgaggacaagccctgttaaaagtatgggggcggggatggcaggccgaagagggaccactctttcacaaccaaacaagcgtcacggtcgacggccgcggggcttccgtcttcattcagaccgacaagcctgtatacagacctcagcatagagtccttatatcaatctttacagttagtcccaacctgaggccagttaacgagaagctcgaagcgtatattctggatcccagagggtcgaggatgattgaatggagacaccttaagccgttttgttgtggtatcacaaatatgtcattccctttgtccgaccagcccgtgctcggagaatggtttatcttcgttgagatgcaggggcacgcgtataataaaagttttgaagtgcagaagtacgtgctgcctaagtttgagttgctcattgaccctcctcggtatattcaagatctggacgcatgcgaaacgggcacagtgcgtgcaaggtacacgttcggaaaacccgtcgcgggcgctctcatgataaatatgactgtgaatggggtgggatattactcccacgaggttggtaggcccgtacttcggactactaagatcctgggttcgagggattttgatatctgtgtgagagatatgattcctgccgatgtgcccgagcattttagaggacgggtttccatatgggctatggtgacgtctgtcgatgggtctcagcaagttgcttttgacgacagcacccccgtccagcggcagctggtggacatccgttactccaaagacacacgtaagcagtttaaaccgggcctggcttacgtcggaaaagtggaactctcttacccagacggttcccccgccgagggcgtaactgtgcaaattaaagctgaactgactcccaaggataacatttacacttccgaggtcgtgagtcagcgcggtctggttggatttgaaattccttcgatccccaccagcgcccagcacgtatggctcgagacgaaggtgatggctctgaacgggaagcccgtgggtgcacagtacctcccttcatacctgtctctgggttcgtggtatagcccaagtcaatgctatctccagttacagccaccaagccatccactgcaggtcggtgaagaggcctacttcagtgtgaagtctacttgtccttgcaatttcaccttgtactatgaagtggccgctagggggaacattgtattaagtggacagcagccagctcacactacgcagcagcgctccaagagggcggcaccagcattggaaaaaccgatcagactgacccacctgagcgaaaccgagcctcctcccgctcccgaggcagaggtagacgtgtgtgtgacgtccctccatctggctgtgacaccctctatggtgccactggggagactcctggtgttttacgtgagagagaatggtgagggggttgccgacagcctgcagtttgcagtggagaccttcttcgagaatcaagtctccgtcacctacagtgccaatgaaacacagcccggagaagtagtggatctgcggatccgcgccgcccgtggcagttgcgtctgcgttgctgctgtcgataagtctgtgtatcttctaaggtccggatttagactaactccagcacaggtattccaagaattagaagattacgatgtctcggactcctttggggtctcaagagaggacggaccattttggtgggctggcctcacggcccaaaggagaagacgcagttcagtgtttccttggccttggggaatcaccaaggatagtgggtttgcctttaccgaaaccggcttggtagtaatgacagacagggtctccctgaaccatcggcaagacggtggcctttacaccgacgaggccgtgcctgcgttccagcctcacactggttccctggttgctgttgcaccatcacggcaccctcccagaacggagaagcggaagcggactttcttcccagagacttggatatggcattgcctaaacatttcagaccccagcggagaggggactctgtcagttaaggtgccggacagtattacgtcctgggtgggcgaggctgtggctctgagcactagccagggactcggaatcgctgagccttctctcctgaaaacctttaaaccatttttcgtggattttatgttgcctgccctcatcattcggggtgagcaggtgaagatccccctctccgtgtataattacatggggacatgcgcagaagtttatatgaagctcagtgtgcctaaaggaatccagtttgtcggtcaccctggtaagcgccacgtcacaaaaaagatgtgcgtagccccaggtgaggctgaaccaatatgggtcgtcctctctttttctgatcttgggctgaacaacattaccgctaaggcgctggcttacggcgacacaaactgttgtagggatggacggtcgtccaagcacccggaggaaaaccacgctgataggagggtccctattggggtcgatcatgtgaggagatcagtcatggtcgaagctgagggcgtaccacgtgcctacacatacagtgcctttttttgtcccagtgaacgggtgcatatctccacaccgaacaaatatgaatttcagtatgttcagcgtccactgagacttacacggttcgatgtagccgtgcgggcccacaacgatgctcgggttgcacttagttccgggccccaggacactgctggaatgatagaaattgtcctgggcgggcatcagaatacacgcagttggatcagcacctctaagatgggtgaacctgtcgccagtgcccataccgccaagatcttatcgtgggacgagtttaggacattttggatctcctggaggggtggactcattcaagtagggcacggccccgagcctagtaacgaatcagttatcgtggcatggacccttccacgaccacctgaggtccagtttattggattttctactggatggggatcaatgggcgagtttagaatttggaggaaaatggaagtggacgaatcctacagcgaagcttttactctcggggttccccacggggcgattccgggatctgagcgcgcaacagcctcaatcattggggatgtgatgggcccaacactaaaccacttaaacaacctgctgcggttaccttttggatgcggagaacagaacatgattcatttcgcccccaatgtgttcgtgctgaagtacctgcagaagacccaacagctgtctcccgaagttgaaagggagacaaccgattacttggtccaaggatatcagcggcaactgacctataagcggcaggacggctcatattcagcctttggggagcgggatgcatctggttccatgtggttgactgccttcgtgttaaaatcttttgctcaggctcggagtttcatcttcgtcgatcctcgcgagctcgctgctgcaaaatcttggattatccagcaacaacaagcagatggcagcttcctggcagtgggacgcgtgcttaataaagatattcaggggggaatccacggtactgtgccattgaccgcctacgtcgtggttgcacttttggaaaccggcactgcaagcgaagaagaacggggaagcactgataaagcaagacacttcttggaatcagccgcccctctggcaatggacccctacagctgcgccttgaccacctatgcactgaccctactcagatcacctgccgccccagaggctctcaggaaactccgttccttggccataatgcgcgatggagtaacccactggtctctgagcaattcttgggacgtcgacaagggcacatttctctcattctcagatcgcgtgtctcagtccgtagtcagcgctgaggtagaaatgaccgcttacgccctcctaacatacacgctgctgggcgacgttgccgctgcgctacccgtggtgaagtggttgtctcagcagcgaaacgccctcggaggcttctcatcgactcaggacacttgcgtggctctccaggcccttgcagaatatgccattctgagttacgccggcggtattaacctgaccgtgagtctggcatccactaatctggattaccaagagacatttgaactccataggactaaccaaaaggtccttcaaaccgcagcaatccctagtctgccaactggtctgttcgtctctgccaaaggtgatggatgctgtctcatgcagatcgacgtcacctacaacgtgccggaccctgtcgctaaacctgcttttcagttactcgtgtccctccaggaaccagaagcccaggggcgccctccgccaatgcccgcgtccgccgctgaaggttcccgaggtgactggccccctgccgatgatgacgaccctgccgcagaccagcaccaccaagaatataaggtaatgctcgaagtttgtactcgatggctccatgcgggctctagcaacatggctgttctggaagtccctttgctgagcggtttccgggcggacatcgagtctttggagcagctgctgttggacaagcacatgggaatgaaaagatatgaggtcgctggacgaagagtgctgttttattttgatgagatccccagtcgatgtctcacctgtgtgaggttcagggcactgcgagaatgtgtggtcggaagaaccagcgcactgcccgtatccgtgtacgactattacgagccagcatttgaagccacgaggttctacaacgtcagcactcacagcccactggcaagagaattgtgtgccggacctgcatgcaatgaggtcgagcgcgcacctgccagaggccctggatggttccctggggagagtggaccagccgtagccccggaagagggcgcggcaatagccagatgcgggtgtgatcacgactgtggtgcacagggcaacccagtgtgtggctcagacggcgtggtctatgccagcgcgtgtcggcttagagaggcagcctgcagacaagcagcccccctagaacccgccccaccgagctgttgtgcgctagaacagcggctccctgcctcatctagttcaacgtacggggatgacctggcctcagtcgcacccggacccctccaacaggacgttaagcttaacggcgccggcctggaggtggaggattctgaccctgagcccgaaggtgaggcagaagatcgcgtgacagcagggccccgcccaccggtgtcaagtggcaaccttgagtcttcgacccagagcgcctccccgttccataggtggggccagactcccgcgccacagagacacagcggtcgagttgttggtgcccaccggcccgggcttctgtcccccgtatttgtgtactcgccggcttttcagtcaggcggagaagaaggattatggatgtctaacacttgtaccttgcgctag

SEQ ID NO: 11993 - RNA, 1209 nt, synthetic construct
  misc_feature 1..1209: note = source = /note="Description of Artificial Sequence: Synthetic coding sequence"
  source 1..1209: mol_type = other RNA
atggtttgtgcgcgtgccgctttaggaccgggtgctctatgggcagccgcttggggcgtgctgctgctgactgccccagccggcgcccaacgaggaaggaaaaaggtggtacacgttttggaaggagagagtgggagcgtggtggttcagaccgcccccggacaggtggtgagtcaccgcggcgggaccatcgtgttgccttgccggtatcattatgaggccgccgcacacggacatgatggggtgcgcttgaagtggacaaaagtggtggatccactggcattcactgatgttttcgtggccctaggaccccaacatcgcgcatttgggtcataccgagggagagccgaattacagggggacgggcccggcgacgccagcctggtgctgcgaaacgtaaccctccaggattacggcaggtatgagtgtgaagtgactaacgaactggaggatgacgccggaatggtcaagctcgatctggaaggtgtcgtctttccatatcacccgaggggcggaaggtacaaactgacattcgctgaagcacaaagggcatgtgccgaacaggatgggattttagcatccgccgagcagttgcacgcagcctggcgcgatggactcgactggtgcaacgccggctggcttcgggatggctccgtgcaatatccagtgaatcggcctcgtgaaccttgtggagggctgggcgggaccggatctgccggcgggggcggagatgccaacggcggcctgcgcaactacggatataggcacaatgcggaggagcggtatgatgcattttgttttacttccaacctccctggaagggtgtttttcctgaagcctctgcgccccgtccctttttcaggcgccgcgagagcttgcgcagcacgtggagcagctgtggcaaaggtgggccagttgtttgccgcctggaaattacaactgctagaccggtgcaccgccggctggctggctgacggcagcgctcgctaccctattgtgaaccctcgggcccgttgtgggggacggagacccggagtgagatccctcggattcccagacgcaaccagaagattatttggtgtgtactgctacagagctcctggggcgcccgaccccgctcccggcggatggggctggggttgggctggaggtgggggatgggcagggggagcccgggatcctgccgcttggactccactccatgtttag

SEQ ID NO: 11994 - RNA, 1740 nt, synthetic construct
  misc_feature 1..1740: note = source = /note="Description of Artificial Sequence: Synthetic coding sequence"
  source 1..1740: mol_type = other RNA
atgtcggctctcagacccttgctgctgttactactccctctgtgcccagggccagggcccggccccgggagtgaggccaaagtgactcgctcctgcgctgagaccaggcaggtcctaggagcaagaggatattcactgaatctgattccacctgctctgattagcggtgagcacctgagagtctgtccccaagagtacacttgctgtagctccgagaccgaacagaggttaatccgagaaactgaagccacgttccgcggcctggtcgaagattctggttcctttcttgttcacacgctcgccgccaggcatagaaaatttgatgagttctttctggaaatgctatcggtcgcacaacattcgctcacccagctctttagccactcatatggtcgtctctacgcccagcacgctctgatctttaacgggttgttctcacggctccgggatttttatggggagtctggagagggcctcgacgacactttggctgacttttgggcccagctgctcgaacgcgtttttcccctcctccatccccaatactccttccccccagactatctgttgtgtctgagccgactggcgagttctaccgacgggtccctccagccgttcggcgactccccccgtaggctacggctgcaaattacacgcacactggttgcagcccgagcctttgttcaaggcctcgagaccgggagaaatgtggtgtccgaggctctgaaggtccccgtgtctgaggggtgtagtcaggccctgatgcgactgatcggatgtcctctctgtagaggcgtgccatccttgatgccatgtcaggggttctgccttaatgtcgtccgaggctgcctttcctcccggggcttggagcctgattggggtaattacctggacggccttctaattctcgctgataaactccaggggcccttttcttttgaactgacagctgagtccatcggggtgaagatctccgaaggcctgatgtatttgcaggaaaattctgctaaggtaagcgcccaggtatttcaggaatgcggaccacctgaccctgtgccagcgaggaaccgtcgagcccctccccctcgcgaagaggccggacgactttggtccatggttacagaagaggagcggccaacaacagcagcaggcaccaatttgcaccgcctagtgtgggagttaagagagcgactggcacgcatgagagggttttgggcaagactcagtctgacggtgtgcggcgactctagaatggccgccgacgctagcctcgaagctgccccatgctggactggcgcaggacgaggacgctatctaccgcccgtcgttgggggctcaccagccgagcaggttaacaatccggaattgaaggttgatgcctcgggcccagacgtgccgacgagacgacggagactccagttgcgagctgctactgctcgtatgaagacggctgctctaggccacgatctcgacggccaggacgctgatgaagacgcctccggcagtgggggagggcagcagtacgccgatgattggatggcaggggcagtcgctcctcctgcgcgtcctccaaggccaccctatccgcccaggagggacggctccgggggaaagggagggggtggcagcgcacgttataatcagggcagatcccggagcggaggcgcaagcattggctttcacacccagacaatccttatcctgtctttatctgcacttgcattgctggggcctaggtag

SEQ ID NO: 11995 - RNA, 498 nt, synthetic construct
  misc_feature 1..498: note = source = /note="Description of Artificial Sequence: Synthetic coding sequence"
  source 1..498: mol_type = other RNA
atggccctgttagccttactgctggttgtagctctgcccagagtgtggacagatgccaacctcacggcaagacaaagggacccagaggattctcagcgtacagacgaaggagacaatagagtgtggtgtcacgtgtgcgagagagaaaacacctttgagtgtcaaaatcccaggcgatgcaagtggacagagccttattgcgtcatcgctgcggtgaaaattttccctcgattctttatggtcgcaaaacagtgttctgctggttgtgccgccatggagcggcccaagcccgaagagaagaggttccttttggaagaacccatgccatttttctacttgaagtgctgtaagatcaggtactgcaatctggagggcccccccatcaacagctcagtgttcaaggagtacgctgggtcaatgggtgaatcatgcggaggactttggctagccatcttactcctgcttgcttctatagccgctggactgagcttgtcctag

SEQ ID NO: 11996 - RNA, 933 nt, synthetic construct
  misc_feature 1..933: note = source = /note="Description of Artificial Sequence: Synthetic coding sequence"
  source 1..933: mol_type = other RNA
atgaacgggctgtccctgtcagagttatgctgcctgttttgctgtcccccctgccccgggcgaattgccgccaaattagcctttcttccacccgaggctacttattcattggtgcctgagcccgaacctggaccaggaggtgcaggtgccgctccactcggaaccctcagagcgtcaagcggcgcacctggaaggtggaaactgcatctcactgaacgggccgattttcagtactcccagcgggaactggacaccatcgaagtctttccaaccaaatccgctcgaggtaaccgggtgtcttgtatgtatgtgcgctgcgtgcccggagcccgctatacagtcctattttcccatggcaatgccgtagatctggggcagatgagtagcttttacatcggattaggtagtcggctgcactgcaatatcttcagttacgattactctggatacggagcctcatccggcagaccatccgagcggaacctgtacgcagatattgatgccgcttggcaggcgctgcgtacacgctatggcatatcaccagatagcatcattttatacgggcagtctatcggaaccgtgcctacagttgacttagcttcccgatacgagtgtgctgcagtggtgctgcactctcctcttacctcagggatgagggtggctttccctgacacaaagaagacatattgctttgacgcattccccaacattgaaaaagtctcaaagatcacaagtccagttctaataattcacggcaccgaagatgaggtgattgattttagccacggcctagccctctacgaacgctgcccaaaggccgttgagcccttgtgggttgaaggggcaggtcacaacgatattgagctctattcccaatatcttgagaggctgcgccgattcatttcccaggaactcccgagccagcgcgcctag

SEQ ID NO: 11997 - RNA, 1905 nt, synthetic construct
  misc_feature 1..1905: note = source = /note="Description of Artificial Sequence: Synthetic coding sequence"
  source 1..1905: mol_type = other RNA
atggcacagggtgtgctctggatcctgttaggtttgcttctctggtccgatcccggtactgcttcactccccctattgatggactcggtaatccaagccctggccgaactcgagcagaaggtgcccgccgcgaaaacacgccatacggcttcagcatggcttatgtctgctcccaactccggtccacataatcggctttatcatttcctactcggtgcttggtctctgaatgcaacagagctagatccttgtccactgagcccagaactgttgggcttaacaaaggaggttgccagacatgacgttcgcgagggaaaggagtatggggtggttctggccccagatggcagcactgtggctgtggaacctctactggcgggtttggaggctggcctccaaggtcggcgcgtcattaacctgcctcttgactctatggccgctccttgggagacaggggacacctttcctgatgtcgtcgccattgcccctgatgtgagagctacctcatctccggggctcagagatggatctccggacgtcactacagccgacataggagctaacactcccgacgcgactaagggatgccctgacgttcaggcctctctccccgatgcgaaggccaaatcaccgccaacgatggtagactcactgctggcagttactttggctggtaacttgggtctgactttcctgagaggatcccagactcagagccaccctgatctcggaaccgaaggatgttgggaccagttgtccgcaccgagaaccttcactctcttggaccctaaggccagtctgttaaccatggccttcctcaatggggccctggacggtgtgatcttaggcgactatctgtcccgcacaccagaaccacggccttctttatctcaccttctgtcccagtattacggggccggtgtagctcgcgaccccggattcaggtctaactttaggcgtcaaaatggcgctgccttgaccagcgcttcaatactggcacaacaagtttggggaactctggtcttgctgcagcgattggaacccgttcaccttcagttgcagtgtatgtctcaggagcaacttgcccaggtggctgctaacgctactaaggagtttacagaagccttcctcgggtgccccgcaatccatccccgctgccgatggggggccgcaccatacagaggacgtcctaagctgctgcagctacccttgggcttcctttatgtccaccatacctacgttcccgcgccaccttgcaccgactttactagatgcgccgccaacatgcggtcaatgcagcgttaccaccaggatacacagggctggggtgatattgggtattcctttgtggtaggcagcgatggttacgtgtacgaaggtagaggctggcactgggttggggcgcacacactgggacataatagccggggcttcggagtggcaattgtgggcaattatactgccgccctccctacggaggccgctttgcgaacagtgagagacaccctgccaagttgcgctgtccgggctggcttactgcggccagactatgcgttgctcgggcatcggcaactggttaggacagattgtcccggggatgcccttttcgaccttctccggacctggccccacttcactgccgtgtccctgcgcagcctgcactataccgcccggagaccgtcagtatatacctccagtacccgtcctttgccccccgcgtgtaacagctgcgcacggaccgcatctgcaaggccgcccacctcacgaagacacgtctattcaggaaacctgggcccagccttcgcaggacactccgccggaaacattcctgatccggtcaccagcgcgtatgctgcatctgcccagcctcagactcagcccgcttgcccatttcctagctcatag

SEQ ID NO: 11998 - RNA, 777 nt, synthetic construct
  misc_feature 1..777: note = source = /note="Description of Artificial Sequence: Synthetic coding sequence"
  source 1..777: mol_type = other RNA
atgttagtgctgtacggccattcaacacaagacctcccagagacaaacgctagagtcgttggcgggacagaagcaggaagaaattcctggccaagccagatttctctgcaataccggagtggaggcagccgatatcatacatgtggcggcaccctaatccgacagaactgggtaatgaccgccgcccattgcgtggattatcagaagactttcagagtcgtggctggcgaccacaacttgtcacagaacgatggaactgagcagtatgtgagcgtgcagaaaatcgtggtgcatccctattggaattccgacaatgtggccgccggatatgatatcgccctgttgaggctggctcagtctgtgacactgaactcatacgtccagctaggcgtgttgcctcaggaaggtgccatactcgcgaataactccccttgctacattacaggatgggggaaaactaagactaacggccagcttgcacagactctccagcaggcttatctgccttctgtagactatgcaatttgtagttcatcaagctattggggttctactgttaaaaatacaatggtgtgtgccgggggagacggcgttcgttccgggtgccaaggggattcggggggccctttgcactgtttagttaatggaaagtactccgtgcatggggttacatcatttgtcagctccagggggtgcaatgtttctcgcaagcccactgtctttacccaggtttctgcctacatatcatggataaacaatgtaatcgcatccaattag

SEQ ID NO: 11999 - RNA, 993 nt, synthetic construct
  misc_feature 1..993: note = source = /note="Description of Artificial Sequence: Synthetic coding sequence"
  source 1..993: mol_type = other RNA
atggctgcccgcagaagccagaggagaaggggccgacggggtgagccgggaaccgccctgctcgtgcctctcgctttgggccttgggctggccctcgcttgcctggggctcctgctggccgttgtttcactgggctctagagcctcactgtctgctcaagagccagcccaagaagagcttgttgccgaggaggaccaggacccgtcagaactgaacccgcaaacagaagaaagtcaggatccagccccttttctgaatagactggtacgtccccgaagatctgctcccaaagggagaaaaactcgcgctcggagagcaatagccgcccattacgaagtccacccacgacctggtcaggatggtgctcaagcaggagtcgatggcaccgtgagcggttgggaagaagcacgaattaactcaagcagccctctacggtacaataggcagatcggtgaatttattgtgaccagagcaggactgtattacctttactgccagtcttcagacgctctagaggcctgggaaaacggcgagcgaagtaggaaaagaagagccgtcctgacccagaagcagaagaagcagcatagtgttcttcaccttgtccctattaacgccacaagcaaagacgactccgacgttacagaggtaatgtggcagccagccctccgtcgcggaagaggactgcaggctcagggctacggtgtgcggatccaggatgcaggtgtctatttgctttatagccaagtcctattccaggacgtgacattcacaatgggtcaggtagtgtcccgagagggccagggcagacaggagacgctcttccgctgcattagaagtatgcccagccaccctgaccgcgcgtacaacagctgttattcagccggggtgttccacctccaccaaggagatattctctcggtaatcatcccccgggcccgggccaaactcaacctgagccctcatgggacgttcctaggattcgtgaaactttag

SEQ ID NO: 12000 - RNA, 2253 nt, synthetic construct
  misc_feature 1..2253: note = source = /note="Description of Artificial Sequence: Synthetic coding sequence"
  source 1..2253: mol_type = other RNA
atggccaagccccgcctcctggtcctgtatttcgcgcttattgttgtacctgcctgggtgtcttctatcgtgctaaccggaacaagtgaacctcctgacgctcaaaccgtggcgcctgcagaagacgaaacgctgcagaatgaagcagacaaccaggagaatgtactgtcccaactgcttggagattatgataaggtgaaggctatgagtgaaggatctgactgtcagtgcaaatgcgttgtgcgcccactgggcagagatgcatgccagagaatcaatgccggggcgagccgaaaggaagatttctatacggtcgagaccattacctccggcagttcctgtaagtgtgcctgtgtagcacctccatccgctttaaatccctgcgagggtgatttccggctgcagaagttgagggaggccgactctcaagatctcaagctatcaacaattattgacatgctggagggtgctttctacggtctagacctgctgaagctccacagcgtcactaccaaattagtgggaagagtcgataagctggaggaagaggtgtcaaaaaacctgacaaaggaaaacgagcagattaaagaagatatggaggagatccgcactgaaatgaacaagaggggtaaggaaaactgctccgaaaacatcctggacagcatgccagatatccggagcgcattgcagagagacgccgccgctgcttacgcgcaccccgaatacgaggaacgctttttgcaggaagaaaccgtgtctcagcaaatcaacagtatcgaactgctgcaaaccaggccactggctttacctgaggtggtcaagagtcagcgcccgctgcagagacaggttcacctacgcggccgcccagcctctcaaccgaccgtaattagaggaataacctattacaaagctaaagtatcagaggaggagaatgacattgaggagcaacaggatgagttcttctcaggtgacaacggggtggacctgctcattgaggatcagctgctccgccataacgggctgatgacatctgtgacacgccgacccgccgcaacaagacagggtcattcaacggcggtgactagcgacctgaacgcacggacggccccttggagtagcgctctgccccagccctcgacatctgacccatccatcgctaatcacgctagcgtgggacccactctgcaaactacgtcagtatcccccgaccctactagagaaagcgtgctgcagccttcgccccaggtgcccgctaccaccgtcgcccacactgcaacccagcagcctgccgcaccggctccgccagcagtgtccccacgtgaggccctgatggaagccatgcacaccgtgcccgtcccacccacaacagtgcggactgactcactgggcaaagatgcgcccgctggatggggaactacacctgcctcacctaccctgtctcctgaggaggaggacgatattcgcaatgttatcggtcgatgtaaagatacattaagcactatcaccggacccaccacacagaacacttacggccggaacgaaggggcgtggatgaaagacccgctggccaaggacgaaaggatatacgttactaattactattacggcaacactcttgtagagttccggaatttagagaactttaagcagggccgctggtctaattcctacaaacttccttattcttggataggcacggggcatgtcgtttacaacggcgctttttattataacagagcttttacaaggaacataattaagtacgatctgaagcagaggtacgtggcagcctgggcaatgcttcacgatgtggcctacgaggaagctaccccatggcgctggcagggccatagtgacgtggactttgctgtggacgaaaacggattgtggctgatttatcccgccctggacgatgagggattttcccaggaggtgattgttctgtctaaacttaatgccgcagatctttctacgcaaaaggaaacaacgtggcggacaggtctgcgacgcaacttctacggaaattgtttcgtcatatgtggcgtcctttatgcagtagatagttacaatcagcggaacgctaacatttcttacgcttttgatactcatacaaacacacagattgttccccgtctgttattcgaaaacgagtattcttataccacacaaattgattataaccctaaggaccggttactgtacgcttgggataacggacaccaggtgacataccacgtgatcttcgcatactag

SEQ ID NO: 12001 - RNA, 678 nt, synthetic construct
  misc_feature 1..678: note = source = /note="Description of Artificial Sequence: Synthetic coding sequence"
  source 1..678: mol_type = other RNA
atgaagctggggtgcgtgttgatggcttgggcgctatacctgtctttgggcgtgctctgggtggcccaaatgctgttggctgcaggatgtcatgccgaattatttcctgcccccatcctgcgcgctgtcccgtctgccgagcctcaagccggatccccaatgacactgagctgccaaactaaactgccattgcaacggtctgccgcaaggctgttgtttagcttttataaagacggccgaattgttcaaagccgaggtcttagtagcgaatttcaaatccctactgctagtgaggatcatagcggtagctactggtgtgaggcagctactgaggataatcaggtctggaaacagagtcctcagctcgaaattagagtgcaaggagcgtcatcaagcgccgcaccacccaccttaaacccagctccccagaagtccgcagctcccggaactgcacctgaagaagctcccggaccccttccacctccaccaaccccaagctcagaagaccccggattcagtagcccattgggaatgcctgatccacacctataccaccaaatgggcttgttactgaagcatatgcaggatgtgcgggtgctgcttggccacctgttgatggagctaagagaattatccggacaccggaaaccagggactaccaaggcaaccgccgagtag

SEQ ID NO: 12002 - RNA, 891 nt, synthetic construct
  misc_feature 1..891: note = source = /note="Description of Artificial Sequence: Synthetic coding sequence"
  source 1..891: mol_type = other RNA
atgtctcgccaggaacccaaaatgtttgtgctgctctatgtgaccagctttgccatttgcgctagcggtcaacctaggggtaatcagctcaagggcgaaaactattcacctagatacatttgtagcattccaggtctccccggtccaccaggtcctcctggggccaacggctcacccggcccccacggcaggatcggacttccagggagggacggccgggacggtcgcaagggagaaaagggcgagaagggcaccgccggcctgcggggtaagactggccctctgggtctcgcgggggaaaaaggtgatcagggcgaaaccgggaaaaaagggccgattggaccagagggagaaaagggagaggttggaccgatcggaccgccaggaccgaagggtgaccgtggtgaacaaggagaccctggattgcctggcgtctgtaggtgcgggagcattgtcctgaagagcgcattttccgtgggaatcaccacctcttatcccgaagaaagactcccaatcattttcaacaaggtactgtttaatgagggcgagcattacaaccctgcaaccgggaagttcatttgtgctttccccggtatctattatttttcatatgatatcaccctcgcaaataaacaccttgccatcggattagttcataatggtcaatataggataaagacatttgacgcaaacactgggaaccatgacgtcgccagcggctcaacagtgatctacttacagccggaagacgaggtgtggctcgagatattttttactgatcaaaatggattgttcagcgacccaggttgggctgacagtcttttttctggcttcctcttgtatgttgatacagattatttggactcgatcagcgaggacgacgaactgtag

SEQ ID NO: 12003 - RNA, 1275 nt, synthetic construct
  misc_feature 1..1275: note = source = /note="Description of Artificial Sequence: Synthetic coding sequence"
  source 1..1275: mol_type = other RNA
atggggagcttagtactaactttgtgtgcacttttctgtttggccgcatacctcgtttcaggatctccgatcatgaatctggagcagtcaccattggaggaggatatgtctctcttcggtgacgttttttcagaacaggatggcgtggactttaacaccctgctccagtccatgaaagacgaattcctgaagacactgaacctatccgacatcccaacccaggattcagcgaaggtggaccctcctgaatacatgctagaattgtacaataagtttgcaactgacagaacttcaatgccctcagccaacattatccgctcctttaagaacgaagatctcttttcacagccagtttcgttcaatggtctgcgaaagtaccctctgctgttcaacgtttctatcccccaccatgaagaagtgataatggccgaactgcggctatatactcttgtgcaacgcgacagaatgatttatgacggcgtcgatagaaagattaccatcttcgaggtactggagagcaaaggtgataacgaaggagaacggaacatgctcgtgctcgtcagcggcgagatctacggtacaaactctgagtgggagacattcgacgtgactgacgccatccgcagatggcagaaatccggaagcagtacccaccagctcgaggttcacatcgagtcaaaacatgacgaggccgaagatgcttcctccggaagattagagatcgacacctccgcccaaaacaagcataatccactgctgatcgtcttctcagacgaccaatcatcagacaaagagagaaaggaggaactcaatgaaatgatcagtcatgaacagctccctgagctcgacaatctcggcctggatagcttttcatctggcccgggggaggaggcattactgcagatgagatctaatatcatctatgattctactgcacgcattaggcggaatgctaagggcaattattgcaaacgcacaccactttatatagacttcaaggaaataggctgggacagctggattatcgcgcctcccggctacgaggcctatgaatgcaggggagtgtgtaactatcctctggccgaacatttgacacctacgaaacatgctatcatccaagcactcgtccatctgaaaaattcgcagaaggcaagtaaagcatgttgtgtcccaacgaaactggaacccattagcatcctttacctcgataagggggtggtgacgtacaagtttaaatacgagggaatggccgtatccgagtgtggatgtagatag

SEQ ID NO: 12004 - RNA, 381 nt, synthetic construct
  misc_feature 1..381: note = source = /note="Description of Artificial Sequence: Synthetic coding sequence"
  source 1..381: mol_type = other RNA
atgcacttgagtcagctgctagcatgcgcactgctgctcacactcctgtctctgcgtccttctgaagcgaagcccggtgcacctccgaaagtgccccgaacccccccagccgaggaactggctgaacctcaggcagctggaggcggacagaagaagggagacaaagcgcctggtggaggaggtgccaatctgaaaggggaccgtagccgtttactcagggacttaagggtcgataccaaatctcgggcggcctgggctaggcttttgcaggaacatccaaacgcccgaaaatataaaggtgctaataagaaggggctgagcaagggatgctttggtctgaagctcgataggatcggatctatgtcgggacttggctgttag

SEQ ID NO: 12005 - RNA, 423 nt, synthetic construct
  misc_feature 1..423: note = source = /note="Description of Artificial Sequence: Synthetic coding sequence"
  source 1..423: mol_type = other RNA
atgagatccccacgcatgagagtgtgcgctaaaagcgtgctcctgtcacactggttattcctcgcatacgtgctgatggtgtgttgtaaattgatgagcgcttcctcccagcacctgcgcggccatgctgggcaccaccagattaaacaagggacttgcgaggtggttgctgtgcaccggtgctgcaataaaaaccgcatagaagaacgctcccaaaccgttaagtgtagttgtttccctgggcaggtcgcaggcacgacccgagcacagccatcttgtgttgaagcctcaatcgtcattcaaaagtggtggtgtcacatgaatccctgtctggaaggtgaagactgcaaagtgctccctgattactccgggtggtcttgttcatctggcaacaaggtgaagacaacgaaggtgacgaggtag

SEQ ID NO: 12006 - RNA, 1332 nt, synthetic construct
  misc_feature 1..1332: note = source = /note="Description of Artificial Sequence: Synthetic coding sequence"
  source 1..1332: mol_type = other RNA
atgctaatgctgttcgttttcggcgtccttttgcacgaggtttcacttagcggccagaatgaggccccgccgaacacccattcgatcccaggagagcccttatacaactatgcgtcgatacgccttcctgaagaacacatccctttcttcctgcacaacaacaggcacattgctaccgtgtgtcgtaaagattcactgtgtccatataagaaacacctcgaaaaactgaagtattgctggggatacgaaaagagctgtaagccggagttccggtttggctaccctgtgtgctcctacgttgacatgggctggactgataccctagaatcggctgaggatattttctggaaacaagcagatttcgggtacgctagagagcgcctggaagagatgcatgtgctatgccaaccaaaagagacatccgactcttctcttgtgtgctcacgctacctgcagtactgtcgcgccacaaatctgtacctggatctaaggaatatcaagcgtaaccacgatcggttcaaggaggacttttttcaaagcggagagataggcgggcattgtaagttagatatcagaacactaacatcggaaggccaacgaaaaagccccctgcaatcctggttcgctgaattacagtcctacacacagctcaattttcgacccattgaggatgccaagtgtgatattgtcattgagaaacctacttatttcatgaagctggatgccggcgtcaatatgtaccaccatttctgtgattttatcaacttatacatcacacagcacgtgaataacagtttcagtacagacgtgtacattgtgatgtgggacacagatggcaaaattcgggttacaatcctcgctcggtctacggagtacagaaaaattctgaaccagaacgagctagtgaatgctttaaagacagtctcgacttttgaagtgcagatagtagattacaagtatcgagagctggggttcctggatcagcttcgtatcactcacaacacagacattttcatcgggatgcatggcgctgggctgacacacctgttgttccttccagactgggctgcagtctttgagctctacaattgcgaagacgaaaggtgttatcttgatcttgctagactcagaggggtgcactatatcacttggcggcggcaaaacaaggttttcccccaagacaaaggccatcatccaactctaggcgaacaccccaagtttacaaactattcctttgacgtggaggagtttatgtatttggtgctccaagcagctgatcacgtcctgcaacaccctaagtggccattcaaaaagaagcacgatgagctctag

SEQ ID NO: 12007 - RNA, 336 nt, synthetic construct
  misc_feature 1..336: note = source = /note="Description of Artificial Sequence: Synthetic coding sequence"
  source 1..336: mol_type = other RNA
atgggccctagttcttgtcttcttctgatcctaattccccttctgcagctaataaaccccggatctactcaatgtagcctcgacagcgtcatggataagaagatcaaagatgtcctcaatagcctggaatatagccccagcccaattagcaaaaaattatcttgcgcatcagtgaaatcccaagggcgtcctagctcttgtcccgctggcatggccgtgacagggtgtgcatgcggctacggttgtggtagttgggatgtgcaattggagacaacttgccactgtcagtgctctgtcgtggattggacaactgcacgctgttgccaccttacctag

SEQ ID NO: 12008 - RNA, 1965 nt, synthetic construct
  misc_feature 1..1965: note = source = /note="Description of Artificial Sequence: Synthetic coding sequence"
  source 1..1965: mol_type = other RNA
atggcacccaaaaagctgtcgtgtctccgatccctactgttgccacttagtcttactctgctgctgccacaagcagacacgcgatcattcgtagtagaccgcgggcatgatcgctttctgctggatggtgctcccttccggtacgttagtgggtcgttgcattactttcgcgtgccacgagttctgtgggcagaccgccttctgaaaatgcgctggagcggcctgaacgctatccagttttacgttccttggaattaccacgaacctcaacccggcgtgtataactttaacggcagtcgcgatcttattgcctttctgaacgaagccgctttagccaacttacttgtgatcctcagacccgggccctatatctgcgcagaatgggagatgggcggcctaccttcatggcttctcaggaagcccgaaatacatctgagaaccagtgatcctgatttcttggcagcagttgactcatggtttaaagtgcttctgcctaagatctatccctggctctatcataacggaggaaatattatttcaattcaagtcgagaacgagtacggttcttacagggcttgcgacttctcgtatatgaggcatctggcaggcttattcagagctctccttggagaaaagatcctcttgtttaccaccgacggccccgaaggccttaagtgcggtagcctacgcggactgtatacgaccgttgacttcggccctgccgataacatgaccaaaattttcaccttgctgcgtaaatacgaaccacacgggcccctggtgaatagcgagtattacacagggtggctggactactggggtcaaaaccatagcactagatccgtatctgctgtgacaaagggcctggaaaacatgctgaagctgggcgcgtcagtgaatatgtacatgttccacggcggcacaaactttgggtactggaacggcgcggataaaaaggggcgattcttaccgattacaacaagttacgactacgatgctcccatctcagaggcgggtgatccgactcccaaactgtttgccttgagagatgtcatcagcaaatttcaggaagtgccacttggacccctgcccccaccctcaccaaagatgatgctgggaccagtaacgctgcacctggtggggcaccttctggcttttctcgatctcctgtgccctagaggtcctattcacagcatcctgccaatgaccttcgaggcagtgaaacaggaccatggcttcatgctgtataggacttacatgactcacacaatctttgaaccaacccctttctgggtgcctaataacggcgtacacgatagggcttatgtgatggtagacggagtatttcagggagtggtggagagaaatatgagggataaactgttcctgacgggaaagctcggcagtaaattagatatcctagtagagaatatgggccgtctttctttcggctccaacagtagtgatttcaaaggacttctgaaacctcccatcctggggcagacaattctgacacagtggatgatgttcccccttaagatcgataatcttgtaaaatggtggtttccgctgcaactccccaaatggccatatcctcaggcccccagcggtccaaccttctattcaaagacattcccaatcctgggcagtgtcggggatactttcctgtacctccctgggtggactaaaggacaggtctggattaacggattcaatctggggagatactggacaaagcaggggccccagcaaactctgtacgtaccgcgttttctgttattcccccgaggggcattgaacaaaatcacactgctggaactcgaagatgtgccactgcaaccacaggtacagtttctggacaaaccaatcttgaattctacttcaaccctgcatcgaacacatattaactctctcagcgctgacactctgtcagcgagcgaaccaatggagctcagtgggcactag

SEQ ID NO: 12009 - RNA, 2502 nt, synthetic construct
  misc_feature 1..2502: note = source = /note="Description of Artificial Sequence: Synthetic coding sequence"
  source 1..2502: mol_type = other RNA
atgaatatggagataggtcacccacacgagggtaaagacgatctaggcgacaagagagtaataatgggcaccaaatttcctatggagctgggcattcgcgtcggtctgggtaaggaggattcaaggtgcggcgagtcccctgtggtctcgaataaatgtgaaggaagaatggccccgcctgaaacaaagtttccgctctcgaagggactggaaatgggtctcgaaagacagaacatctctcgtaccgtcatgcaaaggggctcactgggcgtcgactctgttagcgcctcgcagggtacgaaaccatccctgttgcctggaagaatggggctcgaaaacgagtctctgctcgccggatatacccacgaaaggattatacaacctcccctgggcagggtttgtgggagctctcaagcggccgggagcaggcgcgctccacttgcaagcgggcctgaaggcgtggaggaattggtgggaaaaccggcatttgtcatggagccacggcaggagatggaaaaggaatccacttgtgtactcatgaagccaaataccgaaatcaaactacccgtcgaagttgacattggactcacacaggccgaaggccccgacgaaacaaaaaacacagagccacagatgggactggttatcgagccacctcaatgccagttcgcccagcaacacgaacagcggaaggaagctggaaacattgaaagcggcgtggaaccccccgatagaatacggccaatctacagtggcaaattctttgatcgcactccttgttggccttccgctggaaaagtgatccctgtaggatacagagtcgctacgtgcttgaccgaaaagcttcctcggctgattacaccacccgaagcgaagaagtactttaactttcgctaccctcccgctggtgtggaaagggtgttttacggaagagcaaatgacccccagatcgcaccatacctcactcacggtatcaggagcaaaattagcgtgctggctaataccctcataaatccccagccaatcacaacgttccagcagaaaattaaggataaaaaggaatccatttacctttctaaccgcagagcaccactgggcaagtcccatgatcaagccccaggcttgcctaagggcatggacaccactaatacaacatttgggactgctgttatcaaggagtacagtgcgaaagacgttgtgaacccaccaaagagttacgaagaggtctttaaagagggtaatgaggggcatgacctgtacgtcgtctcgcacaacgactattatgcaggcgaagctaagaacaggaagtataacccctccagttttcatcggtgctctgtatatggcgtccctaccccccactttaatgatggccgcgcgatggccaagagtttgtactggctgcatgagctgcagatgaaacgcggagcgaagttcgtatctaagcgggccgatgatttcaaagaaaaattccaacacaaactgggtagagtgttggaccccatcgcagaaacgatgaacgtgcctccagactgcacattcggggcatgcttgaggcctgaagaatatggcgtgggagatcttatccataaccggttacctgatgagtatctgaggggtaaagaccggcagcgtgccctgatcgccgccgtccgtcaccacctgaagaaggtcaattaccagaaatttgacactctgttagctgcattccggcattacgataaaaagggggatggaatgattgacaaagacgagctgcaggaggcatgcgatcaggcaaatctgtcactcgatgataaactcctggaccagctttttgactattgtgacgttgacaatgatggatttattaactacttggaattcgccaattttctgaattggaaagacaagatgttgctgaaggaatatgaggagagagttattatcaaagggcggaagccagactgtgtcaacccgaccgaggcaaatgtcgaggaacccgaacagaccctattgatcaagcccgaagacatcgtccttaaagaagctggctcgactgaaaagactttgagaaccctgctgagaccctcagataaagttagcaactactataaaacaacatcatccgaaatcaacgccatcgtaggggcaattcccagcacatgctatccgatctgtggggtcccaacaatacgctccgacatccctgcgcctcgtataaggcgaatttcagatagaacgaactacggagaggaagggtccgcctatagcctgttgtacccaactatatttgctaggaagggtgtgtttgaacgcgacttttttaaaaccaggtccaaagaggaaatcgcagagatcctgtgtaatattggtgttaagctctccgacgaggaattcgaaaatgtttggaacctggccagtaaaaagcaccaccgcggagaggtgtgtgtggagaacatccgcaatgtcctagacgagcttcgacacgccgatagaattaaatgcaagaccctgatgtag

SEQ ID NO: 12010 - RNA, 2004 nt, synthetic construct
  misc_feature 1..2004: note = source = /note="Description of Artificial Sequence: Synthetic coding sequence"
  source 1..2004: mol_type = other RNA
atgggctcttccaggttggctgcactcttgctgcccctgctcttgatagttatcgacctctcggacagcgccggcataggctttcgtcacctgccacactggaacactcgctgccccctcgcctctcatactgacgacagcttcacagggagctctgcttatattccttgccggacatggtgggccctttttagcaccaagccatggtgcgtgagagtctggcactgctcacgctgcctctgtcagcacttgttgtcagggggaagtgggctccaacgcggactcttccatcttctggtgcagaagtctaagaagtcatctacatttaagttctacagaaggcataaaatgcccgcacccgctcaaagaaagctgctgccacgccgccacctgtcagaaaagtcccaccatatctctataccctctcccgacatctctcacaaagggttgcgctccaaacggacacagccatcggatcccgagacgtgggagtcactaccgcgattagactctcaacggcatggagggccagagttctcgttcgacctgctacctgaggctagagccattcgtgtcaccatctcatcagggccagaggtaagcgtcagactgtgtcaccagtgggctctggaatgcgaagagctgagcagcccctatgatgtccagaagatcgtttctggagggcacacagtggagcttccatacgagttcttgctaccctgcctatgcattgaggccagttaccttcaggaagacaccgttaggagaaaaaaatgcccattccagtcatggccagaagcctacggtagcgacttctggaagtctgtgcattttaccgattattcccagcatactcaaatggtgatggccctcacgttacgatgccctcttaaactcgaagctgccctgtgccagcggcacgactggcataccttgtgcaaagatctccccaatgctaccgctcgagagtccgatggctggtatgtattagagaaagtggatcttcaccctcaattgtgctttaagttcagttttggcaattcctctcacgttgaatgcccccatcagaccggcagtctcactagttggaacgtttcaatggatacccaagcacagcagttgattcttcatttctcctccaggatgcatgccacgtttagcgctgcttggtctctacctggcttaggacaagacacacttgtccccccggtgtatactgtctcccaggcccggggatcttcacccgtcagtctggacctgattattcctttccttcgtcctggctgctgcgtgttggtttggagatcggatgtgcagttcgcatggaaacacttattgtgtccggacgtgagctatagacaccttggtttactgatcttagccctcctcgctctgctgacattgctcggagtggtgcttgcgttgacatgccggcggcctcaatccggccccggaccagccaggcccgtgctgctgctgcatgcagccgacagtgaggcccagaggagactagttggggcgctagccgaactgctgagagctgcactgggtgggggccgggacgtcatcgtggacctgtgggagggacgccacgtagcccgagtcggcccgttgccatggctgtgggctgctcgcacacgggtggcacgcgagcaggggacagttctgttgctgtggtctggagccgacttaaggcccgtgtctggacctgacccccgggccgccccccttttagccttgctgcatgccgcaccaagaccccttctgttgctggcttatttttcccgcctgtgtgcaaaaggagatatcccccccccacttcgcgcgttacctagataccgactattaagggacctgcctagactcctgagggctctcgacgcccggccctttgccgaagctactagttggggacgcctgggagctcgccaaaggagacaaagtcggttggagttgtgcagccggttagaacgcgaagctgccagactggcagatcttgggtag

SEQ ID NO: 12011 - RNA, 609 nt, synthetic construct
  misc_feature 1..609: note = source = /note="Description of Artificial Sequence: Synthetic coding sequence"
  source 1..609: mol_type = other RNA
atggagctgtggggggcatacctgctgctttgtctttttagcctcttgactcaggtcaccacagaaccaccgactcaaaagccaaagaaaattgtaaacgctaagaaggatgtggtcaatacgaagatgttcgaagaacttaaatcgcggttggatactttagcccaagaagtggcactcctgaaggaacagcaggcacttcagaccgtgtgcttgaaaggaactaaagtccacatgaagtgcttcctggcattcacccagactaagaccttccacgaggcctccgaagactgtattagcagaggcgggacactgggcaccccccaaaccggatccgagaacgatgccttatacgaatatctgagacaaagcgtgggcaacgaggccgagatttggttgggtctaaatgacatggccgctgaaggtacatgggtggacatgacaggcgctcgaatagcctacaaaaactgggagaccgagataacagctcaacccgacggcggcaaaactgaaaactgcgccgtgttgtcaggagcggccaacggaaaatggttcgataaacgctgcagggaccaactgccatacatctgtcaattcggaatagtgtag

SEQ ID NO: 12012 - RNA, 1839 nt, synthetic construct
  misc_feature 1..1839: note = source = /note="Description of Artificial Sequence: Synthetic coding sequence"
  source 1..1839: mol_type = other RNA
atgttggaggggctgggatctcccgcttcaccccgagctgctgcaagcgcgagcgtagctgggagttctggcccagccgcctgttctccaccttcttcaagcgcgcctcgtagccctgagagcccagccccaagacgtggaggggtgagggcctcagttccccaaaagctggcagagatgctttccagtcagtacgggctgattgtctttgtggcaggcctgctgctgctgctcgcgtgggcagtgcatgccgccggggtctctaaatccgacctgctgtgcttcctgaccgcactgatgttgctgcagctgttgtggatgctgtggtacgtagggcgttcgtccgcacatagacgacttttcaggctgaaagacacacacgccggggccggatggttgcgcggctcaattaccttattcgccgtgattactgttattctcggttgtctgaagatcgggtatttcatcggtttcagtgagtgcctgagtgcaaccgaaggagtctttcccgttacacattcagtacacaccctgcttcaggtatattttttgtggggccacgccaaggacataatacaatcatttaagacgctcgagagatttggagttattcattccgtttttacgaacctgctgctgtgggccaacggtgtgctgaatgagtcgaagcatcagcttaatgaacacaaggaacgcctgataactctgggatttggtaatattaccaccgtgcttgatgatcacacaccacagtgtaattgcacacctccaacattatgtacggccattagccatgggatatactacctgtacccgtttaacattgaatatcaaatactcgcttccactatgctgtacgtgctttggaaaaacattggacgtaaggtggacagtcaccaacaccagaagatgcagtttaaaagtgatggagttatggtgggagcggtgcttggattaaccgtgctcgcagcaacgatcgccgttgtggtcgtttatctcattcacattgggcgtagcaagaccaagtctgaatctgcactgatcatgttctacttgtacgctattaccctgttaatgctaatgggcgctgcagggttggctggcattaggatctatcgtatcgacgagaaatccctagacgagtccaagaaccccgctcgaaaactcgattctgatcttctggtcggcacagcatccggctcttggctgatcagctggggtagcatcctggctattctttgtgctgaagggcaccctaggtatacatggtacaatctcccctacagtatattagctatcgtggaaaaatatattcaaaacttattcatatttgagagcatccatcgcgaacccgaaaaattatccgaggatatacagaccttgcgcgtggttacagtctgtaacggcaacaccatgccactcgccagttcttgccccaagagcgggggggttgctcgggacgtagctcctcaagggaaggatatgccaccagcagccaacgggaacgtttgtatgagagagtcccacgacaaggaggaagagaagcaagaagagtcaagttggggaggctctccatcacctgtgcgactaccccgctttcttcaaggtaatgcaaaaagaaaggtgctgagaaacatcgccgccttcctgttcctatgcaacatatccctgtggattcctcccgcgttcgggtgtcgccccgagtatgacaacggcctagaagaaatcgtgttcggtttcgaaccgtggataatagtggtgaatctcgccatgcccttctccatcttctaccgcatgcacgcggctgccagcctattcgaagtgtactgtaagatttag

SEQ ID NO: 12013 - RNA, 786 nt, synthetic construct
  misc_feature 1..786: note = source = /note="Description of Artificial Sequence: Synthetic coding sequence"
  source 1..786: mol_type = other RNA
atggagctcctccaagtaacaatccttttcctgctgccaagcatctgttcatctaactctaccggggttttggaggccgccaacaacagtctggtagtcactaccaccaaaccatctatcaccacccctaacaccgagagcttgcaaaagaatgtcgtaacaccaacgacaggcactacccctaagggcaccattactaacgagttgttgaagatgtccctaatgtccacagctacctttctcacttctaaggacgaaggcttgaaagctactactaccgatgtccgcaaaaatgatagcatcatctcgaacgtcacagtgacatccgtgacgctgcctaacgccgtttccaccctccagagttccaagccgaagacagagacgcaatcatctattaaaactaccgagattcccgggagtgtcctgcagcccgatgcttcaccatccaaaacgggtacactcacctctatacccgtgaccattccagagaatacaagtcagtcacaagtgattggcacggaaggcgggaaaaacgcttcaacatctgcaaccagtaggagctactcttcaatcattctccccgtagtcatcgcactcatcgtcatcactctcagcgtgtttgtgttagtcggactgtatcgcatgtgctggaaggccgacccggggacaccagagaatggaaacgaccagccccagtccgataaggaaagcgtgaaactcctcacagtaaaaactatctctcacgaaagcggtgaacacagcgcccagggtaagaccaagaattag

SEQ ID NO: 12014 - RNA, 6408 nt, synthetic construct
  misc_feature 1..6408: note = source = /note="Description of Artificial Sequence: Synthetic coding sequence"
  source 1..6408: mol_type = other RNA
atgccggcactgggccctgcacttctccaagcgttatgggcaggttgggtgttaaccctgcagcccctgcccccaacggcctttaccccgaacggaacatatctccagcatctggcgagggatcctaccagtgggacactgtatctaggagcaacaaactttctgttccagttgtcaccggggcttcagttagaagccaccgtctccacgggccctgtgttggactctcgtgattgtctgcctcccgtgatgccggatgagtgtccccaggcacaacctacgaacaaccccaaccagctcctactggtttcccctggcgccctggtggtctgtggttctgtccaccagggagtgtgtgagcagagacggctaggccaacttgagcagctactgttaaggccagaaagaccaggcgatacccagtacgtcgctgctaacgacccagctgttagcacagtcggcctcgttgcgcagggactagcaggcgaacctcttttattcgtgggcaggggttataccagcaggggagtgggaggtgggattcctcccattacgacacgcgcgttgtggccccccgacccccaggccgccttctcctacgaagaaaccgcaaagctggcagttggcagattgtccgaatattcacatcactttgtgtctgccttcgcccggggggcatcagcttactttctctttctgcgccgggatctccaggcccagagccgagcttttagggcttatgtgtccagagtctgtctccgtgatcagcattattacagctacgttgaattaccattagcatgcgaaggaggaagatatgggttgattcaggccgctgctgttgctacctcccgggaggtagcacatggtgaggtgctgttcgccgcgttctcttctgccgcgccaccaaccgttggccgacccccctccgctgccgcaggtgcctcaggtgctagcgcactgtgtgcattcccgttagacgaggtggacaggctcgccaaccgcactagggatgcctgttacacccgagagggaagggcagaagacggcacagaagtcgcttacattgagtatgatgtcaattctgactgcgcacaattaccagtggatacactcgacgcttacccctgcggttcagaccatacgccaagtcctatggcgtcaagagtccctctggaagccacaccaattttagaatggcctggcattcagctgacagcagtcgcagtgaccatggaggacggccacactatagcctttttaggcgattcacaggggcagctgcaccgggtgtacctgggtcccgggagtgacgggcacccgtatagtactcagagcattcagcaaggcagtgctgtctctcgggacctgaccttcgacggcacattcgaacacctgtatgtgatgacccagtccacactgctgaaggtgcctgtggcgtcatgcgcacaacacttagattgcgccagttgtctggcacaccgagatccctactgcggatggtgcgtgctcctgggacggtgctctaggcggtccgagtgtagtagagggcaggggcctgaacagtggctctggtcattccagccagagctggggtgtctacaggtcgcggctatgagcccagccaatatctcccgtgaggaaacaagagaagtgtttctctccgtccctgatctaccaccactttggccaggggagagctacagctgtcactttggcgaacaccagtctcctgcccttctgaccggttccggagtgatgtgcccatcgcccgacccctctgaggctcccgtactgccccgcggcgccgattatgtgtccgttagtgttgagctaagatttggggctgttgttatagcaaagactagtctgtccttctatgactgtgttgctgtaaccgaacttcgaccatcagcccagtgccaagcctgcgtgtcttccagatggggttgcaattggtgtgtgtggcagcacctgtgcactcacaaagcgtcatgtgacgccggccccatggtcgcaagtcaccagagtcccctcgtgagcccagacccgccagctaggggtggcccttccccctctccccccacagctcctaaggcccttgccaccccagctcccgacactttgcctgtggagcctggtgccccaagtaccgccacagccagtgacatctcccccggcgcatcccccagcctcctgtctccctggggcccttgggcgggctcaggctctatcagttctccaggttcaaccgggtctcccctacacgaagaaccctccccccccagcccacagaatggccctggtactgctgtcccagccccaactgactttcgaccttccgcgaccccagaggatcttctggcctcacctctctcccctagcgaagtggctgctgttcctcccgcagatcctggcccggaggcactacatcctacagtgcccctcgacctcccaccagccaccgtccccgccactaccttcccaggggctatgggatccgtaaaacctgccctggattggctgacacgcgaaggaggtgagttacctgaagctgacgaatggactggaggagatgcgccagcattcagcacatccacactgcttagcggcgatggagatagcgccgaactggagggcccgccagcccccttaattctcccaagttcgttagattatcagtatgacacaccagggctgtgggagttagaggaggccaccttaggcgcaagctcttgcccctgcgtcgagtccgttcagggatcaaccttgatgcccgtccacgtggagagagaaattcggctcctagggcgaaatctgcacttgttccaagatggaccaggagacaacgaatgtgttatggagctggaaggacttgaagttgttgtagaggccagggtggagtgcgagcctccaccagatacccagtgccatgtgacctgtcaacagcaccagctaagctacgaggccctgcaaccagaactcagagtgggtctctttctgagaagggccggacgtttgcgcgtcgactctgccgagggcctgcatgtagtgttatacgattgcagtgtgggccatggtgattgctccaggtgccagaccgccatgccccagtacggctgtgtgtggtgcgagggggagaggcctaggtgcgtcactagggaagcctgtggtgaggcagaagctgtcgccactcagtgtcctgcccctttgatccacagcgtggaaccactgaccggtccagtggatggcggcacacgcgtgaccattcgggggagcaatctcgggcagcacgtccaggacgtccttggaatggtcaccgtcgctggtgtgccttgcgctgtggatgctcaggagtacgaggtctcatcgtcacttgtgtgcatcactggcgcatccggagaagaggttgctggtgcgacagctgtggaggttccagggcgaggaagaggggtgtctgagcatgacttcgcctaccaggaccccaaagtgcacagtatcttccctgctcgtggcccgcgcgccggcggcacacgacttaccctgaatggctcaaagttgctcacggggaggcttgaggatatcagagttgttgtgggagatcaaccctgtcatcttctgcccgagcagcaatcagagcaactgcgttgcgagacatcccctcgaccaacacctgcaaccctgcccgtcgccgtttggtttggcgccactgaacggagactccagagaggtcagttcaaatacactctcgacccaaatatcacctccgcagggcctactaaaagcttcctgagcggtggacgggaaatctgcgtgagggggcagaacctagatgtggtacagacgccaaggattagagtaacagttgtgtcacggatgctacagccgagtcagggattaggacggagacggcgcgttgtgcctgagaccgcttgttctttagggcccagctgttccagtcagcaattcgaagagccatgccacgtcaattcatcccagttgataacgtgtcgtacccccgcactgcccggtctccctgaggacccctgggtaagagtggagtttatcttagacaatctcgtcttcgactttgccaccctcaacccaactcccttttcttatgaggcggacccaacattacagcccctgaatcctgaagaccctaccatgccattccgacacaaacctgggtctgtcttcagcgtggaaggagagaacctcgaccttgcaatgtctaaggaagaagtggtcgccatgataggagacgggccctgcgttgtgaaaaccctcacccgtcaccatctgtactgtgagccacctgtggaacagcctcttccccgacatcatgcgctcagggaagccccggattccctaccagaattcacagtgcagatgggcaacctgcggttttctctgggccacgtacagtatgatggcgagagtccaggcgcattcccagtcgccgcgcaggttgggctgggggtcggtacttccctcctggccctaggggtaattatcatcgtcttaatgtatcggagaaaatccaaacaagccttgagagattataaaaaggtgcagatacagttggagaacctggagtccagcgtaagagaccgatgtaaaaaagaattcactgatctcatgaccgaaatgaccgatcttacaagcgacctccttggttcagggataccattccttgactacaaggtatacgcggagcggatttttttcccagggcaccgagagtcccccctgcatcgagacctgggtgtcccagaatcacgccggcccaccgtcgaacaagggctgggtcaactgagcaacctcctgaacagcaaacttttccttacaaaattcatccatactctggagtctcaacgcaccttctcagccagggatagagcttacgtggcgagtttgctgaccgttgccctgcacggaaaactcgagtactttactgacattctacgtaccctgttaagtgatttggtggcccagtatgttgcaaaaaatcctaaactgatgttacgacgtactgagaccgtagtagagaagctcctgaccaactggatgtccatctgcctgtacacctttgtacgcgatagcgtgggagagccactctacatgctgttccggggcatcaaacaccaggtcgacaaggggccggtggacagcgtgaccggtaaggctaaatacacgctcaacgataatcggctgctcagagaagacgtagagtaccggccgttaactctcaatgccttgctcgccgtcggccctggagctggcgaggctcaaggtgtccctgtgaaagtgctagactgtgacaccatttcccaagccaaagaaaaaatgctcgatcaactgtacaagggtgtcccattaacccaaagaccggacccacgaactctggatgtcgagtggcgaagcggcgttgctggccacctcatcttatccgatgaggacgtgacgtctgaagttcaagggctgtggcggagactcaatactctgcaacactacaaagtgccagatggcgccacggtggccctcgtgccatgcctgactaagcatgtcctccgtgaaaaccaggactacgtgcctggcgagcgtactccaatgctggaagacgtagatgagggcgggatccgcccatggcatctggtcaaaccgtccgatgaacctgaacctcctcgtccgaggcgaggatcattgcgggggggcgagagagaacgcgcaaaagcaatccctgaaatctatcttactagactgctctcaatgaaaggaaccctgcagaaatttgtggacgatctattccaggtgatcctatcgacaagccgacctgtaccactggccgttaagtacttcttcgacttgttggatgagcaggcccaacaacacggcattagcgaccaggacacaatccatatctggaagactaactctctgcctctgcgtttctggatcaatatcattaaaaatccccagttcgtgtttgacgttcagacctctgacaatatggatgccgttctcctagtcattgctcagacttttatggacgcatgcacccttgctgaccacaagctgggaagggacagccctatcaataaactgctgtacgccagggatatcccacgttataaacggatggtagagcgatactacgctgatatacggcagaccgtgcccgcatccgatcaagaaatgaactccgtcctggccgaattgtcttggaattattccggggacttgggagctcgtgtcgccctgcatgaactgtataagtatattaacaagtactatgatcagattatcactgccctcgaagaagatggcacagcccagaaaatgcagttagggtatagactgcaacagatagccgcagccgtagaaaataaggtgactgatctttag

SEQ ID NO: 12015 - RNA, 297 nt, synthetic construct
  misc_feature 1..297: note = source = /note="Description of Artificial Sequence: Synthetic coding sequence"
  source 1..297: mol_type = other RNA
atgaaactaatggtccttgtatttaccatcggacttaccctcttactgggcgttcaagctatgccggctaatcgtctgtcctgctaccgtaaaatacttaaagaccataattgccacaatctgcccgaaggcgtggccgacctgactcagattgacgtcaacgtgcaagatcatttttgggatggaaaaggctgcgaaatgatttgctactgtaacttcagcgaattactttgctgtcctaaagacgtcttcttcggccctaaaatctcctttgtcatcccctgcaacaatcagtag

SEQ ID NO: 12016 - RNA, 1443 nt, synthetic construct
  misc_feature 1..1443: note = source = /note="Description of Artificial Sequence: Synthetic coding sequence"
  source 1..1443: mol_type = other RNA
atgaaacgaagcgtagcagtgtggctgctagttggattatcgctaggggtcccacagttcggtaaaggagatatctgtgatccgaatccctgtgagaacggcggaatttgtttgccagggttggccgatggaagttttagttgcgagtgtcccgacggtttcactgaccctaactgttccagcgtggttgaagtggcaagtgatgaggaggaaccgacgagtgccgggccctgcacacctaatccatgccataacggtgggacttgtgaaatctctgaagcttacagaggagataccttcatcgggtatgtctgcaaatgcccacgcggtttcaatgggattcattgccagcataatattaatgaatgcgaggtcgaaccctgcaaaaacgggggaatatgcactgatctggtggctaactattcatgtgagtgccccggggaatttatgggtcgaaattgccagtacaaatgctccggtcccctgggcatcgaaggtggaattatatccaaccagcagataacagcctcctccacacatagagcactctttggattgcagaagtggtatccttattacgcacggctgaacaagaaggggctcataaacgcatggacagcggccgagaacgatagatggccttggattcaaatcaatcttcagaggaaaatgcgggtgaccggcgtgattactcagggcgccaagaggattggctcccccgagtacatcaagagttacaagattgcatacagtaacgacgggaaaacatgggctatgtataaagtgaagggaactaatgaagatatggttttcagaggaaatattgacaataatacaccctacgccaattcctttaccccgcccatcaaggctcaatatgttaggttataccctcaggtctgtcgcagacactgcactctccggatggaactgctcggttgtgagttgtccggatgctctgaaccccttgggatgaagtccggccacatccaggactatcaaattactgcgagctctattttcaggacgctcaacatggacatgttcacgtgggagccccgcaaagcaaggctcgataagcagggcaaggtgaatgcttggacttccggccataacgaccagtctcagtggcttcaggttgacctgctggtcccaacaaaggttacaggcattattacccaaggggccaaggatttcggccatgttcagttcgttggatcttataaactggcctattcgaatgatggtgaacactggacggtgtaccaggatgaaaagcagaggaaagataaagtattccagggtaatttcgacaatgacacacatcggaaaaatgtgattgacccaccaatctacgctaggcatattcgtattttaccatggagctggtacggaaggatcacgctgaggtctgaacttctgggatgcactgaggaggaatag

SEQ ID NO: 12017 - RNA, 1323 nt, synthetic construct
  misc_feature 1..1323: note = source = /note="Description of Artificial Sequence: Synthetic coding sequence"
  source 1..1323: mol_type = other RNA
atggctgtcaaactgggaactttactgctggcactggccttagggcttgctcaaccagcgtctgctcggcgcaaactattagtgttcctgcttgacgggttcagaagcgactacatatctgacgaagccctggaatcattacctgggtttaaggaaatcgtcagccgaggcgtcaaggtagactacctgacacctgatttccctagtttatcctatcctaattactatacactgatgactggtagacactgtgaagtgcaccaaatgatcgggaactatatgtgggatcccaccacaaataaatcattcgacataggggttaataaagattctttgatgcccctgtggtggaatggcagcgagcccctgtgggtcacgcttactaaggccaaaagaaaagtctatatgtactactggcccggctgcgaggtagaaattctaggggtacgccctacctattgtctggagtacaagaacgtccccaccgatatcaactttgcaaacgctgtctctgatgctctggacagtttcaagtccgggagagcggatctggctgcaatttatcacgagagaattgatgttgaaggacatcattatgggccagccagtccccagcggaaggacgctcttaaagccgtggacaccgttctaaagtacatgactaaatggatacaagaacgggggttacaggatagactcaatgtgattatattctcggatcatgggatgacggatatcttttggatggataaggtgattgaactgaacaagtacatttcgcttaacgacttacagcaagttaaagaccggggaccggtggttagtctatggcctgctccaggaaagcattcggaaatctataacaaactgagtacagtggagcacatgacagtgtacgagaaagaggccattccaagtaggttctactacaagaaaggcaagttcgtcagtcctttgaccctcgtcgcggacgagggctggtttatcactgaaaatagagaaatgctgcccttctggatgaacagcactggtcgcagggaaggctggcagcgcggctggcatggatacgacaacgaactaatggacatgagaggtatcttcctggccttcggaccggactttaagtccaatttccgcgcagcacctatcaggagcgtggacgtgtacaacgtgatgtgtaacgtggtcggtattacgccacttcctaataacggttcatggtcccgcgttatgtgtatgcttaaaggtcgcgcctccacagcccccccggtctggccttcacattgcgccctcgctttgatcctactctttctcctcgcctag

SEQ ID NO: 12018 - RNA, 351 nt, synthetic construct
  misc_feature 1..351: note = source = /note="Description of Artificial Sequence: Synthetic coding sequence"
  source 1..351: mol_type = other RNA
atggaatcttctagagtgagacttctccccctgctgggcgctgccctgttacttatgttacctctgctaggtacgcgggcacaggaagatgccgagctgcaaccacgcgccctggatatttattctgcggtcgatgacgccagtcacgagaaagaactcattgaggctttgcaagaggttctgaagaaactaaagtctaaacgggttcctatttacgaaaaaaagtacggacaagtgccaatgtgcgacgccggcgagcaatgtgccgtgcgaaagggcgcaagaatcggaaaattatgtgactgtcctcgcggaacttcgtgcaatagttttctgctgaagtgcctgtag

SEQ ID NO: 12019 - RNA, 1365 nt, synthetic construct
  misc_feature 1..1365: note = source = /note="Description of Artificial Sequence: Synthetic coding sequence"
  source 1..1365: mol_type = other RNA
atggccagaccaaacaagttcttactctggttctgctgcttcgcctggctgtgcttccccatttcactggggagtcaggctagtggaggggaagctcaaattgccgcctcggccgaactggagtccggagccatgccatggagtctgctgcagcatattgacgagcgtgatcgcgctggattgttacccgcccttttcaaggttctctcggtaggccgtggaggaagccctaggcttcagccggacagtcgggccctacactacatgaagaaactctacaaaacttatgctaccaaggagggtatacctaagagcaaccgttcacacttgtataataccgttcggctgttcaccccctgcactagacacaaacaggctcccggagatcaggtcaccgggatcttaccttcagttgagctgctctttaaccttgatcgcatcactacagtggaacatcttctaaagagtgtactgctgtacaatataaacaactcagttagcttcagctctgccgttaagtgcgtgtgcaacctgatgataaaggagccaaaatcttcgtcaaggacactcggccgcgcaccatattcgttcacttttaactcacagtttgaatttggcaaaaagcacaagtggatccagatcgatgttactagtctcctgcagccactcgtagcctccaataagaggtcgatccatatgtcaattaatttcacttgtatgaaggaccaactcgagcacccctctgcccagaatggtctgttcaatatgaccctggtatctccctcattgatcttgtacctgaacgacacgagtgcccaagcttatcactcttggtatagtctgcactataagcgtcggccttctcagggaccagaccaggaacgttccctgagcgcttaccctgtgggggaggaggccgccgaggatggcagaagctctcatcacaggcatagacgggggcaagaaactgtgtcctccgagcttaaaaagcccttgggtccagcctcatttaacctcagcgagtatttccgacagttcctactgccccagaacgagtgtgagttacatgactttagattgtctttctcccagctcaaatgggacaactggattgtcgctcctcatcgatacaatccaaggtactgcaaaggggattgcccaagagccgtgggccacagatacggctcaccagttcacaccatggtccagaatattatctatgaaaaactcgattcttccgttccaaggccgtcttgcgtgcccgcgaaatacagtccgttaagcgtactgacaattgaaccagatggatctattgcctacaaagaatacgaggatatgattgcgacaaaatgtacatgtcgatag

SEQ ID NO: 12020 - RNA, 234 nt, synthetic construct
  misc_feature 1..234: note = source = /note="Description of Artificial Sequence: Synthetic coding sequence"
  source 1..234: mol_type = other RNA
atgtggcacttaaagctatgcgcagtgttaatgatatttctgctgctgttaggccaaatcgacggatcccctataccagaggtgagctctgctaaaagaagacctcgccggatgactcccttttggcggggggttagcctgagacccattggagctagctgccgagacgattccgaatgcattactcgcttgtgcaggaagcgaaggtgctccctctctgttgcccaagaatag

SEQ ID NO: 12021 - RNA, 912 nt, synthetic construct
  misc_feature 1..912: note = source = /note="Description of Artificial Sequence: Synthetic coding sequence"
  source 1..912: mol_type = other RNA
atgtctgagccacagccagatcttgaaccacctcagcatggcctctatatgctgtttttgctggttctcgtttttttcctgatggggctggtaggtttcatgatttgccacgtgctcaagaagaaaggctacagatgtaggacttcccgggggtcagaaccagacgatgcgcagttgcagccacccgaagacgatgacatgaatgaagacacggtggaaagaatcgtgcgctgtatcatccaaaatgaggctaacgccgaggccctgaaagagatgctgggcgattcggaaggagagggcactgtccagctgagctcagtcgacgccacgtcctcgcttcaggatggggctcccagccaccatcacacagtgcatctgggcagcgccgccccatgccttcactgcagccgaagcaagcgccctcctctggtgagacaagggagatctaaggaagggaagtcacggccccggaccggtgagacgacagtcttcagtgtgggcagatttcgcgtgacgcacatagagaagcggtacggtctgcacgagcacagggacggatcaccaaccgatcggagttgggggtctggcggagggcaagaccccggtgggggccagggtagtggaggaggacaaccaaaggccgggatgcccgccatggaacgactgccacccgaaagacctcagccccaggtactggctagtccgcccgtgcagaacgggggcctccgcgatagtagccttactcctcgggccctggaaggaaatccccgcgcttctgccgaaccaacccttagagcgggcggtaggggaccctctcctggcctccccactcaagaagccaatggacagcctagcaaaccagatactagcgatcaccaagtgtccctcccgcaaggagccggatcgatgtag

SEQ ID NO: 12022 - RNA, 795 nt, synthetic construct
  misc_feature 1..795: note = source = /note="Description of Artificial Sequence: Synthetic coding sequence"
  source 1..795: mol_type = other RNA
atgcggacactgtggatggcactctgcgcactttctcgactatggccaggcgcccaagcgggatgtgccgaagccgggaggtgctgtcccggacgagaccctgcttgctttgctaggggatggcggcttgacagagtgtatgggacatgtttctgcgatcaggcctgcaggtttaccggcgactgctgtttcgactatgatagagcatgtcctgcaagaccatgctttgttggggaatggtccccttggtccgggtgtgctgatcagtgcaaaccgacaacacgcgtgcggcgaaggagtgtgcagcaggagccgcagaatggcggagccccgtgccctccacttgaagaaagagcaggctgcctggaatatagtaccccacaaggtcaggactgtggccacacatacgttcccgcttttattacgacaagtgcttttaataaagagagaacgcggcaggctacaagtccccactggagtacccataccgaggacgccggctactgtatggagttcaagactgagagcctaaccccccattgcgccctggaaaactggcccctgaccagatggatgcaatatctgagagaaggttacacagtttgcgtcgactgccaacctcccgctatgaattccgtctccctgaggtgttctggcgacggcctggattccgatgggaaccaaaccctgcactggcaagcaattggaaatcctaggtgccaagggacatggaaaaaagtcagacgggtcgaccagtgttcttgtccagccgtgcatagctttatattcatttag

SEQ ID NO: 12023 - RNA, 312 nt, synthetic construct
  misc_feature 1..312: note = source = /note="Description of Artificial Sequence: Synthetic coding sequence"
  source 1..312: mol_type = other RNA
atgagacaaaggctactaccatcagttacttcactcctgctggtagcactcctcttccctggatcttcacaagcacggcacgtgaaccacagcgcaacagaagctcttggcgaacttcgagagagagcaccaggccagggtacaaatggctttcaattgctgcgacacgctgtcaagcgcgacctactgcccccacgaaccccaccatatcaagttcatatctcccatcgggaagctcgggggccatccttccgaatttgtgtagacttccttggacctcgatgggcaagaggctgttccaccggcaactag

SEQ ID NO: 12024 - RNA, 3867 nt, synthetic construct
  misc_feature 1..3867: note = source = /note="Description of Artificial Sequence: Synthetic coding sequence"
  source 1..3867: mol_type = other RNA
atggcctcagtggcctgggctgtgttgaaagtactgctgttgctacctacccagacatggtctcccgtcggcgcgggcaacccaccagactgtgacgcccccctagcatctgccttgccccgctcctccttctcctcctcaagtgagctgtctagcagtcatggacctggattctcacggctgaataggcgggatggcgccggtggctggactcccttggtgagcaacaaatatcagtggcttcagattgacctgggcgaacgcatggaggtgaccgcagttgctacccagggaggatacggttctagcgactgggtaacttcatacttgctaatgttcagcgacggaggaagaaactggaagcagtataggagagaagagtccatttggggcttcccaggcaacactaacgctgactccgtggtccactaccgactgcagccaccttttgaagctcgatttctcagatttctcccgctggcttggaatcctcgaggcagaatagggatgaggatagaagtatacggatgtgcctacaagtcggaagtggtctactttgacggccagtccgcgctgctgtatcgactagacaaaaaaccactcaaacccatccgagacgtcatttcactgaaattcaaagccatgcagagtaacgggattttgctacatagagaggggcagcatggcaaccacatcactctggaattaataaaggggaaattggtgtttttcctgaacagtgggaatgctaagctgcccagtacaattgcccctgtaacgctgactttgggatctttgctggacgatcagcactggcacagcgtactcattgagttactcgacactcaggtgaactttactgtggataaacacactcaccactttcaagctaagggcgattccagctacctcgatctgaattttgaaatttcttttggaggcatccctacaccaggccgctcgcgcgctttcaggcgaaagtccttccacggttgtctcgagaacctgtattacaacggagttgacgtgaccgagctcgcaaaaaagcataaaccccagattttaatgatggggaatgtgagtttctcgtgcccgcagcctcagaccgtgcctgtcacatttctgagctcccggtcatacctggccttgcctggaaatagtggggaagacaaggtgagcgtcacatttcagttccgaacctggaaccgcgcaggacatttacttttcggtgaactcagaagaggcagcggttcattcgttctgttcctgaaggacggcaaactcaaacttagtctgtttcaacccggccagtctccaagaaacgtcaccgccggagctgggctaaatgacggccagtggcacagcgtgagcttctcagctaaatggtctcatatgaacgtcgtcgtggacgatgatacggcggtgcagcctcttgtggctgtgctgattgattcaggggacacatactatttcggtggttgcctcgataacagctcaggaagtggctgcaagtcccccctcggaggttttcagggttgtttaaggctaataactataggcgataaagcagtggaccctatcctggtacagcaaggcgcactggggtcgtttagggacctgcaaatagacagttgtggaatcactgaccgctgtctgccttcttactgtgagcatgggggagagtgctctcagagctgggatactttcagttgcgactgtctcggaacagggtacacaggggagacctgccatagtagcctgtacgagcagagttgcgaagcacataaacaccgtggaaaccccagcgggttatattacattgatgccgatgggagtggacctcttggaccctttctggtatactgcaatatgactgccgacgctgcttggaccgtcgtgcagcatggaggaccagatgctgtgacacttcggggcgcgccatcagggcatccacggtctgccgtgagtttcgcttatgctgctggcgctggacagctgcgatccgccgtgaatctggcagaaagatgcgaacaacgactcgccctcagatgcggcaccgcacgacggccagacagtcgcgacggaacaccattgtcctggtgggtaggcaggacaaacgaaactcacacctcttggggcggtagcctgccggatgctcagaaatgtacttgcggactggagggtaattgtatagacagccaatattactgcaattgtgacgccggtagaaacgaatggacctcggacacaatcgtattgagccagaaagaacatcttccagtgacacaaatagttatgactgacgcagggcgtcctcattcggaagccgcctacacattagggccactgctctgcagaggcgaccaaagtttctggaactcagcttctttcaacacggagacttcctatctgcactttcccgcattccatggggagctgaccgcagatgtgtgctttttttttaagacaacagtttcgtccggtgtgttcatggagaacctaggaattactgatttcattcgcatcgaactgcgcgcacctaccgaggtcacattctccttcgacgtagggaatggaccttgtgaggtgactgtgcagagccccactcctttcaatgacaaccagtggcaccatgtaagggctgaaagaaacgttaaaggtgcatctctccaggtggaccaattgcctcaaaaaatgcaacctgccccagcggatggacacgtcaggctgcagctgaactcccagctgtttattggtggaaccgccacgcgtcagcgcggctttttaggatgtattcgatcattgcagctgaacggagtcgcccttgacctcgaagagcgcgccacagtgacacctggcgttgaacccggttgtgccggtcactgttccacatacgggcatttgtgtagaaatggaggacggtgccgggaaaagcgacggggagtgacatgtgattgtgctttctctgcatatgatggtcccttctgttcaaacgagatttcggcgtactttgcaacgggctcaagtatgacttaccactttcaggagcactataccctgtctgagaatagcagtagtttagtgagctcccttcaccgcgacgtcacactcaccagggagatgatcacgcttagtttcagaaccacgcgtaccccgagccttctgctttacgtgtcttcattttacgaggagtacctgtctgtgatcttggcgaataatggtagccttcagatcaggtataaacttgatcgccaccagaatcctgacgcttttacattcgacttcaagaatatggccgatgggcagttgcatcaagtgaaaatcaatcgtgaagaggctgttgttatggtggaagtcaaccaatcgacaaaaaagcaggtgattctatcaagcggtactgaattcaacgcggtgaagagcctcatccttgggaaggtacttgaggcagccggcgctgacccagatacgaggcgggcggcgacatcaggtttcactgggtgtctcagcgcagttcggtttggacgcgcagctcccttaaaagccgcacttcgtccttcgggaccttctcgtgtgaccgtgcggggacatgttgcacctatggcccgctgtgctgctggtgccgcctcaggctcccctgcacgggaactggcacctcggctggccggtggggcagggcgaagcgggccagccgatgagggcgaaccattagtcaatgctgacaggcgagattctgcagtgattggcggcgtaatcgcagtggtgatcttcatcctgctgtgcatcaccgccatcgctatcagaatctatcagcagcgaaagttgcgtaaagagaacgagtcaaaggtttctaagaaggaggaatgctag

SEQ ID NO: 12025 - RNA, 369 nt, synthetic construct
  misc_feature 1..369: note = source = /note="Description of Artificial Sequence: Synthetic coding sequence"
  source 1..369: mol_type = other RNA
atggttcccggacctcccgagtccgtagtcaggttctttctttggttctgcttcttgttaccacccactcgcaaggccagttgcgaccccagagacctcaagtcatgcaatcgcccttgcgtctggagcagacttcttaagcccaactcatccctgagcaacctggaaacagcatacttcccccaaatcctgagattcctgaggccgtggtacttctctagatcacacctcaattatcaccaaaaggcccctgcgcggtgggaatggttgtactctatttatcggaaaggtacaaaagcccagagacgcaacgtgttaagatctccctgtgcccctccacagcccagctggccctgcagcgtaatttag

SEQ ID NO: 12026 - RNA, 1887 nt, synthetic construct
  misc_feature 1..1887: note = source = /note="Description of Artificial Sequence: Synthetic coding sequence"
  source 1..1887: mol_type = other RNA
atggctccaagcgctgaccctggtatgagtaggatgctacccttccttctgctcctctggttcctgcctatcaccgagggatcacagcgagcagaaccaatgtttactgcagtaaccaatagtgtgttacccccagattacgacagcaaccccacccagttgaattatggggtggcggtcacggatgtggaccacgatggggatttcgagattgttgtggctggatataacggccccaatctggtgctgaaatatgacagagcgcagaagaggctggtgaacatagccgttgatgagcgcagttccccatactacgcattgagggaccgacagggaaacgctataggggtgacggcgtgcgatattgatggagatgggcgcgaagaaatctattttcttaatactaacaatgcctttagcggtgtggccacctatacggataaactatttaagttcagaaataataggtgggaagatatcctatcagacgaggtcaacgtcgcacgtggcgttgcctccctcttcgccggacgatctgtagcctgtgttgacagaaagggctcagggcgatattcaatttacatagctaattatgcttatggaaacgtcggacccgatgcactcatcgagatggatccagaagcatctgacttgtcgagaggaattctggccctgcgagacgtcgctgcggaggcgggtgtctctaagtacaccggcggccgcggagtaagcgtggggccaattctctcctcctctgcttcagatatattctgcgacaacgagaacggccccaacttcctctttcacaatcgaggagacgggactttcgtggacgcagcagccagcgctggcgttgatgaccctcatcagcacggtcgaggtgtggccttggccgattttaaccgggacggtaaagtggacattgtctatggtaattggaacggcccccacagactatatcttcagatgtcaacccatgggaaagtcaggttccgagatattgcaagtcccaagttcagcatgccatctcccgtgcgcaccgtgataacggccgactttgacaatgatcaggagctggagatcttcttcaataacatcgcctatcggtcatccagcgctaacaggcttttccgcgtgatcagaagggagcatggtgaccccctcattgaggaacttaaccccggcgacgccttagaacctgaagggcgcgggaccggtggagtcgtgacagacttcgatggcgacggcatgctcgatctgatcttgagccatggcgagtcaatggcacaaccactgtctgtcttccgaggaaatcagggctttaacaataattggttgagggtggtaccaagaacacgctttggagcatttgcgagaggcgctaaagtcgtactttacaccaagaagtcaggggcccatctgagaatcatcgacggcggctccggttacctttgtgagatggaacccgtagcacactttggtctgggtaaagatgaagcaagctcagtcgaagttacgtggcccgatggtaagatggtgtccaggaacgtggcctcaggcgaaatgaattcagttcttgaaatcctttatcccagagatgaggacaccttgcaggatcccgctccactggagacaccgatgaacgccagcagttctcactcctgtgccttggagacctccccctacgtcagcacgccgatggaggcgaccggggcaggtcctactaggtcggctgtgggcgctacctctccaactagaatggctcagccagcctggggcttgtcagccagccatcgtgcacccgctccccctcctcctcccctcctgctcccactgcccctcctcttgccactattagaattacctctcctgcaccggtcaagttag

SEQ ID NO: 12027 - RNA, 1008 nt, synthetic construct
  misc_feature 1..1008: note = source = /note="Description of Artificial Sequence: Synthetic coding sequence"
  source 1..1008: mol_type = other RNA
atgcagggccaggggaggagacgaggcacatgtaaagatatcttctgcagcaagatggccagctatttatatggagttcttttcgccgtaggcctttgtgccccaatctactgcgtgtctcccgctaatgccccttcagcctacccccgaccatcaagtaccaagtccacaccggcatctcaagtgtactccctgaacacagactttgccttccgactttatcgacgcctggtactggagaccccttcacagaacattttcttttccccagcgcggatcaattcgcacgtgaaaaaaaaaacccagggaaaagtcgtggatattatacaggggttggacctgctaacagcaatggtccttgtgaaccatattttttttaaagccaagtgggaaaagccctttcaccccgagtataccaggaagaacttccccttcctcgtgggagagcaggttacagttcacgtcccgatgatgcaccaaaaagagcagttcgcctttggagttgacactgagttgaattgtttcgtcttgcaaatggattacaaaggagacgctgtggcctttttcgtgctgccttccaagggcaaaatgaggcagctcgaacaggccctgtccgctcggacactgagaaagtggtcacacagtctgcagaaaagatggatcgaggtgttcataccccgcttcagcataagcgccagctataacttggagaccatactacccaaaatggggatccaaaacgtctttgataagaacgcggacttcagcgggatcgccaaaagagactccctgcaggtgagtaaagccactcataaagccgtccttgacgtttctgaagagggaaccgaggctactgccgctacaaccaccaagttcatcgtgcgatctaaagacggacctagctatttcacagtcagtttcaatagaacttttttaatgatgattaccaacaaagctactgacggcatcctttttttgggcaaagtcgagaatccaacgaaatcatag

SEQ ID NO: 12028 - RNA, 768 nt, synthetic construct
  misc_feature 1..768: note = source = /note="Description of Artificial Sequence: Synthetic coding sequence"
  source 1..768: mol_type = other RNA
atggtgcttttattggtcatcctgattcccgtgttggtcagttcagctggcacctccgcccactatgaaatgctcggaacatgcagaatggtgtgtgatccttatggtgggaccaaagcgcctagcacagctgccacccccgacagggggctcatgcagtccctgccaacgtttatccaagggccgaaaggcgaggctggtagacctggtaaggctggacctcgcggcccccccggagagccgggcccacctggaccgatgggcccccccggcgagaaaggcgaacctggaaggcaggggctgcctggacctcccggagcacctggactgaatgctgcaggggctattagcgctgccacatactcaaccgtgcccaagatcgctttttacgccggtctgaagagacagcacgaaggctacgaggtcctgaagtttgatgatgtagtgacaaatctaggaaatcactatgacccgacaactgggaagttcacctgttctattcccggcatttactttttcacgtatcacgttctgatgcgaggaggtgatgggacatcaatgtgggctgatctttgtaaaaataaccaagtacgcgccagcgccatcgcgcaggacgccgaccaaaactatgattatgcaagcaactccgtggtgttacacctggaacccggtgatgaggtgtatatcaagctggatggagggaaagcccatggaggcaataacaataagtacagtacattttcaggttttattatctacgcagattag

SEQ ID NO: 12029 - RNA, 1617 nt, synthetic construct
  misc_feature 1..1617: note = source = /note="Description of Artificial Sequence: Synthetic coding sequence"
  source 1..1617: mol_type = other RNA
atgagctttagcgcaactatcctattctccccgccctccggctctgaagctcgctgttgctgctgtgcctgcaagtcagaaactaacgggggcaatacgggctcacagggcggaaacccgcctccttcaactccaataacagtcaccggtcatggtctggccgttcagagctccgaacaactactccacgtaatttatcagcgagtcgataaggccgtgggcttagctgaagctgcgttaggtctggctagggccaacaacgaattgcttaaaagactgcaagaagaggttggagatctgcgtcaaggaaaggttagcattcccgatgaggacggcgagtcacgcgcacactcctcacctccagaagagcccggccctctgaaagaaagtcccggcgaagcgtttaaagccttgtcggcagtggaagaggaatgcgattcagttggctccggcgtgcaggttgtgatcgaggaactgagacagttgggcgccgcatctgtcggccccggccctctcggctttcctgctacgcagcgggatatgaggctccctgggtgtacactggccgccagcgaggcggctcctttgcttaaccctttagtggatgactacgtagcatccgaaggagcagtgcaaagggtattggtcccagcgtatgctaaacagctatcacctgccacccagctagcaatacagagagccacccctgaaaccgggccagagaacggcaccaagctgcctccacctcgacctgaagatatgctgaatgctgccgccgccctggatagcgccctagaggagtcaggacccggctctacaggagagttgcgtcattccctcggactaacggtttcaccttgtcgtaccaggggctccgggcaaaaaaacagccgccgcaagagagacttggtgctgtctaaattggtgcacaacgtccataatcacattaccaacgacaagaggtttaatggctctgagtccatcaagagcagctggaacattagcgttgttaagtttctcctggagaaattgaaacaagaacttgtgacaagcccacacaattatactgacaaagagctgaagggcgcttgcgttgcctattttcttactaagcgccgcgagtatcgcaacagtctcaacccattcaagggcctcaaggaaaaagaagaaaagaagcttcggagtcgcagatatagactgttcgctaatcgcagctctatcatgagacattttggtccagaagaccagagactttggaacgacgtgacagaagagctgatgtccgatgaagaagatagcctgaacgaaccaggggtctgggttgctcggcctccacgattcagggcccagaggctgaccgagctttgttatcatctggacgccaactccaaacacggtaccaaagctaatcgcgtttatgggcctccctccgaccgactgcccagcgcagaggcccagctcctgccgcccgagttgtataacccaaacttccaggaggaggaagacgagggaggcgacgagaacgcccctggatcacccagcttcgatcaacctcacaaaacatgctgccccgacctgaattcattcatcgagatcaaggttgagaaggacgagtag

SEQ ID NO: 12030 - RNA, 2853 nt, synthetic construct
  misc_feature 1..2853: note = source = /note="Description of Artificial Sequence: Synthetic coding sequence"
  source 1..2853: mol_type = other RNA
atgctgctgcttggcattctgaccctggcttttgccggtagaacggcgggaggaagcgagcccgaacgggaagtcgtagtgcctattaggttggaccctgacatcaatggtcgccgatattactggcgaggtcctgaggatagcggggatcaaggattaatcttccaaattaccgccttccaagaggatttctacctgcatctgactcctgacgctcagtttctagcaccagcattttctaccgagcacctgggcgtacctctgcagggactgacgggcggcagcagcgacctccgacgttgcttctattcaggagacgtgaacgccgagccagattcctttgctgccgtgagtctgtgtggaggactccggggcgccttcgggtaccgcggagccgagtatgtcatttcacctttacctaatgccagcgcccccgctgcccaacgtaactcccagggcgcacatttgctccagagacgtggtgtgcccgggggccctagcggagaccccacaagtcgctgtggcgtggcttcaggttggaacccagcaattctgagagctctggacccttacaaacctcggcgtgctggcttcggtgaaagtagatcacgaagacgcagcggacgggccaagagatttgtgtcaattcctaggtacgttgaaactttggtcgtggcagacgagagcatggtgaagttccatggcgccgatctcgagcattacctactgacactgttagccaccgctgcgagactctatagacacccttccatcttaaatcctattaacatcgtagttgtcaaagtgctactacttagggaccgcgattcaggccccaaggtgactggaaatgccgccttgaccctgagaaatttttgcgcatggcagaagaagctgaataaagtgagcgacaaacacccagagtattgggacacagcaattctgtttacccggcaggacctgtgcggcgccaccacctgcgacactctgggcatggctgacgtaggaactatgtgcgatcctaaacgttcgtgctccgtgatcgaagatgatgggctgccaagtgcgtttaccactgcccacgagttgggacatgtgtttaacatgcctcacgataatgtcaaggtgtgcgaggaggtgtttgggaagctgagagcaaatcacatgatgtcgcccaccttaatccagatcgatcgggccaatccatggagcgcgtgtagcgccgctataattacagacttcctagacagcgggcatggcgattgcctgctcgaccagcccagcaagccaatatctttgccagaggatctgcctggagcctcttataccttaagccagcagtgtgagctggcatttggcgtgggtagtaagccctgcccgtacatgcagtattgcactaaattgtggtgcaccgggaaggctaaggggcagatggtttgtcagacccgtcattttccttgggccgatgggacgagttgtggcgagggtaaattatgcctcaagggtgcttgtgtcgaacggcataaccttaataaacaccgcgtggacggatcttgggctaaatgggatccctacggcccgtgtagcagaacttgcggggggggcgtgcaattggccagaagacaatgcaccaatccaactcccgcaaatgggggcaagtattgtgagggtgtacgtgttaaatatcgaagttgtaatctggagccctgccctagctctgcatcagggaaaagtttccgcgaagaacaatgcgaagcctttaatggatataaccactcaactaaccgacttactctggcagtggcgtgggtacccaaatatagcggagtcagcccccgcgataaatgtaaactcatctgccgtgctaacggcactggctacttttatgtgctagccccaaaagtggttgatggcacactgtgctctcctgattccaccagcgtttgtgtacagggaaagtgtatcaaggctggttgtgatggcaaccttggaagcaagaaaaggtttgacaagtgcggcgtgtgcggaggggataataaatcgtgcaaaaaggtcacaggccttttcacgaaacctatgcacggctataacttcgtggtagcgattcctgctggggccagttctatcgatattcgtcagcgcgggtacaagggattgattggagatgataactacctagccctgaaaaattcccagggtaaatacctgcttaacggccattttgtggtttctgccgtagagcgggacttagtcgtcaaaggcagcctccttcggtacagtggtacaggaaccgcagtggagtctctacaggctagccgacccatcttggaaccccttacagtcgaggtgctctctgtgggtaagatgactccaccgagagtgcgctattccttctatctgccaaaggaacctcgtgaagataagagctcacacccaaaagacccaagaggtccctcagtactccacaactctgtcctgagcctttcaaatcaggtggagcaacctgatgacagacccccggcccgctgggtggcaggttcatggggcccttgctctgcctcctgcggatcaggtttacaaaagcgggctgtagattgccgaggcagcgccggccagaggactgttccagcatgcgatgcagcccaccggcctgtggaaactcaggcctgtggagaaccatgccctacatgggaattaagcgcttggtctccctgcagcaagtcctgtggccgtggctttcagcggcggagtcttaaatgcgtcggacacggcggacgactgctcgctcgagaccagtgcaaccttcacaggaagccacaagagctagacttttgcgttttacgaccgtgctag

SEQ ID NO: 12031 - RNA, 1521 nt, synthetic construct
  misc_feature 1..1521: note = source = /note="Description of Artificial Sequence: Synthetic coding sequence"
  source 1..1521: mol_type = other RNA
atgacaagcaagcctcatagcgactggatcccatactcagtcctggacgatgaggggcgcaatctccgtcagcaaaaattggatagacagagagcactcttagaacagaaacaaaaaaaaaagcgccaagaacccctgatggtgcaggctaatgccgacggaaggcctcgttcacgaagggcaaggcagagcgaagaacaagcacctctggtggagtcatatttaagcagctcagggagcacgtcataccaagtgcaggaagccgacagtctcgcatcagtccagcttggtgcaaccagacccacggcaccggcgtcagcaaaaagaacaaaggcagccgctacagctgggggccagggcggagcagcacggaaagaaaaaaaaggaaaacacaagggtacctctggcccggccgccctggccgaggacaaaagtgaggcacaaggacctgttcaaattttgacagtgggacagtctgaccacgcacaggacgccggtgagactgctgccggtgggggcgaaagacccagtgggcaggatctcagagctaccatgcagcgcaaggggatttcttctagcatgtccttcgacgaggatgaggaagatgaagaggagaattccagttccagcagtcagttaaactctaacacaaggccatcatcagccacatctcgcaagagtgtcagagaagccgccagtgcgcctagccctaccgcccctgagcagcctgtcgatgtggaagtgcaggacctcgaggagttcgcacttagacccgcccctcaaggaattactatcaaatgcaggatcactagagataaaaagggaatggatcggggcatgtatcccacatattttctgcacttggacagggaagatggaaaaaaagtattcttgctggccggtaggaagaggaaaaaatcaaaaaccagcaactatcttatctccgtagatcctacggacctcagcagaggcggggacagttacattggaaagctccgaagcaacctcatggggaccaaatttacggtctacgacaacggtgtgaatccccagaaagctagttcatctaccctggaatccgggacattacggcaggaactcgctgctgtatgctacgaaacgaacgttctcgggtttaaaggcccaagaaaaatgtcagtcatcgtccctgggatgaacatggtccacgaacgagtgagcatccgccccaggaacgagcacgagactctgctcgcccgctggcagaacaaaaacacagagagcattattgaactccagaataaaacacccgtttggaatgacgacacccaaagctatgtcctgaactttcatggccgggtgacccaggcctccgttaaaaatttccagatcatacacggaaacgaccctgactatattgttatgcaatttggaagagtggctgaggatgtgtttactatggattacaactatcccttatgtgcactgcaagcctttgctattgccctgtctagttttgactcaaaattagcctgtgagtag

SEQ ID NO: 12032 - RNA, 594 nt, synthetic construct
  misc_feature 1..594: note = source = /note="Description of Artificial Sequence: Synthetic coding sequence"
  source 1..594: mol_type = other RNA
atggctaagaatgggctcgtgatctgcatcctcgttattacattactgttagaccaaactacctctcacacatcacggctaaaagctagaaaacacagcaagcgtcgggtaagggacaaagatggtgacctgaaaacgcagattgaaaagttatggaccgaggtgaatgcgctgaaagagatccaagctctccagacagtatgcctccggggcacaaaggtacacaagaaatgctacctagccagtgaagggctaaaacacttccacgaagctaatgaagactgtatcagcaaaggtgggatattggtgattcctaggaactctgatgagattaatgcactgcaggactacgggaagagaagtctcccaggggtgaacgatttttggcttggaattaatgatatggtgaccgaaggaaagtttgtagatgtgaacggtatcgccatctctttcctgaactgggatagagcccagccgaatggaggtaaaagggagaactgcgtccttttctcccaatcggcccagggcaaatggtctgacgaagcatgtcgcagcagcaaacgttatatctgcgagttcactatacctcagtag

SEQ ID NO: 12033 - RNA, 2424 nt, synthetic construct
  misc_feature 1..2424: note = source = /note="Description of Artificial Sequence: Synthetic coding sequence"
  source 1..2424: mol_type = other RNA
aaaaaaaagcggaaaatctccctgctacctaaaccacctaaacacgacgccccacttacaattgaattcccaaacctcgacaagacatcagccgagtggctcaaagtgaatggactgaaagcaaaaaaactgagtttataccaagttctcgcacccaatgcgttcagccctgtggaagaatttgtgcccattttgcagaaaaccgtcagttctaccattcacgagaaggcaatgatccagtttgagtggcatgatggcaccgttaaaaacatacatgttgatccacctttcctatataaatatcagcaacagctgtcccgagccatgcggatgtacgaacggagaatcgagtggctctcactggcgtccagacggatctggggaactgtctgcgaaaagcgcgtggtggttctgttggacatttcagctactaatagcatgtatatcattcacattcagcactctctacgactcctgcttgaggagcagctctcaaataaggactgtttcaatctcattgcctttggatctacaatcgaatcctggagacccgaaatggtaccagtatcccacaataatctacagagcgcttggagatgggctctgaaccttcgatgtagaggtagccggaatgtgctgagcgcacttcgaaaagcagtggaggtggattttaaagacaaggacaaacaccagtcccaagggatttacctctttacgggcgggattccagatcaggacatgccaaccctgagtgcgtacatggctgaggcttgtggtggatgtgacctgcagctaaatgtttgcttgttctatgtgggcgagccaaagatggatactacaccacccgctaggtacgcttctcacacagataccgccgccgcatacaaggaggtgacccgcgccgcgggcgggcggttccattggttcggcgatacaggcatctacgagtccgacgatatcaactcaattatgtctgagatggaaaaagctttgaactactctcagaagtgtgcatttctgatggcatcactgaagaatcattcaggtaaagtcctcggaagctcagctctccctaaagaaaagccaaagacactgcaactgcggtcgcaacctaagaagttgtgccctcctaggcccaccgtcccactgggggctaggatgtcaattaaagacgatccagaccgagagaagagcccacccctgaaatctttgaagtggcgacccctgagtagtcgggttggcatcagtccagccgcagcgcagccgacgaaggagggtatgatggagctcagacggaaaactaaatcccgcgaagctgaaacctctctcctcctgttttatactgaaaaaggtaacgacgtcggaagtgtatacaaaaaatatccccagggcaggggcttacggcggacaagctcctcgatcgacctccctcgtaaagacacggtgtgctcctcccaagagtgggtcgcgaaatacgggctaaagaagctgaaactagaaatctctcgctgcatgggccccaattgcacccatcagaagtctgggcagcgatcggcaagcgcaaagcattgttctattttcccctctgtagagattcacggtgtagtgcggcatattcagtggactccaagagaaatggaggtatatatccggcacctcgagaaggtactgaggaggtacgtacagcgtttgcagtggttgctgagcggcagccgaagattgttcgggaccgttctggaaagcaaggtgtgtattctgcttgatacatccggaagcatgggcccctatcttcaacaggtgaagacagagctcgttctgctgatctgggaacagctgaggaagtgctgcgattccttcaacctgttatcatttgctgaatccttccaatcctggcaggatactttggtcgagactaccgatgctgcttgtcacgaggccatgcaatgggtaacacacctgcaggctcagggaagcacatccattctgcaggctctgttaaaagctttctcttttcacgatctcgagggcttgtatctcctgaccgatgggaaaccagacacgagttgcagccttgtgcttaatgaggtacagaagctcagagagaagcgtgacgtcaaagttcacaccatctctcttaactgctccgatagagctgcggtagagttcctccggaagttggcttcattcacaggcggtcgctaccactgccctgtgggcgaagacactctgtccaagatccactccctgcttaccaaggggttcataaatgaaaaagacccaacactcccgccatttgaaggcgatgacctgaggatcttggcacaagagattaccaaggctcggtcctttctttggcaggcacagtcattcaggtcgcaactccaaaagaagaacgacgcggagccgaaggttaccctctcctag

SEQ ID NO: 12034 - RNA, 639 nt, synthetic construct
  misc_feature 1..639: note = source = /note="Description of Artificial Sequence: Synthetic coding sequence"
  source 1..639: mol_type = other RNA
atggtgtcacgtatggtcagtactatgttatccggtttactcttttggctagcgagcggctggacacctgcgttcgcctactcccctagaactcccgacagagtgagtgaagctgacatacagaggctgttgcacggcgtgatggagcaacttgggattgcccggccgagagtcgaatacccggcacaccaggccatgaacctggtcggtccccaatccatcgagggcggagcgcacgagggccttcagcatctcggcccttttggaaatatcccaaacatcgtggctgaacttacgggcgataacatccctaaggacttttccgaggatcaaggatatcccgacccaccaaatccctgccctgtcggaaagaccgcagacgacggttgtctcgagaacacccccgataccgcagaattctctagagaatttcagttgcaccaacacctcttcgatccagagcacgattaccccggtttggggaaatggaacaagaagcttctgtacgaaaaaatgaagggaggagagagaaggaagagacgatctgtaaatccttacctacaagggcaaaggctggataacgtggttgctaaaaagtctgttccgcacttctccgatgaggataaggacccagagtag

SEQ ID NO: 12035 - RNA, 1524 nt, synthetic construct
  misc_feature 1..1524: note = source = /note="Description of Artificial Sequence: Synthetic coding sequence"
  source 1..1524: mol_type = other RNA
atgtgtaccaagacaattccagtgctttgggggtgcttcctgctgtggaacctttacgtgtcgagctcccaaactatttaccctgggatcaaagctcggattactcaacgtgccctcgattacggagttcaggctgggatgaagatgatcgaacagatgctgaaggaaaagaagctaccagacctctctggatctgagagcctagaatttttgaaggttgactacgtaaactataatttctcaaacattaaaatctcagcctttagcttcccaaacacctctctcgcatttgtccctggcgttggaatcaaagcattgacaaatcacggcactgcgaatatctcaacagattggggattcgaatctccactcttccaggacactgggggcgctgacctgttcttgagtggtgtgtactttactgggattatcatcctgacaagaaacgacttcggccatcctactttaaaactgcaagactgttacgctcagctttcacacgcccacgtgtcatttagcggcgaactctccgtcctatataattcttttgccgagccaatggaaaaacctatccttaagaacttgaatgagatgctttgcccaattatcgcatcggaagttaaagccctgaacgctaatctgagtactctggaagtattgacaaaaatcgataactacaccttgctggattattcgctgatttctagcccagagataaccgagaactacctggatttgaatctgaaaggcgtgttttatcccttagagaacctgacagaccccccgttttcacccgtcccctttgtgttgccagagagatcaaattctatgctttatattggaattgccgaatacttcttcaagagcgcctcctttgcacacttcaccgccggagtgtttaatgtcacactgtccaccgaggagattagcaatcatttcgtgcaaaattcccagggactaggcaatgtactgagccgcatagcagagatctacattctctctcaaccctttatggtgagaatcatggccacagagccacctatcatcaatctgcagccaggcaacttcaccctggacattcccgctagcataatgatgcttactcaacccaaaaactctaccgtggagacaatcgtgagtatggacttcgtggcctctacctcagtaggcttggtgattcttggccagcggcttgtctgtagtcttagtcttaataggtttcgactggctttgcctgaatcaaaccggtctaatattgaagtgctgcgctttgaaaatatcctgagtagtatcctgcattttggcgtcttaccgctcgcaaatgccaagctgcagcagggctttcctctctctaacccacataaattcctgtttgttaattccgatatcgaggtgctggagggctttcttctcatcagcactgatctgaaatatgaaacatcttccaaacagcagccaagctttcacgtctgggaaggactcaatttaatcagtcgtcagtggcgtgggaaatcagccccatag

SEQ ID NO: 12036 - RNA, 474 nt, synthetic construct
  misc_feature 1..474: note = source = /note="Description of Artificial Sequence: Synthetic coding sequence"
  source 1..474: mol_type = other RNA
atgcatccctggctggggtctgcccttggctttcctaagtgtagggggatacacctgtgcgcatgcggtaacggttggacacctggtgaaacactttctcagaataagacggaaataacaaagaataaggtcacatgttggagaccccatggctgtgagcctaacacgggcctcggctatcaaggatcccacacttctaagtataccctgctgccttggaacctgctcaagacaaagccactgccccccagccacggcaaggaaggcggcaaagaggctaaagtacctagtggtgataacagtggcagaggcgaagtaccacgggcacaggaagggcaagccgcttgcggcagagccgcttctggcgactcccaagagggaatgagaagagggtacgaggaacgcgctaccgctcagcgtcccgccgtgagaagcgcagagactactgctcacgggacctggatctacccctag

SEQ ID NO: 12037 - RNA, 213 nt, synthetic construct
  misc_feature 1..213: note = source = /note="Description of Artificial Sequence: Synthetic coding sequence"
  source 1..213: mol_type = other RNA
atgtccaacaatatggctaagattgccgaggccaggaagaccgtcgaacaactcaaactggaagtgaacatcgaccgaatgaaggttagtcaggctgcagcagaactcctcgctttttgcgagacccatgccaaagatgaccctttagttacccccgttccagccgcagaaaacccattccgcgacaagagactcttctgtgtactgctgtag

SEQ ID NO: 12038 - RNA, 645 nt, synthetic construct
  misc_feature 1..645: note = source = /note="Description of Artificial Sequence: Synthetic coding sequence"
  source 1..645: mol_type = other RNA
atggctctgttgctgtgtctggtttgcttaactgccgcattggcccacggatgcttgcactgccattccaacttttctaaaaagttctcattctacagacatcacgtcaattttaagtcatggtgggtaggggatataccggtctcaggggctcttctaactgactggtcagatgacaccatgaaggagttgcacctggctattcccgccaaaatcacaagagaaaaattagatcaggttgccaccgctgtgtaccagatgatggaccagctatatcagggaaaaatgtactttccaggatatttccccaacgagctcaggaacatctttcgggagcaggttcacctcatacaaaacgcaatcatcgagagcagaatcgactgccagcacagatgtggaatcttccagtacgagacaatctcatgcaacaactgcacagatagccacgttgcatgtttcggttataattgtgagtcttccgcccaatggaaatctgcagtacaaggactgctgaactatataaataattggcataagcaggacacatccatgtccctggtgagccccgctctccgttgtctcgaacccccgcatttagccaaccttacgctcgaggatgcagccgaatgtttaaagcaacattag

SEQ ID NO: 12039 - RNA, 459 nt, synthetic construct
  misc_feature 1..459: note = source = /note="Description of Artificial Sequence: Synthetic coding sequence"
  source 1..459: mol_type = other RNA
atgtcccctcacctcactgcactgctgggtctggttctttgtctggcacaaactatccatacacaagagggggctctaccgaggccatccattagtgcagaacctggcacagtgatctcccctggcagtcatgtcacctttatgtgccgagggccagtgggagtgcaaacgtttcgtctggaacgagaagatagggccaaatacaaagatagttacaacgtgtttcgcttgggaccttctgaaagcgaagccagatttcacattgacagtgtctctgaaggaaatgccggattatatcgttgtctgtattacaaacccccaggatggtcagaacactcagattttctggaactgctcgtcaaagaaagctccggaggaccagattctcccgacactgagccaggctcatctgctgggactgtaccgggcacagaggctagtggattcgatgcgccctag

SEQ ID NO: 12040 - RNA, 900 nt, synthetic construct
  misc_feature 1..900: note = source = /note="Description of Artificial Sequence: Synthetic coding sequence"
  source 1..900: mol_type = other RNA
atggcaccatggtcccacccatcagcccagcttcaaccagtagggggcgatgctgtctctccagctcttatggtgctactgtgtctcggcctttcactcggaccaaggacccacgtccaggcaggcaatctgagcaaagcaactctgtgggccgaaccaggatcagtgattagtaggggcaacagcgtcactatccgttgccagggtacactcgaggctcaggagtatagactagtgaaggaaggaagccccgaaccttgggacactcagaatcccctagagcccaaaaacaaggcgcgcttctccatcccgtcaatgactgaacaccacgcaggcaggtatagatgctactattattcaccagcaggttggtccgagccttcggatccattagaattggttgtcaccggcttttataataaacccaccttgagtgccctccccagcccagttgtgaccagtggagaaaatgtgaccctgcagtgcggtagtcgccttcgattcgaccgcttcatccttaccgaggagggagaccataagttgagctggacactcgactcacagttaacaccttcaggtcaatttcaagcacttttccccgtcggtccagtcacacctagtcacagatggatgctcaggtgttatggcagccgcaggcacatcctgcaggtgtggtccgaacccagtgacctgttagagatacctgtttcgggcgccgccgacaacctaagccctagccagaacaaatctgattccggaacggcttctcatctccaggactatgcagtggaaaacctgatcaggatgggaatggccggccttatcctggtggtactgggcatcctcatcttccaggattggcattcccagaggagcccccaggcagccgcagggcgttag

SEQ ID NO: 12041 - RNA, 618 nt, synthetic construct
  misc_feature 1..618: note = source = /note="Description of Artificial Sequence: Synthetic coding sequence"
  source 1..618: mol_type = other RNA
atgaaggttctgctgctcacagggctcggtgcacttttctttgcatactactgggacgataattttgatccaggcggactggattacctcgtgctgaaccatattggcggtgctcccgccggcacccgtgctcgcagtccccaggccacccgatggctgatgcaagtgaacttcgtctcctacgtccaattgacatcacgtgcactccctagcttaaccgattctaagggctcactagttgtcgtgtcttccctgttaggccgggtccctacctccttctcaacaccatattctgctgctaaatttgccctggatggcttctttggaagcctccgccgggagttggacgttcaagacgtaaacgtcgcaattactatgtgtgtgctagggcttagggatcgggcttcagccgccgaagccgttcgtggcgtcacccgcgttaaagccgctcctggccccaaggccgcactggccgttattagaggaggcgctacccgtgcagccggagttttttacccttggaggtttcgtcttctatgcctgttacgacgatggctacctaggcctcgggcttggtttattagacaggaactgaacgtgactgccgccgcagcgtag

SEQ ID NO: 12042 - RNA, 795 nt, synthetic construct
  misc_feature 1..795: note = source = /note="Description of Artificial Sequence: Synthetic coding sequence"
  source 1..795: mol_type = other RNA
atgctgcgctgcggcggccggggcctattgcttggacttgctgtggctgccgctgctgtaatggccgctcgtcttatggggtggtgggggccacgcgcaggctttagattattcattcccgaggagcttagtagatatcgcggcgggcctggagatcctggactgtacctggcattactcggtagagtgtacgatgtgagttctgggagacgacattatgaacctggcagtcattattccggattcgccggtcgagacgccagcagagcatttgtgaccggtgattgttcagaggcaggcctggtcgatgacgtaagtgacctgtcagcagccgagatgctaaccctgcataactggctgtccttttacgagaagaattacgtttgcgtcgggcgggttaccggaagattttatggagaggacgggcttcccacacccgcactcacacaagtcgaagcagcaatcacgagggggctggaagctaataagctccagttacaggagaaacaaaccttcccaccctgcaatgccgagtggagttcagcaagaggctcacggctgtggtgttctcagaagagtggcggcgtttccagggactggattggggtgccaaggaagctgtacaagccaggagcaaaggagccgcggtgtgtgtgcgttcgaaccactggccccccatccgggcaaatgcctgacaatccaccccaccgcaatcgcggggatcttgaccacccaaatctcgctgaatacaccggttgccctcctctcgcaataacatgttcctttcccctgtag

SEQ ID NO: 12043 - RNA, 468 nt, synthetic construct
  misc_feature 1..468: note = source = /note="Description of Artificial Sequence: Synthetic coding sequence"
  source 1..468: mol_type = other RNA
atgtctaaacgattactgctgctgctgctgctgtccatgggagggacatgggccagcaaagaaccactccgccctcgctgtcgtccaatcaacgcaaccctcgctgtagaaaaggagggatgccccgtgtgtattaccgtgaacacaacaatttgtgccggttactgtcctacaatgacaagagttcttcagggggtactccccgccctgccccaggttgtctgtaattatagggacgtgcggtttgaatctatacgtctcccaggatgtcctagaggggtgaatcccgttgtgagttatgctgttgctttaagctgtcagtgcgcattatgtcgcagatccacaaccgattgcggcgggccaaaagatcacccactgacatgcgacgatccaaggttccaagattcaagttcatccaaagcaccaccgccctcacttccaagcccttcgcgcctccctggaccatag

SEQ ID NO: 12044 - RNA, 498 nt, synthetic construct
  misc_feature 1..498: note = source = /note="Description of Artificial Sequence: Synthetic coding sequence"
  source 1..498: mol_type = other RNA
atggaaatgttccaaggattgcttctgctcttactgctcagtatgggtggcacttgggcttcaaaagaacctcttagacctaggtgcagaccgataaatgctacactggccgtcgaaaaggaaggatgtcctgtgtgtattaccgtaaacacaacaatttgcgccggctattgcccaaccatgacccgggtcctccagggtgttctgcccgctctgcctcaggtcgtttgcaactatagagacgtgcggttcgagtctattagattgcctggctgtccccggggagtgaatcccgtcgtaagttatgccgtcgcactatcttgccaatgcgccctgtgcagaagatcgaccacagactgtggtggtccaaaggatcacccactgacatgcgacgatcctagattccaagatagctcctcatccaaagccccaccccctagtctgcctagtccatcccgactccccggccctagcgacacacctatcttaccacaatag

SEQ ID NO: 12045 - RNA, 990 nt, synthetic construct
  misc_feature 1..990: note = source = /note="Description of Artificial Sequence: Synthetic coding sequence"
  source 1..990: mol_type = other RNA
atgctgcctctgttgctggggctgctgggccctgctgcttgctgggccctcggaccaaccccagggccaggctctagcgagttacgttccgccttctctgctgctaggacaacccccctggaaggtacaagcgagatggctgtcacattcgacaaggtttatgtcaatattggcggcgactttgatgtggctaccgggcagttcaggtgtagggtgcccggggcatattttttttcttttaccgccggaaaggcaccacacaagagtctttcagttatgcttgtgagaaaccgcgacgaggtacaggctctggcatttgatgaacagcggaggccaggtgctagacgtgcagcctcccagtccgcgatgctgcagctcgattatggggacacagtctggctcagactacacggagcaccacagtacgctttaggcgctcccggggccactttcagtggttatctcgtgtacgcagacgccgatgcagatgccccagcccggggaccccccgccccaccagagccgcgctctgccttttctgcagcccgcaccagaagcttggtcggttcagacgctggaccagggcctcgccaccagccattggccttcgacacggagtttgtcaatatcggcggtgacttcgatgccgccgccggagtgttcaggtgcagacttcctggcgcctacttcttttcttttacattgggtaagctgcccagaaaaactctttccgtgaagctcatgaagaacagagatgaggttcaggctatgatctacgatgatggggcctcccgaaggcgcgaaatgcagagtcagtccgtaatgctagcgctgaggcgcggggatgcagtgtggcttctctcgcatgatcatgacggttatggggcttattccaaccacggcaagtatatcacattctccggctttttggtctatcccgacctggctccggctgctcctccaggtttgggggctagtgaactgctctag

SEQ ID NO: 12046 - RNA, 873 nt, synthetic construct
  misc_feature 1..873: note = source = /note="Description of Artificial Sequence: Synthetic coding sequence"
  source 1..873: mol_type = other RNA
atgaggagacctgcagccgtgccactgctgctcttactatgtttcggatctcagcgggctaaagcagcaacagcttgtggccgtcctcgtatgctgaataggatggtgggtggtcaggacactcaagagggagaatggccttggcaggtctcaatacaacggaacgggtcccatttttgtggtggctccttgatcgccgaacagtgggttctaaccgccgcccactgctttaggaacacctccgagacatctctctaccaggttcttctgggagcaagacagcttgttcagcctggacctcacgccatgtacgcgcgggtacggcaggtagaatcaaatcccttatatcaagggacggctagttccgctgacgtcgcactcgtcgagctcgaggcacctgttcccttcaccaattacattctccccgtctgcctccccgatccttccgtaatcttcgagacaggcatgaattgctgggttaccggctggggatctccctcggaagaggatttgctccccgaaccccggatcctccagaagctggccgtacccataatcgatacccccaagtgcaacctgctttattcgaaggataccgaatttggctatcagcctaagacgattaaaaacgatatgctttgtgcaggttttgaggagggaaaaaaggatgcttgcaaaggtgactcgggaggaccattagtgtgcttagttggacaaagttggctccaggcaggagtgataagttggggagagggctgcgccaggcagaacagaccgggagtctacattcgcgtaacagcccatcacaactggatccatcgcatcatcccgaagctccagttccaaccagccagattagggggacaaaaatag

SEQ ID NO: 12047 - RNA, 792 nt, synthetic construct
  misc_feature 1..792: note = source = /note="Description of Artificial Sequence: Synthetic coding sequence"
  source 1..792: mol_type = other RNA
atggcattcttatggcttctgtcctgttgggctctgctgggtacaacattcggctgcggagtgcctgccatccatccagtactctccggcttgtcccgtatcgtgaacggagaagacgctgtgccaggatcttggccatggcaggttagcctccaggacaaaacagggtttcacttctgcggcgggtcactaatcagcgaggattgggtggtgacagcagcacattgcggagttagaactagcgatgtggtcgtcgccggcgagttcgaccagggttccgatgaagaaaatatacaggtgctcaagatcgccaaagtctttaaaaatccaaagttctctatactcactgtgaataacgacatcactctactcaagttagcaactcccgcacgattctctcagaccgtatccgccgtgtgtctgcccagtgctgatgatgacttccctgctggaactttatgtgctacaaccggatggggaaaaacaaagtacaatgccaacaaaacacccgacaagctccaacaagcggctctacccctcctgagtaatgccgaatgcaagaaatcgtggggtaggcgcataactgacgtgatgatttgcgccggagcttcaggggtatcttcgtgtatgggcgacagtggcggcccattagtgtgtcagaaagacggggcatggacactcgtcggcattgtgtcttggggttctaggacttgcagtacaactacaccggctgtgtatgcccgcgtggcaaagctgatcccatgggtgcagaagatcttagcagcaaattag

SEQ ID NO: 12048 - RNA, 228 nt, synthetic construct
  misc_feature 1..228: note = source = /note="Description of Artificial Sequence: Synthetic coding sequence"
  source 1..228: mol_type = other RNA
atgggagctgccataagccagggagctttaattgccatagtttgtaacggcctggtggggttcctccttttgctgctctgggttatcctgtgttgggcttgccactcccggtcagctgatgttgatagcttgtctgaaagtcgcacacaggaatctgcatgtctcgagcttgatcccgccgcccaatccctcgcctcattagcccctatcggtgctcagtggccctag

SEQ ID NO: 12049 - RNA, 762 nt, synthetic construct
  misc_feature 1..762: note = source = /note="Description of Artificial Sequence: Synthetic coding sequence"
  source 1..762: mol_type = other RNA
atggccaggagtcttttacttcccctacagattttgctgctgtcactggccctcgagactgcaggagaagaagcacagggagacaaaattattgacggagcgccctgtgcccgaggatcccacccttggcaggtcgccttattgtccggcaatcagctacactgcggaggtgtacttgtgaatgagcgttgggtcttaaccgccgcccactgcaaaatgaatgaatacacggtgcatctcggctcagataccttaggcgaccgccgtgctcaacgcataaaggccagtaagagcttccgccatcccggatacagtacccagactcacgtcaacgatttaatgctcgtcaaacttaactcgcaggcccgactgagttctatggtgaaaaaagtccgactccctagccgctgcgaacctcccggtaccacctgcactgtctccgggtggggtacaactacatccccggacgttacttttccgtctgacctgatgtgtgtagatgtcaagctaataagtcctcaggactgcactaaagtgtacaaggacctcttggaaaactcaatgctttgtgctggaattcccgattcaaaaaaaaacgcctgcaacggcgattcaggaggccctctggtctgccgaggaactctgcagggccttgtgtcttgggggaccttcccctgcggacagcccaatgaccccggagtgtatacccaagtttgcaagtttacaaagtggatcaacgatacgatgaaaaagcatcgctag

SEQ ID NO: 12050 - RNA, 480 nt, synthetic construct
  misc_feature 1..480: note = source = /note="Description of Artificial Sequence: Synthetic coding sequence"
  source 1..480: mol_type = other RNA
atgaaggcttgggggacagtcgtggtgacgctggctacactaatggtggttacagttgatgccaaaatttacgaaagatgtgagctggccgcgcgattagagagagctgggctcaatgggtataagggatacggcgttggagattggttgtgcatggcccactatgaatcggggttcgacactgcctttgtggaccacaacccagacggaagcagtgaatatgggattttccagctgaattccgcctggtggtgcgataatggaataacacctacaaagaacctgtgccatatggattgccatgatctgctcaacaggcacatcctcgatgacatacgttgtgcaaaacaaattgtttccagtcaaaatggcctgagtgcgtggacaagttggagattgcattgttctggccacgatctgagtgagtggctgaagggctgcgatatgcacgtgaaaatcgaccctaaaatacatccttag

SEQ ID NO: 12051 - RNA, 501 nt, synthetic construct
  misc_feature 1..501: note = source = /note="Description of Artificial Sequence: Synthetic coding sequence"
  source 1..501: mol_type = other RNA
atggcacaaacaaactctttctttatgctgatctccagtctgatgtttcttagcttgtctcagggccaggagtcgcaaactgaattgcccaaccctcgaattagctgtcccgagggtacgaatgcttaccggagctattgctactactttaatgaagatcctgaaacttgggtggatgccgatctgtattgtcagaacatgaattcaggtaaccttgttagcgttctcacccaggccgagggtgcctttgtggcttctctgatcaaggaatctagtaccgatgactctaacgtgtggatagggttgcacgatcctaaaaagaatcgccggtggcactggtcgtctggatctctggtatcgtacaaaagctgggacacagggtcaccaagttccgcaaacgcaggctattgcgcttctttgacatcctgcagcgggttcaaaaaatggaaggatgaatcatgcgagaagaagttcagctttgtttgcaaattcaagaattag

SEQ ID NO: 12052 - RNA, 528 nt, synthetic construct
  misc_feature 1..528: note = source = /note="Description of Artificial Sequence: Synthetic coding sequence"
  source 1..528: mol_type = other RNA
atgcttcctccgatggcgctaccaagtgtgtcgtggatgttactctcctgtcttatgctattgtcccaagtgcaaggcgaggaacctcagcgagaactgccctcagctcgcatccgctgtccaaaaggtagcaaagcttatggatctcattgttatgcactcttcttgagccctaaatcctggactgacgccgatctcgcatgccagaagcggccatccgggaacttggtcagcgtgttgagtggtgccgaagggtcattcgtatcctcactggtaaagagtataggtaacagctactcatatgtttggatcggcctgcacgacccaactcaggggaccgaaccgaacggagaaggctgggagtggtcttccagtgacgtgatgaattatttcgcctgggagagaaacccatcgacgatctcctcccctggccactgtgccagcttgtcccggagtaccgcgtttctgagatggaaagattataattgcaacgtcagactgccctatgtttgcaagttcactgattag

SEQ ID NO: 12053 - RNA, 1686 nt, synthetic construct
  misc_feature 1..1686: note = source = /note="Description of Artificial Sequence: Synthetic coding sequence"
  source 1..1686: mol_type = other RNA
atgggggcgcgtacaccactcccgtctttttgggtgagttttttcgcagagaccggaattctttttcctggaggcacgccatggcctatgggatcacaacactccaagcaacaccggaaacctgggcctctgaagcgaggacatcggagagacaggaggacaacacgcagaaaatactggaaagaaggccgcgaaatagcaagagtcttggacgatgagggccggaacctgagacagcagaagttagacaggcaacgagccttgcttgagcaaaaacagaagaagaagcggcaggagcccctgatggtacaggccaacgcagacgggcggccccgctccaggcgagcccgtcaatccgaagagcaggcgccgctggttgaaagttacctcagcagctccggatctacatcttaccaggtgcaggaagcagactcactcgcaagcgtacagcttggcgctactcgtcccacagctcctgcatccgcgaagcgcacgaaggcagctgcaacagcgggcgggcaaggcggagccgcccgtaaggagaagaaaggtaagcacaagggcacgtctgggccagctgctctcgcagaggacaagtctgaagcccagggaccagtccagatcctgactgtgggccaatcagatcacgcccaggacgccggggaaactgctgcgggggggggagagcgcccctctggccaggacctccgcgccaccatgcaacgcaagggaatcagctcatcaatgtcatttgacgaagacgaggaggatgaggaggagaatagcagcagctcctcccaactgaattcgaatacccgtccttcctccgcaacaagtaggaaaagtgttagggaggctgcttctgctcctagccccactgctcctgagcagcctgttgatgttgaggttcaagacctggaggagttcgcgttaaggcctgctccacaggggatcacaattaaatgcagaattacaagggataaaaaaggaatggaccgcggcatgtaccctacgtatttcctccacttggaccgcgaagacggaaaaaaagtatttctcctggccggcagaaaacgtaaaaaaagcaagacctctaactacctgatatctgttgaccctaccgacctgtcaagaggcggagattcttacatcggcaaactacgatccaaccttatgggcactaagttcaccgtctatgataacggcgtaaaccctcagaaggcttcttcgagcacgctcgagagcggtacgttacgccaggagctcgccgccgtgtgttacgagactaatgtgttgggctttaaaggtcccagaaagatgtcagttattgtgcctggaatgaacatggtgcacgaacgcgtttccatccgacctcgcaatgagcacgaaactcttttggctaggtggcagaataagaatactgagtctatcattgagctgcagaacaagactccagtgtggaatgacgacactcagagttacgtcttgaatttccatggcagagtgactcaagcatccgttaagaacttccagattattcacggtaatgatcccgactacattgtgatgcaatttggccgcgttgcggaagatgtgtttactatggattacaactaccctttatgcgctttacaagcgtttgctattgcattaagctccttcgattctaagctggcttgcgagtag

SEQ ID NO: 12054 - RNA, 1272 nt, synthetic construct
  misc_feature 1..1272: note = source = /note="Description of Artificial Sequence: Synthetic coding sequence"
  source 1..1272: mol_type = other RNA
atgatgtacagacccgacgtggtacgagcaagaaagcgcgtttgctgggagccatgggtgattggactggtcatattcatttctttgatcgtgctcgccgtgtgcatcggattgaccgtacactacgtcaggtataatcaaaaaaaaacctataactattattcgactctgagcttcacaactgataaactttatgctgagttcggccgggaagcctcaaacaattttactgagatgagccaacggttggaatccatggtgaagaatgcattttacaaatcacccctacgcgaagagttcgtgaagtcacaggtcatcaaattctctcaacaaaaacacggagtcctggcacacatgctgctgatctgcaggtttcactccaccgaggaccccgaaaccgttgataagatcgtccagctagtcttgcatgagaaacttcaggacgcggtagggccccccaaggtcgacccacactctgtaaaaataaaaaagattaataagactgaaactgactcatacctgaatcactgctgtggtacacgccggtcaaaaactctaggtcagtcactaagaattgtcggggggacggaggtagaggaaggggaatggccctggcaggcttcacttcagtgggatgggagtcaccggtgcggagccacactgattaatgctacctggctggtgtctgccgcacactgctttacaacctacaaaaacccagctcggtggactgcttcctttggggttacaatcaaacctagcaagatgaaacgggggcttcgtcgcataatcgttcacgaaaagtacaaacatccatcccacgattacgatatatccctggctgaattaagctcccccgtgccatacacaaacgcggtgcaccgggtgtgtctgccagacgcatcctacgagtttcaaccaggtgacgtaatgtttgtaactggcttcggcgctttgaagaacgacggttactctcagaaccatctccgccaggctcaggtaacactcatagacgccactacttgcaacgagcctcaggcatacaacgacgctatcacaccaagaatgctgtgtgcaggtagtttggaaggcaagacggatgcctgtcagggagacagtgggggccctctcgtttctagtgacgcgagagacatttggtatctcgccggcatagttagctggggcgacgagtgcgccaagccaaacaagcctggcgtatacacacgcgtgaccgccctgagggactggatcacctctaaaaccggtatttag

SEQ ID NO: 12055 - RNA, 282 nt, synthetic construct
  misc_feature 1..282: note = source = /note="Description of Artificial Sequence: Synthetic coding sequence"
  source 1..282: mol_type = other RNA
atgaagcctgtgctgcccctgcaattcctcgtcgtattttgcctggccctccagcttgtgcctggatcacccaagcaacgcgtattaaagtacatcctcgaacctcctccgtgtatctccgctcccgaaaactgcactcacctgtgtaccatgcaagaggactgcgaaaaaggattccagtgttgttcatcattctgcggtattgtgtgttccagtgaaaccttccagaaaagaaaccgcataaagcataaaggctcagaggtgatcatgccggcaaactag

SEQ ID NO: 12056 - RNA, 1530 nt, synthetic construct
  misc_feature 1..1530: note = source = /note="Description of Artificial Sequence: Synthetic coding sequence"
  source 1..1530: mol_type = other RNA
atggactttctccttgccctcgttttagtgtccagtctgtatctccaggcagccgcagagtttgacgggcgctggccaaggcagatagtctctagtattgggttatgtcgttatggggggaggattgattgttgttgggggtgggctagacagtcttggggtcaatgtcagccggtgtgtcagccgagatgtaaacacggcgaatgcatagggccgaacaaatgtaaatgccatccaggctatgcagggaaaacatgcaatcaggacttgaacgagtgcggcttgaaaccccgtccttgcaagcaccgatgtatgaatacctatggttcctacaaatgctactgcctcaacggatatatgctgatgcctgatgggtcttgttcttccgctctcacctgctctatggctaactgccagtacggatgcgacgttgtgaaaggccaaattagatgtcagtgcccatcccctggtctacagctggctccggacgggcgaacatgtgtggatgtggacgagtgcgctaccggcagggcctcttgcccacggttccgacagtgtgtcaatacgttcggatcttatatttgtaaatgtcataaagggtttgacctgatgtacattggagggaaataccaatgtcacgatatagacgaatgctcactcggccagtaccaatgctcatcttttgctaggtgttataacattcgcggctcatataagtgcaaatgtaaggaaggataccaaggcgatggcttaacctgtgtgtatattcctaaagtaatgatcgagccatccggcccaatccatgtgcccaagggaaacggcactattcttaaaggggatacagggaacaataattggataccagacgtgggctcaacttggtggccccccaagaccccttacattccaccaattatcacaaacaggcccactagtaaaccaaccacacgtccaacaccaaagccaaccccaattcctaccccaccgcctcccccccccttacccacggaactgcgcactccactgccccccaccacaccggagcgacctacaactgggctaacaactattgctcccgccgcttctacaccaccgggcgggattactgtggataaccgcgtgcagacggaccctcagaagccaagaggagacgtattttccgtgctggtccattcttgcaattttgatcatggactgtgcggatggattcgggagaaggataatgaccttcattgggagccaatccgggaccccgccggcggtcagtatctcaccgtgtcggcagccaaagcccccggtggcaaagcagctcgcctggttctcccattgggcaggttgatgcatagcggggacctctgcctgtccttccggcacaaagtgacggggctgcattcaggcaccctgcaggtgttcgtgcggaaacacggcgcacatggggccgctttgtggggacgaaacggcgggcatggatggagacagacccagatcacactgagaggcgctgacattaagtccgagtcgcagcgctag

SEQ ID NO: 12057 - RNA, 381 nt, synthetic construct
  misc_feature 1..381: note = source = /note="Description of Artificial Sequence: Synthetic coding sequence"
  source 1..381: mol_type = other RNA
atggataagagcttactgctcgaattgccaatactcttgtgttgttttagggccttgtccggtagcctgtcaatgcgcaacgatgccgtgaatgaaattgtagctgtgaaaaataatttcccagtgattgagatagtgcagtgtaggatgtgtcacttacaattccctggcgaaaagtgtagtaggggacgaggaatctgtaccgccaccacagaggaggcatgtatggttggcaggatgttcaagagagacgggaacccttggttgacctttatgggatgcctaaaaaattgtgccgatgtgaaaggaattcggtggagcgtgtaccttgtaaatttccggtgctgtagaagtcacgacctctgcaacgaggacctgtag

SEQ ID NO: 12058 - RNA, 537 nt, synthetic construct
  misc_feature 1..537: note = source = /note="Description of Artificial Sequence: Synthetic coding sequence"
  source 1..537: mol_type = other RNA
atggagctcctccaggtaactattctttttctcctcccctccatttgctcctccaattccaccggcgtgctagaagccgccaataatagcctggtcgtgaccacgacaaagccttcgatcacgacaccaaataccgaaagcttgcagaagaatgtggtaaccccgacaactgggacaactcccaagggtaccataacaaacgagttgctgaaaatgtcactgatgagtactgctactttcctgacaagtaaggatgagggattaaaggccacaacaactgatgtccgaaaaaatgactccattataagcaatgttaccgtaaccagcgtgaccttaccaaatgccgtatcaaccttgcaaagctccaagcctaaaactgagactcagtcttccatcaagacaactgagatccctggaacccctgaaaacggcaatgatcagccacagtccgataaagaaagcgtgaagctactgaccgttaagacaatctctcacgaaagcggcgaacatagcgcacaaggtaagactaaaaattag

SEQ ID NO: 12059 - RNA, 2544 nt, synthetic construct
  misc_feature 1..2544: note = source = /note="Description of Artificial Sequence: Synthetic coding sequence"
  source 1..2544: mol_type = other RNA
atgtttaaatgctggagtgtggtgctcgtcctagggttcatttttctggagagtgagggaagaccaacgaaggagggcggttacggcctgaagtcataccagccactaatgaggctacgtcataaacaggaaaagaatcaagaaagttcgagagtgaaaggcttcatgatccaggacgggccgttcgggtcatgcgaaaacaaatactgtggcttgggcagacattgcgtgaccagtagagagaccggacaagccgaatgtgcatgcatggatctgtgtaagcggcactataaacccgtatgcggctcagacggggaattctacgagaatcattgcgaagtgcacagagccgcgtgtcttaaaaaacaaaaaatcactattgtacataatgaagattgtttcttcaaaggcgacaagtgcaagaccactgagtacagcaagatgaaaaacatgctgctagacttgcaaaaccaaaagtatattatgcaggagaatgagaatccaaacggagatgatattagccgcaaaaagctacttgtcgaccaaatgttcaagtattttgacgcagattccaatggcctggtcgatattaacgaactcacccaggttattaaacaagaagagctaggcaaagacctgtttgattgcactttatatgtcttgctcaaatacgacgactttaacgcggacaaacacctcgcgctggaggagttctatcgcgcttttcaggtaatccagctaagcctgccggaggatcagaaacttagcatcactgccgctaccgtggggcagtcagctgtgttgtcgtgtgcaatccagggcaccctgagaccacctattatatggaaaagaaacaacattattctgaataacctcgatctcgaagacatcaacgacttcggcgacgatggctcactgtacattacaaaggttaccaccactcacgtgggcaattatacctgctacgcagacggctatgagcaggtgtatcagacacatatattccaggtaaacgtgcctcctgtaataagagtctaccctgagagccaggcacgagagccaggagttaccgcaagcctccgatgtcacgctgaaggtattcccaaacctcagctgggctggttaaagaacggcattgacattaccccaaaactgtctaaacagctaacccttcaggctaacggaagtgaggtgcacatcagcaacgtgagatacgaagacaccggggcctacacatgtattgcaaagaacgaagccggcgtggatgaagatatctctagcctctttgtggaagatagtgcaaggaaaactttggcaaatatcctctggagagaggagggactcggtatcgggaacatgttctacgtgttctacgaagacggaattaaggtgatccagccgattgaatgtgagttccagaggcacattaagcccagtgagaagctgctaggattccaggatgaagtgtgcccgaaagcagaaggggatgaagtgcagaggtgcgtgtgggcctcggccgtgaacgttaaggataaattcatctacgttgcgcagccaacattggaccgagtcttgatcgtggacgtacagagccaaaaagttgttcaggccgtctccaccgacccagtacctgttaagctacactatgacaagtctcacgaccaagtgtgggtgctcagctggggaactttagaaaagaccagtcctacactgcaggttattaccctcgcgtctggcaacgtcccccatcatacaattcacactcaacccgtaggaaagcagttcgaccgggtagacgatttttttatccctactaccacactgatcatcacacacatgagatttggattcattcttcataaagacgaagccgctctccaaaagatcgacctcgagaccatgtcatacatcaaaactatcaatctaaaagactacaagtgcgttccccagagtctggcctatacacacttgggcggctattattttatcggctgtaagccagattccacaggtgccgtttcaccccaggttatggtggacggggttactgatagcgttatcggtttcaattcggacgttaccgggaccccttatgtatctcccgatggacattacctggtgtccataaacgatgtgaaaggccttgtgcgagtgcagtacattaccattaggggcgagatccaggaagcttttgacatctacaccaatctccatatatccgaccttgcattccagccaagctttacagaagcacatcagtataacatttacgggagttccagcacccagaccgacgttctttttgttgagctcagtagtggaaaagtaaaaatgatcaaaagcctgaaggaacctctcaaagctgaggagtggccctggaatcgcaagaacaggcagatccaggatagcgggctatttggtcaatacctcatgacccctagcaaagatagcttattcattttggatggaaggttgaacaagctaaactgtgagatcactgaggtggagaaagggaacacggtcatatgggttggcgacgcatag

SEQ ID NO: 12060 - RNA, 273 nt, synthetic construct
  misc_feature 1..273: note = source = /note="Description of Artificial Sequence: Synthetic coding sequence"
  source 1..273: mol_type = other RNA
atgcgactgagcgtgtgcctgctgctgttaaccctcgccttgtgttgttacagagcaaatgccgtagtgtgccaggcgctggggtccgaaataacaggcttcctgctggcaggtaaacccgtgttcaagtttcaactggctaagttcaaggcccctctggaggccgttgctgcaaaaatggaggttaagaaatgcgtagataccatggcctacgaaaaacgagtgctgataaccaaaacattaggcaaaatcgctgagaaatgcgacaggtag

SEQ ID NO: 12061 - RNA, 1044 nt, synthetic construct
  misc_feature 1..1044: note = source = /note="Description of Artificial Sequence: Synthetic coding sequence"
  source 1..1044: mol_type = other RNA
atgagtagttggtctcgccagcgcccaaaatcccccggtgggatccagcctcacgtgtctcgtacactgtttctgctgcttctgctggcagcctccgcctggggcgtaacattatcaccaaaagattgccaggtttttagaagtgatcacggttcctctatcagttgtcagccacctgctgagatacccgggtacttacctgccgacaccgtccatcttgccgttgaattttttaacctcactcacttacccgcgaacctcctccagggcgcatctaagctgcaggagctacacctgagctccaatggactggagagccttagcccggaattcctgcgcccagttccccagttgagggtcctggacctcacccgtaacgccctgactggcctcccacccggactcttccaggcttccgctacccttgacaccctcgttctgaaggagaaccaacttgaagtgctcgaagtgtcctggctgcacggactgaaggcactcgggcacctggacctgagcggcaaccggctgagaaagttgcctcctggcctgctggctaattttacactactgagaaccctggacttaggagaaaaccaactcgaaacattgcctcctgacctgttaagggggcctttgcagctagagcgactccaccttgaggggaacaagctccaggtgctgggtaaagaccttctcctaccacagccggacctgcgatacttgtttctgaatgggaacaagcttgctagggtagcagctggcgcattccagggcttacgtcagctggacatgctggacttatccaacaattcgcttgcaagcgtgccggagggcctgtgggccagtcttggacaaccaaattgggacatgcgtgacggattcgatattagcggtaacccttggatttgtgaccaaaacttgtccgatttgtatcgatggctgcaggcacaaaaggataagatgttttctcagaacgatacccgatgcgcagggcctgaggcggttaaggggcaaaccttacttgccgtcgctaaatctcagtag

SEQ ID NO: 12062 - RNA, 1407 nt, synthetic construct
  misc_feature 1..1407: note = source = /note="Description of Artificial Sequence: Synthetic coding sequence"
  source 1..1407: mol_type = other RNA
atgccaccttggggggctgctctggcactcatacttgctgtgctcgcacttctcggactcttaggtccccggctccgaggcccatggggtcgcgctgtgggggagaggactttgcctggagcccaggatagggacgacggagaagaggccgacgggggtggaccagccgatcagttcagcgacggccgggaacctctccccggtggttgttccctagtgtgtaagcctagcgctttggcccaatgcctcctcagggcattacgccgctcagaggccttggaggctggccccaggtcatggttctccggccctcatctccagacactgtgccactttgtgctccctgtagcacctggtccagaactggctagggaataccttcagctggccgatgacggactggtggccctggactgggtggtcggcccttgcgtcaggggacggcgcattacttcagcaggagggctgccagcagtattactcgtcattcctaacgcatggggacgactcacacggaatgtcctcggtctctgtctgctggctctggagagaggctattatccagtgatttttcatcgaagggggcaccacggctgcccattggtgtctcctcggttacaaccattcggggatccgtcagacctgaaagaagctgtgacatacattaggtttagacatccagctgctcccctttttgcagtcagcgagggctccggttctgccttattactatcgtacctcggcgaatgcggtagctcgagctacgtcactggcgccgcctgcatctccccagtccttaggtgtcgtgagtggttcgaagcaggacttccctggccatatgagagagggttcctgctgcatcagaaaatagcattgtctagatacgctaccgctctagaagatacagtagacacatcaaggctctttcgctcacggtctctgcgcgagtttgaagaggccctgttctgccacacaaagtccttcccaatctcgtgggatacatactgggatcgaaatgacccgctgcgagacgtcgatgaggctgctgtacctgtgctgtgcatttgctcagccgatgatcccgtatgcggcccacccgaccatacattgacaactgaattgtttcattcaaacccctattttttccttctactaagtagacacggaggccactgcggttttctcaggcaggagcccctcccagcctggagccatgaggtgatcttggagagctttcgagcactgaccgagtttttccgtactgaagaacggattaagggcctgagcaggcatagggcatcattcctaggcggccgtcgccggggaggcgcgttgcaaaggagggaagtttcaagcagctcgaatctagaggagattttcaattggaagagatcctacactcgttag

SEQ ID NO: 12063 - RNA, 423 nt, synthetic construct
  misc_feature 1..423: note = source = /note="Description of Artificial Sequence: Synthetic coding sequence"
  source 1..423: mol_type = other RNA
atgttttttacgatttcaagaaagaacatgtctcagaaactgagcctgttattgctagttttcggactcatctggggtctgatgctgctacattatactttccagcaacctagacatcaatcatccgtgaaactgcgggagcaaattctggatctctcaaaaagatacgtgaaggcacttgcggaggagaataagaataccgtggacgtggaaaatggagcatctatggcaggatacgccgatctaaagagaaccattgctgtgctgttggatgatatcttacagcgtctggtgaagctcgagaataaagttgactatatcgtggtgaatggaagcgcggcaaacactaccaacggcacatcggggaatctcgttcccgtcaccactaacaaacgaacgaatgtttcaggttccatccgctag

SEQ ID NO: 12064 - RNA, 993 nt, synthetic construct
  misc_feature 1..993: note = source = /note="Description of Artificial Sequence: Synthetic coding sequence"
  source 1..993: mol_type = other RNA
cgcggggccttggtgggagctccccgttctgcacgggcaagctgtctcaggggaaggagacctggtcggaggcagccttgcgggaggtgcccggacccacctcgctctggtccaggccaggcagggcgagctcgctgtgcaagagacgtcgctgcccaaaccgccctcgctccacgggccctcgcccttggagccggagctgcagggccaggatggaggggtgccgtgccacgaaggccagcagcaagagtgagcagagcggctcagaggcaggagcaagaattggtgagattgcatcgcgagcaggaatgtgagctccagcccgaacctgcacctccgcgccccagtggccctgcaaccgctgaggacccagggcggagacctgttctgccacaaagaccccccgaggagagacctccacagcctccaggttcaactggggtgatcgcagaaaccggacaagcaggtcctcccgcgggggcaggtgtttccggataccctaaatcacccccagtagcgtctcctggtgctcccgttccctccctagtatcattcagcgccggcttgactcaaaaacccttccctagcgacggcggggttgtgctgtttaacaaggtgctggtaaatgatggcgacgtgtacaacccttctaccggcgtctttacggccccttatgacggtcgttacttgattactgcgactttaacccctgagagagatgcatatgttgaagccgttctgagtgtgtccaatgcaagcgtggctcagctccacacagctgggtacaggcgtgaatttctggagtatcaccggccccccggcgccctgcatacctgtgggggccccggcgctttccatctaatcgtacatcttaaagctggcgatgccgttaacgtggtcgtcactggcggaaagctcgcccatactgattttgacgaaatgtactctaccttcagcggcgttttcctgtatccattcctgtctcacctgtag

SEQ ID NO: 12065 - RNA, 585 nt, synthetic construct
  misc_feature 1..585: note = source = /note="Description of Artificial Sequence: Synthetic coding sequence"
  source 1..585: mol_type = other RNA
atgtccgcactgtggctactgctgggactgcttgcactgatggatctgtctgagtcgtctaactgggggtgttatgggaacattcaatctctggacacccctggtgcaagctgcggaatagggcgacggcacggactgaactactgtggggtgagggcttccgaacgactggctgagatcgacatgccatacctgctgaaatatcagcctatgatgcaaacaatcgggcagaagtattgtatggacccagctgtgatagccggtgtcttgtccagaaagtctccaggtgacaagattctagttaatatgggcgacagaacttctatggtgcaagatccaggcagtcaagctcccaccagttggatttcagaatctcaggtctcacagacaacggaggtgttgacaacccgaatcaaggagatacagcgcagattccccacttggactcctgatcagtacttaagaggcggactgtgtgcctactccggcggcgcaggctacgttcggtctagccaggatctctcctgcgacttttgcaatgacgttctcgcacgcgcaaaataccttaaaaggcatggcttttag

SEQ ID NO: 12066 - RNA, 273 nt, synthetic construct
  misc_feature 1..273: note = source = /note="Description of Artificial Sequence: Synthetic coding sequence"
  source 1..273: mol_type = other RNA
atgaaattcttagccgttctcgttctcctgggtgtttccatctttctcgtgtccgcccagaaccctactactgctgctcctgccgatacttaccccgcgaccgggcctgctgatgacgaggcgcctgatgccgagacaactgctgccgcaaccacagccactactgccgctcctactactgctaccacagcggcttccactactgctcgcaaagacattccagtgcttcctaaatgggtgggagacctgccaaacggccgcgtttgcccttag

SEQ ID NO: 12067 - RNA, 1914 nt, synthetic construct
  misc_feature 1..1914: note = source = /note="Description of Artificial Sequence: Synthetic coding sequence"
  source 1..1914: mol_type = other RNA
atgagccggatgctgcctttccttttacttctctggttcttgcctataaccgagggttctcagagagcggaaccgatgtttaccgctgttactaatagtgtgctacctccagattacgattccaatcccacccagttgaattatggggttgcagttaccgacgtcgatcacgatggtgattttgaaatcgtggttgcgggatacaatggaccaaaccttgttttaaagtacgacagagctcagaagcgccttgtgaatattgctgtcgatgagcggtcctctccatattatgccctgagagaccgacaggggaacgccataggagtaacagcctgtgatattgatggtgacggcagggaagaaatctacttcttaaatacgaacaacgctttcagtggggtagccacgtataccgataaattgttcaaatttcggaataaccggtgggaagacatactctcggacgaggtcaatgtcgctcgaggtgtggctagcctgtttgccggcaggtctgtggcctgcgtggaccgtaagggctctgggcgctacagcatctacatagccaactatgcctatggaaacgtcgggcctgacgccctcattgaaatggacccagaagcatccgacttgtcccgtgggatcttggcccttcgagacgtggctgcagaggctggggtgtcaaagtacactggaggtcgcggggtgagtgttgggcccatattgagctcctctgcaagcgacatattctgtgataacgaaaacggccctaactttctctttcataatagaggcgatgggacattcgtcgacgctgccgccagcgctggtgttgacgatccacaccaacatggacgaggggttgccttggcagactttaatcgggacggaaaagtggacattgtgtacggcaattggaacggcccacacagactgtatcttcagatgtcaactcacggtaaagtgagatttcgcgatatcgcaagccccaaattctccatgcccagtcctgtgaggacagtgatcacagcagactttgacaacgaccaggaactggaaatctttttcaataatatagcatacagatccagcagtgcgaacaggctattcagagtcatcagacgcgaacacggcgatccgctcatagaagaacttaaccccggagacgcactcgagcccgaaggcaggggcacgggaggcgttgtcaccgacttcgacggcgacggtatgctggatctgattctgagtcatggagagtcaatggcacaacccctgagcgtgtttcggggaaatcagggttttaataataactggctgcgagtggtgcctcgtactcggttcggagctttcgcccggggcgcaaaggtggtgctgtacactaagaaaagcggagcgcatctcaggatcatagatggagggagcggatatctgtgcgaaatggaacctgtggcccacttcgggctaggcaaggatgaagctagctcggtggaggtgacatggcctgacggcaaaatggtgtcaaggaacgtcgctagtggagaaatgaactctgtcctggagattctatatccccgagacgaagacactctccaagatcccgcacccctggaatgtggccagggattctcccagcaagaaaacgggcattgtatggataccaacgagtgcatccaatttcccttcgtgtgccctcgagacaagccagtgtgtgtgaatacatacggctcttataggtgccgaaccaacaagaagtgtagtcgtggctacgaacccaacgaagacggtaccgcctgtgtagctcaggtggcattcctgggcggttactcaagtgcagcgtctagaattagcgagcccttgagccgagccagttatctgtcactgggactgggcctgtgtctccagttgtacgccctgtag

SEQ ID NO: 12068 - RNA, 600 nt, synthetic construct
  misc_feature 1..600: note = source = /note="Description of Artificial Sequence: Synthetic coding sequence"
  source 1..600: mol_type = other RNA
atggcgctgaacggggcagaagtggacgacttttcctgggaacctccgacagaagctgagactaaggtgttacaggccagaagagagcgccaggacagaatatctcgactaatgggggattacctcctgcgcgggtatcgaatgctcggggagacatgtgcagattgtggcacgatcctcttacaggataagcagcgcaagatatactgtgttgcttgtcaggagttagattcagacgtggataaggataacccagcacttaacgcacaagccgcgctgagccaagcccgcgaacaccagctggcaagcgccagcgaactgccactcggcagtcgacccgccccacagccccccgtccctaggcccgagcattgtgaaggagcagcggctggcctgaaagcagctcaaggacccccagctcccgccgtgccacccaatacggatgtcatggcttgtactcaaactgccctattgcaaaagttgacatgggcgtctgccgaactcggaagctctacctctctcgaaacctccatacagctttgtggcctgataagggcctgcgccgaagccttgcgctccctccagcagctgcaacactag

SEQ ID NO: 12069 - RNA, 813 nt, synthetic construct
  misc_feature 1..813: note = source = /note="Description of Artificial Sequence: Synthetic coding sequence"
  source 1..813: mol_type = other RNA
atgaaactcggatgcgtgctgatggcctgggccctatatttgagcctaggagtactctgggtggcacagatgctactagctgcttctttcgagacattgcagtgtgagggtccagtttgcacagaggaaagttcgtgccacactgaggacgatctgaccgacgccagagaggccggattccaagtgaaggcctacacttttagtgagcctttccacctaatcgtgagttacgagttgtttcccgcaccaattctccgtgcagtgccatccgctgagcctcaggctggttctccaatgacactgtcctgccaaacaaagctccctcttcaacgaagtgccgcacgcttactgttttccttctataaagacggtaggatcgttcagtcaagaggcctgtcttctgaatttcagatcccgaccgctagcgaagaccactccggtagctactggtgtgaggccgcgaccgaagacaaccaggtatggaaacaatccccacagctggagatcagggtgcaaggtgcctccagttcagcggcaccacctacgttgaatcctgctccccagaagtctgctgctcccggaaccgcaccggaagaggccccgggtccccttcctccccctcctaccccatcttccgaggacccaggctttagctctccacttgggatgccagatccgcacctttatcaccaaatggggctgctgctgaaacatatgcaggatgtccgcgtcctgttgggacatctgctgatggaattaagagagctgtctggacatcgcaagcctggtacaaccaaagcgaccgccgaatag

SEQ ID NO: 12070 - RNA, 2421 nt, synthetic construct
  misc_feature 1..2421: note = source = /note="Description of Artificial Sequence: Synthetic coding sequence"
  source 1..2421: mol_type = other RNA
atgcgcctgtctcccgcaccactcaaactgagccggacgccagctctcttggcactggcactgcctctcgccgctgcactcgccttctctgacgagactctcgacaaggtcccaaagtctgaaggatattgcagccgcatcctgcgcgctcaggggactcgacgagaggggtataccgaattctccctccgggtggaaggggaccccgacttttacaagccaggcacaagctacagagttacactgtctgcagcaccaccgagttattttagaggtttcaccctcatcgccttgcgcgaaaatagagaaggggataaagaggaggaccacgcaggtacgttccagataattgatgaagaggagactcagtttatgtctaactgtcccgtggctgtaaccgagtccacccctagaaggagaactagaatccaagttttctggatagcaccccctgctgggaccgggtgtgtgattctcaaggcatctattgttcagaagagaatcatctatttccaggacgagggctccctcactaagaagctctgcgagcaggacagcacattcgacggtgtgactgataaacctattttagactgctgttgcggcaccgctaaataccggctaacattctatggcaactggtctgaaaaaacacacccaaaagactatccacgcagagcgaaccattggtccgccatcattggtggcagccattcaaaaaactacgtcctgtgggagtacggaggttacgcatctgaaggcgtcaaacaggtagccgaactgggcagcccggtgaagatggaggaggagatacgccagcagagcgacgaggttctgaccgtaatcaaggctaaggcccaatggcccgcctggcagcctttaaatgtccgcgccgcaccctccgctgagtttagtgtagacaggactcggcatctgatgtcttttctgaccatgatgggcccgtctcccgactggaacgtaggactgtcagccgaggatttatgtactaaggaatgcggttgggtacagaaggtagtgcaggatctaatcccttgggacgctggaacagactctggggttacctacgaatcacctaacaagcctacaatcccacaggagaaaatccgccccctgactagtttggatcatccacagagtcccttttatgatcccgagggtggctcaatcacacaggtggcacgcgtggtgatcgaaaggattgcaagaaagggtgagcagtgtaatatcgtacctgataacgtggatgacatcgtggctgacctggcccctgaagaaaaggacgaagacgacacacccgagacctgtatatattccaattggagcccttggtccgcttgttctagttccacctgtgacaaaggaaagcggatgcggcagcgtatgctcaaagcgcagctggacctgtctgttccatgtcccgacacacaggacttccagccttgtatggggcccggatgctccgacgaggacggttccacctgtactatgagtgaatggattacctggagtccatgtagtatctcatgtggcatgggaatgcgtagcagggagcgatacgtgaagcaattccccgaggacggatccgtgtgcaccctgcctaccgaagagaccgagaagtgcaccgtaaacgaagagtgttccccttcttcatgcctgatgaccgagtggggagagtgggacgaatgttcggcaacatgtggaatggggatgaagaaaaggcacagaatgatcaagatgaatcccgcagatggaagtatgtgcaaagccgaaactagccaagctgaaaaatgcatgatgcccgagtgtcataccataccatgcctgcttagtccctggagtgaatggagcgactgcagcgttacctgtggtaagggaatgaggacacgacagcggatgctgaagagcctcgccgagctcggcgactgcaatgaggatctggagcaagtggagaaatgtatgctgcccgagtgtccaatagactgtgaacttactgagtggtctcagtggagcgagtgtaataaaagctgcggaaaaggacacgtgataaggaccagaatgattcagatggagccacagtttgggggagcaccttgcccggaaaccgtacagcggaagaaatgtcgcattcgaaagtgtcttagaaacccaagtatacagaagctccgatggcgggaggcacgcgagtcccggaggtccgagcaactaaaggaagagtcagaaggggagcaatttcccggttgtcggatgaggccttggactgcgtggagcgaatgcaccaagctatgcggagggggaatccaggaaagatatatgaccgtcaaaaagcgatttaaatcatcccaatttacttcttgtaaagataagaaagagatacgagcgtgtaatgttcacccttgttag

SEQ ID NO: 12071 - RNA, 4242 nt, synthetic construct
  misc_feature 1..4242: note = source = /note="Description of Artificial Sequence: Synthetic coding sequence"
  source 1..4242: mol_type = other RNA
atgcgccacggtgtcgcttgggccctgttagtggctgccgcactgggtcttggagcacgcggcgtgcgcggggctgtggccctagctgatttctacccttttggggccgagcgtggcgacgctgtgacgccaaagcaggacgacggtggctcgggtctgcgccctctgtccgtccccttcccattttttggggcagagcacagcggtctgtatgtgaataataatgggatcatcagtttcttgaaagaggtgagccaattcacacctgttgcctttcctattgccaaggaccgctgcgtggttgccgcattctgggcagacgtggacaacagacgggctggagacgtctactacagagaagccaccgacccagccatgctgaggcgagccacggaggacgtccggcactactttcctgagcttctagacttcaacgctacttgggtgttcgtggctacttggtatagggtgaccttcttcggcgggtcctcgtcctcacctgtcaatacatttcagacagtgttaatcactgatggaaagctctcattcacaattttcaactatgaatccatagtatggaccactggcacacacgccagttcaggaggaaatgccaccggccttggcggcatcgccgctcaggctgggtttaacgccggtgacggccaacggtatttttcgatccccggcagcagaacagctgatatggccgaggtggaaactaccactaatgttggggtcccaggccgctgggccttccgcatcgacgatgctcaggtcagagtcggcggatgcgggcacacaacctcagtctgcctagccttgcgcccatgtctcaatggcggtaaatgtattgacgactgtgttacagggaacccttcttacacatgtagctgcctttccggttttacaggcaggcgttgccacctcgatgtgaacgagtgtgcttcacagccatgccaaaatggcggtacgtgtacacatgggataaattcatttcgttgtcaatgtcccgccggttttggaggcccaacgtgcgaaaccgcacagtcgccgtgtgacaccaaggaatgtcagcacggtgggcagtgtcaggtggaaaacggctccgccgtgtgcgtgtgccaggcaggatatacgggagcagcgtgcgagatggatgtggacgactgcagtccggacccctgcctcaacggcggctcatgcgtggatttggtgggcaattatacatgcctttgcgccgagccattcaaaggcctgaggtgcgagactggcgaccatcccgtaccagatgcttgccttagcgccccttgccataatggaggcacctgcgtcgacgcagatcaaggatatgtttgcgaatgtcccgaaggcttcatgggactggactgtcgggaacgggtacccgacgactgtgagtgtcgcaacggcggacgctgcctaggagccaacacgacactgtgtcagtgtccattgggcttttttgggctcttgtgtgaatttgagatcactgccatgccttgcaacatgaacacccagtgtccagacggaggctattgtatggaacacggcgggagttatctctgcgtatgccacaccgatcacaatgcctcacacagtctgccatccccctgcgattccgatccctgcttcaatgggggttcctgcgatgcccacgatgacagttatacctgcgagtgcccacgcggattccatggaaagcattgcgaaaaagcaagaccacacctttgctcctctggaccatgtaggaacggcggaacatgcaaagaggctggcggcgaatatcattgtagctgtccataccgattcaccgggcgccattgtgagatcgggaaacctgatagttgtgccagcggaccctgtcataacgggggaacctgtttccactatatcggaaagtacaagtgtgactgcccacctggtttcagcggtcggcactgtgaaattgcccccagcccctgctttcgctccccatgcgtcaacggcggaacgtgtgaggaccgggacaccgacttcttttgtcattgccaggctggatatatgggacgcaggtgtcaagcggaagtcgattgcggaccccctgaggaagtcaagcacgccacactacgctttaatggcacacggctcggggcagtggcattatacgcttgtgatagaggatactccctttcagccccaagcagaattagagtttgtcagcctcatggagtgtggtcagagccccctcagtgcctggagattgacgagtgcagaagccagccatgcctccatggcggctcttgtcaggaccgggtcgccggatatctgtgtctgtgctcaaccggatacgaaggtgctcattgcgagctcgagcgagacgagtgtagggcacacccttgtcgcaatggaggtagctgtcgcaacctgcccggtgcctacgtatgtagatgtccagctgggtttgtgggtgtacattgcgagacagaggtagacgcgtgcgacagctctccgtgtcagcacggtgggaggtgtgaatctgggggaggagcctacctttgtgtgtgtccagagtccttttttgggtaccactgtgaaaccgtttctgatccctgtttctcatccccttgcggcggaaggggatactgcctagcaagtaacgggagtcactcttgcacctgtaaagtaggatacacaggggaagactgtgctaaagaactcttcccaccaacagcattaaagatggaacgggtcgaggaatctggggtctctatttcttggaacccacctaatgggccagcagctcggcagatgctcgatggctatgctgtgacttacgtttccagcgatggatcctaccgccgaaccgacttcgtagaccgcacacgttcctcacatcagctgcaggccttggcagccggacgcgcctataatataagtgttttctccgtaaaaagaaattccaataacaagaatgacatcagtagacccgccgttctgctcgcaagaacgagacctaggcctgtggagggttttgaagtcacaaatgtaactgcatccactatctcagtgcagtgggccctccacaggattcggcatgctacagtctcaggggtcagggtctccatcaggcatcctgaagccctaagagatcaagccaccgatgtggataggtccgtggaccgatttaccttccgggctttgctgcctggaaagcgatatacaatccagttgaccaccctcagcggtctaagaggtgaagaacaccctactgagagcctcgccaccgcacctacacacgtgtggacccgccccctgccaccagccaacctaacagctgcaagagtgaccgccacctcggcccacgttgtttgggacgctcctaccccagggtctttgctggaggcgtacgtcatcaatgtgactacatcacagagcacgaagagccgttatgtccccaatggtaagctcgcatcctacacagttcgcgatctcctccccggcaggaggtatcagctgtccgtcatcgccgtgcagtctacagagctaggaccacaacattcggagccggcacacctttacatcattacctcccctagagacggtgccgatcggcgctggcatcaagggggacaccaccctcgcgttctaaagaacagaccacctccagcacgactgcctgaactgcgcctgctgaatgaccactctgccccagagacgcctactcagcctccaagattctctgagttagtggacggccgaggaagagtaagtgctagattcggcgggagcccctcaaaggccgccacggtgcggagccaaccaactgcgagtgcacagttagagaacatggaggaggcgcccaagcgtgtctccctagccctgcagttgcctgagcacggcagcaaagacattggcaacgtgccgggaaactgctccgagaatccttgtcagaatggtggcacctgtgtccctggagctgacgcacattcctgcgactgtggacccggcttcaagggccggcgatgcgaattagcctgtattaaggtctctcgcccgtgtacgagacttttctccgagaccaaagccttccccgtgtgggagggcggcgtctgccatcatgtgtacaaaagagtgtacagggttcaccaagatatatgcttcaaagagtcttgcgagagtacaagtttaaagaaaaccccaaacagaaagcaatctaaaagccagacactggaaaaatcttag

SEQ ID NO: 12072 - RNA, 1008 nt, synthetic construct
  misc_feature 1..1008: note = source = /note="Description of Artificial Sequence: Synthetic coding sequence"
  source 1..1008: mol_type = other RNA
atgttcctcgccaccctgtctttcctgttgccatttgcacatcccttcggcacagttagttgcgaatatatgctcggaagcccactgtcaagtctagcccaggtcaatctatccccattcagccacccaaaagtccatatggatccaaattattgccacccatcaaccagtctacatctgtgttcacttgcctggagctttacgcggctgcttcatccccctctcagcccaggaatttcccaggtcgtaaaagaccacgtaactaaacccacagccatggcacagggccgcgtggcccatctgatcgagtggaaggggtggtcaaaaccatcagatagtccagctgccctcgaatccgcatttagcagttacagtgatttgtccgaaggcgaacaagaagcccgtttcgctgctggagttgccgaacaattcgctatcgcagaagcaaaactccgggcatggtcaagcgtggacggcgaagattctacagatgactcttatgacgaggacttcgcaggcggcatggacacggacatggcaggacagctgcccctagggccccacctgcaggacctctttacaggccataggtttagcagacccgttcgtcagggatcagtggaaccggaaagcgactgctctcagactgtatcccccgatacgttgtgcagtagcctgtgctccctagaggacggactccttggaagccccgccagactggctagccagctcctgggggatgaattgctattggccaagctccccccatccagagagagcgcttttagatctctgggaccactggaagcacaggactccctctataattccccgttaaccgagtcatgtctttctcccgccgaagaagaacctgccccatgtaaggactgtcaacccctgtgcccaccactcacggggtcgtgggagagacagagacaagcctcggatcttgcttcgtccggcgttgtgtctctggatgaggatgaagcagagccagaagagcagtag

SEQ ID NO: 12073 - RNA, 828 nt, synthetic construct
  misc_feature 1..828: note = source = /note="Description of Artificial Sequence: Synthetic coding sequence"
  source 1..828: mol_type = other RNA
atgcagccgccgggcccccgagatcctctcataaggttatgtttcttcagagaggaggggacaaacgtagttcagaaaatatgcttctccacccagattattaggcatttcgagtcaaagctctcagacactattgaagtataccaggaaaggatccaatggctcacggaaaatagtaagaaagctttcggcctgattaagggagctagggtcagcattctcatcgatgtgagcgcaatttctagcggcccccagaaagaggagtttcagaaggatcttatgtcactaatagacgagcagctgtcccataaagaaaagctgtttgtactctcgtttggaacaaacgctggcagcttgtggccggaccccatggaagtatcggcttctacactccaagaactcaagttgtgggtgaaaacattgcaaccagacggggggtccaaccttttgcaagcactaaaaaaaatttttaccctcaaaggacttgatagcctggtggcaatcatgaggagctgccccgatcagccttctgaaatcctatctgattacatacaacaaagcacgatgggcagagatcttataatccactttattacatacaggtgtgacgatcaaatgcccccagcagttctaaagaacctcgccgaggccgtccggggatattaccactgctactcacccaaaatggagcattataccagtagggacatggacgaactgctcgcggaaattcaaaaggcccaaagcctcctgtcacatgtgcaagctctgcaacattcttcaccatgcgaggccttgacctgcacgatggaggaacccaggaactag

SEQ ID NO: 12074 - RNA, 438 nt, synthetic construct
  misc_feature 1..438: note = source = /note="Description of Artificial Sequence: Synthetic coding sequence"
  source 1..438: mol_type = other RNA
atgctcacgcgacttgtactcagtgcacacctctccagcaccacgtcgcccccatggacccacgccgcgattagctgggaactggataacgtcctgatgccctccccaaggatttggcctcaagtcaccccaactggcaggagcgcatccgtcagaagtgaggggaacacgagtagcctgtggaatttctcagcagggcaagacgtacatgccattgttactcgtacctgtgagagtgtcttgagcagcgctgtatatacccacggatgtggctgcgtgcgctcagctacaaatattacctgccaatctagcggccagcaaagacaggcagctagacaagaagaagaaaattctatctgcaaagcccatgattcccgagaagggcgtctgggatacccactatcagcccaccaacctggatctggcggccctaactag

SEQ ID NO: 12075 - RNA, 777 nt, synthetic construct
  misc_feature 1..777: note = source = /note="Description of Artificial Sequence: Synthetic coding sequence"
  source 1..777: mol_type = other RNA
atgactcctcctaagctgcgtgcatcactcagccctagcttacttctcctcttatccgggtgcctgttggcagctgcaagacgggaaaagggagctgctagcaatgttgccgagcctgtcccgggtcccacgggcggcagttctgggcggtttctaagtcctgagcagcacgcatgcagttggcaacttttgttgcccgccccggaagccgccgcaggttccgaacttgccctgcgctgccagtctccagatggagcgcgacaccaatgtgcctacagaggacaccctgaaagatgcgccgcatatgctgccaggcgggcacacttttggaaacaggtcttgggtgggcttcgaaagaagagacgtccttgtcacgaccccgcccctcttcaagccaggctgtgtgcagggaaaaaaggccacggggcagagctgcgcttggtaccacgcgccagcccccctgctagacccactgtcgccgggtttgcaggcgagtctaaaccccgcgcccgcaaccgaggtaggacccgagagagggcttccgggcccgctgcgggtaccccgcccccacaatctgccccacctaaggaaaacccaagcgaacgaaaaacgaacgagggcaagcgcaaggcggccctcgtccccaacgaagaaagacccatgggaaccggccctgacccagatggtctagacggaaacgccgaattaaccgagacttactgcgctgaaaagtggcattctttatgcaactttttcgtcaatttttggaatggttag

SEQ ID NO: 12076 - RNA, 393 nt, synthetic construct
  misc_feature 1..393: note = source = /note="Description of Artificial Sequence: Synthetic coding sequence"
  source 1..393: mol_type = other RNA
atggctagacgccactgtttttcatactggctcctagtatgctggctcgtcgttacagtggccgagggccaggaagaagtctttactccacccggagattcacagaataatgccgacgccaccgactgtcagattttcacattgactccacctcccgcccccagatcccccgttacacgcgcccagccaatcactaaaacaccacgttgcccctttcatttcttcccgcgtagacctcggattcacttcaggttcccgaatagacccttcgtaccctctaggtgcaaccataggtttccttttcaacctttctactggccacaccgctatctgacatacagatattttccaagacgtcgactgcagcggggtagctccagcgaagaaagctag

SEQ ID NO: 12077 - RNA, 600 nt, synthetic construct
  misc_feature 1..600: note = source = /note="Description of Artificial Sequence: Synthetic coding sequence"
  source 1..600: mol_type = other RNA
atgtaccccgccaccgcagttccacaaatcaatatcaccatactgaagggagaaaaaggggacagaggcgaccgtggacttcaaggcaagtatggcaaaacaggcagcgcaggtgcccgcggtcacaccggccccaagggacagaagggaagcatgggcgccccaggagaacgatgcaagagtcactacgccgccttcagcgtgggccggaagaaaccaatgcacagcaatcactattaccagacagtcattttcgataccgaattcgttaatctttatgatcatttcaatatgtttacaggcaagttctactgttatgttcccggtctgtattttttttcgcttaacgttcatacatggaatcaaaaagagacctatttgcatattatgaagaacgaagaggaggtggtcatactgttcgcccaggtcggggacaggtcaattatgcagagccaaagtctgatgttagagttaagagagcaagaccaggtgtgggtgcgtctttacaagggagaacgcgaaaacgcaatttttagcgaggagctcgacacatatatcacattcagtgggtatctggtgaagcatgctacagaaccttag

SEQ ID NO: 12078 - RNA, 702 nt, synthetic construct
  misc_feature 1..702: note = source = /note="Description of Artificial Sequence: Synthetic coding sequence"
  source 1..702: mol_type = other RNA
atggctttaaaaaacaaattctcttgcctgtggattctaggactatgccttgtggctaccacctcctccaagatcccatccatcactgacccccatttcatcgataattgcatcgaggcccataacgagtggcgcgggaaagtcaatccacctgcagcggatatgaagtatatgatatgggacaagggcctcgcaaaaatggccaaagcgtgggccaatcaatgcaaatttgagcacaacgattgtcttgataaaagctacaagtgctacgcagcgttcgaatacgtgggtgaaaatatttggcttggtggtattaagtcatttactcctcggcacgccattacagcatggtataacgagacccagttctacgacttcgacagcctctcctgttcccgggtgtgcggccactatactcaactggtctgggcgaactccttttatgtgggatgcgctgtcgcgatgtgccctaatctaggaggagcttccaccgccatctttgtgtgtaactacggacccgccggtaactttgcaaacatgccaccatacgtcagaggagagtcatgtagtctgtgctctaaggaagaaaagtgtgttaaaaacttgtgtaagaatcctttcctcaagcccaccggccgtgcccctcaacagaccgccttcaacccctttagcttgggctttttactcctgagaatcttttag

SEQ ID NO: 12079 - RNA, 669 nt, synthetic construct
  misc_feature 1..669: note = source = /note="Description of Artificial Sequence: Synthetic coding sequence"
  source 1..669: mol_type = other RNA
atggctctgcatattcacgaagcatgcatcttattgctggttatacccggactcgtcacttccgccgccatatctcacgaggattaccccgcggatgaaggtgaccagataagcagcaacgacaatttaatctttgatgattaccggggaaaaggctgcgtggatgactctggttttgtgtacaaactcggcgagcgtttcttcccagggcattccaactgcccatgtgtgtgtgccctagatggccccgtgtgcgatcaacctgaatgtcccaaaattcaccctaagtgtaccaaagtggaacataacggctgttgccctgagtgcaaagaagttaaaaacttctgcgaataccacggtaagaactataaaatactcgaggagtttaagcctagcccttgcgaatggtgtcgctgcgagccttcaaatgaagtccattgcgtggttgccgattgtgctgtacccgaatgtgttaaccccgtgtatgagcccgaacagtgctgcccagtctgcaagaacgggcctaactgctttgccgggacaacgattatacctgccggaattgaggtgaaggtcgatgaatgcaatatctgccattgtcacaacggcgattggtggaagcctgctcaatgctctaagcgagagtgtcagggcaagcaaaccgtctag

SEQ ID NO: 12080 - RNA, 957 nt, synthetic construct
  misc_feature 1..957: note = source = /note="Description of Artificial Sequence: Synthetic coding sequence"
  source 1..957: mol_type = other RNA
atgctccccctgacaatgaccgttctcattctgcttttgctgcctaccggccaagccgcaccgaaggatggcgtgaccagaccagattcagaagtccaacaccaattgctcccaaacccatttcaaccgggtcaggagcagttggggttactccagagttatctcaaaggtctaggcaggacagaggttcaactggaacacttatctcgagagcaggtgctcttgtacctctttgccttgcacgattacgaccagagtggacagcttgatggcctggaactgctgtctatgttgaccgccgccctggcccccggtgccgctaattccccgactacaaatcccgtcatactgatcgtcgacaaagtgttagagactcaggacctgaacggcgacggtcttatgacacccgcagagctgatcaactttcctggagtagccctgagacatgttgaacctggcgagccactagcaccttccccccaggagccacaggccgtgggtaggcagtcgctgttggccaagtcccccctcagacaggaaacacaagaagccccaggacccagggaggaggcaaaaggtcaggtggaagctaggcgggagagtttagatccagtgcaggaaccaggcggccaagcagaggccgacggagatgtgcccggcccacgcggcgaggccgagggacaggccgaggccaaaggcgacgcacctggcccaaggggtgaggctggaggacaggcagaggccgaaggagacgcaccaggtccccggggcgaagccgggggacaagccgaagcggagggcgatgcccctggacctagaggagaggccggcgggcaggctgaggcaagagaaaatggcgaggaggccaaagagctccctggagaaaccctggaaagtaaaaacacacagaacgattttgaagtgcacatcgttcaggtggagaacgatgagatctag

SEQ ID NO: 12081 - RNA, 393 nt, synthetic construct
  misc_feature 1..393: note = source = /note="Description of Artificial Sequence: Synthetic coding sequence"
  source 1..393: mol_type = other RNA
atgctggccccattgtttctgtgctgcctacgtaacctcttccgaaaacttataagctttcagcctcctcagctgggcagaactaatatgcattacagtaaactccctagaactgccattgagacagaatttaagcagaacgttgggcccccaccgaaagatcttaccgctgaggtgtatttcccatcaattaaaagccgctcacacctacctgccgtcttttacaaccagtacttcaagcaccccaaatgtgtcggggagtatggcccaaaaaatggcgcggagcggcagatcgaagaacgcaaagtcctccccactacaatgatgttttccatgctcgcagactgtgttctgaagtccacgccaatccccatcctcggggttgccatgtag

SEQ ID NO: 12082 - RNA, 4362 nt, synthetic construct
  misc_feature 1..4362: note = source = /note="Description of Artificial Sequence: Synthetic coding sequence"
  source 1..4362: mol_type = other RNA
atgatgctgccgcagaacagttggcacattgactttggtagatgttgttgtcatcagaatttattttctgctgtggtgacatgcattctgctgctcaatagttgctttctgatctctagctttaatggcaccgacctggagctgcgacttgtgaacggcgatggaccctgcagcggtactgtcgaagtgaaatttcaaggtcagtggggtacagtctgtgacgatggctggaacaccactgctagcactgttgtctgtaaacagctaggatgccccttttctttcgcaatgtttaggttcggccaggctgtcacccgccacgggaagatatggcttgacgacgtgtcttgttacggaaatgaatcagccctgtgggagtgccagcacagggaatggggatcccacaattgctaccacggagaggatgtcggtgtaaattgctatggagaagctaacctcggcctcaggctcgtggatgggaataactcgtgttccggaagagtggaggtaaagttccaggagcggtggggaaccatttgcgatgacggctggaatctgaataccgctgctgtggtgtgccgtcagttggggtgtccctcttcatttatttcatccggcgtcgttaatagtcctgccgtcctccggcctatctggcttgacgacatattatgccagggcaacgaactggctctttggaattgtcgacacagggggtggggcaaccacgactgctcacataatgaagatgtcacacttacttgttatgatagctcagaccttgaattgcgactggtcggcggcacaaacagatgcatgggacgagtggagctgaagattcagggacgctgggggacagtttgccaccacaagtggaacaacgctgctgccgatgtggtctgcaaacagctgggatgtggtacagcactgcactttgccggtttaccacacctacagagcggttcagatgtcgtctggctcgacggggttagttgctctggtaatgaatcctttctatgggactgccgtcatagcggcactgtgaactttgattgtctccatcagaacgacgtctctgtgatctgcagcgatggagccgatttggaattgaggctcgcagacgggtctaacaactgttctggtcgagtagaagtgagaattcatgaacagtggtggacaatttgcgaccaaaactggaaaaacgagcaagctttggtagtgtgcaaacagctcggctgtccattttccgtgtttgggtcccgcagggccaaaccatctaacgaggcacgcgacatctggataaactccatctcctgtacagggaatgaaagtgctctctgggactgtacgtacgatggcaaggcaaaacggacctgttttaggcgctctgatgccggcgtgatttgcagcgataaggcggatctggatcttaggctcgtcggcgcccactccccttgttatggacgactggaggtaaaatatcaaggcgagtggggcactgtttgccacgaccggtggagcactagaaacgccgccgtcgtgtgcaaacagttgggatgtgggaagcccctccacgtgttcggaatgacatatttcaaggaagcgtccgggccaatctggcttgatgatgtgagctgtatagggaacgaaagcaatatctgggactgcgaacattccggttgggggaaacacaattgtgtgcaccgcgaggacgttattgtgacgtgttcgggcgacgcaacatggggcctgcggcttgtgggaggatcgaataggtgcagcggtaggctggaagtttattttcagggaaggtgggggaccgtgtgcgacgatggctggaacagtaaagctgccgctgtggtgtgctcccaacttgactgcccttcctctatcattggcatgggccttggcaatgcaagtacaggctatgggaagatctggttggatgacgtctcctgtgatggcgatgagtcagatttgtggtcatgtcgcaatagtggttggggaaacaatgactgttctcacagtgaggacgtgggcgtgatatgctctgatgcatctgatatggagctgagactggttggaggaagctcacggtgcgccggtaaagtcgaggtcaacgtgcaaggcgctgtgggaattctgtgtgcaaatggatgggggatgaatattgcggaggtcgtgtgccggcagttggagtgtgggtctgccattcgagtaagcagggagccacacttcaccgagcgcacactccacattctgatgtccaattcgggctgcactggcggcgaggcctctctttgggactgcatcagatgggagtggaagcaaacagcctgtcatcttaacatggaagcatctctcatctgttctgcacacagacagcctagactcgtgggggctgacatgccttgcagcgggcgcgtggaggtcaaacatgccgacacttggagatccgtatgtgattctgatttcagcttacacgccgcaaatgttctgtgcagagaacttaactgtggcgatgcaatctctctgtcagtcggagaccatttcgggaagggtaacggcctcacttgggctgagaagtttcagtgcgagggatcagagacccatctggccttgtgccccattgtgcagcatcctgaagatacttgtattcactcacgcgaagtgggggtggtctgttcgcgctacaccgacgtgaggctggttaacggcaagtcacagtgtgacgggcaggtagagatcaatgtcctggggcactggggatcactctgcgacactcactgggatcccgaggacgcccgcgtactctgtagacagctttcatgcggaactgcactttcgaccaccgggggtaagtacattggcgagcgtagcgttagggtctggggccaccggttccactgccttgggaacgaatcactgctcgacaactgtcagatgactgtgctgggtgcccccccatgcatccatggtaacaccgtgtccgtgatttgtactggaagtctcacccagcccttattcccctgcctcgcaaatgtcagcgatccttacctgtccgctgtgccagaggggtccgcactgatatgcctcgaggataaaaggctgcggctggtcgatggggatagtagatgcgccggacgagtcgagatctatcacgacggcttttggggcactatatgtgacgacggctgggatctgagcgacgcacatgtggtctgccaaaaacttggctgtggtgtcgcctttaatgccacagtttcggctcacttcggcgagggaagcggcccaatctggctggatgacctgaattgtaccggtatggaatctcacttatggcagtgcccttctcgggggtggggacaacacgattgcaggcacaaagaggatgccggggttatctgctcagaattcaccgcactgaggctatattctgaaaccgagaccgagagctgcgccggccggctggaggtgttttataatgggacttgggggtctgtgggccgaagaaatatcaccaccgccatagctgggatcgtatgccgtcagttaggatgtggggaaaacggggtggtgagcctcgcacccttaagtaagacaggatctgggttcatgtgggtggatgatatccagtgtcctaagacccatatttcaatatggcagtgtttaagcgcaccatgggagcggagaatcagtagccctgcagaagagacctggatcacatgcgaagatagaattagggtgcgtggaggggatacagagtgctccggaagagtcgagatatggcacgctggatcctggggaaccgtttgcgacgactcatgggatctggccgaggccgaagtggtgtgtcaacaactgggatgcggcagcgctctcgccgcgctgcgtgatgcgtcctttgggcaaggaacgggaacgatttggctggacgacatgcggtgcaagggtaacgagagttttctctgggactgtcacgccaagccttgggggcagtcagattgcggccataaggaggacgcgggggtcagatgcagtggccagtctttgaaatcactgaacgccagcagcggccatttagctctgatcctgagtagcatcttcggcttgttactgctcgtgctgttcattctgtttctgacatggtgccgtgttcagaaacagaagcacctgccacttagagtgagtactagacgccgggggagtctagaagagaatttgttccacgagatggaaacctgccttaagcgcgaagacccccacggaacgcgtacttccgacgacaccccaaaccatgggtgcgaggatgcatccgacacttcgctcctgggtgtgctgccagcgtccgaagccacaaaatag

SEQ ID NO: 12083 - RNA, 759 nt, synthetic construct
  misc_feature 1..759: note = source = /note="Description of Artificial Sequence: Synthetic coding sequence"
  source 1..759: mol_type = other RNA
atgctgcctccccctcgccccgccgctgcactcgctcttcccgttctgcttctgctgttagtggtcttgactccaccgcccacgggtgccagaccatcaccaggcccagattacttaaggcgaggttggatgcgcctcttagccgagggagaagggtgtgctccatgtcgtccagaggaatgcgccgctccgcgcggatgcctggctggccgggttagagatgcttgtggatgttgctgggagtgtgcgaacctcgaaggacagctttgtgatcttgacccgtcagcccacttctatggtcattgtggtgaacagctggagtgccgcctggatactggtggggacttgtctcggggggaagtgcccgagccactgtgtgcatgtagatcccagtcacccctgtgcggatccgatgggcatacctactcacagatttgccgactgcaagaagctgcaagagcacgtccagacgcaaatctgactgtcgctcatccaggcccttgtgaatcaggtcctcagattgtctctcacccttatgatacatggcggggacctcgtcttcagactctgggcactgaggacaccttgaccacactggtgggcgccggcggcatggctcgggctgtggcttgcggagaggcccctggcgaacatctggccctgcaggtcctgtgcctgtccggcaaacgcagacacctatggcaggtgggttccaccggctcctcggagggcgttccatctggcggaagtttctggtag

SEQ ID NO: 12084 - RNA, 1323 nt, synthetic construct
  misc_feature 1..1323: note = source = /note="Description of Artificial Sequence: Synthetic coding sequence"
  source 1..1323: mol_type = other RNA
atgaaactcgctcttctgctcccttgggcgtgctgttgcctctgtggatctgccctggcaaccggatttctctacccgttctccgcagccgccctccagcagcatggatatcctgaaccaggagccggttctccaggttcaggttatgctagccgccgccattggtgtcaccacacagtgaccaggaccgtgagctgccaagtccagaatggttccgagacagtggtccagagggtatatcaatcttgtcgatggcctggcccctgtgcaaatctggtcagctatcgcaccctcattcgaccaacctacagggtgtcgtaccgcaccgtgacggtgctcgagtggcgctgttgtcctggctttaccggctcaaattgcgatgaagagtgtatgaactgcacccgattgagtgatatgtcagaacggctgaccactttggaggcaaaggtgttactcctcgaagctgccgagagaccatccagccctgacaatgatctgcccgcaccagagtccactccgcccacatggaacgaagactttctaccagacgctatcccacttgcccaccccgtcccaagacagcggcggcccaccggccctgcgggtccgcccggccagacaggacctcccggccccgccggacctcccggatccaagggcgataggggacaaaccggggaaaaaggccccgcaggtccacccgggctgctgggcccaccaggcccccgaggattacctggcgaaatgggacgtccaggcccccccggtccgcctggccctgctggaaatccaggcccctccccaaacagcccgcaaggtgctctctacagcctccagcccccaaccgacaaagacaatggcgattcccgattggcctccgccatcgtggatactgtcctggcaggcgtgccaggcccccgtggaccacctggcccgcctggtcctcccggcccaagaggtcctcctggcccccccgggactccagggtcccagggactggctggagagagaggaacagtcgggcccagcggagagccaggcgtgaagggcgaggagggagaaaaggctgcaacagccgagggcgaaggcgtgcaacagctgcgcgaggcgctcaaaattctcgcggaacgcgtgctaatcctggagcacatgattggcatccacgatcctctggcctcacccgaagggagcggacaagatgccgcactgcgcgctaatctcaagatgaaacggggaggcgcacaacccgatggagtgctggccgcgttactcggccctgatcccgggcaaaaaagtgtggaccaggcatcatcccggaagtag

SEQ ID NO: 12085 - RNA, 1341 nt, synthetic construct
  misc_feature 1..1341: note = source = /note="Description of Artificial Sequence: Synthetic coding sequence"
  source 1..1341: mol_type = other RNA
atgctccaccccgagacctctccaggacgagggcacttactcgccgtactgttggctttacttggcactgcatgggcggaggtgtggccaccccagttacaggagcaggccccaatggccggggctctcaaccggaaagaaagcttcttactgcttagccttcacaacagactccgcagttgggtgcagccccccgctgctgatatgagacgtctggattggagcgacagcctcgctcagctagcacaggcaagagccgccttatgcggcatcccaaccccaagcctggcatctggcctatggagaactctccaggttgggtggaatatgcagctgctgcctgccggactcgcatcattcgtggaagtggtttcgctctggttcgccgaaggccaacgctatagccatgcggcaggcgagtgtgctagaaatgccacctgtactcactatacacagcttgtgtgggccacttcatcacagttaggttgtggtagacatctatgttccgctggccaagctgccattgaggcttttgtctgcgcgtatagccctagaggtaattgggaggtcaacgggaaaacgatcgtgccatataaaaaaggtgcttggtgttctctctgtacagccagtgtatcaggctgcttcaaggcctgggaccacgcgggtggcctatgcgaggtaccacggaatccttgcagaatgtcctgccagaatcacggacgcctgaacatcagtacttgccactgtcattgtccgccaggttatacgggaagatactgccaggtgagatgttccctccaatgcgtccacggccgctttcgggaggaggagtgctcatgcgtgtgtgatatcggctacggcggtgcccagtgtgctacaaaagtacactttccttttcatacctgtgacctgcgcattgatggagactgttttatggtgagctcggaggcagacacatactatagagctagaatgaaatgccagagaaaaggcggcgtactggcacagattaagtcccagaaggtacaggatattctcgccttttatctaggtcgcctcgagacgacaaatgaagtcatcgacagtgacttcgaaaccaggaatttttggattggtctgacctacaagactgcgaaggattcattccgttgggccacaggcgagcaccaagctttcaccagtttcgcgttcggccagccggacaaccacggtttcggcaactgcgttgaactccaggcctccgccgcctttaactggaataatcaacgctgcaagacgagaaaccgttacatctgccagtttgcgcaagagcatattagtcgctggggccccggctcctag

SEQ ID NO: 12086 - RNA, 219 nt, synthetic construct
  misc_feature 1..219: note = source = /note="Description of Artificial Sequence: Synthetic coding sequence"
  source 1..219: mol_type = other RNA
atgcagagacttgtgctactgctcgcaatttctctgctcctctatcaagacctcccggtaagaagcgaatttgaattagataggatctgcggctatggcacagcacgttgtagaaagaagtgtcgcagtcaggagtacagaattggtcgatgtcctaatacctacgcgtgctgcctgcgcaagtgggacgaatccctcctgaatagaaccaaaccatag

SEQ ID NO: 12087 - RNA, 2349 nt, synthetic construct
  misc_feature 1..2349: note = source = /note="Description of Artificial Sequence: Synthetic coding sequence"
  source 1..2349: mol_type = other RNA
ttatggctcctgttgtgggctgccgcctggaggctcggcgcctccgcctgtcctgctctttgcacatgtactggaaccactgtcgactgccacggaacaggactccaggctataccaaaaaatatccctcgtaacacggagcgacttgagctaaatggaaacaatatcaccagaatacacaaaaatgacttcgccggattaaaacagctccgggtccttcaactcatggaaaatcaaataggcgccgtggagagaggagctttcgatgatatgaaggagctcgagcggctgcgtctgaaccgcaaccagcttcacatgttgcccgaactgctgttccaaaataaccaagcactttcccgtctcgacctttccgagaatgccatccaggctattccaagaaaggcattcagaggtgctactgaccttaaaaatcttcagctggataaaaaccagatcagttgtattgaggaaggtgcttttcgggcccttcgcggattggaggtgcttacgttaaacaacaataacattaccacaattcctgtctccagcttcaatcacatgcccaaattgcgaaccttccggctgcactctaaccacctgttttgcgattgccatctggcctggctgagccagtggctgcgacaacgccctacgatcgggctgttcactcagtgttcaggacccgcatcattacgggggttaaatgtggccgaagtccagaagagtgagttctcatgtagcggacagggagaagctggaagagtaccgacgtgcaccctgtcttcaggctcatgtcctgcaatgtgcacatgtagtaacggtatcgtggactgtagaggtaaaggtcttacagcaatccccgctaatctacctgagacaatgactgagattagactggaacttaacgggatcaagtcaatcccgccgggggcattttcaccgtaccgtaaattgcggcggatttgtcccctaagcttctgtagcccttgtcgtgatctgtctaacaatcaaatcgccgaaatcgctccggacgcgtttcaaggtctccggtctctgaacagtctcgtgctgtatggaaataaaataaccgatcttccgcgaggtgtcttcggcggactgtacactctgcagctgctactgctcaacgccaataaaatcaactgcatccggcctgacgctttccaggacctgcaaaacctgtctctgctgtctctgtatgacaataaaattcagtccctggcaaagggcaccttcacctccctgagagcgattcagactctgcatttagcccagaatcccttcatctgcgactgcaatctcaaatggcttgccgatttcctccgaactaatcccattgaaacttccggagcacggtgtgcgagccctagacgactggccaataaaaggatcggccagattaagtctaaaaagttccggtgttctgctaaagaacagtactttattcccggtacagaagattatcagttgaatagtgagtgtaacagcgacgtagtgtgcccgcacaagtgtaggtgcgaagcaaacgttgtagagtgcagttccctaaagctgaccaagattcccgagcgcatccctcagtccaccgcagaacttcggctgaacaacaatgagatctcaattttggaggcaaccggcatgtttaaaaaactgacacacctcaagaaaatcaatctctccaataacaaagtgtcagaaatcgaggacggagcctttgaaggcgccgcttcagtgtctgaactgcacttgaccgctaaccaactagagtcaataaggtctggcatgttccgtggactcgatggcctgcgaaccctgatgcttcgcaacaaccgaataagctgcatccacaacgattctttcactggattacgcaatgttcggttgttatctctctatgataatcagatcacgaccgtgtccccaggtgcttttgacacactgcagagtctgtccactttgaacctcttggccaatcccttcaactgcaactgccagctggcctggctcggaggctggttacgaaagcgaaagattgtgactgggaaccctagatgccagaatcccgatttccttcgccaaatccccttgcaggatgtcgcatttccagattttcgttgcgaagaaggccaagaggagggaggctgcttgccccgcccacaatgtcctcaagaatgtgcttgtctagatactgttgtgcgatgtagtaacaaacatctgcgtgccttgcccaagggaattcctaagaacgtgaccgagctttacttagatggtaaccagttcactctcgtgcctgggcagctgagtacctttaaatatctgcagctggtatag

SEQ ID NO: 12088 - RNA, 411 nt, synthetic construct
  misc_feature 1..411: note = source = /note="Description of Artificial Sequence: Synthetic coding sequence"
  source 1..411: mol_type = other RNA
atgtccaacgtcccacataagtccagcttaccagaaggcattaggcctggaacggtacttcgcatcagagggttggtgcctcctaatgccagtcgtttccatgtgaatctgctgtgtggagaggaacagggatcagacgcagcgctgcacttcaatccacgtctggatacctctgaggttgtgtttaatagtaaggaacagggatcatggggacgcgaggagaggggccctggtgttccattccagcgcgggcagccgttcgaggtcctcatcattgcatctgacgacggatttaaagctgtagtcggagatgcccaataccaccacttcaggcacagattacctctcgcaagagtgaggctggtggaagtcggcggagacgtccagctcgatagcgtacgaatcttctag

SEQ ID NO: 12089 - RNA, 1926 nt, synthetic construct
  misc_feature 1..1926: note = source = /note="Description of Artificial Sequence: Synthetic coding sequence"
  source 1..1926: mol_type = other RNA
atgcccccgccactgccactcctgctcctgacggtgctcgtggtcgctgctgcccgtcccgggtgtgagttcgagcgaaatcccgctgcaacgtgtgttgacttacagctgagaacctgcagcgatgctgcttacaatcacacaacatttcctaatctcctgcaacaccgctcatgggaggtggttgaggcctcctctgagtacattttgctttctgtccttcatcaactattagaaggccaatgcaacccagacctcaggttgctgggttgcgccgttcttgcccccaggtgcgaagggggttgggtacggcgaccatgcagacacatctgtgagggcctacgcgaagtgtgtcagcctgcttttgacgctatcgacatggcctggccttactttttggattgccaccggtacttcacgagagaggatgaaggatgctacgatcccctggagaagctgcgcggaggactggaggctgatgaagccctgccgtctggcctgcctcctacttttattcggtttagccatcactcctatgctcagatggtgagagttctccgcaggaccgccagccgctgtgctcatgtggcgcgcacgtacagcatcgggaggagcttcgacggacgcgagctgcttgtcatagaatttagctcaaggcctggacaacacgaacttatggaacccgaggttaagctaataggaaatatccatggaaatgaggtagcaggcagggaaatgctgatctacttggcacagtacctctgttccgaatacttgttgggtaatccgcgtattcagaggttacttaacaccactcgcatccacctgcttccctccatgaatcccgatggctatgaggtcgccgcggctgagggagcaggctataacggatggacttctggcagacaaaatgctcaaaacttagatcttaacagaaattttcctgacctgacaagcgaatactaccggctggccgagaccagaggcgccagatctgaccacattccgattcctcagcactactggtggggaaaagtggcccctgaaaccaaagccatcatgaaatggatgcaaaccataccgtttgtcttatccgcctcactgcacggaggtgatctcgttgtgtcttatccatttgatttttcgaagcaccctcaggaagagaaaatgtttagtcctactcctgatgaaaagatgttcaaattactctcaagggcttatgcagacgtccaccccatgatgatggatcggtctgagaacagatgcggaggtaatttcctgaagcgcggctctattatcaatggcgcagactggtattctttcactggcggtatgtcagacttcaactatctacataccaactgcttcgagataaccgttgagcttgggtgtgtcaagtttccgccggaagaggcgctgtatatcctttggcagcacaacaaagaatccctcctgaacttcgttgaaacggtacaccgtgggataaaaggcgtcgtgactgacaagtttgggaaacccgtcaagaatgctcgtatatcggtgaaaggaattcggcacgatatcaccactgctccagatggcgattattggagacttctgccccccgggattcacatcgtaatagcacaagcacctggatacgcaaaagtgatcaagaaggtgataatccccgcgcgtatgaagagagcaggacgggtggatttcattctgcagcccctgggtatggggccgaaaaactttatacacggcctccgtaggactggcccacatgaccctctgggaggcgcaagctcgcttggcgaggcaaccgagccagaccctctgagggctaggcggcaaccaagcgccgacggcagcaagccctggtggtggagctattttacttcgctcagtacgcatcgacccagatggcttctcaaatattag

SEQ ID NO: 12090 - RNA, 1305 nt, synthetic construct
  misc_feature 1..1305: note = source = /note="Description of Artificial Sequence: Synthetic coding sequence"
  source 1..1305: mol_type = other RNA
atggcaagcctaggcctgttactcctactgttgttaactgcactcccacctctgtggagttcaagcctccccggactggacacagcagagtctaaggcgacaattgctgatcttatcctatccgccttggagagagctactgtttttttggagcaaaggctccccgaaatcaacttagacggcatggttggagtcagagtcctggaagaacagttgaagagcgtgcgcgaaaaatgggctcaggaacccctcctgcagccgttgtcactcagggtcgggatgctgggggaaaaactggaagctgccatccaaagatccctccattacctgaaactgtctgatccaaagtatctgagagagttccagttaaccctgcagcccggcttctggaagctcccccacgcatggattcacactgacgcctcgctcgtatacccgacttttgggccacaggattctttctcagaagagcgaagcgatgtttgcctggtgcagctgttgggaaccggtaccgattcttctgaaccatgtggactaagcgatctctgccggagcctgatgaccaagcctgggtgttctggttattgcctgagtcatcagcttctttttttcctttgggcccgaatgcggggttgcacccaaggtcctttgcagcaatcccaggattacattaatcttttctgtgccaatatgatggatcttaaccgtagagcggaagcgatcggttacgcttaccccacgagggacattttcatggagaacaatgttactggccatcccgtattctatctcccactgtgtgatagtttcttgcccccgaaagctgcccccgttacagaattgtacacagacggccctgtgatgttttgtggaatgggtggattctccgacttctataaactccggtggttggaggctatcctctcttggcaaaagcagcaggagggatgtttcggcgaaccagatgcggaggacgaagaactttcaaaggcaatccagtatcagcagcatttcagtcgaagagtcaaacggcgagagaagcagttccctgattctaggagcgtggcacaggccggcgttcagtggcgaaatctcggctcattgcaacctctccctcccgggtttaagcagttttcgtgcctgatcctcccatcctcttgggattacaggagtgtgccgccatatctcgcgaacttttacatctttcttgtcgaaactgggtttcaccacgtggcccatgcgggactggaattactgatatctcgagacccccccacctcaggaagccaatctgtgggcctttag

SEQ ID NO: 12091 - RNA, 555 nt, synthetic construct
  misc_feature 1..555: note = source = /note="Description of Artificial Sequence: Synthetic coding sequence"
  source 1..555: mol_type = other RNA
atgatgtcattccttctcggagcaattctgaccctactgtgggcacctaccgcacaagccgaggtactcttacagcccgacttcaatgccgagaagttcagcgggctttggtatgttgtctccatggcaagcgattgtcgcgtgtttctcggtaaaaaagaccacctatcgatgtccacccgggctattcgaccaacagaggaagggggccttcacgtccacatggaatttcccggtgccgatggttgtaatcaggttgacgccgagtatctcaaggtcgggtccgagggacactttcgggttcccgcgcttggatacctagacgtacgcatcgtagacaccgattattcctcctttgcagtcctgtatatctataaagagctcgaaggggctctgtctacaatggtacaactttattctaggacgcaggacgtgtctccccaggccctgaagagtttccaagacttttatccaaccctaggattacctaaagacatgatggttatgcttcctcagagcgacgcatgcaatccggagtccaaggaggccccgtag

SEQ ID NO: 12092 - RNA, 219 nt, synthetic construct
  misc_feature 1..219: note = source = /note="Description of Artificial Sequence: Synthetic coding sequence"
  source 1..219: mol_type = other RNA
atgcagcgcctggtcctgttacttgctatctcactactactttaccaagatctgcccgtacgaagcgagttcgagcttgaccgcatatgtggctatggaacagctcgctgcaggaaaaagtgtcggtcacaggagtataggatcgggagatgtcctaacacgtatgcttgttgtctccgcaaatgggatgagtctctgctgaatcgtacaaaaccatag

SEQ ID NO: 12093 - RNA, 2247 nt, synthetic construct
  misc_feature 1..2247: note = source = /note="Description of Artificial Sequence: Synthetic coding sequence"
  source 1..2247: mol_type = other RNA
atgggacgggctggcgctgcagccgtcatacctggcctggctctcctatgggcggtggggctggggtcggccgcccctcctccgaggttgcgcctgtcttttcaagaactgcaagcctggcacgggctacagacattctctttggagcgtacttgctgttaccaggccctgcttgtggatgaggagagggggcgcttatttgtgggcgctgaaaaccacgtcgccagtctgaacctggacaatattagcaagcgagccaaaaagctggcatggccagcaccggtcgaatggcgcgaagagtgcaactgggcgggcaaagacattggaactgagtgcatgaacttcgtcaagttgctccacgcctacaacagaacacacctgcttgcgtgcggaacgggtgcttttcaccccacctgcgcctttgtcgaggtgggacacagagccgaagaacccgtgctgaggttggatccaggaaggatcgaggacgggaaaggaaaatccccatacgaccccagacacagagccgcgagtgttctagtgggtgaagagctgtattcgggtgtagctgccgatttaatgggcagggacttcacaatcttcaggtcactagggcaacggccttctttgcgaactgagcctcatgatagtaggtggctcaacgagcctaagttcgttaaagtgttctggattcctgagtctgagaatccagatgacgacaagatctatttttttttcagagagactgcagtggaagctgctccagcgctgggcaggctgtctgttagtcgtgtcggccaaatttgcagaaatgatgtaggtggacaaaggtccctggtgaacaagtggacaacattcctcaaagcacggctcgtgtgttcagtacccggtgtggaaggagacacgcattttgatcagcttcaggacgttttcttgctgtccagcagggaccaccgcacacccctcttatacgcagttttttcgacctcttcctcgattttccaagggtcagccgtctgcgtgtactctatgaatgacgtgcgccgagcctttctggggccttttgctcataaagaaggtcccatgcaccagtgggtctcctaccagggaagggtgccatatccacgccctgggatgtgcccttctaagaccttcggcacattctcatccaccaaggacttcccagatgacgttattcaatttgctagaaatcaccctctcatgtacaatagcgttttgcctaccggcgggcggcctctctttttgcaggtgggcgcaaattatacttttacgcaaatcgcagcagatcgtgtagcagctgccgacggtcattatgacgtgctgtttatcggaactgatgtcggcaccgttttgaaggtgattagcgtccctaaaggcagtcggccatctgccgagggactcctgttagaagaattgcacgttttcgaagattccgcagctgtgacctctatgcaaatttcttctaaaagacatcagctgtacgtcgcaagtaggtcagctgtagctcagatcgccctgcatcgctgcgcagctcacggacgggtgtgcacggagtgctgtcttgcacgagacccctactgtgcttgggacggcgtggcatgcaccagatttcagccctctgccaagaggcgcttcagaagacaggacgttcggaatggcgatccatcgactctttgctctggcgacagttcacgccccgccctgttagaacacaaggtgttcggcgttgagggatcgtcagctttcttggaatgcgaacccagatctctgcaggcaagagttgaatggaccttccagcgggcgggtgtcaccgcacatactcaggtgttggccgaggaaaggacagagagaacagcccggggcctgctgttgcgaaggctgcgacgaagagattccggagtatacttgtgtgccgctgtggagcaaggattcacccaacccctgcggcgattaagccttcacgtgctctcagccactcaagccgaacgtctcgcccgagccgaagaagccgcccctgccgcgcccccgggtccaaagctgtggtaccgagatttcctccagttagtggagcccgggggcggggggtcagccaatagcttacgcatgtgccgtcctcaaccagccttgcagagccttccactagagagccgacgcaagggccgcaatagaagaacccacgccccagaaccaagggcagagagagggcctcgctccgcaacccactggtag

SEQ ID NO: 12094 - RNA, 369 nt, synthetic construct
  misc_feature 1..369: note = source = /note="Description of Artificial Sequence: Synthetic coding sequence"
  source 1..369: mol_type = other RNA
atggttctgctgtgcctgtttctggcctctctggccgccacacctcgcgctggagtgacaggggcctggcccacctccggactgtccatccttgcacaactccagccttcatgcgagctacggtggactcagctgtccagatcatcctggcgagacctcgtgatgacaaccagtctttggtctctggcctactttcaacacttctctcaggaaaccacaacgcaagaacaacttgatgagatggaagaaatacctagagagagccaatgtggaagacaagatttccatgccctttcatgtcctacagcttcccctagagaccgggtattgttatgctgtcccggctggagagctatggttccttcttag

SEQ ID NO: 12095 - RNA, 570 nt, synthetic construct
  misc_feature 1..570: note = source = /note="Description of Artificial Sequence: Synthetic coding sequence"
  source 1..570: mol_type = other RNA
atgttattggggcaactgagtacattgctgtgtttattgtcaggtgccctgcccacaggtagtgggcgaccagagccacagtcaccccggccacaatcttgggccgccgccaaccaaacttgggctctgggtcccggcgccttaccacccctcgtacccgcctccgccctaggatcatggaaagcttttttgggcctacagaaagcacgacagctgggtatgggcagacttcagagagggcaggatgaagtagccgctgttactttgcctctcaacccccaggaggtgatccagggcatgtgcaaggccgtcccatttgtgcaagtgttttctcggcccgggtgcagcgctatacgacttaggaaccatctctgttttgggcactgttcctccctctatatcccaggatcagatccgactccactcgtcctatgtaactcttgcatgccagctcgaaaacgctgggcacctgttgtgctctggtgccttacaggctcctcagcttcccgaagacgagtcaagatctctaccatgctgattgagggatgccactgctcccccaaggcatag

SEQ ID NO: 12096 - RNA, 2505 nt, synthetic construct
  misc_feature 1..2505: note = source = /note="Description of Artificial Sequence: Synthetic coding sequence"
  source 1..2505: mol_type = other RNA
atgaagcacaccctagcattgctggcccccctccttggcctcgggctgggtctcgccctgtctcagctggctgctggagctactgattgcaaattccttggtcctgcggagcacctgacattcacccctgcagccagggctcgctggctggcccctcgcgttcgtgctcctggacttctggacagcctatacgggacggtgagaagatttctgagcgtggtgcagttaaaccccttcccttctgagctcgtgaaagccctgctcaacgagctagcatcagtcaaggtcaacgaagttgttaggtatgaagctgggtatgtggtctgcgccgttattgcagggctatacctgcttttggtgcctacggctggactgtgtttctgctgttgtaggtgtcacagacgctgtggcggacgcgtcaagactgaacacaaggccttagcctgcgagagggccgcgcttatggtctttctcctcctgaccaccctccttcttctcattggcgtcgtgtgcgctttcgttaccaaccagcgcacgcatgagcagatgggccccagcatagaggcgatgccagagaccctcctttcgctgtggggactggtgtctgacgtgccccaggaattgcaggctgtcgctcagcagttcagcctcccccaggaacaggtctccgaggaactggatggtgttggcgtttcaatcgggagtgctatccatacacaactgcgatccagtgtctatccgctgctggccgcagtgggctcgctgggccaggttcttcaggtatcagtgcaccacttgcaaactttgaacgcaacagtcgtggagctccaggctgggcagcaagaccttgagcctgcaattagggaacaccgggatcgactgctggaacttctgcaggaagcaaggtgtcagggtgactgcgccggcgctttgagttgggcaagaacccttgagttgggggccgacttttctcaggtacccagcgttgatcacgtgctacatcagcttaagggcgtccccgaagccaatttctcctcaatggtgcaggaggaaaattccacattcaacgccctccctgcccttgctgctatgcagacaagttccgtggtacaggaattgaaaaaggccgtagctcagcagccagagggggtgagaacactggccgagggatttcccgggcttgaggctgcaagcagatgggcgcaggctttgcaagaagtcgaggagtcgtctcggccatatcttcaagaggtgcagcgctacgaaacttatcgatggatcgttggatgtgtactctgctcggtggtactgttcgtggttctttgcaatctgttagggcttaacctgggaatttggggcctgtcagcccgcgatgacccttcccatccggaagccaaaggcgaggctggagccaggttccttatggctggagttggacttagtttcttattcgcagccccactgatactcctagttttcgccacctttttagtggggggaaacgttcaaacactcgtgtgtcagtcctgggagaatggcgaactgtttgaattcgccgataccccggggaacctgcccccctcgatgaacctttcccagctgcttggactgcgtaagaacatctctatccaccaagcttatcagcaatgcaaggagggtgctgctctgtggactgtgttgcaacttaatgatagctatgacttggaggaacaccttgatatcaaccagtacacaaacaagcttaggcaggaactacagagccttaaggtagacacgcagagcctggacctactttcctcagctgctcgtcgcgatctggaggctttgcagtcaagtggactacaacggattcactacccagactttcttgtacagattcaacgccccgtggtgaaaacctctatggagcagctcgcacaagagttacagggccttgctcaggcccaggacaatagcgtgctcgggcagcgtctgcaagaggaggcccaaggactgcggaatcttcatcaggaaaaagttgtaccacagcagtctctggtcgcaaagcttaacctctctgtgcgtgccctcgagtcctccgcccccaatctgcaattagaaacaagcgacgtcctagccaatgtaacctatcttaagggagagctccccgcatgggctgctaggatcttacgcaacgtaagtgagtgcttcctggctcgagagatggggtattttagccagtatgtggcctgggtccgcgaggaagtgacacagcgtattgcgacttgtcaacctctgtccggcgctttagataactctagagtcattctctgcgatatgatggccgacccatggaacgcattttggttttgcctcgcttggtgtaccttctttctcattcccagcatcattttcgcggtcaaaactagcaaatattttagacccatccggaagcgactatcctcaacatcctccgaagagacgcagctgtttcatatccctcgtgtgaccagtctgaaactatag
